United States Patent Application Publication US 2017/0114356 A1 - sequence listing, part 25

SEQ ID NO: 32782 - DNA, 6467 bp, Zea Mays
tgcccctgcccctgcccctgcaaccccgctccaccgcgcccgatctctatcgtcgacaccaccgcctccggcgaggccttttccgctcttgaggtttccacaggaaacagcgtgtctcttttctggacttgggaatctgagaggatactgtgcagtttaatggcacacactgctgactatatgcacatataatgatgcatgggcaaaccatgcttctctggtctagtggctattgagctgtgctctatgggaggtattgctgaatgtggtgtgagcattgacactaaagcttcaccacgtcgagcagccatagagaaagctcaggacgagctcaggcaggaatatgatgttcgtgaagaacgaaggagagagcttgaatttctggagaaggtttgcgttgtcatccttatggtttgcacactgaatttgcgtcagaacttttttccttgtttgtttacttattgttgcagggaggcaatcccttggatttcaaacttggccatgtagcttcccttagtgtacagtccacttctgtgacagaacagatagctgaacaaaatgtgataagtgaggccaaaggtagttctgcatttgctacatcacctcatggggattctgttgaaagtaacgacaagccaggaaattcattgtgccgtgaaggcaatacagccgataatattacgcttttggatggagatgccagcagcatgggtgtggataaaattgtgaaacgtggaacaaagagaactaattcagctcaagctgagcagttcctgcactgtgatggtcagaacaatgcaaaagaagaagattctgggttgtaccgtcttggtccaaagagccaagcgtatgcacgacgtaggtcaaagcctatcagagagaatgcatatagtgtatctgttaggtatccaccaattcctccattaagttctcagcaaaaagatgtgacaggattaatcccagaaaccaagactgaggataatggtgtttcatccattggtgattcaaaaccgactagtcctaactctaaaaatttggtgacaaatgcatcattactgaatgataaggtggaaatggagacagaaaatgttcaagcaattcctgaaggcaatcaagcaccgaaaaatgagttatcaaacagcaacaatggtagtcctgctattgagatttcaccaaacagtgtgccggataattctcgtcttactgtaagtgatcagatggttactgcatttgtttctgtggaatccccagatgctatttcaaaagtagctgcttcaaggatagtttgttctctcccatatatatccaatgaaatattgaaagaagcacaaactcttgagaaggcaggtaataacccatctatggtaagtgtggttgacgttcatgcatatggtatggataacaatggtgcagcaccttactctgctgtgaaaagtgctagtttgaatgaaaatgaagttgatccaattcatgaatatgctgccaaagctgttactgaacatccagaccaaaatgagaatcttgtaccagtgaatgcagatgaaatggctgatgaaggcttgaataagatcctacctgatgacaaggatgacaagaaagattgtcaactggaagttagtagtgggcctgtcattttgaatgacagttctactcctgtctatcctgaatttagcaattccttttatgcaagagatggaacagaagtttctaacaatgcagtagattcaaaaaataacgcagaacagcttgcttcttctaatcagggaaaagggaacatggaggaatgcaaagattctgacggaaacaatgcaagtgaattgagtgttgcccaaaagctagtgtctgttattgtgccccctgcttcagacgcaggcgatgtgagtaattttgtagaaaatgatgttgataaatctagcagagatcaggagaaggtagcaaagaaggaatatgaagattctgtcgtggcaaagaaggatcacgaagatgctatcctcagaagggcacggtatatagaggcaaatattaagagggctggtgaatggtctctctgcaatatttctttagagaagaagcagaagagccactgggattttgttctggaggagatggtctggatggcaaatgacttcacacaggagcgtttgtggaaaaatacagttgcagcacagatgtcccattggatttcttctagaggtcgagcggtatttgaagaagcaagcattcagagaaagcagaaatctgttgctagagttctagccaatggtattatgaacttttggtgttcagtccatactttacgagctagtggtggtattcctaaaccaataaaaatcgagcaaccgaatgagctagaggaaaataagcttggtgggttcaaatccggaaaagcggatgaggagtgtttggagcaagaaaagtcgcgccagtctcctattcagagctttgcacttaggtttcttgagtataacattaatgcatctgaatttctgccattagccgaagcaccatcaactcctgacaggctaaatgattttggcattttgaaagcaaatctcttttatggcgtagcacccggtgcaatgcaggcatacagggagtctatggaccgtctccttatttataataacaagaaaattggtgacactgtactcaaggatgattatgagccatcaacatatgcatctgtcacagatgtccctatggagaatgcatatggagatgacgaaagtgaggcacacacctacttattgcctggagcttataatggtggtttggcatcaaaaaatagtcacaaaaagaagcaccatttgcctcagaggatgaatggcgcaaggtcatatgaaattggtgttgacagtccttacgaaccactgtatttggaaagtaaatcaggaaaccagcaactcttatcgaatggcaaacaaacagacttcctctccattcctataaaacgcatccgcacagcagctaggcagcgggttgtgagtccatttcctgctggtgcttctgggacccctcaattcacaaataaaacggacgcatctagtggagatacaaactcctgtcaagatgatcaaagttcattacatggagggtcattttctaggaagaatgcagatatagagtccactgttgattttgacaggcaattgttgtatgatggtagtgaggtgtcgacaaaatctaaaaagaagaaaaagactaagcacccagggtacaaggcactaccaaatgtgtccgaatcttgttcgttgagggctcctggaaagggcaattatgatcatagatctcagatcgatatgatagctcagtatgagcagaaggattatattaaaaagagacaggagacaaatgggaattttgtggttaatggcctacatgctgctaagaagcctaaattgttgaatcaagcaccagatatttcactggaagctcttaaaccaattggtccaatggcctctcttgctgcatcacaaatgagcaacatggcaaatcctacgagggttataaaaatcagcacccgtggaagaaaaagtaaaggactcaagatgcgagctggtcattcaggtcctggaagtccatggtcaagttttgaggatcaggctcttgttgtccttgtccatgatatgggtgaaaactgggaattggttagtgatgcccttaacagcatcatccaattgaagtgcatatacagaaggcctaatgagtgtaaggaacgccataaacttctcaccgatagaagttgtggcgacggtgctgacagcgctgatgactcaggctcatctcaacactatccttctgcattgcctgggattccaaagggtagtgcaaggcaactgtttcagcgccttcaaggaccgtttgaggaagggactctcaagacacacttcgagaaaataatattgcttggtcaaaaattgcatcaaactcgtagaaaggatgagatccatgagctgaggcaaaaaaatccacttcatacttctcatggttttgcactttctcaagcatgtccagggaacttatctggtgtcattttgacgccacttgacctttgcgatggaccttcgaactcggatgcacttacaggatccaatacaagtgggttaggtctttcaaacaataactgctctgttggtcctactcttcctacatcaaatatgaacttaagattaccaggttctcctggtatggttttgggaagcaattcaccattgcctttgaatgctccctctagggatgttcagaggtatggtgtgcctagaccaacctcgatacagggtgacgagcaatcaagaattcattataaccagatggtaaatggcagaaaccttcagcaacctggagttcctgttcctggtgtgttgccatctggtgttgatcggggtgcccgaatgatgccacctgcccatggtgttggaatcatggctggactaaatcgaggtacacctattactaggccaggttttccaaggcttggttctcttggaaacatgtcacccaccgatggtcaaggcttaaaaaatactgtaaacgttcatcctggtgccatactgggacctggaagtactatgttgaggccacgtgacccaatgcagatgtttagacctggccagaattcagaggagcatagacagatgatgatgccagagtttcagttacaagtctcgcaaggaaataatcatgctgtgcatttcagcggtccaccatattccaacactggggcatcttcacctgttcaatctttacctgcccagcagtcccaaccacatcagatgccacaacaatcacacatgtatggaaacacacaccttcttcatacccaaggaacaaaccagtcaaatccacagcaacagcaggcttatgctatgcgcttggccaaagagaggcatatgcaacagatgatgccccaacaacagcgtccattatctgttgccagtgcagtgtcagctgtacagaatggctcaccgatgcaacagcagagccaaggatctgcaacttgcgtaatcccagctacacagacacaacataagcagcaatatcctgcacaaaatgcacaagataactcaatgcttccccatcagccttcagccaccactacacataaacagaagaagcaacagggccagcagcagcctagacaaaatcaacagcaacgaaatcaaggcagtcaacaagctaagcttatgaagagtttaggccgagggaacatgatgcagcagagtcctgtggatgttattcaagcaagtggcatatcaacaagctgtaaagatcaagttcctgataagaatatgatgcaacagggtccagggcattttgttgtaagtaaaggatcaatcccattgatacctcaacctgggaatcaaccaaatgtatacacttctcagatgcctccgtctccaatgcagacaccggatattagtaatcagggtgcagtcaagggttcttccaaccatgccttgttaacttcccagcaaggttcactccatacgccttcacagttggcacagcagcagcagcagcaactacggttcatgaatccgtcacagaataatatgcaaaggttgataatgcaacagaatcggcatgtgaacacagatggcaggattgagttacctgctgaccaagtacagcataaccaggtaatgtcatctgcctcacttgcaagaagtacagattcaggcagcccaggaatctcatctataagccagcggaaacaagagtcatctcatgacccaagtgcaattacctcaacctcgcagctagctagctcacctcaagacacctttgttggaagtgatagggtgttgccatcatccagccaaagcatgccgcaaaggcaaatgtccggtggtgtgcctgtacatggatatggcattggtggccaggtgcagctacaacagtctcggcagcaactccagtctcagcagcagcagcagcagcagcagaggcctgttgtccaaggtggtgtatatgctcacccctcaaattcaggacaaggatgatgctgaaccatactgggcctgcatttctgaagagcctcccttccccttgtaaagttacctgtacaggcgtccgtgctgtggaagatgtgtgcggatgatagtgctctttattcccaactttgagctaactgtagcctcctcggtgtcaggtagataattatttctcctcaccattttggtgccacactgctaccttccatgtagtttgaccctaggttgctggaggtggttcttgtgagggcaaactccttgagtcgtcaaattgtaaccacgacactgggcccagttgtatatttttgccgttgaggtccatgttagaggcaatctcttttgtataagcctgtatattcagctcacaagccagtcaatgaatgcaaagcctttctttgcgtcaaaccaggaatgtaaaaagcttgagcgttttgcgtcgatcacttatcttaacttgtcgtattcaactccgtc

SEQ ID NO: 32783 - DNA, 6572 bp, Zea Mays
cctgcccctgcccctgcaaccccgctccaccgcgcccgatctctatcgtcgacaccaccgcctccggcgaggccttttccgctcttgaggtttccacaggtgcctctcagccctccgcacactgcctcgtgggtttccccgagctcccctgccccaaaccctaaccctagctcctggcgtggggccgtgcaggttcattccctgctcaatcgggcgccccatttggcaccctctgcccccccacagacccgtagggttgcatttcaggaaacagcgtgtctcttttctggacttgggaatctgagaggatactgtgcagtttaatggcacacactgctgactatatgcacatataatgatgcatgggcaaaccatgcttctctggtctagtggctattgagctgtgctctatgggaggtattgctgaatgtggtgtgagcattgacactaaagcttcaccacgtcgagcagccatagagaaagctcaggacgagctcaggcaggaatatgatgttcgtgaagaacgaaggagagagcttgaatttctggagaagggaggcaatcccttggatttcaaacttggccatgtagcttcccttagtgtacagtccacttctgtgacagaacagatagctgaacaaaatgtgataagtgaggccaaaggtagttctgcatttgctacatcacctcatggggattctgttgaaagtaacgacaagccaggaaattcattgtgccgtgaaggcaatacagccgataatattacgcttttggatggagatgccagcagcatgggtgtggataaaattgtgaaacgtggaacaaagagaactaattcagctcaagctgagcagttcctgcactgtgatggtcagaacaatgcaaaagaagaagattctgggttgtaccgtcttggtccaaagagccaagcgtatgcacgacgtaggtcaaagcctatcagagagaatgcatatagtgtatctgttaggtatccaccaattcctccattaagttctcagcaaaaagatgtgacaggattaatcccagaaaccaagactgaggataatggtgtttcatccattggtgattcaaaaccgactagtcctaactctaaaaatttggtgacaaatgcatcattactgaatgataaggtggaaatggagacagaaaatgttcaagcaattcctgaaggcaatcaagcaccgaaaaatgagttatcaaacagcaacaatggtagtcctgctattgagatttcaccaaacagtgtgccggataattctcgtcttactgtaagtgatcagatggttactgcatttgtttctgtggaatccccagatgctatttcaaaagtagctgcttcaaggatagtttgttctctcccatatatatccaatgaaatattgaaagaagcacaaactcttgagaaggcaggtaataacccatctatggtaagtgtggttgacgttcatgcatatggtatggataacaatggtgcagcaccttactctgctgtgaaaagtgctagtttgaatgaaaatgaagttgatccaattcatgaatatgctgccaaagctgttactgaacatccagaccaaaatgagaatcttgtaccagtgaatgcagatgaaatggctgatgaaggcttgaataagatcctacctgatgacaaggatgacaagaaagattgtcaactggaagttagtagtgggcctgtcattttgaatgacagttctactcctgtctatcctgaatttagcaattccttttatgcaagagatggaacagaagtttctaacaatgcagtagattcaaaaaataacgcagaacagcttgcttcttctaatcagggaaaagggaacatggaggaatgcaaagattctgacggaaacaatgcaagtgaattgagtgttgcccaaaagctagtgtctgttattgtgccccctgcttcagacgcaggcgatgtgagtaattttgtagaaaatgatgttgataaatctagcagagatcaggagaaggtagcaaagaaggaatatgaagattctgtcgtggcaaagaaggatcacgaagatgctatcctcagaagggcacggtatatagaggcaaatattaagagggctggtgaatggtctctctgcaatatttctttagagaagaagcagaagagccactgggattttgttctggaggagatggtctggatggcaaatgacttcacacaggagcgtttgtggaaaaatacagttgcagcacagatgtcccattggatttcttctagaggtcgagcggtatttgaagaagcaagcattcagagaaagcagaaatctgttgctagagttctagccaatggtattatgaacttttggtgttcagtccatactttacgagctagtggtggtattcctaaaccaataaaaatcgagcaaccgaatgagctagaggaaaataagcttggtgggttcaaatccggaaaagcggatgaggagtgtttggagcaagaaaagtcgcgccagtctcctattcagagctttgcacttaggtttcttgagtataacattaatgcatctgaatttctgccattagccgaagcaccatcaactcctgacaggctaaatgattttggcattttgaaagcaaatctcttttatggcgtagcacccggtgcaatgcaggcatacagggagtctatggaccgtctccttatttataataacaagaaaattggtgacactgtactcaaggatgattatgagccatcaacatatgcatctgtcacagatgtccctatggagaatgcatatggagatgacgaaagtgaggcacacacctacttattgcctggagcttataatggtggtttggcatcaaaaaatagtcacaaaaagaagcaccatttgcctcagaggatgaatggcgcaaggtcatatgaaattggtgttgacagtccttacgaaccactgtatttggaaagtaaatcaggaaaccagcaactcttatcgaatggcaaacaaacagacttcctctccattcctataaaacgcatccgcacagcagctaggcagcgggttgtgagtccatttcctgctggtgcttctgggacccctcaattcacaaataaaacggacgcatctagtggagatacaaactcctgtcaagatgatcaaagttcattacatggagggtcattttctaggaagaatgcagatatagagtccactgttgattttgacaggcaattgttgtatgatggtagtgaggtgtcgacaaaatctaaaaagaagaaaaagactaagcacccagggtacaaggcactaccaaatgtgtccgaatcttgttcgttgagggctcctggaaagggcaattatgatcatagatctcagatcgatatgatagctcagtatgagcagaaggattatattaaaaagagacaggagacaaatgggaattttggtgttattgatttatcaacagtggttaatggcctacatgctgctaagaagcctaaattgttgaatcaagcaccagatatttcactggaagctcttaaaccaattggtccaatggcctctcttgctgcatcacaaatgagcaacatggcaaatcctacgagggttataaaaatcagcacccgtggaagaaaaagtaaaggactcaagatgcgagctggtcattcaggtcctggaagtccatggtcaagttttgaggatcaggctcttgttgtccttgtccatgatatgggtgaaaactgggaattggttagtgatgcccttaacagcatcatccaattgaagtgcatatacagaaggcctaatgagtgtaaggaacgccataaacttctcaccgatagaagttgtggcgacggtgctgacagcgctgatgactcaggctcatctcaacactatccttctgcattgcctgggattccaaagggtagtgcaaggcaactgtttcagcgccttcaaggaccgtttgaggaagggactctcaagacacacttcgagaaaataatattgcttggtcaaaaattgcatcaaactcgtagaaaggatgagatccatgagctgaggcaaaaaaatccacttcatacttctcatggttttgcactttctcaagcatgtccagggaacttatctggtgtcattttgacgccacttgacctttgcgatggaccttcgaactcggatgcacttacaggatccaatacaagtgggttaggtctttcaaacaataactgctctgttggtcctactcttcctacatcaaatatgaacttaagattaccaggttctcctggtatggttttgggaagcaattcaccattgcctttgaatgctccctctagggatgttcagaggtatggtgtgcctagaccaacctcgatacagggtgacgagcaatcaagaattcattataaccagatggtaaatggcagaaaccttcagcaacctggagttcctgttcctggtgtgttgccatctggtgttgatcggggtgcccgaatgatgccacctgcccatggtgttggaatcatggctggactaaatcgaggtacacctattactaggccaggttttccaaggcttggttctcttggaaacatgtcacccaccgatggtcaaggcttaaaaaatactgtaaacgttcatcctggtgccatactgggacctggaagtactatgttgaggccacgtgacccaatgcagatgtttagacctggccagaattcagaggagcatagacagatgatgatgccagagtttcagttacaagtctcgcaaggaaataatcatgctgtgcatttcagcggtccaccatattccaacactggggcatcttcacctgttcaatctttacctgcccagcagtcccaaccacatcagatgccacaacaatcacacatgtatggaaacacacaccttcttcatacccaaggaacaaaccagtcaaatccacagcaacagcaggcttatgctatgcgcttggccaaagagaggcatatgcaacagatgatgccccaacaacagcgtccattatctgttgccagtgcagtgtcagctgtacagaatggctcaccgatgcaacagcagagccaaggatctgcaacttgcgtaatcccagctacacagacacaacataagcagcaatatcctgcacaaaatgcacaagataactcaatgcttccccatcagccttcagccaccactacacataaacagaagaagcaacagggccagcagcagcctagacaaaatcaacagcaacgaaatcaaggcagtcaacaagctaagcttatgaagagtttaggccgagggaacatgatgcagcagagtcctgtggatgttattcaagcaagtggcatatcaacaagctgtaaagatcaagttcctgataagaatatgatgcaacagggtccagggcattttgttgtaagtaaaggatcaatcccattgatacctcaacctgggaatcaaccaaatgtatacacttctcagatgcctccgtctccaatgcagacaccggatattagtaatcagggtgcagtcaagggttcttccaaccatgccttgttaacttcccagcaaggttcactccatacgccttcacagttggcacagcagcagcagcagcaactacggttcatgaatccgtcacagaataatatgcaaaggttgataatgcaacagaatcggcatgtgaacacagatggcaggattgagttacctgctgaccaagtacagcataaccaggtaatgtcatctgcctcacttgcaagaagtacagattcaggcagcccaggaatctcatctataagccagcggaaacaagagtcatctcatgacccaagtgcaattacctcaacctcgcagctagctagctcacctcaagacacctttgttggaagtgatagggtgttgccatcatccagccaaagcatgccgcaaaggcaaatgtccggtggtgtgcctgtacatggatatggcattggtggccaggtgcagctacaacagtctcggcagcaactccagtctcagcagcagcagcagcagcagcagaggcctgttgtccaaggtggtgtatatgctcacccctcaaattcaggacaaggatgatgctgaaccatactgggcctgcatttctgaagagcctcccttccccttgtaaagttacctgtacaggcgtccgtgctgtggaagatgtgtgcggatgatagtgctctttattcccaactttgagctaactgtagcctcctcggtgtcaggtagataattatttctcctcaccattttggtgccacactgctaccttccatgtagtttgaccctaggttgctggaggtggttcttgtgagggcaaactccttgagtcgtcaaattgtaaccacgacactgggcccagttgtatatttttgccgttgaggtccatgttagaggcaatctcttttgtataagcctgtatattcagctcacaagccagtcaatgaatgcaaagcctttctttgcgtcaaaccaggaatgtaaaaagcttgagcgttttgcgtcgatcacttatcttaacttgtcgtattcaactccgtc

SEQ ID NO: 32784 - DNA, 3790 bp, Zea Mays
cctgcccctgcaaccccgctccaccgcgcccgatctctatcgtcgacaccaccgcctccggcgaggccttttccgctcttgaggtttccacaggtgcctctcagccctccgcacactgcctcgtgggtttccccgagctcccctgccccaaaccctaaccctagctcctggcgtggggccgtgcaggttcattccctgctcaatcgggcgccccatttggcaccctctgcccccccacagacccgtagggttgcatttcagcgtgtctcttttctggacttgggaatctgagaggatactgtgcagtttaatggcacacactgctgactatatgcacatataatgatgcatgggcaaaccatgcttctctggtctagtggctattgagctgtgctctatgggaggtattgctgaatgtggtgtgagcattgacactaaagcttcaccacgtcgagcagccatagagaaagctcaggacgagctcaggcaggaatatgatgttcgtgaagaacgaaggagagagcttgaatttctggagaagggaggcaatcccttggatttcaaacttggccatgtagcttcccttagtgtacagtccacttctgtgacagaacagatagctgaacaaaatgtgataagtgaggccaaaggtagttctgcatttgctacatcacctcatggggattctgttgaaagtaacgacaagccaggaaattcattgtgccgtgaaggcaatacagccgataatattacgcttttggatggagatgccagcagcatgggtgtggataaaattgtgaaacgtggaacaaagagaactaattcagctcaagctgagcagttcctgcactgtgatggtcagaacaatgcaaaagaagaagattctgggttgtaccgtcttggtccaaagagccaagcgtatgcacgacgtaggtcaaagcctatcagagagaatgcatatagtgtatctgttaggtatccaccaattcctccattaagttctcagcaaaaagatgtgacaggattaatcccagaaaccaagactgaggataatggtgtttcatccattggtgattcaaaaccgactagtcctaactctaaaaatttggtgacaaatgcatcattactgaatgataaggtggaaatggagacagaaaatgttcaagcaattcctgaaggcaatcaagcaccgaaaaatgagttatcaaacagcaacaatggtagtcctgctattgagatttcaccaaacagtgtgccggataattctcgtcttactgtaagtgatcagatggttactgcatttgtttctgtggaatccccagatgctatttcaaaagtagctgcttcaaggatagtttgttctctcccatatatatccaatgaaatattgaaagaagcacaaactcttgagaaggcaggtaataacccatctatggtaagtgtggttgacgttcatgcatatggtatggataacaatggtgcagcaccttactctgctgtgaaaagtgctagtttgaatgaaaatgaagttgatccaattcatgaatatgctgccaaagctgttactgaacatccagaccaaaatgagaatcttgtaccagtgaatgcagatgaaatggctgatgaaggcttgaataagatcctacctgatgacaaggatgacaagaaagattgtcaactggaagttagtagtgggcctgtcattttgaatgacagttctactcctgtctatcctgaatttagcaattccttttatgcaagagatggaacagaagtttctaacaatgcagtagattcaaaaaataacgcagaacagcttgcttcttctaatcagggaaaagggaacatggaggaatgcaaagattctgacggaaacaatgcaagtgaattgagtgttgcccaaaagctagtgtctgttattgtgccccctgcttcagacgcaggcgatgtgagtaattttgtagaaaatgatgttgataaatctagcagagatcaggagaaggtagcaaagaaggaatatgaagattctgtcgtggcaaagaaggatcacgaagatgctatcctcagaagggcacggtatatagaggcaaatattaagagggctggtgaatggtctctctgcaatatttctttagagaagaagcagaagagccactgggattttgttctggaggagatggtctggatggcaaatgacttcacacaggagcgtttgtggaaaaatacagttgcagcacagatgtcccattggatttcttctagaggtcgagcggtatttgaagaagcaagcattcagagaaagcagaaatctgttgctagagttctagccaatggtattatgaacttttggtgttcagtccatactttacgagctagtggtggtattcctaaaccaataaaaatcgagcaaccgaatgagctagaggaaaataagcttggtgggttcaaatccggaaaagcggatgaggagtgtttggagcaagaaaagtcgcgccagtctcctattcagagctttgcacttaggtttcttgagtataacattaatgcatctgaatttctgccattagccgaagcaccatcaactcctgacaggctaaatgattttggcattttgaaagcaaatctcttttatggcgtagcacccggtgcaatgcaggcatacagggagtctatggaccgtctccttatttataataacaagaaaattggtgacactgtactcaaggatgattatgagccatcaacatatgcatctgtcacagatgtccctatggagaatgcatatggagatgacgaaagtgaggcacacacctacttattgcctggagcttataatggtggtttggcatcaaaaaatagtcacaaaaagaagcaccatttgcctcagaggatgaatggcgcaaggtcatatgaaattggtgttgacagtccttacgaaccactgtatttggaaagtaaatcaggaaaccagcaactcttatcgaatggcaaacaaacagacttcctctccattcctataaaacgcatccgcacagcagctaggcagcgggttgtgagtccatttcctgctggtgcttctgggacccctcaattcacaaataaaacggacgcatctagtggagatacaaactcctgtcaagatgatcaaagttcattacatggagggtcattttctaggaagaatgcagatatagagtccactgttgattttgacaggcaattgttgtatgatggtagtgaggtgtcgacaaaatctaaaaagaagaaaaagactaagcacccagggtacaaggcactaccaaatgtgtccgaatcttgttcgttgagggctcctggaaagggcaattatgatcatagatctcagatcgatatgatagctcagtatgagcagaaggattatattaaaaagagacaggagacaaatgggaattttggtgttattgatttatcaacagtggttaatggcctacatgctgctaagaagcctaaattgttgaatcaagcaccagatatttcactggaagctcttaaaccaattggtccaatggcctctcttgctgcatcacaaatgagcaacatggcaaatcctacgagggttataaaaatcagcacccgtggaagaaaaagtaaaggactcaagatgcgagctggtcattcaggtcctggaagtccatggtcaagttttgaggatcaggctcttgttgtccttgtccatgatatgggtgaaaactgggaattggttagtgatgcccttaacagcatcatccaattgaagggctttggatcttaa

SEQ ID NO: 32785 - DNA, 3608 bp, Zea Mays
cctgcccctgcaaccccgctccaccgcgcccgatctctatcgtcgacaccaccgcctccggcgaggccttttccgctcttgaggtttccacaggaaacagcgtgtctcttttctggacttgggaatctgagaggatactgtgcagtttaatggcacacactgctgactatatgcacatataatgatgcatgggcaaaccatgcttctctggtctagtggctattgagctgtgctctatgggaggtattgctgaatgtggtgtgagcattgacactaaagcttcaccacgtcgagcagccatagagaaagctcaggacgagctcaggcaggaatatgatgttcgtgaagaacgaaggagagagcttgaatttctggagaagggaggcaatcccttggatttcaaacttggccatgtagcttcccttagtgtacagtccacttctgtgacagaacagatagctgaacaaaatgtgataagtgaggccaaaggtagttctgcatttgctacatcacctcatggggattctgttgaaagtaacgacaagccaggaaattcattgtgccgtgaaggcaatacagccgataatattacgcttttggatggagatgccagcagcatgggtgtggataaaattgtgaaacgtggaacaaagagaactaattcagctcaagctgagcagttcctgcactgtgatggtcagaacaatgcaaaagaagaagattctgggttgtaccgtcttggtccaaagagccaagcgtatgcacgacgtaggtcaaagcctatcagagagaatgcatatagtgtatctgttaggtatccaccaattcctccattaagttctcagcaaaaagatgtgacaggattaatcccagaaaccaagactgaggataatggtgtttcatccattggtgattcaaaaccgactagtcctaactctaaaaatttggtgacaaatgcatcattactgaatgataaggtggaaatggagacagaaaatgttcaagcaattcctgaaggcaatcaagcaccgaaaaatgagttatcaaacagcaacaatggtagtcctgctattgagatttcaccaaacagtgtgccggataattctcgtcttactgtaagtgatcagatggttactgcatttgtttctgtggaatccccagatgctatttcaaaagtagctgcttcaaggatagtttgttctctcccatatatatccaatgaaatattgaaagaagcacaaactcttgagaaggcaggtaataacccatctatggtaagtgtggttgacgttcatgcatatggtatggataacaatggtgcagcaccttactctgctgtgaaaagtgctagtttgaatgaaaatgaagttgatccaattcatgaatatgctgccaaagctgttactgaacatccagaccaaaatgagaatcttgtaccagtgaatgcagatgaaatggctgatgaaggcttgaataagatcctacctgatgacaaggatgacaagaaagattgtcaactggaagttagtagtgggcctgtcattttgaatgacagttctactcctgtctatcctgaatttagcaattccttttatgcaagagatggaacagaagtttctaacaatgcagtagattcaaaaaataacgcagaacagcttgcttcttctaatcagggaaaagggaacatggaggaatgcaaagattctgacggaaacaatgcaagtgaattgagtgttgcccaaaagctagtgtctgttattgtgccccctgcttcagacgcaggcgatgtgagtaattttgtagaaaatgatgttgataaatctagcagagatcaggagaaggtagcaaagaaggaatatgaagattctgtcgtggcaaagaaggatcacgaagatgctatcctcagaagggcacggtatatagaggcaaatattaagagggctggtgaatggtctctctgcaatatttctttagagaagaagcagaagagccactgggattttgttctggaggagatggtctggatggcaaatgacttcacacaggagcgtttgtggaaaaatacagttgcagcacagatgtcccattggatttcttctagaggtcgagcggtatttgaagaagcaagcattcagagaaagcagaaatctgttgctagagttctagccaatggtattatgaacttttggtgttcagtccatactttacgagctagtggtggtattcctaaaccaataaaaatcgagcaaccgaatgagctagaggaaaataagcttggtgggttcaaatccggaaaagcggatgaggagtgtttggagcaagaaaagtcgcgccagtctcctattcagagctttgcacttaggtttcttgagtataacattaatgcatctgaatttctgccattagccgaagcaccatcaactcctgacaggctaaatgattttggcattttgaaagcaaatctcttttatggcgtagcacccggtgcaatgcaggcatacagggagtctatggaccgtctccttatttataataacaagaaaattggtgacactgtactcaaggatgattatgagccatcaacatatgcatctgtcacagatgtccctatggagaatgcatatggagatgacgaaagtgaggcacacacctacttattgcctggagcttataatggtggtttggcatcaaaaaatagtcacaaaaagaagcaccatttgcctcagaggatgaatggcgcaaggtcatatgaaattggtgttgacagtccttacgaaccactgtatttggaaagtaaatcaggaaaccagcaactcttatcgaatggcaaacaaacagacttcctctccattcctataaaacgcatccgcacagcagctaggcagcgggttgtgagtccatttcctgctggtgcttctgggacccctcaattcacaaataaaacggacgcatctagtggagatacaaactcctgtcaagatgatcaaagttcattacatggagggtcattttctaggaagaatgcagatatagagtccactgttgattttgacaggcaattgttgtatgatggtagtgaggtgtcgacaaaatctaaaaagaagaaaaagactaagcacccagggtacaaggcactaccaaatgtgtccgaatcttgttcgttgagggctcctggaaagggcaattatgatcatagatctcagatcgatatgatagctcagtatgagcagaaggattatattaaaaagagacaggagacaaatgggaattttgtggttaatggcctacatgctgctaagaagcctaaattgttgaatcaagcaccagatatttcactggaagctcttaaaccaattggtccaatggcctctcttgctgcatcacaaatgagcaacatggcaaatcctacgagggttataaaaatcagcacccgtggaagaaaaagtaaaggactcaagatgcgagctggtcattcaggtcctggaagtccatggtcaagttttgaggatcaggctcttgttgtccttgtccatgatatgggtgaaaactgggaattggttagtgatgcccttaacagcatcatccaattgaagggctttggatcttaa

SEQ ID NO: 32786 - DNA, 3629 bp, Zea Mays
cctgcccctgcaaccccgctccaccgcgcccgatctctatcgtcgacaccaccgcctccggcgaggccttttccgctcttgaggtttccacaggaaacagcgtgtctcttttctggacttgggaatctgagaggatactgtgcagtttaatggcacacactgctgactatatgcacatataatgatgcatgggcaaaccatgcttctctggtctagtggctattgagctgtgctctatgggaggtattgctgaatgtggtgtgagcattgacactaaagcttcaccacgtcgagcagccatagagaaagctcaggacgagctcaggcaggaatatgatgttcgtgaagaacgaaggagagagcttgaatttctggagaagggaggcaatcccttggatttcaaacttggccatgtagcttcccttagtgtacagtccacttctgtgacagaacagatagctgaacaaaatgtgataagtgaggccaaaggtagttctgcatttgctacatcacctcatggggattctgttgaaagtaacgacaagccaggaaattcattgtgccgtgaaggcaatacagccgataatattacgcttttggatggagatgccagcagcatgggtgtggataaaattgtgaaacgtggaacaaagagaactaattcagctcaagctgagcagttcctgcactgtgatggtcagaacaatgcaaaagaagaagattctgggttgtaccgtcttggtccaaagagccaagcgtatgcacgacgtaggtcaaagcctatcagagagaatgcatatagtgtatctgttaggtatccaccaattcctccattaagttctcagcaaaaagatgtgacaggattaatcccagaaaccaagactgaggataatggtgtttcatccattggtgattcaaaaccgactagtcctaactctaaaaatttggtgacaaatgcatcattactgaatgataaggtggaaatggagacagaaaatgttcaagcaattcctgaaggcaatcaagcaccgaaaaatgagttatcaaacagcaacaatggtagtcctgctattgagatttcaccaaacagtgtgccggataattctcgtcttactgtaagtgatcagatggttactgcatttgtttctgtggaatccccagatgctatttcaaaagtagctgcttcaaggatagtttgttctctcccatatatatccaatgaaatattgaaagaagcacaaactcttgagaaggcaggtaataacccatctatggtaagtgtggttgacgttcatgcatatggtatggataacaatggtgcagcaccttactctgctgtgaaaagtgctagtttgaatgaaaatgaagttgatccaattcatgaatatgctgccaaagctgttactgaacatccagaccaaaatgagaatcttgtaccagtgaatgcagatgaaatggctgatgaaggcttgaataagatcctacctgatgacaaggatgacaagaaagattgtcaactggaagttagtagtgggcctgtcattttgaatgacagttctactcctgtctatcctgaatttagcaattccttttatgcaagagatggaacagaagtttctaacaatgcagtagattcaaaaaataacgcagaacagcttgcttcttctaatcagggaaaagggaacatggaggaatgcaaagattctgacggaaacaatgcaagtgaattgagtgttgcccaaaagctagtgtctgttattgtgccccctgcttcagacgcaggcgatgtgagtaattttgtagaaaatgatgttgataaatctagcagagatcaggagaaggtagcaaagaaggaatatgaagattctgtcgtggcaaagaaggatcacgaagatgctatcctcagaagggcacggtatatagaggcaaatattaagagggctggtgaatggtctctctgcaatatttctttagagaagaagcagaagagccactgggattttgttctggaggagatggtctggatggcaaatgacttcacacaggagcgtttgtggaaaaatacagttgcagcacagatgtcccattggatttcttctagaggtcgagcggtatttgaagaagcaagcattcagagaaagcagaaatctgttgctagagttctagccaatggtattatgaacttttggtgttcagtccatactttacgagctagtggtggtattcctaaaccaataaaaatcgagcaaccgaatgagctagaggaaaataagcttggtgggttcaaatccggaaaagcggatgaggagtgtttggagcaagaaaagtcgcgccagtctcctattcagagctttgcacttaggtttcttgagtataacattaatgcatctgaatttctgccattagccgaagcaccatcaactcctgacaggctaaatgattttggcattttgaaagcaaatctcttttatggcgtagcacccggtgcaatgcaggcatacagggagtctatggaccgtctccttatttataataacaagaaaattggtgacactgtactcaaggatgattatgagccatcaacatatgcatctgtcacagatgtccctatggagaatgcatatggagatgacgaaagtgaggcacacacctacttattgcctggagcttataatggtggtttggcatcaaaaaatagtcacaaaaagaagcaccatttgcctcagaggatgaatggcgcaaggtcatatgaaattggtgttgacagtccttacgaaccactgtatttggaaagtaaatcaggaaaccagcaactcttatcgaatggcaaacaaacagacttcctctccattcctataaaacgcatccgcacagcagctaggcagcgggttgtgagtccatttcctgctggtgcttctgggacccctcaattcacaaataaaacggacgcatctagtggagatacaaactcctgtcaagatgatcaaagttcattacatggagggtcattttctaggaagaatgcagatatagagtccactgttgattttgacaggcaattgttgtatgatggtagtgaggtgtcgacaaaatctaaaaagaagaaaaagactaagcacccagggtacaaggcactaccaaatgtgtccgaatcttgttcgttgagggctcctggaaagggcaattatgatcatagatctcagatcgatatgatagctcagtatgagcagaaggattatattaaaaagagacaggagacaaatgggaattttggtgttattgatttatcaacagtggttaatggcctacatgctgctaagaagcctaaattgttgaatcaagcaccagatatttcactggaagctcttaaaccaattggtccaatggcctctcttgctgcatcacaaatgagcaacatggcaaatcctacgagggttataaaaatcagcacccgtggaagaaaaagtaaaggactcaagatgcgagctggtcattcaggtcctggaagtccatggtcaagttttgaggatcaggctcttgttgtccttgtccatgatatgggtgaaaactgggaattggttagtgatgcccttaacagcatcatccaattgaagggctttggatcttaa

SEQ ID NO: 32787 - DNA, 6545 bp, Zea Mays
cctgcccctgcaaccccgctccaccgcgcccgatctctatcgtcgacaccaccgcctccggcgaggccttttccgctcttgaggtttccacaggtgcctctcagccctccgcacactgcctcgtgggtttccccgagctcccctgccccaaaccctaaccctagctcctggcgtggggccgtgcaggttcattccctgctcaatcgggcgccccatttggcaccctctgcccccccacagacccgtagggttgcatttcaggaaacagcgtgtctcttttctggacttgggaatctgagaggatactgtgcagtttaatggcacacactgctgactatatgcacatataatgatgcatgggcaaaccatgcttctctggtctagtggctattgagctgtgctctatgggaggtattgctgaatgtggtgtgagcattgacactaaagcttcaccacgtcgagcagccatagagaaagctcaggacgagctcaggcaggaatatgatgttcgtgaagaacgaaggagagagcttgaatttctggagaagggaggcaatcccttggatttcaaacttggccatgtagcttcccttagtgtacagtccacttctgtgacagaacagatagctgaacaaaatgtgataagtgaggccaaaggtagttctgcatttgctacatcacctcatggggattctgttgaaagtaacgacaagccaggaaattcattgtgccgtgaaggcaatacagccgataatattacgcttttggatggagatgccagcagcatgggtgtggataaaattgtgaaacgtggaacaaagagaactaattcagctcaagctgagcagttcctgcactgtgatggtcagaacaatgcaaaagaagaagattctgggttgtaccgtcttggtccaaagagccaagcgtatgcacgacgtaggtcaaagcctatcagagagaatgcatatagtgtatctgttaggtatccaccaattcctccattaagttctcagcaaaaagatgtgacaggattaatcccagaaaccaagactgaggataatggtgtttcatccattggtgattcaaaaccgactagtcctaactctaaaaatttggtgacaaatgcatcattactgaatgataaggtggaaatggagacagaaaatgttcaagcaattcctgaaggcaatcaagcaccgaaaaatgagttatcaaacagcaacaatggtagtcctgctattgagatttcaccaaacagtgtgccggataattctcgtcttactgtaagtgatcagatggttactgcatttgtttctgtggaatccccagatgctatttcaaaagtagctgcttcaaggatagtttgttctctcccatatatatccaatgaaatattgaaagaagcacaaactcttgagaaggcaggtaataacccatctatggtaagtgtggttgacgttcatgcatatggtatggataacaatggtgcagcaccttactctgctgtgaaaagtgctagtttgaatgaaaatgaagttgatccaattcatgaatatgctgccaaagctgttactgaacatccagaccaaaatgagaatcttgtaccagtgaatgcagatgaaatggctgatgaaggcttgaataagatcctacctgatgacaaggatgacaagaaagattgtcaactggaagttagtagtgggcctgtcattttgaatgacagttctactcctgtctatcctgaatttagcaattccttttatgcaagagatggaacagaagtttctaacaatgcagtagattcaaaaaataacgcagaacagcttgcttcttctaatcagggaaaagggaacatggaggaatgcaaagattctgacggaaacaatgcaagtgaattgagtgttgcccaaaagctagtgtctgttattgtgccccctgcttcagacgcaggcgatgtgagtaattttgtagaaaatgatgttgataaatctagcagagatcaggagaaggtagcaaagaaggaatatgaagattctgtcgtggcaaagaaggatcacgaagatgctatcctcagaagggcacggtatatagaggcaaatattaagagggctggtgaatggtctctctgcaatatttctttagagaagaagcagaagagccactgggattttgttctggaggagatggtctggatggcaaatgacttcacacaggagcgtttgtggaaaaatacagttgcagcacagatgtcccattggatttcttctagaggtcgagcggtatttgaagaagcaagcattcagagaaagcagaaatctgttgctagagttctagccaatggtattatgaacttttggtgttcagtccatactttacgagctagtggtggtattcctaaaccaataaaaatcgagcaaccgaatgagctagaggaaaataagcttggtgggttcaaatccggaaaagcggatgaggagtgtttggagcaagaaaagtcgcgccagtctcctattcagagctttgcacttaggtttcttgagtataacattaatgcatctgaatttctgccattagccgaagcaccatcaactcctgacaggctaaatgattttggcattttgaaagcaaatctcttttatggcgtagcacccggtgcaatgcaggcatacagggagtctatggaccgtctccttatttataataacaagaaaattggtgacactgtactcaaggatgattatgagccatcaacatatgcatctgtcacagatgtccctatggagaatgcatatggagatgacgaaagtgaggcacacacctacttattgcctggagcttataatggtggtttggcatcaaaaaatagtcacaaaaagaagcaccatttgcctcagaggatgaatggcgcaaggtcatatgaaattggtgttgacagtccttacgaaccactgtatttggaaagtaaatcaggaaaccagcaactcttatcgaatggcaaacaaacagacttcctctccattcctataaaacgcatccgcacagcagctaggcagcgggttgtgagtccatttcctgctggtgcttctgggacccctcaattcacaaataaaacggacgcatctagtggagatacaaactcctgtcaagatgatcaaagttcattacatggagggtcattttctaggaagaatgcagatatagagtccactgttgattttgacaggcaattgttgtatgatggtagtgaggtgtcgacaaaatctaaaaagaagaaaaagactaagcacccagggtacaaggcactaccaaatgtgtccgaatcttgttcgttgagggctcctggaaagggcaattatgatcatagatctcagatcgatatgatagctcagtatgagcagaaggattatattaaaaagagacaggagacaaatgggaattttgtggttaatggcctacatgctgctaagaagcctaaattgttgaatcaagcaccagatatttcactggaagctcttaaaccaattggtccaatggcctctcttgctgcatcacaaatgagcaacatggcaaatcctacgagggttataaaaatcagcacccgtggaagaaaaagtaaaggactcaagatgcgagctggtcattcaggtcctggaagtccatggtcaagttttgaggatcaggctcttgttgtccttgtccatgatatgggtgaaaactgggaattggttagtgatgcccttaacagcatcatccaattgaagtgcatatacagaaggcctaatgagtgtaaggaacgccataaacttctcaccgatagaagttgtggcgacggtgctgacagcgctgatgactcaggctcatctcaacactatccttctgcattgcctgggattccaaagggtagtgcaaggcaactgtttcagcgccttcaaggaccgtttgaggaagggactctcaagacacacttcgagaaaataatattgcttggtcaaaaattgcatcaaactcgtagaaaggatgagatccatgagctgaggcaaaaaaatccacttcatacttctcatggttttgcactttctcaagcatgtccagggaacttatctggtgtcattttgacgccacttgacctttgcgatggaccttcgaactcggatgcacttacaggatccaatacaagtgggttaggtctttcaaacaataactgctctgttggtcctactcttcctacatcaaatatgaacttaagattaccaggttctcctggtatggttttgggaagcaattcaccattgcctttgaatgctccctctagggatgttcagaggtatggtgtgcctagaccaacctcgatacagggtgacgagcaatcaagaattcattataaccagatggtaaatggcagaaaccttcagcaacctggagttcctgttcctggtgtgttgccatctggtgttgatcggggtgcccgaatgatgccacctgcccatggtgttggaatcatggctggactaaatcgaggtacacctattactaggccaggttttccaaggcttggttctcttggaaacatgtcacccaccgatggtcaaggcttaaaaaatactgtaaacgttcatcctggtgccatactgggacctggaagtactatgttgaggccacgtgacccaatgcagatgtttagacctggccagaattcagaggagcatagacagatgatgatgccagagtttcagttacaagtctcgcaaggaaataatcatgctgtgcatttcagcggtccaccatattccaacactggggcatcttcacctgttcaatctttacctgcccagcagtcccaaccacatcagatgccacaacaatcacacatgtatggaaacacacaccttcttcatacccaaggaacaaaccagtcaaatccacagcaacagcaggcttatgctatgcgcttggccaaagagaggcatatgcaacagatgatgccccaacaacagcgtccattatctgttgccagtgcagtgtcagctgtacagaatggctcaccgatgcaacagcagagccaaggatctgcaacttgcgtaatcccagctacacagacacaacataagcagcaatatcctgcacaaaatgcacaagataactcaatgcttccccatcagccttcagccaccactacacataaacagaagaagcaacagggccagcagcagcctagacaaaatcaacagcaacgaaatcaaggcagtcaacaagctaagcttatgaagagtttaggccgagggaacatgatgcagcagagtcctgtggatgttattcaagcaagtggcatatcaacaagctgtaaagatcaagttcctgataagaatatgatgcaacagggtccagggcattttgttgtaagtaaaggatcaatcccattgatacctcaacctgggaatcaaccaaatgtatacacttctcagatgcctccgtctccaatgcagacaccggatattagtaatcagggtgcagtcaagggttcttccaaccatgccttgttaacttcccagcaaggttcactccatacgccttcacagttggcacagcagcagcagcagcaactacggttcatgaatccgtcacagaataatatgcaaaggttgataatgcaacagaatcggcatgtgaacacagatggcaggattgagttacctgctgaccaagtacagcataaccaggtaatgtcatctgcctcacttgcaagaagtacagattcaggcagcccaggaatctcatctataagccagcggaaacaagagtcatctcatgacccaagtgcaattacctcaacctcgcagctagctagctcacctcaagacacctttgttggaagtgatagggtgttgccatcatccagccaaagcatgccgcaaaggcaaatgtccggtggtgtgcctgtacatggatatggcattggtggccaggtgcagctacaacagtctcggcagcaactccagtctcagcagcagcagcagcagcagcagaggcctgttgtccaaggtggtgtatatgctcacccctcaaattcaggacaaggatgatgctgaaccatactgggcctgcatttctgaagagcctcccttccccttgtaaagttacctgtacaggcgtccgtgctgtggaagatgtgtgcggatgatagtgctctttattcccaactttgagctaactgtagcctcctcggtgtcaggtagataattatttctcctcaccattttggtgccacactgctaccttccatgtagtttgaccctaggttgctggaggtggttcttgtgagggcaaactccttgagtcgtcaaattgtaaccacgacactgggcccagttgtatatttttgccgttgaggtccatgttagaggcaatctcttttgtataagcctgtatattcagctcacaagccagtcaatgaatgcaaagcctttctttgcgtcaaaccaggaatgtaaaaagcttgagcgttttgcgtcgatcacttatcttaacttgtcgtattcaactccgtc

SEQ ID NO: 32788 - DNA, 6524 bp, Zea Mays
cctgcccctgcaaccccgctccaccgcgcccgatctctatcgtcgacaccaccgcctccggcgaggccttttccgctcttgaggtttccacaggaaacagcgtgtctcttttctggacttgggaatctgagaggatactgtgcagtttaatggcacacactgctgactatatgcacatataatgatgcatgggcaaaccatgcttctctggtctagtggctattgagctgtgctctatgggaggtattgctgaatgtggtgtgagcattgacactaaagcttcaccacgtcgagcagccatagagaaagctcaggacgagctcaggcaggaatatgatgttcgtgaagaacgaaggagagagcttgaatttctggagaagggaggcaatcccttggatttcaaacttggccatgtagcttcccttagtgtacagtccacttctgtgacagaacagatagctgaacaaaatgtgataagtgaggccaaaggtagttctgcatttgctacatcacctcatggggattctgttgaaagtaacgacaagccaggaaattcattgtgccgtgaaggcaatacagccgataatattacgcttttggatggagatgccagcagcatgggtgtggataaaattgtgaaacgtggaacaaagagaactaattcagctcaagctgagcagttcctgcactgtgatggtcagaacaatgcaaaagaagaagattctgggttgtaccgtcttggtccaaagagccaagcgtatgcacgacgtaggtcaaagcctatcagagagaatgcatatagtgtatctgttaggtatccaccaattcctccattaagttctcagcaaaaagatgtgacaggattaatcccagaaaccaagactgaggataatggtgtttcatccattggtgattcaaaaccgactagtcctaactctaaaaatttggtgacaaatgcatcattactgaatgataaggtggaaatggagacagaaaatgttcaagcaattcctgaaggcaatcaagcaccgaaaaatgagttatcaaacagcaacaatggtagtcctgctattgagatttcaccaaacagtgtgccggataattctcgtcttactgtaagtgatcagatggttactgcatttgtttctgtggaatccccagatgctatttcaaaagtagctgcttcaaggatagtttgttctctcccatatatatccaatgaaatattgaaagaagcacaaactcttgagaaggcaggtaataacccatctatggtaagtgtggttgacgttcatgcatatggtatggataacaatggtgcagcaccttactctgctgtgaaaagtgctagtttgaatgaaaatgaagttgatccaattcatgaatatgctgccaaagctgttactgaacatccagaccaaaatgagaatcttgtaccagtgaatgcagatgaaatggctgatgaaggcttgaataagatcctacctgatgacaaggatgacaagaaagattgtcaactggaagttagtagtgggcctgtcattttgaatgacagttctactcctgtctatcctgaatttagcaattccttttatgcaagagatggaacagaagtttctaacaatgcagtagattcaaaaaataacgcagaacagcttgcttcttctaatcagggaaaagggaacatggaggaatgcaaagattctgacggaaacaatgcaagtgaattgagtgttgcccaaaagctagtgtctgttattgtgccccctgcttcagacgcaggcgatgtgagtaattttgtagaaaatgatgttgataaatctagcagagatcaggagaaggtagcaaagaaggaatatgaagattctgtcgtggcaaagaaggatcacgaagatgctatcctcagaagggcacggtatatagaggcaaatattaagagggctggtgaatggtctctctgcaatatttctttagagaagaagcagaagagccactgggattttgttctggaggagatggtctggatggcaaatgacttcacacaggagcgtttgtggaaaaatacagttgcagcacagatgtcccattggatttcttctagaggtcgagcggtatttgaagaagcaagcattcagagaaagcagaaatctgttgctagagttctagccaatggtattatgaacttttggtgttcagtccatactttacgagctagtggtggtattcctaaaccaataaaaatcgagcaaccgaatgagctagaggaaaataagcttggtgggttcaaatccggaaaagcgtgtgccagaatgcttagaccgtgcccagcagttcatccatatggtcacccaaaacacacttttgcactgttcatagagtggagtttgaatatgggtatagggatgtgtaagctgctggagatagccttaaaaacgtcatgcttatttgatgaggagtgtttggagcaagaaaagtcgcgccagtctcctattcagagctttgcacttaggtttcttgagtataacattaatgcatctgaatttctgccattagccgaagcaccatcaactcctgacaggctaaatgattttggcattttgaaagcaaatctcttttatggcgtagcacccggtgcaatgcaggcatacagggagtctatggaccgtctccttatttataataacaagaaaattggtgacactgtactcaaggatgattatgagccatcaacatatgcatctgtcacagatgtccctatggagaatgcatatggagatgacgaaagtgaggcacacacctacttattgcctggagcttataatggtggtttggcatcaaaaaatagtcacaaaaagaagcaccatttgcctcagaggatgaatggcgcaaggtcatatgaaattggtgttgacagtccttacgaaccactgtatttggaaagtaaatcaggaaaccagcaactcttatcgaatggcaaacaaacagacttcctctccattcctataaaacgcatccgcacagcagctaggcagcgggttgtgagtccatttcctgctggtgcttctgggacccctcaattcacaaataaaacggacgcatctagtggagatacaaactcctgtcaagatgatcaaagttcattacatggagggtcattttctaggaagaatgcagatatagagtccactgttgattttgacaggcaattgttgtatgatggtagtgaggtgtcgacaaaatctaaaaagaagaaaaagactaagcacccagggtacaaggcactaccaaatgtgtccgaatcttgttcgttgagggctcctggaaagggcaattatgatcatagatctcagatcgatatgatagctcagtatgagcagaaggattatattaaaaagagacaggagacaaatgggaattttgtggttaatggcctacatgctgctaagaagcctaaattgttgaatcaagcaccagatatttcactggaagctcttaaaccaattggtccaatggcctctcttgctgcatcacaaatgagcaacatggcaaatcctacgagggttataaaaatcagcacccgtggaagaaaaagtaaaggactcaagatgcgagctggtcattcaggtcctggaagtccatggtcaagttttgaggatcaggctcttgttgtccttgtccatgatatgggtgaaaactgggaattggttagtgatgcccttaacagcatcatccaattgaagtgcatatacagaaggcctaatgagtgtaaggaacgccataaacttctcaccgatagaagttgtggcgacggtgctgacagcgctgatgactcaggctcatctcaacactatccttctgcattgcctgggattccaaagggtagtgcaaggcaactgtttcagcgccttcaaggaccgtttgaggaagggactctcaagacacacttcgagaaaataatattgcttggtcaaaaattgcatcaaactcgtagaaaggatgagatccatgagctgaggcaaaaaaatccacttcatacttctcatggttttgcactttctcaagcatgtccagggaacttatctggtgtcattttgacgccacttgacctttgcgatggaccttcgaactcggatgcacttacaggatccaatacaagtgggttaggtctttcaaacaataactgctctgttggtcctactcttcctacatcaaatatgaacttaagattaccaggttctcctggtatggttttgggaagcaattcaccattgcctttgaatgctccctctagggatgttcagaggtatggtgtgcctagaccaacctcgatacagggtgacgagcaatcaagaattcattataaccagatggtaaatggcagaaaccttcagcaacctggagttcctgttcctggtgtgttgccatctggtgttgatcggggtgcccgaatgatgccacctgcccatggtgttggaatcatggctggactaaatcgaggtacacctattactaggccaggttttccaaggcttggttctcttggaaacatgtcacccaccgatggtcaaggcttaaaaaatactgtaaacgttcatcctggtgccatactgggacctggaagtactatgttgaggccacgtgacccaatgcagatgtttagacctggccagaattcagaggagcatagacagatgatgatgccagagtttcagttacaagtctcgcaaggaaataatcatgctgtgcatttcagcggtccaccatattccaacactggggcatcttcacctgttcaatctttacctgcccagcagtcccaaccacatcagatgccacaacaatcacacatgtatggaaacacacaccttcttcatacccaaggaacaaaccagtcaaatccacagcaacagcaggcttatgctatgcgcttggccaaagagaggcatatgcaacagatgatgccccaacaacagcgtccattatctgttgccagtgcagtgtcagctgtacagaatggctcaccgatgcaacagcagagccaaggatctgcaacttgcgtaatcccagctacacagacacaacataagcagcaatatcctgcacaaaatgcacaagataactcaatgcttccccatcagccttcagccaccactacacataaacagaagaagcaacagggccagcagcagcctagacaaaatcaacagcaacgaaatcaaggcagtcaacaagctaagcttatgaagagtttaggccgagggaacatgatgcagcagagtcctgtggatgttattcaagcaagtggcatatcaacaagctgtaaagatcaagttcctgataagaatatgatgcaacagggtccagggcattttgttgtaagtaaaggatcaatcccattgatacctcaacctgggaatcaaccaaatgtatacacttctcagatgcctccgtctccaatgcagacaccggatattagtaatcagggtgcagtcaagggttcttccaaccatgccttgttaacttcccagcaaggttcactccatacgccttcacagttggcacagcagcagcagcagcaactacggttcatgaatccgtcacagaataatatgcaaaggttgataatgcaacagaatcggcatgtgaacacagatggcaggattgagttacctgctgaccaagtacagcataaccaggtaatgtcatctgcctcacttgcaagaagtacagattcaggcagcccaggaatctcatctataagccagcggaaacaagagtcatctcatgacccaagtgcaattacctcaacctcgcagctagctagctcacctcaagacacctttgttggaagtgatagggtgttgccatcatccagccaaagcatgccgcaaaggcaaatgtccggtggtgtgcctgtacatggatatggcattggtggccaggtgcagctacaacagtctcggcagcaactccagtctcagcagcagcagcagcagcagcagaggcctgttgtccaaggtggtgtatatgctcacccctcaaattcaggacaaggatgatgctgaaccatactgggcctgcatttctgaagagcctcccttccccttgtaaagttacctgtacaggcgtccgtgctgtggaagatgtgtgcggatgatagtgctctttattcccaactttgagctaactgtagcctcctcggtgtcaggtagataattatttctcctcaccattttggtgccacactgctaccttccatgtagtttgaccctaggttgctggaggtggttcttgtgagggcaaactccttgagtcgtcaaattgtaaccacgacactgggcccagttgtatatttttgccgttgaggtccatgttagaggcaatctcttttgtataagcctgtatattcagctcacaagccagtcaatgaatgcaaagcctttctttgcgtcaaaccaggaatgtaaaaagcttgagcgttttgcgtcgatcacttatcttaacttgtcgtattcaactccgtc

SEQ ID NO: 32789 - DNA, 6384 bp, Zea Mays
cgtgtctcttttctggacttgggaatctgagaggatactgtgcagtttaatggcacacactgctgactatatgcacatataatgatgcatgggcaaaccatgcttctctggtctagtggctattgagctgtgctctatgggaggtattgctgaatgtggtgtgagcattgacactaaagcttcaccacgtcgagcagccatagagaaagctcaggacgagctcaggcaggaatatgatgttcgtgaagaacgaaggagagagcttgaatttctggagaagggaggcaatcccttggatttcaaacttggccatgtagcttcccttagtgtacagtccacttctgtgacagaacagatagctgaacaaaatgtgataagtgaggccaaaggtagttctgcatttgctacatcacctcatggggattctgttgaaagtaacgacaagccaggaaattcattgtgccgtgaaggcaatacagccgataatattacgcttttggatggagatgccagcagcatgggtgtggataaaattgtgaaacgtggaacaaagagaactaattcagctcaagctgagcagttcctgcactgtgatggtcagaacaatgcaaaagaagaagattctgggttgtaccgtcttggtccaaagagccaagcgtatgcacgacgtaggtcaaagcctatcagagagaatgcatatagtgtatctgttaggtatccaccaattcctccattaagttctcagcaaaaagatgtgacaggattaatcccagaaaccaagactgaggataatggtgtttcatccattggtgattcaaaaccgactagtcctaactctaaaaatttggtgacaaatgcatcattactgaatgataaggtggaaatggagacagaaaatgttcaagcaattcctgaaggcaatcaagcaccgaaaaatgagttatcaaacagcaacaatggtagtcctgctattgagatttcaccaaacagtgtgccggataattctcgtcttactgtaagtgatcagatggttactgcatttgtttctgtggaatccccagatgctatttcaaaagtagctgcttcaaggatagtttgttctctcccatatatatccaatgaaatattgaaagaagcacaaactcttgagaaggcaggtaataacccatctatggtaagtgtggttgacgttcatgcatatggtatggataacaatggtgcagcaccttactctgctgtgaaaagtgctagtttgaatgaaaatgaagttgatccaattcatgaatatgctgccaaagctgttactgaacatccagaccaaaatgagaatcttgtaccagtgaatgcagatgaaatggctgatgaaggcttgaataagatcctacctgatgacaaggatgacaagaaagattgtcaactggaagttagtagtgggcctgtcattttgaatgacagttctactcctgtctatcctgaatttagcaattccttttatgcaagagatggaacagaagtttctaacaatgcagtagattcaaaaaataacgcagaacagcttgcttcttctaatcagggaaaagggaacatggaggaatgcaaagattctgacggaaacaatgcaagtgaattgagtgttgcccaaaagctagtgtctgttattgtgccccctgcttcagacgcaggcgatgtgagtaattttgtagaaaatgatgttgataaatctagcagagatcaggagaaggtagcaaagaaggaatatgaagattctgtcgtggcaaagaaggatcacgaagatgctatcctcagaagggcacggtatatagaggcaaatattaagagggctggtgaatggtctctctgcaatatttctttagagaagaagcagaagagccactgggattttgttctggaggagatggtctggatggcaaatgacttcacacaggagcgtttgtggaaaaatacagttgcagcacagatgtcccattggatttcttctagaggtcgagcggtatttgaagaagcaagcattcagagaaagcagaaatctgttgctagagttctagccaatggtattatgaacttttggtgttcagtccatactttacgagctagtggtggtattcctaaaccaataaaaatcgagcaaccgaatgagctagaggaaaataagcttggtgggttcaaatccggaaaagcgtgtgccagaatgcttagaccgtgcccagcagttcatccatatggtcacccaaaacacacttttgcactgttcatagagtggagtttgaatatgggtatagggatgtgtaagctgctggagatagccttaaaaacgtcatgcttatttgatgaggagtgtttggagcaagaaaagtcgcgccagtctcctattcagagctttgcacttaggtttcttgagtataacattaatgcatctgaatttctgccattagccgaagcaccatcaactcctgacaggctaaatgattttggcattttgaaagcaaatctcttttatggcgtagcacccggtgcaatgcaggcatacagggagtctatggaccgtctccttatttataataacaagatgtccctatggagaatgcatatggagatgacgaaagtgaggcacacacctacttattgcctggagcttataatggtggtttggcatcaaaaaatagtcacaaaaagaagcaccatttgcctcagaggatgaatggcgcaaggtcatatgaaattggtgttgacagtccttacgaaccactgtatttggaaagtaaatcaggaaaccagcaactcttatcgaatggcaaacaaacagacttcctctccattcctataaaacgcatccgcacagcagctaggcagcgggttgtgagtccatttcctgctggtgcttctgggacccctcaattcacaaataaaacggacgcatctagtggagatacaaactcctgtcaagatgatcaaagttcattacatggagggtcattttctaggaagaatgcagatatagagtccactgttgattttgacaggcaattgttgtatgatggtagtgaggtgtcgacaaaatctaaaaagaagaaaaagactaagcacccagggtacaaggcactaccaaatgtgtccgaatcttgttcgttgagggctcctggaaagggcaattatgatcatagatctcagatcgatatgatagctcagtatgagcagaaggattatattaaaaagagacaggagacaaatgggaattttggtgttattgatttatcaacagtggttaatggcctacatgctgctaagaagcctaaattgttgaatcaagcaccagatatttcactggaagctcttaaaccaattggtccaatggcctctcttgctgcatcacaaatgagcaacatggcaaatcctacgagggttataaaaatcagcacccgtggaagaaaaagtaaaggactcaagatgcgagctggtcattcaggtcctggaagtccatggtcaagttttgaggatcaggctcttgttgtccttgtccatgatatgggtgaaaactgggaattggttagtgatgcccttaacagcatcatccaattgaagtgcatatacagaaggcctaatgagtgtaaggaacgccataaacttctcaccgatagaagttgtggcgacggtgctgacagcgctgatgactcaggctcatctcaacactatccttctgcattgcctgggattccaaagggtagtgcaaggcaactgtttcagcgccttcaaggaccgtttgaggaagggactctcaagacacacttcgagaaaataatattgcttggtcaaaaattgcatcaaactcgtagaaaggatgagatccatgagctgaggcaaaaaaatccacttcatacttctcatggttttgcactttctcaagcatgtccagggaacttatctggtgtcattttgacgccacttgacctttgcgatggaccttcgaactcggatgcacttacaggatccaatacaagtgggttaggtctttcaaacaataactgctctgttggtcctactcttcctacatcaaatatgaacttaagattaccaggttctcctggtatggttttgggaagcaattcaccattgcctttgaatgctccctctagggatgttcagaggtatggtgtgcctagaccaacctcgatacagggtgacgagcaatcaagaattcattataaccagatggtaaatggcagaaaccttcagcaacctggagttcctgttcctggtgtgttgccatctggtgttgatcggggtgcccgaatgatgccacctgcccatggtgttggaatcatggctggactaaatcgaggtacacctattactaggccaggttttccaaggcttggttctcttggaaacatgtcacccaccgatggtcaaggcttaaaaaatactgtaaacgttcatcctggtgccatactgggacctggaagtactatgttgaggccacgtgacccaatgcagatgtttagacctggccagaattcagaggagcatagacagatgatgatgccagagtttcagttacaagtctcgcaaggaaataatcatgctgtgcatttcagcggtccaccatattccaacactggggcatcttcacctgttcaatctttacctgcccagcagtcccaaccacatcagatgccacaacaatcacacatgtatggaaacacacaccttcttcatacccaaggaacaaaccagtcaaatccacagcaacagcaggcttatgctatgcgcttggccaaagagaggcatatgcaacagatgatgccccaacaacagcgtccattatctgttgccagtgcagtgtcagctgtacagaatggctcaccgatgcaacagcagagccaaggatctgcaacttgcgtaatcccagctacacagacacaacataagcagcaatatcctgcacaaaatgcacaagataactcaatgcttccccatcagccttcagccaccactacacataaacagaagaagcaacagggccagcagcagcctagacaaaatcaacagcaacgaaatcaaggcagtcaacaagctaagcttatgaagagtttaggccgagggaacatgatgcagcagagtcctgtggatgttattcaagcaagtggcatatcaacaagctgtaaagatcaagttcctgataagaatatgatgcaacagggtccagggcattttgttgtaagtaaaggatcaatcccattgatacctcaacctgggaatcaaccaaatgtatacacttctcagatgcctccgtctccaatgcagacaccggatattagtaatcagggtgcagtcaagggttcttccaaccatgccttgttaacttcccagcaaggttcactccatacgccttcacagttggcacagcagcagcagcagcaactacggttcatgaatccgtcacagaataatatgcaaaggttgataatgcaacagaatcggcatgtgaacacagatggcaggattgagttacctgctgaccaagtacagcataaccaggtaatgtcatctgcctcacttgcaagaagtacagattcaggcagcccaggaatctcatctataagccagcggaaacaagagtcatctcatgacccaagtgcaattacctcaacctcgcagctagctagctcacctcaagacacctttgttggaagtgatagggtgttgccatcatccagccaaagcatgccgcaaaggcaaatgtccggtggtgtgcctgtacatggatatggcattggtggccaggtgcagctacaacagtctcggcagcaactccagtctcagcagcagcagcagcagcagcagaggcctgttgtccaaggtggtgtatatgctcacccctcaaattcaggacaaggatgatgctgaaccatactgggcctgcatttctgaagagcctcccttccccttgtaaagttacctgtacaggcgtccgtgctgtggaagatgtgtgcggatgatagtgctctttattcccaactttgagctaactgtagcctcctcggtgtcaggtagataattatttctcctcaccattttggtgccacactgctaccttccatgtagtttgaccctaggttgctggaggtggttcttgtgagggcaaactccttgagtcgtcaaattgtaaccacgacactgggcccagttgtatatttttgccgttgaggtccatgttagaggcaatctcttttgtataagcctgtatattcagctcacaagccagtcaatgaatgcaaagcctttctttgcgtcaaaccaggaatgtaaaaagcttgagcgttttgcgtcgatcacttatcttaacttgtcgtattcaactccgtc

SEQ ID NO: 32790 - DNA, 3527 bp, Zea Mays
atgggcaaaccatgcttctctggtctagtggctattgagctgtgctctatgggaggtattgctgaatgtggtgtgagcattgacactaaagcttcaccacgtcgagcagccatagagaaagctcaggacgagctcaggcaggaatatgatgttcgtgaagaacgaaggagagagcttgaatttctggagaagggaggcaatcccttggatttcaaacttggccatgtagcttcccttagtgtacagtccacttctgtgacagaacagatagctgaacaaaatgtgataagtgaggccaaaggtagttctgcatttgctacatcacctcatggggattctgttgaaagtaacgacaagccaggaaattcattgtgccgtgaaggcaatacagccgataatattacgcttttggatggagatgccagcagcatgggtgtggataaaattgtgaaacgtggaacaaagagaactaattcagctcaagctgagcagttcctgcactgtgatggtcagaacaatgcaaaagaagaagattctgggttgtaccgtcttggtccaaagagccaagcgtatgcacgacgtaggtcaaagcctatcagagagaatgcatatagtgtatctgttaggtatccaccaattcctccattaagttctcagcaaaaagatgtgacaggattaatcccagaaaccaagactgaggataatggtgtttcatccattggtgattcaaaaccgactagtcctaactctaaaaatttggtgacaaatgcatcattactgaatgataaggtggaaatggagacagaaaatgttcaagcaattcctgaaggcaatcaagcaccgaaaaatgagttatcaaacagcaacaatggtagtcctgctattgagatttcaccaaacagtgtgccggataattctcgtcttactgtaagtgatcagatggttactgcatttgtttctgtggaatccccagatgctatttcaaaagtagctgcttcaaggatagtttgttctctcccatatatatccaatgaaatattgaaagaagcacaaactcttgagaaggcaggtaataacccatctatggtaagtgtggttgacgttcatgcatatggtatggataacaatggtgcagcaccttactctgctgtgaaaagtgctagtttgaatgaaaatgaagttgatccaattcatgaatatgctgccaaagctgttactgaacatccagaccaaaatgagaatcttgtaccagtgaatgcagatgaaatggctgatgaaggcttgaataagatcctacctgatgacaaggatgacaagaaagattgtcaactggaagttagtagtgggcctgtcattttgaatgacagttctactcctgtctatcctgaatttagcaattccttttatgcaagagatggaacagaagtttctaacaatgcagtagattcaaaaaataacgcagaacagcttgcttcttctaatcagggaaaagggaacatggaggaatgcaaagattctgacggaaacaatgcaagtgaattgagtgttgcccaaaagctagtgtctgttattgtgccccctgcttcagacgcaggcgatgtgagtaattttgtagaaaatgatgttgataaatctagcagagatcaggagaaggtagcaaagaaggaatatgaagattctgtcgtggcaaagaaggatcacgaagatgctatcctcagaagggcacggtatatagaggcaaatattaagagggctggtgaatggtctctctgcaatatttctttagagaagaagcagaagagccactgggattttgttctggaggagatggtctggatggcaaatgacttcacacaggagcgtttgtggaaaaatacagttgcagcacagatgtcccattggatttcttctagaggtcgagcggtatttgaagaagcaagcattcagagaaagcagaaatctgttgctagagttctagccaatggtattatgaacttttggtgttcagtccatactttacgagctagtggtggtattcctaaaccaataaaaatcgagcaaccgaatgagctagaggaaaataagcttggtgggttcaaatccggaaaagcgtgtgccagaatgcttagaccgtgcccagcagttcatccatatggtcacccaaaacacacttttgcactgttcatagagtggagtttgaatatgggtatagggatgtgtaagctgctggagatagccttaaaaacgtcatgcttatttgatgaggagtgtttggagcaagaaaagtcgcgccagtctcctattcagagctttgcacttaggtttcttgagtataacattaatgcatctgaatttctgccattagccgaagcaccatcaactcctgacaggctaaatgattttggcattttgaaagcaaatctcttttatggcgtagcacccggtgcaatgcaggcatacagggagtctatggaccgtctccttatttataataacaagatgtccctatggagaatgcatatggagatgacgaaagtgaggcacacacctacttattgcctggagcttataatggtggtttggcatcaaaaaatagtcacaaaaagaagcaccatttgcctcagaggatgaatggcgcaaggtcatatgaaattggtgttgacagtccttacgaaccactgtatttggaaagtaaatcaggaaaccagcaactcttatcgaatggcaaacaaacagacttcctctccattcctataaaacgcatccgcacagcagctaggcagcgggttgtgagtccatttcctgctggtgcttctgggacccctcaattcacaaataaaacggacgcatctagtggagatacaaactcctgtcaagatgatcaaagttcattacatggagggtcattttctaggaagaatgcagatatagagtccactgttgattttgacaggcaattgttgtatgatggtagtgaggtgtcgacaaaatctaaaaagaagaaaaagactaagcacccagggtacaaggcactaccaaatgtgtccgaatcttgttcgttgagggctcctggaaagggcaattatgatcatagatctcagatcgatatgatagctcagtatgagcagaaggattatattaaaaagagacaggagacaaatgggaattttggtgttattgatttatcaacagtggttaatggcctacatgctgctaagaagcctaaattgttgaatcaagcaccagatatttcactggaagctcttaaaccaattggtccaatggcctctcttgctgcatcacaaatgagcaacatggcaaatcctacgagggttataaaaatcagcacccgtggaagaaaaagtaaaggactcaagatgcgagctggtcattcaggtcctggaagtccatggtcaagttttgaggatcaggctcttgttgtccttgtccatgatatgggtgaaaactgggaattggttagtgatgcccttaacagcatcatccaattgaagggctttggatcttaa

SEQ ID NO: 32791 - DNA, 1215 bp, Zea Mays
ctcaaatttgggtgcctattcgcacaatgccatctaccctaggcaaatctcttttatggcgtagcacccggtgcaatgcaggcatacagggagtctatggaccgtctccttatttataataacaagaaaattggtgacactgtactcaaggatgattatgagccatcaacatatgcatctgtcacagatgtccctatggagaatgcatatggagatgacgaaagtgaggcacacacctacttattgcctggagcttataatggtggtttggcatcaaaaaatagtcacaaaaagaagcaccatttgcctcagaggatgaatggcgcaaggtcatatgaaattggtgttgacagtccttacgaaccactgtatttggaaagtaaatcaggaaaccagcaactcttatcgaatggcaaacaaacagacttcctctccattcctataaaacgcatccgcacagcagctaggcagcgggttgtgagtccatttcctgctggtgcttctgggacccctcaattcacaaataaaacggacgcatctagtggagatacaaactcctgtcaagatgatcaaagttcattacatggagggtcattttctaggaagaatgcagatatagagtccactgttgattttgacaggcaattgttgtatgatggtagtgaggtgtcgacaaaatctaaaaagaagaaaaagactaagcacccagggtacaaggcactaccaaatgtgtccgaatcttgttcgttgagggctcctggaaagggcaattatgatcatagatctcagatcgatatgatagctcagtatgagcagaaggattatattaaaaagagacaggagacaaatgggaattttggtgttattgatttatcaacagtggttaatggcctacatgctgctaagaagcctaaattgttgaatcaagcaccagatatttcactggaagctcttaaaccaattggtccaatggcctctcttgctgcatcacaaatgagcaacatggcaaatcctacgagggttataaaaatcagcacccgtggaagaaaaagtaaaggactcaagatgcgagctggtcattcaggtcctggaagtccatggtcaagttttgaggatcaggctcttgttgtccttgtccatgatatgggtgaaaactgggaattggttagtgatgcccttaacagcatcatccaattgaagggctttggatcttaa

SEQ ID NO: 32792 - DNA, 1165 bp, Zea Mays
ccatctaccctaggcaaatctcttttatggcgtagcacccggtgcaatgcaggcatacagggagtctatggaccgtctccttatttataataacaagaaaattggtgacactgtactcaaggatgattatgagccatcaacatatgcatctgtcacagatgtccctatggagaatgcatatggagatgacgaaagtgaggcacacacctacttattgcctggagcttataatggtggtttggcatcaaaaaatagtcacaaaaagaagcaccatttgcctcagaggatgaatggcgcaaggtcatatgaaattggtgttgacagtccttacgaaccactgtatttggaaagtaaatcaggaaaccagcaactcttatcgaatggcaaacaaacagacttcctctccattcctataaaacgcatccgcacagcagctaggcagcgggttgtgagtccatttcctgctggtgcttctgggacccctcaattcacaaataaaacggacgcatctagtggagatacaaactcctgtcaagatgatcaaagttcattacatggagggtcattttctaggaagaatgcagatatagagtccactgttgattttgacaggcaattgttgtatgatggtagtgaggtgtcgacaaaatctaaaaagaagaaaaagactaagcacccagggtacaaggcactaccaaatgtgtccgaatcttgttcgttgagggctcctggaaagggcaattatgatcatagatctcagatcgatatgatagctcagtatgagcagaaggattatattaaaaagagacaggagacaaatgggaattttgtggttaatggcctacatgctgctaagaagcctaaattgttgaatcaagcaccagatatttcactggaagctcttaaaccaattggtccaatggcctctcttgctgcatcacaaatgagcaacatggcaaatcctacgagggttataaaaatcagcacccgtggaagaaaaagtaaaggactcaagatgcgagctggtcattcaggtcctggaagtccatggtcaagttttgaggatcaggctcttgttgtccttgtccatgatatgggtgaaaactgggaattggttagtgatgcccttaacagcatcatccaattgaagggctttggatcttaa

SEQ ID NO: 32793 - DNA, 2715 bp, Zea Mays
ccggaacggcccgtcgcgcgtcctgtcgtgccgcgcgcaccaccttctcctccctcctcttcttccccaggaaaaaacacctcgcctgcatacggacgacgcaccaccaagcccctgcccccgcaaccccgctgcaccgcgcccgatctctgtcgtcgacaccgccgcctccggcgaggccctttccgctcttgaggtttccacaggttcattccctgctcaatcgggcgccccatttggctccctctgccccccacagacccgtagggttgcatttcaggaaacagcgtgtctcttttctggacttgggaatctgagaagatactgtgcagtttaatggcacacactgctgactatatgcgcatataatgatgcatgggctaactgtgcttctctggtctagtggctattgagctgtgctctatgggaggtattgctgaatgtggtgtgagcattgacactaaagcttcaccacgccgtgcagccatagagaaagctcaggaggagctcaggcaggaatatgatgtccgtgaagaacgaaggagagagcttgaatttcttgagaagggaggcaatcccttggatttcaaacttggccatgtagcttcccttagtgtacagtccacttctgtgacagaacagatagctgaacaaaatgtgataagtgaggccaaaggtagttctgcatttgctacgtcatctcatggagattctgttgaaagcaacgacaagccaggaaattcattgtgccgtgaaggcaatacagccgataatcttacgcttttggatggagatgccagcaacctgggtgtggataaaattgtgaaacatggaactaagagaactaattcagctcaagctgagcagttcctgcactgtgatggtcagaacaatgcaaaagaagaagattctgggttgttccgtcttggtccaaagagccaagcgtatgcacgacgtaggtcaaagcctatcagagaaaatgcatatagtctatctgttatgtacccaccaattcctccattaagttctcagcaaaaagatgtgacaggattaatcccagaaaccaagactgaggataatggtgtttcatccattggtgattcaaaaccgactagtcctaactctaaaaatatggtgacaaatgcatcattactgaatgataaggtggaaatggagacagaaaatgttcaagcaattcctgaaggcaatcaagcaccaaaaaacgagttatcaaacagcaacaatggtagtcctgctatggagatttcaccaaatagtgtgcctgataattctcgtcttactgtaagtgatcagatggctactgcatttgtttctgtggaatccccagatgctatttcaaaagtagctgcttcaaggatagtttgttctctcccatatatatccaatgaaatattgaaagaagcacaaactcttgagaaggcagtgaatgcagatgaaatggctgatgaaggcttgaatgagatcctacctgatgacaaggatgacaagaaagattgtcaactggaagttagtagtgggcctgtcattttgaatgacagttctactcctgtctatcctgaatttagcaatttcttttatgcaaaagatggaacagaagtttctaacaatgcagtagattcaaaaaataacgcagaacagcatgcttcttctaatcagggaaaagggaacatggaggaatgtaaagattctgatggaaacaatgcaagtgaatcgagtgttgcccaaaagctagtgtctgttattgtgctccctgcttcagacacaggcgatgtgagtaactttgtagaaaatgatgttgagaaatctagcagagatcaggagaaggtagcaaagaaggaatatgaagattctgtcgtggcaaagaaggatcacgaagatgctatcctcagaagggcacggtatatagaggcaaatattaagagggctggtgaatggtctctctgcaatatttctctagagaagaagcagaagagccactgggattttgttctggaggagatggtctggatggcaaatgacttcacacaggagcgtttgtggaaaaatacagtcgcagcacagatgtcccattggatttcttctagaggtcgagcggcatttgaagaagcaagcattcagagaaagcagaaatctgttgctagagttctagccaatggtattatgaacttttggtgttcagtccatactttacgagctagtggtggtattcctaaaccaatgcaaatacagcaaccgaatgagctagaggaaaataagcttggtggggtcaaaaccagaaaagcggatgaggagtgtttggagcaagaaaagtcccgtcagtctcctattcagagctttgcacttaggcttcttgagtataacattaatgcatctgaatttctgccattagccgaagcaccatcaactcctgacaggctaaatgattttggcattttgaaagtacctgatcaactttcagaagcaaatctcttttatggcgtagcacccggtgcaatgcaggcatacagggagtctatggagcgtctccttatttataataacaagatgccagctggtcattcaggtcctggaagtccatggtcaagttttgaggatcaggctcttgttgtccttgtccatgatatgggtgaaaactgggaattggttagcgatgcccttaacagcatcatccaattgaagggctttggatcttaa

SEQ ID NO: 32794 - DNA, 2824 bp, Zea Mays
ccggaacggcccgtcgcgcgtcctgtcgtgccgcgcgcaccaccttctcctccctcctcttcttccccaggaaaaaacacctcgcctgcatacggacgacgcaccaccaagcccctgcccccgcaaccccgctgcaccgcgcccgatctctgtcgtcgacaccgccgcctccggcgaggccctttccgctcttgaggtttccacaggaaacagcgtgtctcttttctggacttgggaatctgagaagatactgtgcagtttaatggcacacactgctgactatatgcgcatataatgatgcatgggctaactgtgcttctctggtctagtggctattgagctgtgctctatgggaggtattgctgaatgtggtgtgagcattgacactaaagcttcaccacgccgtgcagccatagagaaagctcaggaggagctcaggcaggaatatgatgtccgtgaagaacgaaggagagagcttgaatttcttgagaagggaggcaatcccttggatttcaaacttggccatgtagcttcccttagtgtacagtccacttctgtgacagaacagatagctgaacaaaatgtgataagtgaggccaaaggtagttctgcatttgctacgtcatctcatggagattctgttgaaagcaacgacaagccaggaaattcattgtgccgtgaaggcaatacagccgataatcttacgcttttggatggagatgccagcaacctgggtgtggataaaattgtgaaacatggaactaagagaactaattcagctcaagctgagcagttcctgcactgtgatggtcagaacaatgcaaaagaagaagattctgggttgttccgtcttggtccaaagagccaagcgtatgcacgacgtaggtcaaagcctatcagagaaaatgcatatagtctatctgttatgtacccaccaattcctccattaagttctcagcaaaaagatgtgacaggattaatcccagaaaccaagactgaggataatggtgtttcatccattggtgattcaaaaccgactagtcctaactctaaaaatatggtgacaaatgcatcattactgaatgataaggtggaaatggagacagaaaatgttcaagcaattcctgaaggcaatcaagcaccaaaaaacgagttatcaaacagcaacaatggtagtcctgctatggagatttcaccaaatagtgtgcctgataattctcgtcttactgtaagtgatcagatggctactgcatttgtttctgtggaatccccagatgctatttcaaaagtagctgcttcaaggatagtttgttctctcccatatatatccaatgaaatattgaaagaagcacaaactcttgagaaggcaggtaataacccatctatggtaagtgtggttgacgttcatgcatatggtatggataacaatggtgcagcaccttactctgctgtgaaaagtgctagtttgaatgaaaatgaagttgatccaattcatgcatatgctgccaaagctgttactgaacatccagaccaaaatgagaatcttgtaccagtgaatgcagatgaaatggctgatgaaggcttgaatgagatcctacctgatgacaaggatgacaagaaagattgtcaactggaagttagtagtgggcctgtcattttgaatgacagttctactcctgtctatcctgaatttagcaatttcttttatgcaaaagatggaacagaagtttctaacaatgcagtagattcaaaaaataacgcagaacagcatgcttcttctaatcagggaaaagggaacatggaggaatgtaaagattctgatggaaacaatgcaagtgaatcgagtgttgcccaaaagctagtgtctgttattgtgctccctgcttcagacacaggcgatgtgagtaactttgtagaaaatgatgttgagaaatctagcagagatcaggagaaggtagcaaagaaggaatatgaagattctgtcgtggcaaagaaggatcacgaagatgctatcctcagaagggcacggtatatagaggcaaatattaagagggctggtgaatggtctctctgcaatatttctctagagaagaagcagaagagccactgggattttgttctggaggagatggtctggatggcaaatgacttcacacaggagcgtttgtggaaaaatacagtcgcagcacagatgtcccattggatttcttctagaggtcgagcggcatttgaagaagcaagcattcagagaaagcagaaatctgttgctagagttctagccaatggtattatgaacttttggtgttcagtccatactttacgagctagtggtggtattcctaaaccaatgcaaatacagcaaccgaatgagctagaggaaaataagcttggtggggtcaaaaccagaaaagcggatgaggagtgtttggagcaagaaaagtcccgtcagtctcctattcagagctttgcacttaggcttcttgagtataacattaatgcatctgaatttctgccattagccgaagcaccatcaactcctgacaggctaaatgattttggcattttgaaagtacctgatcaactttcagaagcaaatctcttttatggcgtagcacccggtgcaatgcaggcatacagggagtctatggagcgtctccttatttataataacaagatgccagctggtcattcaggtcctggaagtccatggtcaagttttgaggatcaggctcttgttgtccttgtccatgatatgggtgaaaactgggaattggttagcgatgcccttaacagcatcatccaattgaagggctttggatcttaa

SEQ ID NO: 32795 - DNA, 2671 bp, Zea Mays
ctcctccctcctcttcttccccaggaaaaaacacctcgcctgcatacggacgacgcaccaccaagcccctgcccccgcaaccccgctgcaccgcgcccgatctctgtcgtcgacaccgccgcctccggcgaggccctttccgctcttgaggtttccacaggaaacagcgtgtctcttttctggacttgggaatctgagaagatactgtgcagtttaatggcacacactgctgactatatgcgcatataatgatgcatgggctaactgtgcttctctggtctagtggctattgagctgtgctctatgggaggtattgctgaatgtggtgtgagcattgacactaaagcttcaccacgccgtgcagccatagagaaagctcaggaggagctcaggcaggaatatgatgtccgtgaagaacgaaggagagagcttgaatttcttgagaaggtttgcattgtcatccttatggtttgcacattgaatttgcgtcagaacttttttccttgtttgtttacttattgttgcagggaggcaatcccttggatttcaaacttggccatgtagcttcccttagtgtacagtccacttctgtgacagaacagatagctgaacaaaatgtgataagtgaggccaaaggtagttctgcatttgctacgtcatctcatggagattctgttgaaagcaacgacaagccaggaaattcattgtgccgtgaaggcaatacagccgataatcttacgcttttggatggagatgccagcaacctgggtgtggataaaattgtgaaacatggaactaagagaactaattcagctcaagctgagcagttcctgcactgtgatggtcagaacaatgcaaaagaagaagattctgggttgttccgtcttggtccaaagagccaagcgtatgcacgacgtaggtcaaagcctatcagagaaaatgcatatagtctatctgttatgtacccaccaattcctccattaagttctcagcaaaaagatgtgacaggattaatcccagaaaccaagactgaggataatggtgtttcatccattggtgattcaaaaccgactagtcctaactctaaaaatatggtgacaaatgcatcattactgaatgataaggtggaaatggagacagaaaatgttcaagcaattcctgaaggcaatcaagcaccaaaaaacgagttatcaaacagcaacaatggtagtcctgctatggagatttcaccaaatagtgtgcctgataattctcgtcttactgtaagtgatcagatggctactgcatttgtttctgtggaatccccagatgctatttcaaaagtagctgcttcaaggatagtttgttctctcccatatatatccaatgaaatattgaaagaagcacaaactcttgagaaggcaggtaataacccatctatggtaagtgtggttgacgttcatgcatatggtatggataacaatggtgcagcaccttactctgctgtgaaaagtgctagtttgaatgaaaatgaagttgatccaattcatgcatatgctgccaaagctgttactgaacatccagaccaaaatgagaatcttgtaccagtgaatgcagatgaaatggctgatgaaggcttgaatgagatcctacctgatgacaaggatgacaagaaagattgtcaactggaagttagtagtgggcctgtcattttgaatgacagttctactcctgtctatcctgaatttagcaatttcttttatgcaaaagatggaacagaagtttctaacaatgcagtagattcaaaaaataacgcagaacagcatgcttcttctaatcagggaaaagggaacatggaggaatgtaaagattctgatggaaacaatgcaagtgaatcgagtgttgcccaaaagctagtgtctgttattgtgctccctgcttcagacacaggcgatgtgagtaactttgtagaaaatgatgttgagaaatctagcagagatcaggagaaggtagcaaagaaggaatatgaagattctgtcgtggcaaagaaggatcacgaagatgctatcctcagaagggcacggtatatagaggcaaatattaagagggctggtgaatggtctctctgcaatatttctctagagaagaagcagaagagccactgggattttgttctggaggagatggtctggatggcaaatgacttcacacaggagcgtttgtggaaaaatacagtcgcagcacagatgtcccattggatttcttctagaggtcgagcggcatttgaagaagcaagcattcagagaaagcagaaatctgttgctagagttctagccaatggtattatgaacttttggtgttcagtccatactttacgagctagtggtggtattcctaaaccaatgcaaatacagcaaccgaatgagctagaggaaaataagcttggtggggtcaaaaccagaaaagcggatgaggagtgtttggagcaagaaaagtcccgtcagtctcctattcagagctttgcacttaggcttcttgagtataacattaatgcatctgaatttctgccattagccgaagcaccatcaactcctgacaggctaaatgattttggcattttgaaagtacctgatcaactttcagaattggtgggagacttgggttacatctctcagacttgtgtctcctttgg

SEQ ID NO: 32796 - DNA, 2827 bp, Zea Mays
ccctcctcttcttccccaggaaaaaacacctcgcctgcatacggacgacgcaccaccaagcccctgcccccgcaaccccgctgcaccgcgcccgatctctgtcgtcgacaccgccgcctccggcgaggccctttccgctcttgaggtttccacaggtgtctctcagcctccgcaccctgcctcgtgggtttccccgggctcccctgccccaaaccctaaccctagctcctggcgtggggccgtgcaggttcattccctgctcaatcgggcgccccatttggctccctctgccccccacagacccgtagggttgcatttcaggaatatgatgtccgtgaagaacgaaggagagagcttgaatttcttgagaagggaggcaatcccttggatttcaaacttggccatgtagcttcccttagtgtacagtccacttctgtgacagaacagatagctgaacaaaatgtgataagtgaggccaaaggtagttctgcatttgctacgtcatctcatggagattctgttgaaagcaacgacaagccaggaaattcattgtgccgtgaaggcaatacagccgataatcttacgcttttggatggagatgccagcaacctgggtgtggataaaattgtgaaacatggaactaagagaactaattcagctcaagctgagcagttcctgcactgtgatggtcagaacaatgcaaaagaagaagattctgggttgttccgtcttggtccaaagagccaagcgtatgcacgacgtaggtcaaagcctatcagagaaaatgcatatagtctatctgttatgtacccaccaattcctccattaagttctcagcaaaaagatgtgacaggattaatcccagaaaccaagactgaggataatggtgtttcatccattggtgattcaaaaccgactagtcctaactctaaaaatatggtgacaaatgcatcattactgaatgataaggtggaaatggagacagaaaatgttcaagcaattcctgaaggcaatcaagcaccaaaaaacgagttatcaaacagcaacaatggtagtcctgctatggagatttcaccaaatagtgtgcctgataattctcgtcttactgtaagtgatcagatggctactgcatttgtttctgtggaatccccagatgctatttcaaaagtagctgcttcaaggatagtttgttctctcccatatatatccaatgaaatattgaaagaagcacaaactcttgagaaggcaggtaataacccatctatggtaagtgtggttgacgttcatgcatatggtatggataacaatggtgcagcaccttactctgctgtgaaaagtgctagtttgaatgaaaatgaagttgatccaattcatgcatatgctgccaaagctgttactgaacatccagaccaaaatgagaatcttgtaccagtgaatgcagatgaaatggctgatgaaggcttgaatgagatcctacctgatgacaaggatgacaagaaagattgtcaactggaagttagtagtgggcctgtcattttgaatgacagttctactcctgtctatcctgaatttagcaatttcttttatgcaaaagatggaacagaagtttctaacaatgcagtagattcaaaaaataacgcagaacagcatgcttcttctaatcagggaaaagggaacatggaggaatgtaaagattctgatggaaacaatgcaagtgaatcgagtgttgcccaaaagctagtgtctgttattgtgctccctgcttcagacacaggcgatgtgagtaactttgtagaaaatgatgttgagaaatctagcagagatcaggagaaggtagcaaagaaggaatatgaagattctgtcgtggcaaagaaggatcacgaagatgctatcctcagaagggcacggtatatagaggcaaatattaagagggctggtgaatggtctctctgcaatatttctctagagaagaagcagaagagccactgggattttgttctggaggagatggtctggatggcaaatgacttcacacaggagcgtttgtggaaaaatacagtcgcagcacagatgtcccattggatttcttctagaggtcgagcggcatttgaagaagcaagcattcagagaaagcagaaatctgttgctagagttctagccaatggtattatgaacttttggtgttcagtccatactttacgagctagtggtggtattcctaaaccaatgcaaatacagcaaccgaatgagctagaggaaaataagcttggtggggtcaaaaccagaaaagcggatgaggagtgtttggagcaagaaaagtcccgtcagtctcctattcagagctttgcacttaggcttcttgagtataacattaatgcatctgaatttctgccattagccgaagcaccatcaactcctgacaggctaaatgattttggcattttgaaagtacctgatcaactttcagaagcaaatctcttttatggcgtagcacccggtgcaatgcaggcatacagggagtctatggagcgtctccttatttataataacaagatgccagctggtcattcaggtcctggaagtccatggtcaagttttgaggatcaggctcttgttgtccttgtccatgatatgggtgaaaactgggaattggttagcgatgcccttaacagcatcatccaattgaagtgcatatacagacggcctaatgagtgtaaggaacgccataaacttctcacggataaaagttgtggcgacggtgctgacagcgctgatgactcaggctcatctcaacactatccttctgcattgcctgggattccaaagg

SEQ ID NO: 32797 - DNA, 2821 bp, Zea Mays
ctcctcttcttccccaggaaaaaacacctcgcctgcatacggacgacgcaccaccaagcccctgcccccgcaaccccgctgcaccgcgcccgatctctgtcgtcgacaccgccgcctccggcgaggccctttccgctcttgaggtttccacaggaaacagcgtgtctcttttctggacttgggaatctgagaagatactgtgcagtttaatggcacacactgctgactatatgcgcatataatgatgcatgggctaactgtgcttctctggtctagtggctattgagctgtgctctatgggaggtattgctgaatgtggtgtgagcattgacactaaagcttcaccacgccgtgcagccatagagaaagctcaggaggagctcaggcaggaatatgatgtccgtgaagaacgaaggagagagcttgaatttcttgagaagggaggcaatcccttggatttcaaacttggccatgtagcttcccttagtgtacagtccacttctgtgacagaacagatagctgaacaaaatgtgataagtgaggccaaaggtagttctgcatttgctacgtcatctcatggagattctgttgaaagcaacgacaagccaggaaattcattgtgccgtgaaggcaatacagccgataatcttacgcttttggatggagatgccagcaacctgggtgtggataaaattgtgaaacatggaactaagagaactaattcagctcaagctgagcagttcctgcactgtgatggtcagaacaatgcaaaagaagaagattctgggttgttccgtcttggtccaaagagccaagcgtatgcacgacgtaggtcaaagcctatcagagaaaatgcatatagtctatctgttatgtacccaccaattcctccattaagttctcagcaaaaagatgtgacaggattaatcccagaaaccaagactgaggataatggtgtttcatccattggtgattcaaaaccgactagtcctaactctaaaaatatggtgacaaatgcatcattactgaatgataaggtggaaatggagacagaaaatgttcaagcaattcctgaaggcaatcaagcaccaaaaaacgagttatcaaacagcaacaatggtagtcctgctatggagatttcaccaaatagtgtgcctgataattctcgtcttactgtaagtgatcagatggctactgcatttgtttctgtggaatccccagatgctatttcaaaagtagctgcttcaaggatagtttgttctctcccatatatatccaatgaaatattgaaagaagcacaaactcttgagaaggcaggtaataacccatctatggtaagtgtggttgacgttcatgcatatggtatggataacaatggtgcagcaccttactctgctgtgaaaagtgctagtttgaatgaaaatgaagttgatccaattcatgcatatgctgccaaagctgttactgaacatccagaccaaaatgagaatcttgtaccagtgaatgcagatgaaatggctgatgaaggcttgaatgagatcctacctgatgacaaggatgacaagaaagattgtcaactggaagttagtagtgggcctgtcattttgaatgacagttctactcctgtctatcctgaatttagcaatttcttttatgcaaaagatggaacagaagtttctaacaatgcagtagattcaaaaaataacgcagaacagcatgcttcttctaatcagggaaaagggaacatggaggaatgtaaagattctgatggaaacaatgcaagtgaatcgagtgttgcccaaaagctagtgtctgttattgtgctccctgcttcagacacaggcgatgtgagtaactttgtagaaaatgatgttgagaaatctagcagagatcaggagaaggtagcaaagaaggaatatgaagattctgtcgtggcaaagaaggatcacgaagatgctatcctcagaagggcacggtatatagaggcaaatattaagagggctggtgaatggtctctctgcaatatttctctagagaagaagcagaagagccactgggattttgttctggaggagatggtctggatggcaaatgacttcacacaggagcgtttgtggaaaaatacagtcgcagcacagatgtcccattggatttcttctagaggtcgagcggcatttgaagaagcaagcattcagagaaagcagaaatctgttgctagagttctagccaatgcaaccgaatgagctagaggaaaataagcttggtggggtcaaaaccagaaaagcggatgaggagtgtttggagcaagaaaagtcccgtcagtctcctattcagagctttgcacttaggcttcttgagtataacattaatgcatctgaatttctgccattagccgaagcaccatcaactcctgacaggctaaatgattttggcattttgaaagtacctgatcaactttcagaagcaaatctcttttatggcgtagcacccggtgcaatgcaggcatacagggagtctatggagcgtctccttatttataataacaagatgccagctggtcattcaggtcctggaagtccatggtcaagttttgaggatcaggctcttgttgtccttgtccatgatatgggtgaaaactgggaattggttagcgatgcccttaacagcatcatccaattgaagtgcatatacagacggcctaatgagtgtaaggaacgccataaacttctcacggataaaagttgtggcgacggtgctgacagcgctgatgactcaggctcatctcaacactatccttctgcattgcctgggattccaaagg

SEQ ID NO: 32798 - DNA, 2964 bp, Zea Mays
cttcttccccaggaaaaaacacctcgcctgcatacggacgacgcaccaccaagcccctgcccccgcaaccccgctgcaccgcgcccgatctctgtcgtcgacaccgccgcctccggcgaggccctttccgctcttgaggtttccacaggttcattccctgctcaatcgggcgccccatttggctccctctgccccccacagacccgtagggttgcatttcaggaaacagcgtgtctcttttctggacttgggaatctgagaagatactgtgcagtttaatggcacacactgctgactatatgcgcatataatgatgcatgggctaactgtgcttctctggtctagtggctattgagctgtgctctatgggaggtattgctgaatgtggtgtgagcattgacactaaagcttcaccacgccgtgcagccatagagaaagctcaggaggagctcaggcaggaatatgatgtccgtgaagaacgaaggagagagcttgaatttcttgagaagggaggcaatcccttggatttcaaacttggccatgtagcttcccttagtgtacagtccacttctgtgacagaacagatagctgaacaaaatgtgataagtgaggccaaaggtagttctgcatttgctacgtcatctcatggagattctgttgaaagcaacgacaagccaggaaattcattgtgccgtgaaggcaatacagccgataatcttacgcttttggatggagatgccagcaacctgggtgtggataaaattgtgaaacatggaactaagagaactaattcagctcaagctgagcagttcctgcactgtgatggtcagaacaatgcaaaagaagaagattctgggttgttccgtcttggtccaaagagccaagcgtatgcacgacgtaggtcaaagcctatcagagaaaatgcatatagtctatctgttatgtacccaccaattcctccattaagttctcagcaaaaagatgtgacaggattaatcccagaaaccaagactgaggataatggtgtttcatccattggtgattcaaaaccgactagtcctaactctaaaaatatggtgacaaatgcatcattactgaatgataaggtggaaatggagacagaaaatgttcaagcaattcctgaaggcaatcaagcaccaaaaaacgagttatcaaacagcaacaatggtagtcctgctatggagatttcaccaaatagtgtgcctgataattctcgtcttactgtaagtgatcagatggctactgcatttgtttctgtggaatccccagatgctatttcaaaagtagctgcttcaaggatagtttgttctctcccatatatatccaatgaaatattgaaagaagcacaaactcttgagaaggcaggtaataacccatctatggtaagtgtggttgacgttcatgcatatggtatggataacaatggtgcagcaccttactctgctgtgaaaagtgctagtttgaatgaaaatgaagttgatccaattcatgcatatgctgccaaagctgttactgaacatccagaccaaaatgagaatcttgtaccagtgaatgcagatgaaatggctgatgaaggcttgaatgagatcctacctgatgacaaggatgacaagaaagattgtcaactggaagttagtagtgggcctgtcattttgaatgacagttctactcctgtctatcctgaatttagcaatttcttttatgcaaaagatggaacagaagtttctaacaatgcagtagattcaaaaaataacgcagaacagcatgcttcttctaatcagggaaaagggaacatggaggaatgtaaagattctgatggaaacaatgcaagtgaatcgagtgttgcccaaaagctagtgtctgttattgtgctccctgcttcagacacaggcgatgtgagtaactttgtagaaaatgatgttgagaaatctagcagagatcaggagaaggtagcaaagaaggaatatgaagattctgtcgtggcaaagaaggatcacgaagatgctatcctcagaagggcacggtatatagaggcaaatattaagagggctggtgaatggtctctctgcaatatttctctagagaagaagcagaagagccactgggattttgttctggaggagatggtctggatggcaaatgacttcacacaggagcgtttgtggaaaaatacagtcgcagcacagatgtcccattggatttcttctagaggtcgagcggcatttgaagaagcaagcattcagagaaagcagaaatctgttgctagagttctagccaatggtattatgaacttttggtgttcagtccatactttacgagctagtggtggtattcctaaaccaatgcaaatacagcaaccgaatgagctagaggaaaataagcttggtggggtcaaaaccagaaaagcggatgaggagtgtttggagcaagaaaagtcccgtcagtctcctattcagagctttgcacttaggcttcttgagtataacattaatgcatctgaatttctgccattagccgaagcaccatcaactcctgacaggctaaatgattttggcattttgaaagtacctgatcaactttcagaagcaaatctcttttatggcgtagcacccggtgcaatgcaggcatacagggagtctatggagcgtctccttatttataataacaagatgccagctggtcattcaggtcctggaagtccatggtcaagttttgaggatcaggctcttgttgtccttgtccatgatatgggtgaaaactgggaattggttagcgatgcccttaacagcatcatccaattgaagtgcatatacagacggcctaatgagtgtaaggaacgccataaacttctcacggataaaagttgtggcgacggtgctgacagcgctgatgactcaggctcatctcaacactatccttctgcattgcctgggattccaaagg

SEQ ID NO: 32799 - DNA, 1451 bp, Zea Mays
tttttattttgaaatggctttcagtagacaatactcgtggctttctattaaaaatatttgtggattcacttaaaatcatttttggattttttaaacaaataattcaacgaaatctttcagtaccctatctacattatttaaagacgccatagaataaggtgtgccaacgatcaaaatgaaaattactgagatgtcccctcggacacacagtggtcaaccgacgccgccggttggtgcccggatccttgtccgccctcctgctcactccactcgcctgccagccgcacaccaatcacctctgcggccggcggcgtctgcaacgccagtctctgatccgaccccgatcggcacacacgttctccatggcggagcagctcgcatcccaagatgctcccaatccccctgctccggcacagagggtactgatgacgaacacgcatggggagaaactcgtcggcctgctgcaccacatggggtctgacaaggttgtagttctctgccatggctttacgggctccaaggactatagcctcatcactgaccttgcggccgcactaacaaagcaagggattagtgtgtttcgctttgattttagtggaaatggagaaagtgaaggtgaattccagtacggcaactacaagaaggaggctgctgacttgcactctgttgtcttgtatcttcgccaggagaagtacgacgtagcagcaattgttggtcacagcaaaggtggagatgtggtcgttctatatgcctctatctacaaggatgtccccatggtggttaacctctctggccggtttcatttggagaaaggcattgaggagcgcctaggcaaagagtttatggatagaataaacaaggaaggctacatcgatgccaaagacaaatcagagtaaccaaggagagcttgatggaacggctgagccatgatttgcacgcaacgagcctttccatcagcaaagagtgcaggttctttacaattcacggttcagctgacgagatcatacccgtggaagatgcgtatgagtttgcaaggcttataccaaaccacaagctgcgtgtcatcgagggagcaaatcactgctacactgctcaccgtagagaactttctgatgccgtagtagaagccatcacaaccagtgaggcaggggagaccacaccctagatctgatgcagaacggcagcctgcctttccaatcctgcaatgccgctcttccatctcagtcacattgccttgtcacaatttttaaaagaaaacgagttctttgaaaatatcgtttgaatctagacgttgttaactcgttgtatcatgacatccttaatgctacgtttggacatcgatattggagagtatgaaattgaattgggttgaataccgaatcagacgtgataatgaaataagatgtaatttcaattctattgtttggatgttactgaattggagtttggaa

SEQ ID NO: 32800 - DNA, 3388 bp, Zea Mays
ccccacgccatcacgctctctcatacatacccctccagtcctagatcttcgcggccctttcttgtggacacacattttttttgttcaagaaaagcgatgggcttggtggttaatcagcacttgcttctccaatcccaaaggccaaatatagagcaagaagatctcatgcgatcgcgaagcaccataaagaagagagtgatactgatacctccctcagtgtcatcttgtgccctcagtgacagtgagtggcgcttcactaccggagtccgtccttccggtgggcggtggcagtggcacctgcttccactggagtggagggaaagcaccgaaaggcgcggctttttttacctctctctcgctttgcttgccccttcttttcacttccctccctccctccctttcctctcctccccgctccatggcccccgcggcgccagcgggcctggcctccgtcgcggtcgcggtcgcggttgccgtgctcgccgccgcggcgtcggcggccgtcacctacgaccgcaaggccgtcgtggtgaacggccagcgccggatcctgatgtccggctccatccactacccaaggagcgtccccgagatgtggccggatctgatacagaaggccaaggacggcggcctcgacgtcgtgcagacgtacgtcttctggaacggccatgagccctcccgtcgacagtactacttcgagggtcggtatgatctggtgcacttcatcaagctggtgaagcaggccggactctacgtgcacctccgcattggcccctacgtctgcgccgagtggaatttcggtggtttccctgtttggctcaagtatgtcccgggcattagctttaggactgataatgaaccgttcaagaatttcaccacaaagatcgttgacatgatgaagtccgaagggctctttgaatggcagggagggccaataattctttcccagattgagaatgaatttgggcccttggagtgggatcagggagagcccgccaaggcctatgcgtcatgggcagctaacatggcggttgcgctcaacacaagtgttccatgggtcatgtgcaaagaagatgatgccccggatccaattattaatacttgcaatggattttattgtgactggttctccccaaacaaacctcacaagcctacaatgtggactgaggcttggacatcttggtatacaggatttggtattccagttccacatagaccagtagaggatctagcatatggtgtggccaagtttattcagaagggtggctcttttgttaattattacatgtatcatggtggaacaaattttgggcgcacagctggtggtccattcattgcaactagctacgactatgatgctcctattgatgaatatggtttgctgagagaaccgaaatggggtcacttgaaggagttgcataaagctatcaagctttgtgaaccagcattggttgcaggagacccaattgtaacttcacttggcaatgctcagcaggcatctgtttttagatcaagcaccgatgcctgtgtggccttccttgagaacaaggataaagtatcttatgctagggtatcattcaatggaatgcattatgatctacctccctggtccataagtattctcccagactgcaaaacaacagtctacaacaccgccagcgttggaagtcagatttcacaaatgaaaatggaatgggctggaggattcacatggcaatcatacaatgaggatataaactccttgggtgacgaatcatttgcaacagttggattactggaacagataaatgtgacaagggataacacagactacttatggtatacaacatacgttgatattgctcaggatgagcagtttctcagcaatgggaagaatcctatgctaactgttatgtcagctggtcatgctttgcatattttcgttaatggacaactaacagggactgtgtatggaagcgtagaagatccaaaattgacatatagtggaaatgtgaaactttggtcaggcagtaacactatttcatgcttaagtatagcagttggtctcccgaatgtgggagaacattttgagacttggaatgctggaattctaggtcctgtgacactggatggcctaaatgagggaagaagagatctcacatggcagaaatggacctataaggttggtctgaaaggtgaggctttgagtcttcattcacttagtggcagctcttcagtagagtggggagaacctgttcagaagcagcctctgtcatggtacaaggctttcttcaatgcacctgatggtgatgagccattagctttggatatgagtagcatgggtaaaggtcaaatctggataaatggacaaggtattggaaggtactggcctggctacaaagcttctggaacctgtgggatctgtgattaccgtggagagtatgatgaaaagaagtgccaaaccaactgtggtgactcttctcagagatggtaccatgttcctcgttcatggcttaatccgacggggaaccttttggtgatatttgaggagtggggcggtgatcctaccggaatttcgatggtgaaaagaatagcagggagtatctgcgctgatgtctccgaatggcagccatcgatggcaaactggcgaacaaaaggctatgagaaagccaaggtccacctccagtgtgatcatggacggaaaatgactcacataaaatttgccagctttggcacaccacagggctcctgcgggagctactctgaaggcggttgccatgcacacaagtcatacgacatattttggaagagctgcattggtcaagagcgctgtggggtaagcgtggttccagatgcatttggtggagatccatgccctgggactatgaaaagagccgttgttgaggctatatgcggctgagtcatatgatccatataacgtactggtttctacaataatgttaccctatatcaagctggcaagaggtgaaagtggcggcaactgcgacacacggattgccagggtttacaggaattagttgtatgttagatttaagcatcgtatgtgtatgtaacttaggtcacatgagacttgcatggaagaagtggttaggaccctagctgtgagaaactaagtcttgtagctctctacacagtagaattggtctggcaggtgagggtgcagatgagactctgctttattacctgagtccatgtgcgcggtggctcttgggttggagattgccaaaaggccagcaattggctttgcattatctggtcattcatttttttggtcattggagggtgcaatgtaaatgttcagggtcaatcatttatgaatttttctagctagtaatgaaacagtaaagaaaatgttggttcagattataaaacaccagttatcttccat

SEQ ID NO: 32801 - DNA, 3377 bp, Zea Mays
ccggagtccgtccttccggtgggcggtggcagtggcacctgcttccactggagtggagggaaagcaccgaaaggcgcggctttttttacctctctctcgctttgcttgccccttcttttcacttccctccctccctccctttcctctcctccccgctccatggcccccgcggcgccagcgggcctggcctccgtcgcggtcgcggtcgcggttgccgtgctcgccgccgcggcgtcggcggccgtcacctacgaccgcaaggccgtcgtggtgaacggccagcgccggatcctgatgtccggctccatccactacccaaggagcgtccccgagatgtggccggatctgatacagaaggccaaggacggcggcctcgacgtcgtgcagacgtacgtcttctggaacggccatgagccctcccgtcgacagtactacttcgagggtcggtatgatctggtgcacttcatcaagctggtgaagcaggccggactctacgtgcacctccgcattggcccctacgtctgcgccgagtggaatttcggtggtttccctgtttggctcaagtatgtcccgggcattagctttaggactgataatgaaccgttcaagaatttcaccacaaagatcgttgacatgatgaagtccgaagggctctttgaatggcagggagggccaataattctttcccagattgagaatgaatttgggcccttggagtgggatcagggagagcccgccaaggcctatgcgtcatgggcagctaacatggcggttgcgctcaacacaagtgttccatgggtcatgtgcaaagaagatgatgccccggatccaattattaatacttgcaatggattttattgtgactggttctccccaaacaaacctcacaagcctacaatgtggactgaggcttggacatcttggtatacaggatttggtattccagttccacatagaccagtagaggatctagcatatggtgtggccaagtttattcagaagggtggctcttttgttaattattacatgtatcatggtggaacaaattttgggcgcacagctggtggtccattcattgcaactagctacgactatgatgctcctattgatgaatatggtgagctgaacacattctactttggtaaaaggcatgcattatacagtttgcatcaacctcctctcatgtttgctgagagaaccgaaatggggtcacttgaaggagttgcataaagctatcaagctttgtgaaccagcattggttgcaggagacccaattgtaacttcacttggcaatgctcagcaggcatctgtttttagatcaagcaccgatgcctgtgtggccttccttgagaacaaggataaagtatcttatgctagggtatcattcaatggaatgcattatgatctacctccctggtccataagtattctcccagactgcaaaacaacagtctacaacaccgccagcgtgagattgggcacctgattctttttgttcattctacaacttccttttgttcttattttaattgggttgctttcttaaattgtatggcttccctaatattgagttcatacaacatttccttggtgctattgtactgtataattcttggcaaaaaactttttatactgatatgtttatacaggttggaagtcagatttcacaaatgaaaatggaatgggctggaggattcacatggcaatcatacaatgaggatataaactccttgggtgacgaatcatttgcaacagttggattactggaacagataaatgtgacaagggataacacagactacttatggtatacaacatacgttgatattgctcaggatgagcagtttctcagcaatgggaagaatcctatgctaactgttatgtcagctggtcatgctttgcatattttcgttaatggacaactaacagggactgtgtatggaagcgtagaagatccaaaattgacatatagtggaaatgtgaaactttggtcaggcagtaacactatttcatgcttaagtatagcagttggtctcccgaatgtgggagaacattttgagacttggaatgctggaattctaggtcctgtgacactggatggcctaaatgagggaagaagagatctcacatggcagaaatggacctataaggttggtctgaaaggtgaggctttgagtcttcattcacttagtggcagctcttcagtagagtggggagaacctgttcagaagcagcctctgtcatggtacaaggctttcttcaatgcacctgatggtgatgagccattagctttggatatgagtagcatgggtaaaggtcaaatctggataaatggacaaggtattggaaggtactggcctggctacaaagcttctggaacctgtgggatctgtgattaccgtggagagtatgatgaaaagaagtgccaaaccaactgtggtgactcttctcagagatggtaccatgttcctcgttcatggcttaatccgacggggaaccttttggtgatatttgaggagtggggcggtgatcctaccggaatttcgatggtgaaaagaatagcagggagtatctgcgctgatgtctccgaatggcagccatcgatggcaaactggcgaacaaaaggctatgagaaagccaaggtccacctccagtgtgatcatggacggaaaatgactcacataaaatttgccagctttggcacaccacagggctcctgcgggagctactctgaaggcggttgccatgcacacaagtcatacgacatattttggaagagctgcattggtcaagagcgctgtggggtaagcgtggttccagatgcatttggtggagatccatgccctgggactatgaaaagagccgttgttgaggctatatgcggctgagtcatatgatccatataacgtactggtttctacaataatgttaccctatatcaagctggcaagaggtgaaagtggcggcaactgcgacacacggattgccagggtttacaggaattagttgtatgttagatttaagcatcgtatgtgtatgtaacttaggtcacatgagacttgcatggaagaagtggttaggaccctagctgtgagaaactaagtcttgtagctctctacacagtagaattggtctggcaggtgagggtgcagatgagactctgctttattacctgagtccatgtgcgcggtggctcttgggttggagattgccaaaaggccagcaattggctttgcattatctggtcattcatttttttggtcattggagggtgcaatgtaaatgttcagggtcaatcatttatgaatttttctagctagtaatgaaacagtaaagaaaatgttggttcagattataaaacaccagttatcttccat

SEQ ID NO: 32802 - DNA, 3383 bp, Zea Mays
cagtctagcttatttgctcagattatataatctaaccccttggattatgataatccataagcaagtgaggaggtgcttatttcagattatttttttctcacttcctcactaccctttcaagtttcctagaaattacccaccattgccattataatctaccgaatcgtttttgcgcctatcggatcggagaagcccgccgcccaacagaaacacgccagataatctgggtaaacaaacaggactactcagattatataatccaaattatataatccagattatataatcatccaaaaataatccagattatataatctattggggtaaacaaacaggcctttagttgtctctcgtatttggaatcgtttcaatgctcagggttatacatgacttaagtggtctaagctcctcaagttgagtccgacttcacatgagagcgaatttcagtctgttgaagcgcggggcagggttcagcagttttctcgttcgccgagcaccagatccacgctcctccatgccagatctgtggctatcagggatctggtacccccagcccttcctgggccccgctgtcctcgatgtggcccacggtggtggtgctgtgctgctgcttccgtgtgcgcgttcgcgggctccttgacgtgggctgctctcgtgtctggtgggcactgggcggcggctgcactgtcactagcgcttcggcaggcacgcggccatgcggctcctccctttgggggctggttctttgtggtgcagtggctcccaatcaggttcccgcgtctgccgcgcagctgtgggacacctccacattggctggtggctgcggccgctgttcctggcccacagtcgctgctttggtttgcggatctgaggctggtgttcggctcctgaatggctatgggtggcttgggcgggcctgtctagctgctgctggcgacgatggcatccttgacattatgttcctcccctcgggggcagatgtgcagatgccttaccgcctagatcacatccttgtggcagatggtttgccgccgtggttgtttggggctcgccttcggcaaatactttgccaccaatgcttgtggatgctcgtgtcatctccggttggattcttcatgtctttttatttttttttcacatgcttagcatattttttgggcgtcttggttgatgaccccctccccaactttttcttagtgttctaggttactttgggttgtctaccactgttttggtggtttgtaacctgcgctaattctattctaaatgaaacacatgccaaggcatgttcatgaaaaaatgtttttgcaatcaaaagcaaatgcatctagcacaatttcattactttgacggaatacattggggcatttggtttgctgagagaaccgaaatggggtcacttgaaggagttgcataaagctatcaagctttgtgaaccagcattggttgcaggagacccaattgtaacttcacttggcaatgctcagcaggcatctgtttttagatcaagcaccgatgcctgtgtggccttccttgagaacaaggataaagtatcttatgctagggtatcattcaatggaatgcattatgatctacctccctggtccataagtattctcccagactgcaaaacaacagtctacaacaccgccagcgttggaagtcagatttcacaaatgaaaatggaatgggctggaggattcacatggcaatcatacaatgaggatataaactccttgggtgacgaatcatttgcaacagttggattactggaacagataaatgtgacaagggataacacagactacttatggtatacaacatacgttgatattgctcaggatgagcagtttctcagcaatgggaagaatcctatgctaactgttatgtcagctggtcatgctttgcatattttcgttaatggacaactaacagggactgtgtatggaagcgtagaagatccaaaattgacatatagtggaaatgtgaaactttggtcaggcagtaacactatttcatgcttaagtatagcagttggtctcccgaatgtgggagaacattttgagacttggaatgctggaattctaggtcctgtgacactggatggcctaaatgagggaagaagagatctcacatggcagaaatggacctataaggttggtctgaaaggtgaggctttgagtcttcattcacttagtggcagctcttcagtagagtggggagaacctgttcagaagcagcctctgtcatggtacaaggctttcttcaatgcacctgatggtgatgagccattagctttggatatgagtagcatgggtaaaggtcaaatctggataaatggacaaggtattggaaggtactggcctggctacaaagcttctggaacctgtgggatctgtgattaccgtggagagtatgatgaaaagaagtgccaaaccaactgtggtgactcttctcagagatggtaccatgttcctcgttcatggcttaatccgacggggaaccttttggtgatatttgaggagtggggcggtgatcctaccggaatttcgatggtgaaaagaatagcagggagtatctgcgctgatgtctccgaatggcagccatcgatggcaaactggcgaacaaaaggctatgagaaagccaaggtccacctccagtgtgatcatggacggaaaatgactcacataaaatttgccagctttggcacaccacagggctcctgcgggagctactctgaaggcggttgccatgcacacaagtcatacgacatattttggaagagctgcattggtcaagagcgctgtggggtaagcgtggttccagatgcatttggtggagatccatgccctgggactatgaaaagagccgttgttgaggctatatgcggctgagtcatatgatccatataacgtactggtttctacaataatgttaccctatatcaagctggcaagaggtgaaagtggcggcaactgcgacacacggattgccagggtttacaggaattagttgtatgttagatttaagcatcgtatgtgtatgtaacttaggtcacatgagacttgcatggaagaagtggttaggaccctagctgtgagaaactaagtcttgtagctctctacacagtagaattggtctggcaggtgagggtgcagatgagactctgctttattacctgagtccatgtgcgcggtggctcttgggttggagattgccaaaaggccagcaattggctttgcattatctggtcattcatttttttggtcattggagggtgcaatgtaaatgttcagggtcaatcatttatgaatttttctagctagtaatgaaacagtaaagaaaatgttggttcagattataaaacaccagttatcttccat

SEQ ID NO: 32803 - DNA, 3115 bp, Zea Mays
cagtctagcttatttgctcagattatataatctaaccccttggattatgataatccataagcaagtgaggaggtgcttatttcagattatttttttctcacttcctcactaccctttcaagtttcctagaaattacccaccattgccattataatctaccgaatcgtttttgcgcctatcggatcggagaagcccgccgcccaacagaaacacgccagataatctgggtaaacaaacaggactactcagattatataatccaaattatataatccagattatataatcatccaaaaataatccagattatataatctattggggtaaacaaacaggcctttagttgtctctcgtatttggaatcgtttcaatgctcagggttatacatgacttaagtggtctaagctcctcaagttgagtccgacttcacatgagagcgaatttcagtctgttgaagcgcggggcagggttcagcagttttctcgttcgccgagcaccagatccacgctcctccatgccagatctgtggctatcagggatctggtacccccagcccttcctgggccccgctgtcctcgatgtggcccacggtggtggtgctgtgctgctgcttccgtgtgcgcgttcgcgggctccttgacgtgggctgctctcgtgtctggtgggcactgggcggcggctgcactgtcactagcgcttcggcaggcacgcggccatgcggctcctccctttgggggctggttctttgtggtgcagtggctcccaatcaggttcccgcgtctgccgcgcagctgtgggacacctccacattggctggtggctgcggccgctgttcctggcccacagtcgctgctttggtttgcggatctgaggctggtgttcggctcctgaatggctatgggtggcttgggcgggcctgtctagctgctgctggcgacgatggcatccttgacattatgttcctcccctcgggggcagatgtgcagatgccttaccgcctagatcacatccttgtggcagatggtttgccgccgtggttgtttggggctcgccttcggcaaatactttgccaccaatgcttgtggatgctcgtgtcatctccggtttgctgagagaaccgaaatggggtcacttgaaggagttgcataaagctatcaagctttgtgaaccagcattggttgcaggagacccaattgtaacttcacttggcaatgctcagcaggcatctgtttttagatcaagcaccgatgcctgtgtggccttccttgagaacaaggataaagtatcttatgctagggtatcattcaatggaatgcattatgatctacctccctggtccataagtattctcccagactgcaaaacaacagtctacaacaccgccagcgttggaagtcagatttcacaaatgaaaatggaatgggctggaggattcacatggcaatcatacaatgaggatataaactccttgggtgacgaatcatttgcaacagttggattactggaacagataaatgtgacaagggataacacagactacttatggtatacaacatacgttgatattgctcaggatgagcagtttctcagcaatgggaagaatcctatgctaactgttatgtcagctggtcatgctttgcatattttcgttaatggacaactaacagggactgtgtatggaagcgtagaagatccaaaattgacatatagtggaaatgtgaaactttggtcaggcagtaacactatttcatgcttaagtatagcagttggtctcccgaatgtgggagaacattttgagacttggaatgctggaattctaggtcctgtgacactggatggcctaaatgagggaagaagagatctcacatggcagaaatggacctataaggttggtctgaaaggtgaggctttgagtcttcattcacttagtggcagctcttcagtagagtggggagaacctgttcagaagcagcctctgtcatggtacaaggctttcttcaatgcacctgatggtgatgagccattagctttggatatgagtagcatgggtaaaggtcaaatctggataaatggacaaggtattggaaggtactggcctggctacaaagcttctggaacctgtgggatctgtgattaccgtggagagtatgatgaaaagaagtgccaaaccaactgtggtgactcttctcagagatggtaccatgttcctcgttcatggcttaatccgacggggaaccttttggtgatatttgaggagtggggcggtgatcctaccggaatttcgatggtgaaaagaatagcagggagtatctgcgctgatgtctccgaatggcagccatcgatggcaaactggcgaacaaaaggctatgagaaagccaaggtccacctccagtgtgatcatggacggaaaatgactcacataaaatttgccagctttggcacaccacagggctcctgcgggagctactctgaaggcggttgccatgcacacaagtcatacgacatattttggaagagctgcattggtcaagagcgctgtggggtaagcgtggttccagatgcatttggtggagatccatgccctgggactatgaaaagagccgttgttgaggctatatgcggctgagtcatatgatccatataacgtactggtttctacaataatgttaccctatatcaagctggcaagaggtgaaagtggcggcaactgcgacacacggattgccagggtttacaggaattagttgtatgttagatttaagcatcgtatgtgtatgtaacttaggtcacatgagacttgcatggaagaagtggttaggaccctagctgtgagaaactaagtcttgtagctctctacacagtagaattggtctggcaggtgagggtgcagatgagactctgctttattacctgagtccatgtgcgcggtggctcttgggttggagattgccaaaaggccagcaattggctttgcattatctggtcattcatttttttggtcattggagggtgcaatgtaaatgttcagggtcaatcatttatgaatttttctagctagtaatgaaacagtaaagaaaatgttggttcagattataaaacaccagttatcttccat

SEQ ID NO: 32804 - DNA, 1159 bp, Zea Mays
catctttcctacaactgttaaattcaaggaagccatgaaagtggattgtgccctttgttatgaaacatggtgacagatatctgaagccatggataattccagtcccagaggtaacaatagttccgcgggctaaggatgacgagtgccttattcttgccagtgacggcctctgggatgtaatgtcaaatgaagaggtatgtgaaatcgctcgcaagcggatacttctgtggcacaaaaagaacagcacaagctcatcatcagccccacgggttggtgactccgcagactcagccgctcaagcggctgctgaatgcttgtcaaagcttgctcttcagaaggggagcaaagacaacattactgtcgtggtagttgatctgaaagcacagcgcaagttcaagagcaaaacttaaccgtgacaagcgtagcaacaagttgctaagaacctatagattcggacagtcccaagttcggtcattttagttcgctgctttagtgcattgcttagcccagttccttatttttctcagttctttttaagccatgccaagggctgtattccccgtatacggtacagatcgcgaaatccctatcagggatggtttggtgatatcagggtttatatgttttcctgaccgtggtgactgtcctgttttcattcttctttcttcgctgccctgtattcattttgtcaagctggggcaggcatccaagtatttggcaatgtatatttgagcttgcaggatacaaaggaaacgaattgttatgaagggtacgtatcctgcctgcctgaatttgggaatctatcaactgcatcagctggtaatataagtatggactcgcaatctggatactggtggagagaacctaatggtccagaagggctgagttgtgctaaaaaagtttgaggcaacaaccgtagtgtacataagtttctactcaacttctgcatggtaaagttttatgacaaaaaggatcatattaatgttgaaaaaatccttacggttaatgaagctaaagatgtcccctgaaaataagcaagatgaaactatgtaaagaaatatgctaagcaagtctacttagagttttacacaataattaacagtttagcacaaacaagggaacaactagataagcaacaagaataattaacagttcagag

SEQ ID NO: 32805 - DNA, 1917 bp, Zea Mays
atttaactaatccttttagagctaatccgtaaaagttattggtgacaagggatccaggaatcctcttattatttagttttaaatagtaaaaagattctttacctataaattctctccaatttcgctgtcaccacacctattattgatggggaccaaaacgtcacgcaactctgaccgagttcagatgggtccagattaaaaaggatgctaagctcgatgggtgtgtgtgattatataatggacattgtaaatccaggggagcgaaggaaaggcaaaggagaaaatttcgtagcaataaataaataaataaaattaataaaagaaaggtggcgtagaggataggaggagaaccaaggttgcgtctcgaaggttcttgcctcgttgggaagggatggcgtcggaggtggaggacgaggcggcgacgccgctgctcgccaacggtgcagccgacgtccgccggagggcgaaggcaattctgtccacgcaggccgtcaggatcgccaccaaggccgagcagcatgagcgcttcatctttaaggtcacacacttgctgggtgttcttggatttgggggattttgctatctcttgggtgccagaccacaggatgtgccatatgtgtactgcctgttctatgtcatatttgttccgctccgctggatttactaccgctacaagaaatggcattactaccttctggacttctgctactatgccaacacctttctccttgtaatgattctcttctacccagaggatgaaaaactttttatggtttgcttctcgtttgcagagggtccgcttgcttgggcattaattgtgtggcgttgcagcttggttttcagttcatttgacaaacttgttagtgtcctgatacatctcttacctgggattgttctattcactatccggtggtggaatccacaaacatttgctgccatgcacccagaaggaagagatgctagagtcacatggccatatgtggaggacaaatcatatctgtggacatggcttttttttgttccgctagctgcttacaccctgtggcaacttatgtatttcctcatagttaatgtcctgcgtcgacagaggttgttaagggaccctgaagtcatgacatcctacagggagctctcgaagaaagcacagaaagcgaacaacatctggtggaggctgagcggactgctgggtgaccggaaccggcaggtcatgtacatactgctccaggcgctgttcacagtggcaacaatggcactgaccgtacctatattcctgtcctaccggatgcacgtggtgttcctgatactcaaggtgtgcgcgtcgacatggaacggtggcagcttcatcttggaggtgatgcctcggcaagtagtgcagaagcagctgaagaaactggacatgaagcccatggaacaggggagctcgacacaaggtgcgccaggtggtgatggtggcacattgggtaaccaccaccagcacacatccgaggagcatatccaggagtgaggaaattgaagctggatgtaagattagattttgatgttcactgacacaacctttgttgtcatcgagtgcgctttgtgttggagtttttctttagttcttcccagtttgtgagttgtgacatctagtcatctataggtttataggctggacgatatggggtgagagattgtgcgtgcccatcttttgtcgggcttgggcaaagatatgtcgagatgtttactttctctgtagaatttcgtgaagctgttgcattgttcgtttgaagatggcgacgatgttcagatgatgcttcatgttgaaggacatatctttatttgcttcattgtacccagattttatttgcttcatgttgaaggacagactatgatgatgcgtgctgaggtgatttgcttattttatttgctgcgtgcaag

SEQ ID NO: 32806 - DNA, 1821 bp, Zea Mays
cacctattattgatggggaccaaaacgtcacgcaactctgaccgagttcagatgggtccagattaaaaaggatgctaagctcgatgggtgtgtgtgattatataatggacattgtaaatccaggggagcgaaggaaaggcaaaggagaaaatttcgtagcaataaataaataaataaaattaataaaagaaaggtggcgtagaggataggaggagaaccaaggttgcgtctcgaaggttcttgcctcgttgggaagggatggcgtcggaggtggaggacgaggcggcgacgccgctgctcgccaacggtgcagccgacgtccgccggaggagggaccaggcgaaggcaattctgtccacgcaggccgtcaggatcgccaccaaggccgagcagcatgagcgcttcatctttaaggtcacacacttgctgggtgttcttggatttgggggattttgctatctcttgggtgccagtaagctactgcagcattgatatatttggaccacaggatgtgccatatgtgtactgcctgttctatgtcatatttgttccgctccgctggatttactaccgctacaagaaatggcattactaccttctggacttctgctactatgccaacacctttctccttgtaatgattctcttctacccagaggatgaaaaactttttatggtttgcttctcgtttgcagagggtccgcttgcttgggcattaattgtgtggcgttgcagcttggttttcagttcatttgacaaacttgttagtgtcctgatacatctcttacctgggattgttctattcactatccggtggtggaatccacaaacatttgctgccatgcacccagaaggaagagatgctagagtcacatggccatatgtggaggacaaatcatatctgtggacatggcttttttttgttccgctagctgcttacaccctgtggcaacttatgtatttcctcatagttaatgtcctgcgtcgacagaggttgttaagggaccctgaagtcatgacatcctacagggagctctcgaagaaagcacagaaagcgaacaacatctggtggaggctgagcggactgctgggtgaccggaaccggcaggtcatgtacatactgctccaggcgctgttcacagtggcaacaatggcactgaccgtacctatattcctgtcctaccggatgcacgtggtgttcctgatactcaaggtgtgcgcgtcgacatggaacggtggcagcttcatcttggaggtgatgcctcggcaagtagtgcagaagcagctgaagaaactggacatgaagcccatggaacaggggagctcgacacaaggtgcgccaggtggtgatggtggcacattgggtaaccaccaccagcacacatccgaggagcatatccaggagtgaggaaattgaagctggatgtaagattagattttgatgttcactgacacaacctttgttgtcatcgagtgcgctttgtgttggagtttttctttagttcttcccagtttgtgagttgtgacatctagtcatctataggtttataggctggacgatatggggtgagagattgtgcgtgcccatcttttgtcgggcttgggcaaagatatgtcgagatgtttactttctctgtagaatttcgtgaagctgttgcattgttcgtttgaagatggcgacgatgttcagatgatgcttcatgttgaaggacatatctttatttgcttcattgtacccagattttatttgcttcatgttgaaggacagactatgatgatgcgtgctgaggtgatttgcttattttatttgctgcgtgcaag

SEQ ID NO: 32807 - DNA, 1782 bp, Zea Mays
ctattattgatggggaccaaaacgtcacgcaactctgaccgagttcagatgggtccagattaaaaaggatgctaagctcgatgggtgtgtgtgattatataatggacattgtaaatccaggggagcgaaggaaaggcaaaggagaaaatttcgtagcaataaataaataaataaaattaataaaagaaaggtggcgtagaggataggaggagaaccaaggttgcgtctcgaaggttcttgcctcgttgggaagggatggcgtcggaggtggaggacgaggcggcgacgccgctgctcgccaacggtgcagccgacgtccgccggaggagggaccaggcgaaggcaattctgtccacgcaggccgtcaggatcgccaccaaggccgagcagcatgagcgcttcatctttaaggtcacacacttgctgggtgttcttggatttgggggattttgctatctcttgggtgccagatgtgccatatgtgtactgcctgttctatgtcatatttgttccgctccgctggatttactaccgctacaagaaatggcattactaccttctggacttctgctactatgccaacacctttctccttgtaatgattctcttctacccagaggatgaaaaactttttatggtttgcttctcgtttgcagagggtccgcttgcttgggcattaattgtgtggcgttgcagcttggttttcagttcatttgacaaacttgttagtgtcctgatacatctcttacctgggattgttctattcactatccggtggtggaatccacaaacatttgctgccatgcacccagaaggaagagatgctagagtcacatggccatatgtggaggacaaatcatatctgtggacatggcttttttttgttccgctagctgcttacaccctgtggcaacttatgtatttcctcatagttaatgtcctgcgtcgacagaggttgttaagggaccctgaagtcatgacatcctacagggagctctcgaagaaagcacagaaagcgaacaacatctggtggaggctgagcggactgctgggtgaccggaaccggcaggtcatgtacatactgctccaggcgctgttcacagtggcaacaatggcactgaccgtacctatattcctgtcctaccggatgcacgtggtgttcctgatactcaaggtgtgcgcgtcgacatggaacggtggcagcttcatcttggaggtgatgcctcggcaagtagtgcagaagcagctgaagaaactggacatgaagcccatggaacaggggagctcgacacaaggtgcgccaggtggtgatggtggcacattgggtaaccaccaccagcacacatccgaggagcatatccaggagtgaggaaattgaagctggatgtaagattagattttgatgttcactgacacaacctttgttgtcatcgagtgcgctttgtgttggagtttttctttagttcttcccagtttgtgagttgtgacatctagtcatctataggtttataggctggacgatatggggtgagagattgtgcgtgcccatcttttgtcgggcttgggcaaagatatgtcgagatgtttactttctctgtagaatttcgtgaagctgttgcattgttcgtttgaagatggcgacgatgttcagatgatgcttcatgttgaaggacatatctttatttgcttcattgtacccagattttatttgcttcatgttgaaggacagactatgatgatgcgtgctgaggtgatttgcttattttatttgctgcgtgcaag

SEQ ID NO: 32808 - DNA, 1407 bp, Zea Mays
aactctgaccgagttcagatgggtccagattaaaaaggatgctaagctcgatgggtgtgtgtgattatataatggacattgtaaatccaggggagcgaaggaaaggcaaaggagaaaatttcgtagcaataaataaataaataaaattaataaaagaaaggtggcgtagaggataggaggagaaccaaggttgcgtctcgaaggttcttgcctcgttgggaagggatggcgtcggaggtggaggacgaggcggcgacgccgctgctcgccaacggtgcagccgacgtccgccggaggagggaccaggcgaaggcaattctgtccacgcaggccgtcaggatcgccaccaaggccgagcagcatgagcgcttcatctttaaggtcacacacttgctgggtgttcttggatttgggggattttgctatctcttgggtgccagaccacaggatgtgccatatgtgtactgcctgttctatgtcatatttgttccgctccgctggatttactaccgctacaagaaatggcattactaccttctggacttctgctactatgccaacacctttctccttgtaatgattctcttctacccagaggatgaaaaactttttatggtttgcttctcgtttgcagagggtccgcttgcttgggcattaattgtgtggcgttgcagcttggttttcagttcatttgacaaacttgttagtgtcctgatacatctcttacctgggattgttctattcactatccggtggtggaatccacaaacatttgctgccatgcacccagaaggaagagatgctagagtcacatggccatatgtggaggacaaatcatatctgtggacatggcttttttttgttccgctagctgcttacaccctgtggcaacttatgtatttcctcatagttaatgtcctgcgtcgacagaggttgttaagggaccctgaagtcatgacatcctacagggagctctcgaagaaagcacagaaagcgaacaacatctggtggaggctgagcggactgctgggtgaccggaaccggcaggtcatgtgtgcgcgtcgacatggaacggtggcagcttcatcttggaggagcatatccaggagtgaggaaattgaagctggatgtttataggctggacgatatggggtgagagattgtgcgtgcccatcttttgtcgggcttgggcaaagatatgtcgagatgtttactttctctgtagaatttcgtgaagctgttgcattgttcgtttgaagatggcgacgatgttcagatgatgcttcatgttgaaggacatatctttatttgcttcattgtacccagattttatttgcttcatgttgaaggacagactatgatgatgcgtgctgaggtgatttgcttattttatttgctgcgtgcaag

SEQ ID NO: 32809 - DNA, 903 bp, Zea Mays
ctctgaccgagttcagatgggtccagattaaaaaggatgctaagctcgatgggtgtgtgtgattatataatggacattgtaaatccaggggagcgaaggaaaggcaaaggagaaaatttcgtagcaataaataaataaataaaattaataaaagaaaggtggcgtagaggataggaggagaaccaaggttgcgtctcgaaggttcttgcctcgttgggaagggatggcgtcggaggtggaggacgaggcggcgacgccgctgctcgccaacggtgcagccgacgtccgccggaggagggaccaggcgaaggcaattctgtccacgcaggccgtcaggatcgccaccaaggccgagcagcatgagcgcttcatctttaaggtcacacacttgctgggtgttcttggatttgggggattttgctatctcttgggtgccagaccacaggatgtgccatatgtgtactgcctgttctatgtcatatttgttccgctccgctggatttactaccgctacaagaaatggcattactaccttctgggtccgcttgcttgggcattaattgtgtggcgttgcagcttggttttcagttcatttgacaaacttgttagtgtcctgatacatctcttacctgggattgttctattcactatccggtggtggaatccacaaacatttgctgccatgcacccagaaggaagagatgctagagtcacatggccatatgtggaggacaaatcatatctgtggacatggcttttttttgttccgctagctgcttacaccctgtggcaacttatgtatttcctcatagttaatgtcctgcgtcgacagaggttgttaagggaccctgaagtcatgacatcctacagggcaggtttatgaaacagcaagggagggaagat

SEQ ID NO: 32810 - DNA, 1692 bp, Zea Mays
ctctgaccgagttcagatgggtccagattaaaaaggatgctaagctcgatgggtgtgtgtgattatataatggacattgtaaatccaggggagcgaaggaaaggcaaaggagaaaatttcgtagcaataaataaataaataaaattaataaaagaaaggtggcgtagaggataggaggagaaccaaggttgcgtctcgaaggttcttgcctcgttgggaagggatggcgtcggaggtggaggacgaggcggcgacgccgctgctcgccaacggtgcagccgacgtccgccggaggagggaccaggcgaaggcaattctgtccacgcaggccgtcaggatcgccaccaaggccgagcagcatgagcgcttcatctttaaggatgtgccatatgtgtactgcctgttctatgtcatatttgttccgctccgctggatttactaccgctacaagaaatggcattactaccttctggacttctgctactatgccaacacctttctccttgtaatgattctcttctacccagaggatgaaaaactttttatggtttgcttctcgtttgcagagggtccgcttgcttgggcattaattgtgtggcgttgcagcttggttttcagttcatttgacaaacttgttagtgtcctgatacatctcttacctgggattgttctattcactatccggtggtggaatccacaaacatttgctgccatgcacccagaaggaagagatgctagagtcacatggccatatgtggaggacaaatcatatctgtggacatggcttttttttgttccgctagctgcttacaccctgtggcaacttatgtatttcctcatagttaatgtcctgcgtcgacagaggttgttaagggaccctgaagtcatgacatcctacagggagctctcgaagaaagcacagaaagcgaacaacatctggtggaggctgagcggactgctgggtgaccggaaccggcaggtcatgtacatactgctccaggcgctgttcacagtggcaacaatggcactgaccgtacctatattcctgtcctaccggatgcacgtggtgttcctgatactcaaggtgtgcgcgtcgacatggaacggtggcagcttcatcttggaggtgatgcctcggcaagtagtgcagaagcagctgaagaaactggacatgaagcccatggaacaggggagctcgacacaaggtgcgccaggtggtgatggtggcacattgggtaaccaccaccagcacacatccgaggagcatatccaggagtgaggaaattgaagctggatgtaagattagattttgatgttcactgacacaacctttgttgtcatcgagtgcgctttgtgttggagtttttctttagttcttcccagtttgtgagttgtgacatctagtcatctataggtttataggctggacgatatggggtgagagattgtgcgtgcccatcttttgtcgggcttgggcaaagatatgtcgagatgtttactttctctgtagaatttcgtgaagctgttgcattgttcgtttgaagatggcgacgatgttcagatgatgcttcatgttgaaggacatatctttatttgcttcattgtacccagattttatttgcttcatgttgaaggacagactatgatgatgcgtgctgaggtgatttgcttattttatttgctgcgtgcaag

SEQ ID NO: 32811 - DNA, 1935 bp, Zea Mays
ctaagctcgatgggtgtgtgtgattatataatggacattgtaaatccaggggagcgaaggaaaggcaaaggagaaaatttcgtagcaataaataaataaataaaattaataaaagaaaggtggcgtagaggataggaggagaaccaaggttgcgtctcgaaggttcttgcctcgttgggaagggatggcgtcggaggtggaggacgaggcggcgacgccgctgctcgccaacggtgcagccgacgtccgccggaggagggaccaggcgaaggcaattctgtccacgcaggccgtcaggatcgccaccaaggccgagcagcatgagcgcttcatctttaagccgtgctccctttccttgtcggaacccaagggaattgttggcctgcgtttttgcatgacaattttagtgggcattgtgtgatagtactgtgatgtaactgttccatgaatacgaggaaatattggcgatggatttttttttatcaagcattttagcggaaaggaataagtacctgcacgcactttgtgcatttattgttcgcaccgtactgcagaggtcacacacttgctgggtgttcttggatttgggggattttgctatctcttgggtgccagaccacaggatgtgccatatgtgtactgcctgttctatgtcatatttgttccgctccgctggatttactaccgctacaagaaatggcattactaccttctggacttctgctactatgccaacacctttctccttgtaatgattctcttctacccagaggatgaaaaactttttatggtttgcttctcgtttgcagagggtccgcttgcttgggcattaattgtgtggcgttgcagcttggttttcagttcatttgacaaacttgttagtgtcctgatacatctcttacctgggattgttctattcactatccggtggtggaatccacaaacatttgctgccatgcacccagaaggaagagatgctagagtcacatggccatatgtggaggacaaatcatatctgtggacatggcttttttttgttccgctagctgcttacaccctgtggcaacttatgtatttcctcatagttaatgtcctgcgtcgacagaggttgttaagggaccctgaagtcatgacatcctacagggagctctcgaagaaagcacagaaagcgaacaacatctggtggaggctgagcggactgctgggtgaccggaaccggcaggtcatgtacatactgctccaggcgctgttcacagtggcaacaatggcactgaccgtacctatattcctgtcctaccggatgcacgtggtgttcctgatactcaaggtgtgcgcgtcgacatggaacggtggcagcttcatcttggaggtgatgcctcggcaagtagtgcagaagcagctgaagaaactggacatgaagcccatggaacaggggagctcgacacaaggtgcgccaggtggtgatggtggcacattgggtaaccaccaccagcacacatccgaggagcatatccaggagtgaggaaattgaagctggatgtaagattagattttgatgttcactgacacaacctttgttgtcatcgagtgcgctttgtgttggagtttttctttagttcttcccagtttgtgagttgtgacatctagtcatctataggtttataggctggacgatatggggtgagagattgtgcgtgcccatcttttgtcgggcttgggcaaagatatgtcgagatgtttactttctctgtagaatttcgtgaagctgttgcattgttcgtttgaagatggcgacgatgttcagatgatgcttcatgttgaaggacatatctttatttgcttcattgtacccagattttatttgcttcatgttgaaggacagactatgatgatgcgtgctgaggtgatttgcttattttatttgctgcgtgcaag

SEQ ID NO: 32812 - DNA, 1740 bp, Zea Mays
gtgtgtgattatataatggacattgtaaatccaggggagcgaaggaaaggcaaaggagaaaatttcgtagcaataaataaataaataaaattaataaaagaaaggtggcgtagaggataggaggagaaccaaggttgcgtctcgaaggttcttgcctcgttgggaagggatggcgtcggaggtggaggacgaggcggcgacgccgctgctcgccaacggtgcagccgacgtccgccggaggagggaccaggcgaaggcaattctgtccacgcaggccgtcaggatcgccaccaaggccgagcagcatgagcgcttcatctttaaggtcacacacttgctgggtgttcttggatttgggggattttgctatctcttgggtgccagtaagctactgcagcattgatatatttggttggctggaccacaggatgtgccatatgtgtactgcctgttctatgtcatatttgttccgctccgctggatttactaccgctacaagaaatggcattactaccttctggacttctgctactatgccaacacctttctccttgtaatgattctcttctacccagaggatgaaaaactttttatggtttgcttctcgtttgcagagggtccgcttgcttgggcattaattgtgtggcgttgcagcttggttttcagttcatttgacaaacttgttagtgtcctgatacatctcttacctgggattgttctattcactatccggtggtggaatccacaaacatttgctgccatgcacccagaaggaagagatgctagagtcacatggccatatgtggaggacaaatcatatctgtggacatggcttttttttgttccgctagctgcttacaccctgtggcaacttatgtatttcctcatagttaatgtcctgcgtcgacagaggttgttaagggaccctgaagtcatgacatcctacagggagctctcgaagaaagcacagaaagcgaacaacatctggtggaggctgagcggactgctgggtgaccggaaccggcaggtcatgtacatactgctccaggcgctgttcacagtggcaacaatggcactgaccgtacctatattcctgtcctaccggatgcacgtggtgttcctgatactcaaggtgtgcgcgtcgacatggaacggtggcagcttcatcttggaggtgatgcctcggcaagtagtgcagaagcagctgaagaaactggacatgaagcccatggaacaggggagctcgacacaaggtgcgccaggtggtgatggtggcacattgggtaaccaccaccagcacacatccgaggagcatatccaggagtgaggaaattgaagctggatgtaagattagattttgatgttcactgacacaacctttgttgtcatcgagtgcgctttgtgttggagtttttctttagttcttcccagtttgtgagttgtgacatctagtcatctataggtttataggctggacgatatggggtgagagattgtgcgtgcccatcttttgtcgggcttgggcaaagatatgtcgagatgtttactttctctgtagaatttcgtgaagctgttgcattgttcgtttgaagatggcgacgatgttcagatgatgcttcatgttgaaggacatatctttatttgcttcattgtacccagattttatttgcttcatgttgaaggacagactatgatgatgcgtgctgaggtgatttgcttattttatttgctgcgtgcaag

SEQ ID NO: 32813 - DNA, 1739 bp, Zea Mays
gtgtgtgattatataatggacattgtaaatccaggggagcgaaggaaaggcaaaggagaaaatttcgtagcaataaataaataaataaaattaataaaagaaaggtggcgtagaggataggaggagaaccaaggttgcgtctcgaaggttcttgcctcgttgggaagggatggcgtcggaggtggaggacgaggcggcgacgccgctgctcgccaacggtgcagccgacgtccgccggaggagggaccaggcgaaggcaattctgtccacgcaggccgtcaggatcgccaccaaggccgagcagcatgagcgcttcatctttaaggtcacacacttgctgggtgttcttggatttgggggattttgctatctcttgggtgccagtaagctactgcagcattgatatatttggttggctgaccacaggatgtgccatatgtgtactgcctgttctatgtcatatttgttccgctccgctggatttactaccgctacaagaaatggcattactaccttctggacttctgctactatgccaacacctttctccttgtaatgattctcttctacccagaggatgaaaaactttttatggtttgcttctcgtttgcagagggtccgcttgcttgggcattaattgtgtggcgttgcagcttggttttcagttcatttgacaaacttgttagtgtcctgatacatctcttacctgggattgttctattcactatccggtggtggaatccacaaacatttgctgccatgcacccagaaggaagagatgctagagtcacatggccatatgtggaggacaaatcatatctgtggacatggcttttttttgttccgctagctgcttacaccctgtggcaacttatgtatttcctcatagttaatgtcctgcgtcgacagaggttgttaagggaccctgaagtcatgacatcctacagggagctctcgaagaaagcacagaaagcgaacaacatctggtggaggctgagcggactgctgggtgaccggaaccggcaggtcatgtacatactgctccaggcgctgttcacagtggcaacaatggcactgaccgtacctatattcctgtcctaccggatgcacgtggtgttcctgatactcaaggtgtgcgcgtcgacatggaacggtggcagcttcatcttggaggtgatgcctcggcaagtagtgcagaagcagctgaagaaactggacatgaagcccatggaacaggggagctcgacacaaggtgcgccaggtggtgatggtggcacattgggtaaccaccaccagcacacatccgaggagcatatccaggagtgaggaaattgaagctggatgtaagattagattttgatgttcactgacacaacctttgttgtcatcgagtgcgctttgtgttggagtttttctttagttcttcccagtttgtgagttgtgacatctagtcatctataggtttataggctggacgatatggggtgagagattgtgcgtgcccatcttttgtcgggcttgggcaaagatatgtcgagatgtttactttctctgtagaatttcgtgaagctgttgcattgttcgtttgaagatggcgacgatgttcagatgatgcttcatgttgaaggacatatctttatttgcttcattgtacccagattttatttgcttcatgttgaaggacagactatgatgatgcgtgctgaggtgatttgcttattttatttgctgcgtgcaag

SEQ ID NO: 32814 - DNA, 1536 bp, Zea Mays
aaaatttcgtagcaataaataaataaataaaattaataaaagaaaggtggcgtagaggataggaggagaaccaaggttgcgtctcgaaggttcttgcctcgttgggaagggatggcgtcggaggtggaggacgaggcggcgacgccgctgctcgccaacggtgcagccgacgtccgccggaggagggaccaggcgaaggcaattctgtccacgcaggccgtcaggatcgccaccaaggccgagcagcatgagcgcttcatctttaaggtcacacacttgctgggtgttcttggatttgggggattttgctatctcttgggtgccagtaagctactgcagcattgatatatttggaccacaggatgtgccatatgtgtactgcctgttctatgtcatatttgttccgctccgctggatttactaccgctacaagaaatggcattactaccttctggacttctgctactatgccaacacctttctccttgtaatgattctcttctacccagaggatgaaaaactttttatggtttgcttctcgtttgcagagcttggttttcagttcatttgacaaacttgttagtgtcctgatacatctcttacctgggattgttctattcactatccggtggtggaatccacaaacatttgctgccatgcacccagaaggaagagatgctagagtcacatggccatatgtggaggacaaatcatatctgtggacatggcttttttttgttccgctagctgcttacaccctgtggcaacttatgtatttcctcatagttaatgtcctgcgtcgacagaggttgttaagggaccctgaagtcatgacatcctacagggagctctcgaagaaagcacagaaagcgaacaacatctggtggaggctgagcggactgctgggtgaccggaaccggcaggtcatgtgtgcgcgtcgacatggaacggtggcagcttcatcttggaggtgatgcctcggcaagtagtgcagaagcagctgaagaaactggacatgaagcccatggaacaggggagctcgacacaaggtgcgccaggtggtgatggtggcacattgggtaaccaccaccagcacacatccgaggagcatatccaggagtgaggaaattgaagctggatgtaagattagattttgatgttcactgacacaacctttgttgtcatcgagtgcgctttgtgttggagtttttctttagttcttcccagtttgtgagttgtgacatctagtcatctataggtttataggctggacgatatggggtgagagattgtgcgtgcccatcttttgtcgggcttgggcaaagatatgtcgagatgtttactttctctgtagaatttcgtgaagctgttgcattgttcgtttgaagatggcgacgatgttcagatgatgcttcatgttgaaggacatatctttatttgcttcattgtacccagattttatttgcttcatgttgaaggacagactatgatgatgcgtgctgaggtgatttgcttattttatttgctgcgtgcaag

SEQ ID NO: 32815 - DNA, 1484 bp, Zea Mays
aaaatttcgtagcaataaataaataaataaaattaataaaagaaaggtggcgtagaggataggaggagaaccaaggttgcgtctcgaaggttcttgcctcgttgggaagggatggcgtcggaggtggaggacgaggcggcgacgccgctgctcgccaacggtgcagccgacgtccgccggaggagggaccaggcgaaggcaattctgtccacgcaggccgtcaggatcgccaccaaggccgagcagcatgagcgcttcatctttaaggtcacacacttgctgggtgttcttggatttgggggattttgctatctcttgggtgccagtaagctactgcagcattgatatatttggaccacaggatgtgccatatgtgtactgcctgttctatgtcatatttgttccgctccgctggatttactaccgctacaagaaatggcattactaccttctgggattgttctattcactatccggtggtggaatccacaaacatttgctgccatgcacccagaaggaagagatgctagagtcacatggccatatgtggaggacaaatcatatctgtggacatggcttttttttgttccgctagctgcttacaccctgtggcaacttatgtatttcctcatagttaatgtcctgcgtcgacagaggttgttaagggaccctgaagtcatgacatcctacagggagctctcgaagaaagcacagaaagcgaacaacatctggtggaggctgagcggactgctgggtgaccggaaccggcaggtcatgtacatactgctccaggcgctgttcacagtggcaacaatggcactgaccgtacctatattcctgtcctaccggatgcacgtggtgttcctgatactcaaggtgtgcgcgtcgacatggaacggtggcagcttcatcttggaggtgatgcctcggcaagtagtgcagaagcagctgaagaaactggacatgaagcccatggaacaggggagctcgacacaaggtgcgccaggtggtgatggtggcacattgggtaaccaccaccagcacacatccgaggagcatatccaggagtgaggaaattgaagctggatgtaagattagattttgatgttcactgacacaacctttgttgtcatcgagtgcgctttgtgttggagtttttctttagttcttcccagtttgtgagttgtgacatctagtcatctataggtttataggctggacgatatggggtgagagattgtgcgtgcccatcttttgtcgggcttgggcaaagatatgtcgagatgtttactttctctgtagaatttcgtgaagctgttgcattgttcgtttgaagatggcgacgatgttcagatgatgcttcatgttgaaggacatatctttatttgcttcattgtacccagattttatttgcttcatgttgaaggacagactatgatgatgcgtgctgaggtgatttgcttattttatttgctgcgtgcaag

SEQ ID NO: 32816 - DNA, 1421 bp, Zea Mays
ccatgaatacgaggaaatattggcgatggatttttttttatcaagcattttagcggaaaggaataagtacctgcacgcactttgtgcatttattgttcgcaccgtactgcagaggtcacacacttgctgggtgttcttggatttgggggattttgctatctcttgggtgccagtaagctactgcagcattgatatatttggaccacaggatgtgccatatgtgtactgcctgttctatgtcatatttgttccgctccgctggatttactaccgctacaagaaatggcattactaccttctggacttctgctactatgccaacacctttctccttgtaatgattctcttctacccagaggatgaaaaactttttatggtttgcttctcgtttgcagagggtccgcttgcttgggcattaattgtgtggcgttgcagcttggttttcagttcatttgacaaacttgttagtgtcctgatacatctcttacctgggattgttctattcactatccggtggtggaatccacaaacatttgctgccatgcacccagaaggaagagatgctagagtcacatggccatatgtggaggacaaatcatatctgtggacatggcttttttttgttccgctagctgcttacaccctgtggcaacttatgtatttcctcatagttaatgtcctgcgtcgacagaggttgttaagggaccctgaagtcatgacatcctacagggagctctcgaagaaagcacagaaagcgaacaacatctggtggaggctgagcggactgctgggtgaccggaaccggcaggtcatgtgtgcgcgtcgacatggaacggtggcagcttcatcttggaggtgatgcctcggcaagtagtgcagaagcagctgaagaaactggacatgaagcccatggaacaggggagctcgacacaaggtgcgccaggtggtgatggtggcacattgggtaaccaccaccagcacacatccgaggagcatatccaggagtgaggaaattgaagctggatgtaagattagattttgatgttcactgacacaacctttgttgtcatcgagtgcgctttgtgttggagtttttctttagttcttcccagtttgtgagttgtgacatctagtcatctataggtttataggctggacgatatggggtgagagattgtgcgtgcccatcttttgtcgggcttgggcaaagatatgtcgagatgtttactttctctgtagaatttcgtgaagctgttgcattgttcgtttgaagatggcgacgatgttcagatgatgcttcatgttgaaggacatatctttatttgcttcattgtacccagattttatttgcttcatgttgaaggacagactatgatgatgcgtgctgaggtgatttgcttattttatttgctgcgtgcaag

SEQ ID NO: 32817 - DNA, 1376 bp, Zea Mays
gcggaaaggaataagtacctgcacgcactttgtgcatttattgttcgcaccgtactgcagaggtcacacacttgctgggtgttcttggatttgggggattttgctatctcttgggtgccagtaagctactgcagcattgatatatttggttggctgaccacaggatgtgccatatgtgtactgcctgttctatgtcatatttgttccgctccgctggatttactaccgctacaagaaatggcattactaccttctggacttctgctactatgccaacacctttctccttgtaatgattctcttctacccagaggatgaaaaactttttatggtttgcttctcgtttgcagagggtccgcttgcttgggcattaattgtgtggcgttgcagcttggttttcagttcatttgacaaacttgttagtgtcctgatacatctcttacctgggattgttctattcactatccggtggtggaatccacaaacatttgctgccatgcacccagaaggaagagatgctagagtcacatggccatatgtggaggacaaatcatatctgtggacatggcttttttttgttccgctagctgcttacaccctgtggcaacttatgtatttcctcatagttaatgtcctgcgtcgacagaggttgttaagggaccctgaagtcatgacatcctacagggagctctcgaagaaagcacagaaagcgaacaacatctggtggaggctgagcggactgctgggtgaccggaaccggcaggtcatgtgtgcgcgtcgacatggaacggtggcagcttcatcttggaggtgatgcctcggcaagtagtgcagaagcagctgaagaaactggacatgaagcccatggaacaggggagctcgacacaaggtgcgccaggtggtgatggtggcacattgggtaaccaccaccagcacacatccgaggagcatatccaggagtgaggaaattgaagctggatgtaagattagattttgatgttcactgacacaacctttgttgtcatcgagtgcgctttgtgttggagtttttctttagttcttcccagtttgtgagttgtgacatctagtcatctataggtttataggctggacgatatggggtgagagattgtgcgtgcccatcttttgtcgggcttgggcaaagatatgtcgagatgtttactttctctgtagaatttcgtgaagctgttgcattgttcgtttgaagatggcgacgatgttcagatgatgcttcatgttgaaggacatatctttatttgcttcattgtacccagattttatttgcttcatgttgaaggacagactatgatgatgcgtgctgaggtgatttgcttattttatttgctgcgtgcaag

SEQ ID NO: 32818 - DNA, 1132 bp, Zea Mays
attctctcctataccagtgtcatataaacctcctgcgatcggaacttgtgatcgctcgtggtcataatgcgcctgtgcgcagtaccactgtcatccgcgcttgcagccctggcgttcgcgctgttcctgctcaactcgggcgtcgccacgcgccgcgctctaggccgcggcgacgcctgggtggttgcgttcgtcgcggccgccacggtgcttgtgaccgctctcgtcgccacggtccgcgctcacgaccgcgcgcgcgaggaggggcgccggggcctgttcagggcagtggcgtgggctcagtccgccgcgctcacggctatgttcgcgcaccgtgtcgccgcgctcccgcaggccccggccatggcttgcctggtctggacgatggccggcggcacgatagccggagggttctactgcatctttctgcatggtcgggatggcgctgtcgtcggcgctggtggccgggatgcacgacaggcgtagtgcgcgtcgttactgtcgtacggccgaactgtatatacgggtaaaattagccacttgatttggtgatcagagatcacgcagggattggagggaattgagggaacaattagttcatttccctctcaatccccttcaattctctcgtgatccccttgtcaccaaatcaaccctaagggctaatttggtaacactattttcacaagagatttccatttttaagagaaaaatgaattaattttccttagaaaaaaatgaaaatactatgaaaaatgtggtttctaaactagccctaaaacacatatatgcttgagtctttgttattagttattacgagtactagaaataataaattggccaccgtcctcaggtacgatgtgtgattggttggtgttgttctggctggccacggagtgttgtggcctttgaaaatagtatatatatatacgcagagttgtgtaccgtctcttgtcttttttatttaacccattaacgacctctcaagaaacactatattaaatatatgtacatgtcttaagaataaggataagaacataaatgaaaaataaatgaaaaacatatggtttcttatagttcatttttatgttgtataattgtattatgttcgggtgagacaaatgaaaacgat

SEQ ID NO: 32819 - DNA, 1839 bp, Zea Mays
ggcagctctgcccacattcctacaccaccgcccaccgcggggccaccgtctccatggcaccacttctccatctccaatccaactgcccttgcgatgctctgcctgctgcacattttcctcccactactacactttattaatcacacagaccgaatcccacgccttctctttccttccccttcgttctctccctgctgctctgctcctgccgcctggctgccgtgccgccgctgatccctctccctctcttccccctcaaagccccaattgccgggtgctcctcttccacccccattgccgactgcttcccgccagagagtggggaagggaggggggtgagaagggagatggcttcttggatagggagtgggtgcaggaaaaaattctaaacctgcgaaggttttctccacgctttcttggagctggtcttttaaatctcagcaggctagcagagaagcctcagttctgaattctagtgcttctggatatggttaccatggcaagacactggagaagctttatgacgaggaacaaaaactctacaagttaatcaaggatgaagaatttgcaaggctccagtataagaaacatgtctcagtgctacaaaagctggaatcaggagggcatgatagactgcatgccgaaagacttcgggattctattgaagaactgcaaactcggataatctcattggaagaagctgtgagtttggcatgtttttccatatcaaatctcagagacgaggaattatatcctcagatcattgaattatctgcagggcttgtgcatatgtggaaaaacatgcacgagtgccatcaggtccagaaccatattgcccagcaagttagtctccttggcaacagacctgggagtgaaccaacaagtgacactcatcgccaggcaacatctcagctggaaattgaggtgtctggatggcacactgccttctgcaatcttatcacatcgcagcgtgaatacgttagcatccttagccaatggattggtctcacagactgccttccggatgatggtggcttaatgagaagttcatctggaatccttagcctctctgaggaactccagcgtgctcttgacaggctaccagagaaggtagcagctgaagcgataaagacctttatgtcagtcatacactctatagttgtacagcaaagtgaagagcgccaactaaagaagaagtcagataacatggatagcaagttccagacccagttagagaaacacagtgaaaatacaatgcaaaactcggcccagcctccaaataagaataactattcagcatcaaagaatggaacgaaactggatgcatttataaagcaggtcgaggaggagaaagccagatacctaacctctgtgagggtaagccgagccatgacactgaacagtctgcagacaagccttcgaaatgtgttccatgctctggagggattctcaggagtgtgcgtacaggcatttgaaggtatcagcagatgcagtgaagttgctgttattcactcgggagcagcttcacctgctatttcctcgtgaccttgcttcaatgactgtgattattcattgtaagtaggcaaaggataaactggttccacgtgaatacccttcgcttctaattttcagaactttgaatagctttcgggggattatgtgaagtcaatataggcataatagtcttgaatacatcacaatgtctcaacttacattttggttcttattgcatgggatgtactgctctgtacataatcatttacattttgaccgaaccagtatttttctcccttcacattatatctatacataattgttttgattctgcctctgatttat

SEQ ID NO: 32820 - DNA, 3237 bp, Zea Mays
ctctgcccacattcctacaccaccgcccaccgcggggccaccgtctccatggcaccacttctccatctccaatccaactgcccttgcgatgctctgcctgctgcacattttcctcccactactacactttattaatcacacagaccgaatcccacgccttctctttccttccccttcgttctctccctgctgctctgctcctgccgcctggctgccgtgccgccgctgatccctctccctctcttccccctcaaagccccaattgccgggtgctcctcttccacccccattgccgactgcttcccgccagagagtggggaagggaggggggtgagaagggagatggcttcttggatagggagtgggtaagaatcacacgatgcagttacctccacctttctctcttctccttttgcgggcatattcttcacctccgcctgcctagatccttctttctttggcccggcttagcttccagtctcaccaacagttctgacctcggagcatctatcaatcggcccactccactctctgcgccggttccatcgggttttgatgcaagagtagaggagttgttgctaggttgttgtgactggttgttggagagcaggagccagattgaggagaatttcagccaattttagcggaaccgtaaaacccatcccgagaatttttcctgcgcctcctacggttaggagctgtggctggacagtgcctgcctacgctctggagttttagtgcagttttacaagttttcagtcaattttgatcaagctcaggggaagtaccaatttgggagtgctagctgctgctgcagcagcagctgcgggttccttggtggcagatgggttgctccaactctaaagtggacaatgaggagcctgtgaggcgctccaaggacaggaggcagctcatgaagcagctggtgcgccgccgccctgagcttgcagctgtgcacattgcgtacctgcacgccctccgtaacacaggagccactctccggcaatttgtggagctggagtctgcattgtcacagcagcctcccgtagaccttgtggtgccgccctcgcctactccacagcctcctcctcctcctcctcctgaactctcggtgacatcctcattgccaccctcgccatgccccccgccgcctgtcccttttagtccagtaacaaccataagaaagatggagaagagggatggtgagctcccaccaccaccaccacctctggttttgagtccgataagattaaggaagatggaggatgagttccatgggggtgattttactgatgatgacgacactgacagctgctcgactcctctaccaccacccctgccacccggcatagattgggaggacttggatccctacaatgtgtgccccttgagtttcccatctccatttgctgataggaatgataaagaagtggcctcgcatgtgaccatggacaatgatcctgaagtagacacagaattttatggagaggaggatgaaagcatgcttggcaataatgatgtcattgtggatagggtccatgtgaatccagccaagggtagggctctgggtgatggcaactcttcaacggtgagctgggtgacaaaggattcagactctatggcggtgccttggaggagtaagaagtcgcttgtagagattgttaaggagattgatgagtacttcttgaaagcagcagcaagtgggaatgacgttgtgatttttttggactctgctggtggacggcctgatgccttagaggtagaggcaaagaaaggtgcaggaaaaaattctaaacctgcgaaggttttctccacgctttcttggagctggtcttttaaatctcagcaggctagcagagaagcctcagttctgaattctagtgcttctggatatggttaccatggcaagacactggagaagctttatgacgaggaacaaaaactctacaagttaatcaagaatttgcaaggctccagtataagaaacatgtctcagtgctacaaaagctggaatcaggagggcatgatagactgcatgccgaaagacttcgggattctattgaagaactgcaaactcggataatctcattggaagaagctgtgagtttggcatgtttttccatatcaaatctcagagacgaggaattatatcctcagatcattgaattatctgcagggcttgtgcatatgtggaaaaacatgcacgagtgccatcaggtccagaaccatattgcccagcaagttagtctccttggcaacagacctgggagtgaaccaacaagtgacactcatcgccaggcaacatctcagctggaaattgaggtgtctggatggcacactgccttctgcaatcttatcacatcgcagcgtgaatacgttagcatccttagccaatggattggtctcacagactgccttccggatgatggtggcttaatgagaagttcatctggaatccttagcctctctgaggaactccagcgtgctcttgacaggctaccagagaaggtagcagctgaagcgataaagacctttatgtcagtcatacactctatagttgtacagcaaagtgaagagcgccaactaaagaagaagtcagataacatggatagcaagttccagacccagttagagaaacacagtgaaaatacaatgcaaaactcggcccagcctccaaataagaataactattcagcatcaaagaatggaacgaaactggatgcatttataaagcaggtcgaggaggagaaagccagatacctaacctctgtgagggtaagccgagccatgacactgaacagtctgcagacaagccttcgaaatgtgttccatgctctggagggattctcaggagtgtgcgtacaggcatttgaaggtatcagcagatgcagtgaagttgctgttattcactcgggagcagcttcacctgctatttcctcgtgaccttgcttcaatgactgtgattattcattgtaagtaggcaaaggataaactggttccacgtgaatacccttcgcttctaattttcagaactttgaatagctttcgggggattatgtgaagtcaatataggcataatagtcttgaatacatcacaatgtctcaacttacattttggttcttattgcatgggatgtactgctctgtacataatcatttacattttgaccgaaccagtatttttctcccttcacattatatctatacataattgttttgattctgcctctgatttat

SEQ ID NO: 32821 - DNA, 1993 bp, Zea Mays
attcctacaccaccgcccaccgcggggccaccgtctccatggcaccacttctccatctccaatccaactgcccttgcgatgctctgcctgctgcacattttcctcccactactacactttattaatcacacagaccgaatcccacgccttctctttccttccccttcgttctctccctgctgctctgctcctgccgcctggctgccgtgccgccgctgatccctctccctctcttccccctcaaagccccaattgccgggtgctcctcttccacccccattgccgactgcttcccgccagagagtggggaagggaggggggtgagaagggagatggcttcttggatagggagtgggtaagaatcacacgatgcagttacctccacctttctctcttctccttttgcgggcatattcttcacctccgcctgcctagatccttctttctttggcccggcttagcttccagtctcaccaacagttctgacctcggagcatctatcaatcggcccactccactctctggtgcaggaaaaaattctaaacctgcgaaggttttctccacgctttcttggagctggtcttttaaatctcagcaggctagcagagaagcctcagttctgaattctagtgcttctggatatggttaccatggcaagacactggagaagctttatgacgaggaacaaaaactctacaagttaatcaaggatgaagaatttgcaaggctccagtataagaaacatgtctcagtgctacaaaagctggaatcaggagggcatgatagactgcatgccgaaagacttcgggattctattgaagaactgcaaactcggataatctcattggaagaagctgtgagtttggcatgtttttccatatcaaatctcagagacgaggaattatatcctcagatcattgaattatctgcagggcttgtgcatatgtggaaaaacatgcacgagtgccatcaggtccagaaccatattgcccagcaagttagtctccttggcaacagacctgggagtgaaccaacaagtgacactcatcgccaggcaacatctcagctggaaattgaggtgtctggatggcacactgccttctgcaatcttatcacatcgcagcgtgaatacgttagcatccttagccaatggattggtctcacagactgccttccggatgatggtggcttaatgagaagttcatctggaatccttagcctctctgaggaactccagcgtgctcttgacaggctaccagagaaggtagcagctgaagcgataaagacctttatgtcagtcatacactctatagttgtacagcaaagtgaagagcgccaactaaagaagaagtcagataacatggatagcaagttccagacccagttagagaaacacagtgaaaatacaatgcaaaactcggcccagcctccaaataagaataactattcagcatcaaagaatggaacgaaactggatgcatttataaagcaggtcgaggaggagaaagccagatacctaacctctgtgagggtaagccgagccatgacactgaacagtctgcagacaagccttcgaaatgtgttccatgctctggagggattctcaggagtgtgcgtacaggcatttgaaggtatcagcagatgcagtgaagttgctgttattcactcgggagcagcttcacctgctatttcctcgtgaccttgcttcaatgactgtgattattcattgtaagtaggcaaaggataaactggttccacgtgaatacccttcgcttctaattttcagaactttgaatagctttcgggggattatgtgaagtcaatataggcataatagtcttgaatacatcacaatgtctcaacttacattttggttcttattgcatgggatgtactgctctgtacataatcatttacattttgaccgaaccagtatttttctcccttcacattatatctatacataattgttttgattctgcctctgatttat

SEQ ID NO: 32822 - DNA, 3065 bp, Zea Mays
gcacattttcctcccactactacactttattaatcacacagaccgaatcccacgccttctctttccttccccttcgttctctccctgctgctctgctcctgccgcctggctgccgtgccgccgctgatccctctccctctcttccccctcaaagccccaattgccgggtgctcctcttccacccccattgccgactgcttcccgccagagagtggggaagggaggggggtgagaagggagatggcttcttggatagggagtgggtaagaatcacacgatgcagttacctccacctttctctcttctccttttgcgggcatattcttcacctccgcctgcctagatccttctttctttggcccggcttagcttccagtctcaccaacagttctgacctcggagcatctatcaatcggcccactccactctctgcgccggttccatcgggttttgatgcaagagtagaggagttgttgctaggttgttgtgactggttgttggagagcaggagccagattgaggagaatttcagccaattttagcggaaccgtaaaacccatcccgagaatttttcctgcgcctcctacggttaggagctgtggctggacagtgcctgcctacgctctggagttttagtgcagttttacaagttttcagtcaattttgatcaagctcaggggaagtaccaatttgggagtgctagctgctgctgcagcagcagctgcgggttccttggtggcagatgggttgctccaactctaaagtggacaatgaggagcctgtgaggcgctccaaggacaggaggcagctcatgaagcagctggtgcgccgccgccctgagcttgcagctgtgcacattgcgtacctgcacgccctccgtaacacaggagccactctccggcaatttgtggagctggagtctgcattgtcacagcagcctcccgtagaccttgtggtgccgccctcgcctactccacagcctcctcctcctcctcctcctgaactctcggtgacatcctcattgccaccctcgccatgccccccgccgcctgtcccttttagtccagtaacaaccataagaaagatggagaagagggatggtgagctcccaccaccaccaccacctctggttttgagtccgataagattaaggaagatggaggatgagttccatgggggtgattttactgatgatgacgacactgacagctgctcgactcctctaccaccacccctgccacccggcatagattgggaggacttggatccctacaatgtgtgccccttgagtttcccatctccatttgctgataggaatgataaagaagtggcctcgcatgtgaccatggacaatgatcctgaagtagacacagaattttatggagaggaggatgaaagcatgcttggcaataatgatgtcattgtggatagggtccatgtgaatccagccaagggtagggctctgggtgatggcaactcttcaacggtgagctgggtgacaaaggattcagactctatggcggtgccttggaggagtaagaagtcgcttgtagagattgttaaggagattgatgagtacttcttgaaagcagcagcaagtgggaatgacgttgtgatttttttggactctgctggtggacggcctgatgccttagaggtagaggcaaagaaaggtgcaggaaaaaattctaaacctgcgaaggttttctccacgctttcttggagctggtcttttaaatctcagcaggctagcagagaagcctcagttctgaattctagtgcttctggatatggttaccatggcaagacactggagaagctttatgacgaggaacaaaaactctacaagttaatcaaggatgaagaatttgcaaggctccagtataagaaacatgtctcagtgctacaaaagctggaatcaggagggcatgatagactgcatgccgaaagacttcgggattctattgaagaactgcaaactcggataatctcattggaagaagctgcttgtgcatatgtggaaaaacatgcacgagtgccatcaggtccagaaccatattgcccagcaagttagtctccttggcaacagacctgggagtgaaccaacaagtgacactcatcgccaggcaacatctcagctggaaattgaggtgtctggatggcacactgccttctgcaatcttatcacatcgcagcgtgaatacgttagcatccttagccaatggattggtctcacagactgccttccggatgatggtggcttaatgagaagttcatctggaatccttagcctctctgaggaactccagcgtgctcttgacaggctaccagagaaggtagcagctgaagcgataaagacctttatgtcagtcatacactctatagttgtacagcaaagtgaagagcgccaactaaagaagaagtcagataacatggatagcaagttccagacccagttagagaaacacagtgaaaatacaatgcaaaactcggcccagcctccaaataagaataactattcagcatcaaagaatggaacgaaactggatgcatttataaagcaggtcgaggaggagaaagccagatacctaacctctgtgagggtaagccgagccatgacactgaacagtctgcagacaagccttcgaaatgtgttccatgctctggagggattctcaggagtgtgcgtacaggcatttgaaggtatcagcagatgcagtgaagttgctgttattcactcgggagcagcttcacctgctatttcctcgtgaccttgcttcaatgactgtgattattcattgtaagtaggcaaaggataaactggttccacgtgaatacccttcgcttctaattttcagaactttgaatagctttcgggggattatgtgaagtcaatataggcataatagtcttgaatacatcacaatgtctcaacttacattttggttcttattgcatgggatgtactgctctgtacataatcatttacattttgaccgaaccagtatttttctcccttcacattatatctatacataattgttttgattctgcctctgatttat

SEQ ID NO: 32823 - DNA, 3136 bp, Zea Mays
acattttcctcccactactacactttattaatcacacagaccgaatcccacgccttctctttccttccccttcgttctctccctgctgctctgctcctgccgcctggctgccgtgccgccgctgatccctctccctctcttccccctcaaagccccaattgccgggtgctcctcttccacccccattgccgactgcttcccgccagagagtggggaagggaggggggtgagaagggagatggcttcttggatagggagtgggtaagaatcacacgatgcagttacctccacctttctctcttctccttttgcgggcatattcttcacctccgcctgcctagatccttctttctttggcccggcttagcttccagtctcaccaacagttctgacctcggagcatctatcaatcggcccactccactctctgcgccggttccatcgggttttgatgcaagagtagaggagttgttgctaggttgttgtgactggttgttggagagcaggagccagattgaggagaatttcagccaattttagcggaaccgtaaaacccatcccgagaatttttcctgcgcctcctacggttaggagctgtggctggacagtgcctgcctacgctctggagttttagtgcagttttacaagttttcagtcaattttgatcaagctcaggggaagtaccaatttgggagtgctagctgctgctgcagcagcagctgcgggttccttggtggcagatgggttgctccaactctaaagtggacaatgaggagcctgtgaggcgctccaaggacaggaggcagctcatgaagcagctggtgcgccgccgccctgagcttgcagctgtgcacattgcgtacctgcacgccctccgtaacacaggagccactctccggcaatttgtggagctggagtctgcattgtcacagcagcctcccgtagaccttgtggtgccgccctcgcctactccacagcctcctcctcctcctcctcctgaactctcggtgacatcctcattgccaccctcgccatgccccccgccgcctgtcccttttagtccagtaacaaccataagaaagatggagaagagggatggtgagctcccaccaccaccaccacctctggttttgagtccgataagattaaggaagatggaggatgagttccatgggggtgattttactgatgatgacgacactgacagctgctcgactcctctaccaccacccctgccacccggcatagattgggaggacttggatccctacaatgtgtgccccttgagtttcccatctccatttgctgataggaatgataaagaagtggcctcgcatgtgaccatggacaatgatcctgaagtagacacagaattttatggagaggaggatgaaagcatgcttggcaataatgatgtcattgtggatagggtccatgtgaatccagccaagggtagggctctgggtgatggcaactcttcaacggtgagctgggtgacaaaggattcagactctatggcggtgccttggaggagtaagaagtcgcttgtagagattgttaaggagattgatgagtacttcttgaaagcagcagcaagtgggaatgacgttgtgatttttttggactctgctggtggacggcctgatgccttagaggtagaggcaaagaaaggtgcaggaaaaaattctaaacctgcgaaggttttctccacgctttcttggagctggtcttttaaatctcagcaggctagcagagaagcctcagttctgaattctagtgcttctggatatggttaccatggcaagacactggagaagctttatgacgaggaacaaaaactctacaagttaatcaaggatgaagaatttgcaaggctccagtataagaaacatgtctcagtgctacaaaagctggaatcaggagggcatgatagactgcatgccgaaagacttcgggattctattgaagaactgcaaactcggataatctcattggaagaagctgtgagtttggcatgtttttccatatcaaatctcagagacgaggaattatatcctcagatcattgaattatctgcagggcttgtgcatatgtggaaaaacatgcacgagtgccatcaggtccagaaccatattgcccagcaagttagtctccttggcaacagacctgggagtgaaccaacaagtgacactcatcgccaggcaacatctcagctggaaattgaggtgtctggatggcacactgccttctgcaatcttatcacatcgcagcgtgaatacgttagcatccttagccaatggattggtctcacagactgccttccggatgatggtggcttaatgagaagttcatctggaatccttagcctctctgaggaactccagcgtgctcttgacaggctaccagagaagcagctgaagcgataaagacctttatgtcagtcatacactctatagttgtacagcaaagtgaagagcgccaactaaagaagaagtcagataacatggatagcaagttccagacccagttagagaaacacagtgaaaatacaatgcaaaactcggcccagcctccaaataagaataactattcagcatcaaagaatggaacgaaactggatgcatttataaagcaggtcgaggaggagaaagccagatacctaacctctgtgagggtaagccgagccatgacactgaacagtctgcagacaagccttcgaaatgtgttccatgctctggagggattctcaggagtgtgcgtacaggcatttgaaggtatcagcagatgcagtgaagttgctgttattcactcgggagcagcttcacctgctatttcctcgtgaccttgcttcaatgactgtgattattcattgtaagtaggcaaaggataaactggttccacgtgaatacccttcgcttctaattttcagaactttgaatagctttcgggggattatgtgaagtcaatataggcataatagtcttgaatacatcacaatgtctcaacttacattttggttcttattgcatgggatgtactgctctgtacataatcatttacattttgaccgaaccagtatttttctcccttcacattatatctatacataattgttttgattctgcctctgatttat

SEQ ID NO: 32824 - DNA, 3056 bp, Zea Mays
acattttcctcccactactacactttattaatcacacagaccgaatcccacgccttctctttccttccccttcgttctctccctgctgctctgctcctgccgcctggctgccgtgccgccgctgatccctctccctctcttccccctcaaagccccaattgccgggtgctcctcttccacccccattgccgactgcttcccgccagagagtggggaagggaggggggtgagaagggagatggcttcttggatagggagtgggtaagaatcacacgatgcagttacctccacctttctctcttctccttttgcgggcatattcttcacctccgcctgcctagatccttctttctttggcccggcttagcttccagtctcaccaacagttctgacctcggagcatctatcaatcggcccactccactctctgcgccggttccatcgggttttgatgcaagagtagaggagttgttgctaggttgttgtgactggttgttggagagcaggagccagattgaggagaatttcagccaattttagcggaaccgtaaaacccatcccgagaatttttcctgcgcctcctacggttaggagctgtggctggacagtgcctgcctacgctctggagttttagtgcagttttacaagttttcagtcaattttgatcaagctcaggggaagtaccaatttgggagtgctagctgctgctgcagcagcagctgcgggttccttggtggcagatgggttgctccaactctaaagtggacaatgaggagcctgtgaggcgctccaaggacaggaggcagctcatgaagcagctggtgcgccgccgccctgagcttgcagctgtgcacattgcgtacctgcacgccctccgtaacacaggagccactctccggcaatttgtggagctggagtctgcattgtcacagcagcctcccgtagaccttgtggtgccgccctcgcctactccacagcctcctcctcctcctcctcctgaactctcggtgacatcctcattgccaccctcgccatgccccccgccgcctgtcccttttagtccagtaacaaccataagaaagatggagaagagggatggtgagctcccaccaccaccaccacctctggttttgagtccgataagattaaggaagatggaggatgagttccatgggggtgattttactgatgatgacgacactgacagctgctcgactcctctaccaccacccctgccacccggcatagattgggaggacttggatccctacaatgtgtgccccttgagtttcccatctccatttgctgataggaatgataaagaagtggcctcgcatgtgaccatggacaatgatcctgaagtagacacagaattttatggagaggaggatgaaagcatgcttggcaataatgatgtcattgtggatagggtccatgtgaatccagccaagggtagggctctgggtgatggcaactcttcaacggtgagctgggtgacaaaggattcagactctatggcggtgccttggaggagtaagaagtcgcttgtagagattgttaaggagattgatgagtacttcttgaaagcagcagcaagtgggaatgacgttgtgatttttttggactctgctggtggacggcctgatgccttagaggtagaggcaaagaaaggtgcaggaaaaaattctaaacctgcgaaggttttctccacgctttcttggagctggtcttttaaatctcagcaggctagcagagaagcctcagttctgaattctagtgcttctggatatggttaccatggcaagacactggagaagctttatgacgaggaacaaaaactctacaagttaatcaagaatttgcaaggctccagtataagaaacatgtctcagtgctacaaaagctggaatcaggagggcatgatagactgcatgccgaaagacttcgggattctattgaagaactgcaaactcggataatctcattggaagaagctgcttgtgcatatgtggaaaaacatgcacgagtgccatcaggtccagaaccatattgcccagcaagttagtctccttggcaacagacctgggagtgaaccaacaagtgacactcatcgccaggcaacatctcagctggaaattgaggtgtctggatggcacactgccttctgcaatcttatcacatcgcagcgtgaatacgttagcatccttagccaatggattggtctcacagactgccttccggatgatggtggcttaatgagaagttcatctggaatccttagcctctctgaggaactccagcgtgctcttgacaggctaccagagaaggtagcagctgaagcgataaagacctttatgtcagtcatacactctatagttgtacagcaaagtgaagagcgccaactaaagaagaagtcagataacatggatagcaagttccagacccagttagagaaacacagtgaaaatacaatgcaaaactcggcccagcctccaaataagaataactattcagcatcaaagaatggaacgaaactggatgcatttataaagcaggtcgaggaggagaaagccagatacctaacctctgtgagggtaagccgagccatgacactgaacagtctgcagacaagccttcgaaatgtgttccatgctctggagggattctcaggagtgtgcgtacaggcatttgaaggtatcagcagatgcagtgaagttgctgttattcactcgggagcagcttcacctgctatttcctcgtgaccttgcttcaatgactgtgattattcattgtaagtaggcaaaggataaactggttccacgtgaatacccttcgcttctaattttcagaactttgaatagctttcgggggattatgtgaagtcaatataggcataatagtcttgaatacatcacaatgtctcaacttacattttggttcttattgcatgggatgtactgctctgtacataatcatttacattttgaccgaaccagtatttttctcccttcacattatatctatacataattgttttgattctgcctctgatttat

SEQ ID NO: 32825 - DNA, 1892 bp, Zea Mays
acattttcctcccactactacactttattaatcacacagaccgaatcccacgccttctctttccttccccttcgttctctccctgctgctctgctcctgccgcctggctgccgtgccgccgctgatccctctccctctcttccccctcaaagccccaattgccgggtgctcctcttccacccccattgccgactgcttcccgccagagagtggggaagggaggggggtgagaagggagatggcttcttggatagggagtgggtaagaatcacacgatgcagttacctccacctttctctcttctccttttgcgggcatattcttcacctccgcctgcctagatccttctttctttggcccggcttagcttccagtctcaccaacagttctgacctcggagcatctatcaatcggcccactccactctctggtgcaggaaaaaattctaaacctgcgaaggttttctccacgctttcttggagctggtcttttaaatctcagcaggctagcagagaagcctcagttctgaattctagtgcttctggatatggttaccatggcaagacactggagaagctttatgacgaggaacaaaaactctacaagttaatcaagaatttgcaaggctccagtataagaaacatgtctcagtgctacaaaagctggaatcaggagggcatgatagactgcatgccgaaagacttcgggattctattgaagaactgcaaactcggataatctcattggaagaagctgtgagtttggcatgtttttccatatcaaatctcagagacgaggaattatatcctcagatcattgaattatctgcagggcttgtgcatatgtggaaaaacatgcacgagtgccatcaggtccagaaccatattgcccagcaagttagtctccttggcaacagacctgggagtgaaccaacaagtgacactcatcgccaggcaacatctcagctggaaattgaggtgtctggatggcacactgccttctgcaatcttatcacatcgcagcgtgaatacgttagcatccttagccaatggattggtctcacagactgccttccggatgatggtggcttaatgagaagttcatctggaatccttagcctctctgaggaactccagcgtgctcttgacaggctaccagagaaggtagcagctgaagcgataaagacctttatgtcagtcatacactctatagttgtacagcaaagtgaagagcgccaactaaagaagaagtcagataacatggatagcaagttccagacccagttagagaaacacagtgaaaatacaatgcaaaactcggcccagcctccaaataagaataactattcagcatcaaagaatggaacgaaactggatgcatttataaagcaggtcgaggaggagaaagccagatacctaacctctgtgagggtaagccgagccatgacactgaacagtctgcagacaagccttcgaaatgtgttccatgctctggagggattctcaggagtgtgcgtacaggcatttgaaggtatcagcagatgcagtgaagttgctgttattcactcgggagcagcttcacctgctatttcctcgtgaccttgcttcaatgactgtgattattcattgtaagtaggcaaaggataaactggttccacgtgaatacccttcgcttctaattttcagaactttgaatagctttcgggggattatgtgaagtcaatataggcataatagtcttgaatacatcacaatgtctcaacttacattttggttcttattgcatgggatgtactgctctgtacataatcatttacattttgaccgaaccagtatttttctcccttcacattatatctatacataattgttttgattctgcctctgatttat

SEQ ID NO: 32826 - DNA, 3267 bp, Zea Mays
acattttcctcccactactacactttattaatcacacagaccgaatcccacgccttctctttccttccccttcgttctctccctgctgctctgctcctgccgcctggctgccgtgccgccgctgatccctctccctctcttccccctcaaagccccaattgccgggtgctcctcttccacccccattgccgactgcttcccgccagagagtggggaagggaggggggtgagaagggagatggcttcttggatagggagtgggtaagaatcacacgatgcagttacctccacctttctctcttctccttttgcgggcatattcttcacctccgcctgcctagatccttctttctttggcccggcttagcttccagtctcaccaacagttctgacctcggagcatctatcaatcggcccactccactctctggtaaggcaaccagccacgccacggcaccctttttgttcgagaatctgcttgcccgcgtcgccgtcgtggctttgttcctcctcgcgactgattcgtcggcctgagtcgtcactttttgtctaattggtttcagcgccggttccatcgggttttgatgcaagagtagaggagttgttgctaggttgttgtgactggttgttggagagcaggagccagattgaggagaatttcagccaattttagcggaaccgtaaaacccatcccgagaatttttcctgcgcctcctacggttaggagctgtggctggacagtgcctgcctacgctctggagttttagtgcagttttacaagttttcagtcaattttgatcaagctcaggggaagtaccaatttgggagtgctagctgctgctgcagcagcagctgcgggttccttggtggcagatgggttgctccaactctaaagtggacaatgaggagcctgtgaggcgctccaaggacaggaggcagctcatgaagcagctggtgcgccgccgccctgagcttgcagctgtgcacattgcgtacctgcacgccctccgtaacacaggagccactctccggcaatttgtggagctggagtctgcattgtcacagcagcctcccgtagaccttgtggtgccgccctcgcctactccacagcctcctcctcctcctcctcctgaactctcggtgacatcctcattgccaccctcgccatgccccccgccgcctgtcccttttagtccagtaacaaccataagaaagatggagaagagggatggtgagctcccaccaccaccaccacctctggttttgagtccgataagattaaggaagatggaggatgagttccatgggggtgattttactgatgatgacgacactgacagctgctcgactcctctaccaccacccctgccacccggcatagattgggaggacttggatccctacaatgtgtgccccttgagtttcccatctccatttgctgataggaatgataaagaagtggcctcgcatgtgaccatggacaatgatcctgaagtagacacagaattttatggagaggaggatgaaagcatgcttggcaataatgatgtcattgtggatagggtccatgtgaatccagccaagggtagggctctgggtgatggcaactcttcaacggtgagctgggtgacaaaggattcagactctatggcggtgccttggaggagtaagaagtcgcttgtagagattgttaaggagattgatgagtacttcttgaaagcagcagcaagtgggaatgacgttgtgatttttttggactctgctggtggacggcctgatgccttagaggtagaggcaaagaaaggaaaaaattctaaacctgcgaaggttttctccacgctttcttggagctggtcttttaaatctcagcaggctagcagagaagcctcagttctgaattctagtgcttctggatatggttaccatggcaagacactggagaagctttatgacgaggaacaaaaactctacaagttaatcaaggatgaagaatttgcaaggctccagtataagaaacatgtctcagtgctacaaaagctggaatcaggagggcatgatagactgcatgccgaaagacttcgggattctattgaagaactgcaaactcggataatctcattggaagaagctgtgagtttggcatgtttttccatatcaaatctcagagacgaggaattatatcctcagatcattgaattatctgcagggcttgtgcatatgtggaaaaacatgcacgagtgccatcaggtccagaaccatattgcccagcaagttagtctccttggcaacagacctgggagtgaaccaacaagtgacactcatcgccaggcaacatctcagctggaaattgaggtgtctggatggcacactgccttctgcaatcttatcacatcgcagcgtgaatacgttagcatccttagccaatggattggtctcacagactgccttccggatgatggtggcttaatgagaagttcatctggaatccttagcctctctgaggaactccagcgtgctcttgacaggctaccagagaaggtagcagctgaagcgataaagacctttatgtcagtcatacactctatagttgtacagcaaagtgaagagcgccaactaaagaagaagtcagataacatggatagcaagttccagacccagttagagaaacacagtgaaaatacaatgcaaaactcggcccagcctccaaataagaataactattcagcatcaaagaatggaacgaaactggatgcatttataaagcaggtcgaggaggagaaagccagatacctaacctctgtgagggtaagccgagccatgacactgaacagtctgcagacaagccttcgaaatgtgttccatgctctggagggattctcaggagtgtgcgtacaggcatttgaaggtatcagcagatgcagtgaagttgctgttattcactcgggagcagcttcacctgctatttcctcgtgaccttgcttcaatgactgtgattattcattgtaagtaggcaaaggataaactggttccacgtgaatacccttcgcttctaattttcagaactttgaatagctttcgggggattatgtgaagtcaatataggcataatagtcttgaatacatcacaatgtctcaacttacattttggttcttattgcatgggatgtactgctctgtacataatcatttacattttgaccgaaccagtatttttctcccttcacattatatctatacataattgttttgattctgcctctgatttat

SEQ ID NO: 32827 - DNA, 1026 bp, Zea Mays
ccaccggccacctgcctcgatgaaagtaacggcgcccagtcgcagaaacacacggtctcggccagacggcaggaccaaaaactaatcccaattaaccccaaacccagcccaaatcaaacttcccaaacggagagagaaacggaaggcgaatagaagaaaagcgtgctgttttttcatcctctcgtgtctcgtgtgtgcgcgcgagcgtgcgcctccctccccatctcgcgatcccagttcgatccgctcgcccgctctcccgatccgacccgccctccgcggccgggcaattcggccgccgccgctcggattcgcgtgggctcgccctcagattcgctctccccggcgccccaaaccctagatccgccgctggtcgtcccaccgccgccgccatgttttggcgcatgaccggcctctccgcggcctcgcccgtggatacaattctggacaaagaaaattttacattggaagaacttcttgatgaggatgaaattattcaggagtgcaaagcactgaactcaagactcataaacttcttacgtgacaagtcccaggtggaacagttgcttcattatattttggaagaagttccagaggatgctgaaaggaagcgctccttcaagttcccttttattgcttgtgaaatatttacttgtgaaatcgatgtcattttgaggaccttagtagaggatgaagagctaatggacttgcttttctcatttgtgaaacctgatcatccacatagcacattattgtctggttacttcagtaaggtggtaatatgtttgatgctgaggaagactgctccacttatgagttatgttcaggggcatccaaagatagttgtccagcttgttgacctgattggcatcacatcgataatggaggtgctgatacgactgattggtgctgatgagaccatatattcaaactatggtgatacattgcagtggttagaaaatacagatgtccttgaaatgattgcagacaagtttggctcatcggaatacacttgtgcgttgactt

SEQ ID NO: 32828 - DNA, 1210 bp, Zea Mays
acacggtctcggccagacggcaggaccaaaaactaatcccaattaaccccaaacccagcccaaatcaaacttcccaaacggagagagaaacggaaggcgaatagaagaaaagcgtgctgttttttcatcctctcgtgtctcgtgtgtgcgcgcgagcgtgcgcctccctccccatctcgcgatcccagttcgatccgctcgcccgctctcccgatccgacccgccctccgcggccgggcaattcggccgccgccgctcggattcgcgtgggctcgccctcagattcgctctccccggcgccccaaaccctagatccgccgctggtcgtcccaccgccgccgccatgttttggcgcatgaccggcctctccgcggcctcgcccgtggatacaattctggacaaagaaaattttacattggaagaacttcttgatgaggatgaaattattcaggagtgcaaagcactgaactcaagactcataaacttcttacgtgacaagtcccaggtggaacagttgcttcattatattttggaagaagttccagaggatgctgaaaggaagcgctccttcaagttcccttttattgcttgtgaaatatttacttgtgaaatcgatgtcattttgaggaccttagtagaggatgaagagctaatggacttgcttttctcatttgtgaaacctgatcatccacatagcacattattgtctggttacttcagtaaggtggtaatatgtttgatgctgaggaagactgctccacttatgagttatgttcaggggcatccaaagatagttgtccagcttgttgacctgattggcatcacatcgataatggaggtgctgatacgactgattggtgctgatgagaccatatattcaaactatggtgatacattgcagtggttagaaaatacagatgtccttgaaatgattgcagacaagtttggctcatcgattggcaaaggtgaaccttgaagcatgtactacgacacattgttgaatctggatgcaccatttctgctcgtttcattcacaacctgaccagttgctgatgctggctcagaggagatgagatgtgtagatgagagaagttgtctgtatacctccaaaggttagtggcgggcagtggccagccatgatggtcaacatgttggattctcccagccaactgaaatggcttagtaagcatgtgagccaattaagatggtg

SEQ ID NO: 32829 - DNA, 1984 bp, Zea Mays
acagttttgttggaaggttgttccatcatgctcttgaagaatcaagacccaaatctgttctggttcattcactatcagtgtgcatatctttgctggatccgaaaagactagcatcagcttcgtatcaagcattcagaagcaacttaagtcatggggcattggtcacagccagtccagagacagttgatggcatgcttgacagtttaggcaacttgctgaagttactggacacttcggctactgaaagcgggttgccaacaacttatggatctttgcgcccacctcttggaaaacatcgtctgaagattgtagaattcatctctgtgctgcttacaattggaagtgaaactgctgaaaaagagctaagaaggcagtcagcaataaagcgctcgattgatttgttctttgagtatccatataacaactttttgcaccatcatgttgagaatataattgttgcttgcctggagggtaaaagacctgaagttgttgagcatgttcttcatgaatgtgatattgttggtaaaattcttgtctcagagaggttttcatccttgtcgactgagtctaatgggcctactgttccctctgaagggaaaacccctccaagaattggaaatgttggtcacatgacaagaatagccaataaacttattcagttgggcaatagtaacaacacaatccaggctcacttacaggaaaataatgattgggttgaatggcaaacaaatgtgctggtcaaacgcaatgaagtggagaatgtttatcattgggcttgtgggcgcccgacatctttacatgaccgtggtagggacagcgatgatgatgacttccgggacagggattacgacgtggcagctcttgctaataacttaagtcaggcatttcgttatgggatatatagcaacgatgacattgaagaggcacaaggatcacttgaacgagatgatgaggatgtgtattttgatgatgaatcagctgaggttgtaatatcttctttgcgtctgggagatgaccaggacagaggccgaggaagctgatgatggtaaagtcattggcactgaggatgaaatggaaacagtatatcttggaaatggtagtgctgaggaggtaaaagatgtagcagaatgtaatgaacagccaaattgttgtactgaggatgagcgattgaaaaatactgaagggattgaacggcatccagatgtttcaaatcactataccgacatatgtacaaatgaggctgcctctgctgcagcagaatcttcagccccatcagttgagatagtggcaaagaaaacagtagatgaaccatcggaggcagaaagaacagtggatgaaccggcagaatcatctttggacagttctgtctctatacctttgcctgctcctgttaatggtagtgagcctgccaactcggaagcctcttccgaacaagttgcccatgacactgatgtgcagcaaccagtcaaggaagctcctgatgaggacgttaatgcaaagaaaactgatgtagccaaagcaagcgagtgaattagcaacatgttggactgagctgatcagagcaattacttgcgaactgaaaacactggagtgtagcctgtgctcagctgccacaagatagcctgaagcaaactgctgtacaataagcaagtgattgttctgccatcaacggtggcatatcactgtacaaatgagcaccattgactaacgcacataagtcgccttgtctgaaactggtcattttctttgaaattcaccctccagttcatgtgctttggtggcagacgtcgtggcatggtatatggtacctgagaacattctttgggtggcaactggttttggctacttagtcttctgttgcctgtaatatgagatgtgatgttatttctagtctagctattgttgtaatttttttggactctacatgtgtcagttcgacttcgaacaatttttttataaagattcgtcactgcattagaggacc

SEQ ID NO: 32830 - DNA, 2078 bp, Zea Mays
tttgttggaaggttgttccatcatgctcttgaagaatcaagacccaaatctgttctggttcattcactatcagtgtgcatatctttgctggatccgaaaagactagcatcagcttcgtatcaagcattcagaagcaacttaagtcatggggcattggtcacagccagtccagagacagttgatggcatgcttgacagtttagttactggacacttcggctactgaaagcgggttgccaacaacttatggatctttgcgcccacctcttggaaaacatcgtctgaagattgtagaattcatctctgtgctgcttacaattggaagtgaaactgctgaaaaagagctaagaaggcagtcagcaataaagcgctcgattgatttgttctttgagtatccatataacaactttttgcaccatcatgttgagaatataattgttgcttgcctggagggtaaaagacctgaagttgttgagcatgttcttcatgaatgtgatattgttggtaaaattcttgtctcagagaggttttcatccttgtcgactgagtctaatgggcctactgttccctctgaagggaaaacccctccaagaattggaaatgttggtcacatgacaagaatagccaataaacttattcagttgggcaatagtaacaacacaatccaggctcacttacaggaaaataatgattgggttgaatggcaaacaaatgtgctggtcaaacgcaatgaagtggagaatgtttatcattgggcttgtgggcgcccgacatctttacatgaccgtggtagggacagcgatgatgatgacttccgggacagggattacgacgtggcagctcttgctaataacttaagtcaggcatttcgttatgggatatatagcaacgatgacattgaagaggcacaaggatcacttgaacgagatgatgaggatgtgtattttgatgatgaatcagctgaggttgtaatatcttctttgcgtctgggagatgaccaggacagctccctctttacaaattcaaattggttcacatttgatggagagagaggcattgatgatcgtttatctgcctctgttccttcatcatcccccaattctctggagacttcactagaggccgaggaagctgatgatggtaaagtcattggcactgaggatgaaatggaaacagtatatcttggaaatggtagtgctgaggaggtaaaagatgtagcagaatgtaatgaacagccaaattgttgtactgaggatgagcgattgaaaaatactgaagggattgaacggcatccagatgtttcaaatcactataccgacatatgtacaaatgaggctgcctctgctgcagcagaatcttcagccccatcagttgagatagtggcaaagaaaacagtagatgaaccatcggaggcagaaagaacagtggatgaaccggcagaatcatctttggacagttctgtctctatacctttgcctgctcctgttaatggtagtgagcctgccaactcggaagcctcttccgaacaagttgcccatgacactgatgtgcagcaaccagtcaaggaagctcctgatgaggacgttaatgcaaagaaaactgatgtagccaaagcaagcgagtgaattagcaacatgttggactgagctgatcagagcaattacttgcgaactgaaaacactggagtgtagcctgtgctcagctgccacaagatagcctgaagcaaactgctgtacaataagcaagtgattgttctgccatcaacggtggcatatcactgtacaaatgagcaccattgactaacgcacataagtcgccttgtctgaaactggtcattttctttgaaattcaccctccagttcatgtgctttggtggcagacgtcgtggcatggtatatggtacctgagaacattctttgggtggcaactggttttggctacttagtcttctgttgcctgtaatatgagatgtgatgttatttctagtctagctattgttgtaatttttttggactctacatgtgtcagttcgacttcgaacaatttttttataaagattcgtcactgcattagaggacc

SEQ ID NO: 32831 - DNA, 1335 bp, Zea Mays
atatttcttttctgtcggaatgggatatgagtgggctgggccgaatgcaggcagggtcgtctggtgctacactgctactctttccacgaccccatggcaaaatagcaaatttctctcgattgtgatatcagcccacatagatataaccgtttggggaaaagaatcgtgggctgtgacctgtcgtcttcgtctccggcagagcaaagcggcggcgaggcgggagatatagaggagagacgagagcgggatggggtacctgtggagggtgcggctgtcttcatttgctgccggcgcggcgacggcttcggcggcggggttcttcctcctctacaaggaccacctgctcgcccgcgctgccatcatcagccaggtggaggacatcaaggaaacttctgaaaagcattatgcagccctaaataagaggatatcagcactggaaagcagaagagaaccaggaactatcaaagaggcatcagattaattctgagttgggcttatgtcatggttacatctgcccatgtgtttttgattgctgcaggcggtataaactgcagcattttaagctgtactattgtgttgttgaaattctatgaactctgaatttgaattgtgttacacttcttgtctatgtcgtctttatgagatggacaagatcaaataaaatacattttttcttgatagaataagttatcagatgtgtgcaaagtatcttttttttttgtcttcgtgaccatttgctaaacaacagtattggcacttgttagtctatggctctgtgcattgcattgcttttgagcacttcggcaatttacatgtgaattttgtacaatcacgggtgactgcaaagcctgtaatgagacggttacttgaacttcacgctggtattcaatctgaatgattttgcttgcagctgcaaattcaggggcatcttcaaagatggtaagggaacaatctgacatctctgggatggtgactatagttgtgtcctttgtgatctccactgtgaagaaacaacttatcacctattcaattgtcctttgctggaaccatatgggtattcattgggaccattcattggacttctctatgatcatatccgcaatggagcatttcggaaataagttctttatgcaaataatggtcgtttcgccctgggaaatttggaagcaaaggaatgtggtcatattcagagaatatattcctttttttctcctcttggaggctttgtttcaaggacacgttgaagcttcagctgctgagagttgcccctgagcttagatcggagatatccttttggcttgattctttatactcttccctccctctctctcttcc

SEQ ID NO: 32832 - DNA, 1892 bp, Zea Mays
aattaatcccctcgccttcgtaagctcagtcctccactcctccacctctcccacccaacaacaaaacaagcctaatggcttcctctccatctcacgccactgcgttgcctacttgccctagaaccctcgccgccgcccctctttaggattcccatgtccctggtcgccccctgacacgcccgccccggatcctgcaccggaattccgcgtggaattccgggccgaaccgcctctctgcgtgcgcctccgaccaccaaactctctcacacgcgcgcgcgcgcacgtctgaggcggttggattctccggtgggggtcccttggtctcgatttgctgctgatgggggtgccgaagcagcgctggacgccggaggaagaggccgcgctcaaggccggcgtcgccaagcacgggcccggcaagtggcgcaccatcctccgggactcggacttcagcgcgctcctgcgcctccgctccaatgttgacctcaaggacaagtggcgcaacttgagcgtcaccgcaggaggttacgggtctagagagaaggcaaggatggcgttgaagaaaggcaggcgcgtggtgcctaagcttactgctgagccaatggatgtagatgagaaggatatggacaacgctcatgacacagtcattgatgtggaaccgttagcaatggctttcgagcccttgccttttttggaaagcccagataagtcagttgctaggctcgatgatctcatagtagaagctataaggaagcttaacgagccatctgggtccaataaggcagtcatttctggatatattgaggtttgtggatataaatttatagtgtgctcacttgttttttgtttgttttgtttaacttaaatcagctgtcctactaattcttttctggtcattgctgtctgtaatgggaatatttgtctcatccttctgtatgaaccatctctgctgaatttttgctagcttgggacaatcatttattactttttttgggggtatggatttaacttaattgtctatatattaggaccaatactggccgcctgctgattttcaatacctgctatctacaaaattgaagtcattggttaattctggaaaattaatcaaggtaaaccaaaagtacagaattgcaccaagttcttccttgggcggaataagcactaagatgaaaggcatgaccagggaagaggctgctgcctttgctgccaaggcagttgccgaggcagaagtagcaatggcagaagctgaggaagcagcaagagttgcagaggctgcagaaaatgatgctgaagctgcaaaggcttttcttgatgctgtcattttgtcaatgagaaacaggaacgctgcttccatgatacttcgagcttgctgatcctttacccatgcagcacaccgatgttctgctgcaaagattttctggatagacgagtttcttgtatagccttatagatcatggcgggttttcaacagcttgctgttgtcctgtgctgtgcagccaatcgacaacatgataacaagaatgatcgagaaagtagtcttcatttttttttgtttcccattgtgttgctttgtaattaaactatagccttttcccttcattagttgatgaagtgatgtcgtctaatagaacaactgtagtgaaaagaaaatgtcagaaagccgccttagttaatgcaaattgctgtgatagtatttttgcagaaatgattatatggtgacagcgtttaagattataactgccttgcagttgccgtcgattatatgcctgtaatagctagtttgggaactccatttttctaagagattttttttatttagaaaaatataacaccttagtaaaatgaggtttccaaactagccctaagattgacaacttccctttggataccag

SEQ ID NO: 32833 - DNA, 1669 bp, Zea Mays
tcgccttcgtaagctcagtcctccactcctccacctctcccacccaacaacaaaacaagcctaatggcttcctctccatctcacgccactgcgttgcctacttgccctagaaccctcgccgccgcccctctttaggattcccatgtccctggtcgccccctgacacgcccgccccggatcctgcaccggaattccgcgtggaattccgggccgaaccgcctctctgcgtgcgcctccgaccaccaaactctctcacacgcgcgcgcgcgcacgtctgaggcggttggattctccggtgggggtcccttggtctcgatttgctgctgatgggggtgccgaagcagcgctggacgccggaggaagaggccgcgctcaaggccggcgtcgccaagcacgggcccggcaagtggcgcaccatcctccgggactcggacttcagcgcgctcctgcgcctccgctccaatgttgacctcaaggacaagtggcgcaacttgagcgtcaccgcaggaggttacgggtctagagagaaggcaaggatggcgttgaagaaaggcaggcgcgtggtgcctaagcttactgctgagccaatggatgtagatgagaaggatatggacaacgctcatgacacagtcattgatgtggaaccgttagcaatggctttcgagcccttgccttttttggaaagcccagataagtcagttgctaggctcgatgatctcatagtagaagctataaggaagcttaacgagccatctgggtccaataaggcagtcatttctggatatattgaggaccaatactggccgcctgctgattttcaatacctgctatctacaaaattgaagtcattggttaattctggaaaattaatcaagggatgaacacagaaaataataatgttaaacggctaactaagcctcaagtggttgctgaactggagaagatgaaaggcatgaccagggaagaggctgctgcctttgctgccaaggcagttgccgaggcagaagtagcaatggcagaagctgaggaagcagcaagagttgcagaggctgcagaaaatgatgctgaagctgcaaaggcttttcttgatgctgtcattttgtcaatgagaaacaggaacgctgcttccatgatacttcgagcttgctgatcctttacccatgcagcacaccgatgttctgctgcaaagattttctggatagacgagtttcttgtatagccttatagatcatggcgggttttcaacagcttgctgttgtcctgtgctgtgcagccaatcgacaacatgataacaagaatgatcgagaaagtagtcttcatttttttttgtttcccattgtgttgctttgtaattaaactatagccttttcccttcattagttgatgaagtgatgtcgtctaatagaacaactgtagtgaaaagaaaatgtcagaaagccgccttagttaatgcaaattgctgtgatagtatttttgcagaaatgattatatggtgacagcgtttaagattataactgccttgcagttgccgtcgattatatgcctgtaatagctagtttgggaactccatttttctaagagattttttttatttagaaaaatataacaccttagtaaaatgaggtttccaaactagccctaagattgacaacttccctttggataccag

SEQ ID NO: 32834 - DNA, 1692 bp, Zea Mays
actcctccacctctcccacccaacaacaaaacaagcctaatggcttcctctccatctcacgccactgcgttgcctacttgccctagaaccctcgccgccgcccctctttaggattcccatgtccctggtcgccccctgacacgcccgccccggatcctgcaccggaattccgcgtggaattccgggccgaaccgcctctctgcgtgcgcctccgaccaccaaactctctcacacgcgcgcgcgcgcacgtctgaggcggttggattctccggtgggggtcccttggtctcgatttgctgctgatgggggtgccgaagcagcgctggacgccggaggaagaggccgcgctcaaggccggcgtcgccaagcacgggcccggcaagtggcgcaccatcctccgggactcggacttcagcgcgctcctgcgcctccgctccaatgttgacctcaaggacaagtggcgcaacttgagcgtcaccgcaggaggttacgggtctagagagaaggcaaggatggcgttgaagaaaggcaggcgcgtggtgcctaagcttactgctgagccaatggatgtagatgagaaggatatggacaacgctcatgacacagtcattgatgtggaaccgttagcaatggctttcgagcccttgccttttttggaaagcccagataagtcagttgctaggctcgatgatctcatagtagaagctataaggaagcttaacgagccatctgggtccaataaggcagtcatttctggatatattgagtctttttaggaataaagtggggccttcaagctgcatactatttgaatcgtgattgtaggtaaaccaaaagtacagaattgcaccaagttcttccttgggcggaataagcactaaggtatcctcttctgaagggatgaacacagaaaataataatgttaaacggctaactaagcctcaagtggttgctgaactggagaagatgaaaggcatgaccagggaagaggctgctgcctttgctgccaaggcagttgccgaggcagaagtagcaatggcagaagctgaggaagcagcaagagttgcagaggctgcagaaaatgatgctgaagctgcaaaggcttttcttgatgctgtcattttgtcaatgagaaacaggaacgctgcttccatgatacttcgagcttgctgatcctttacccatgcagcacaccgatgttctgctgcaaagattttctggatagacgagtttcttgtatagccttatagatcatggcgggttttcaacagcttgctgttgtcctgtgctgtgcagccaatcgacaacatgataacaagaatgatcgagaaagtagtcttcatttttttttgtttcccattgtgttgctttgtaattaaactatagccttttcccttcattagttgatgaagtgatgtcgtctaatagaacaactgtagtgaaaagaaaatgtcagaaagccgccttagttaatgcaaattgctgtgatagtatttttgcagaaatgattatatggtgacagcgtttaagattataactgccttgcagttgccgtcgattatatgcctgtaatagctagtttgggaactccatttttctaagagattttttttatttagaaaaatataacaccttagtaaaatgaggtttccaaactagccctaagattgacaacttccctttggataccag

SEQ ID NO: 32835 - DNA, 1423 bp, Zea Mays
ggtgaactactactgctaggaaaatctgtcgctctctctctctctcaacgacgccgcgatccagatccagccaggtatcaagtcatccttccgccgccgcgtactgcgcctatcttgcttctccggcggacgggcgtacccatcgtcctcgatcatcccccggactggatcggaacggagatccagccggacctgcggtgatcccttccttttctcgtatagtgagctagccaatgaagaggtaaattcgtcaggcttgtatcaagttagtagttcatggtgcctggatgagcagtagagatgctactggccgtggaaggaggagggttcttctcgtcttcagcttcggggtacagccatggccttgctctcttgctactcggacggaaagctgaggagaagcccgtcaaggcttcgccgtggaaccagtaccggctagtcgaccgggaggccgagcaggtgtaccacctgccctccgccaaggatcaggcgcctgggaaatgtgctccctttgtctgtttcggatgcacggctaatggcctcgaggtggcgtctccttccaaagcggtctccagcaatgcgctcggtaggggtacctcacaggaagaagcatcttgttcagcacacaaggcgttgacaactagtgcttccatcagtggcagtgagagacgtggctgtcttaagagcaactccaaaagggattctttggagcaccgtatagtggtgagcgagggggaagaaccacgcgagtctgtggaagaggtgcagaccttgagatctagcatagaacggaggaaagttcagtggacagatacatgtggaaaggagctttttgagataagggagtttgaaacaagcgacgagggcctgtcggatgatgatgcagaaaacgatggtttccggaaatgtgaatgtgtgattcagtagatttcatctctgcacaacaagcctgacagaaacatctcatgggaagcctgccctgctgggaaagatgtgccacggagactactttgccgctgaaatgatcgacgacagtcgaaacaaaacaaacagccatgaatcgatatcgtgctagagtatttgttggttatatgcttaactagtctgctcagcagggttatagtttcgatgcccacctgtacaatatcaagatcccctttctttcttttctgtcacattttatttttctcgctttccattgtgttttcacgcccgctgtaccatatgaggctgccatgttacctcctccagggattttggatccctgacatcatgctgttttattttgttttgctcctgacgtatttagtgatggcttgttgatagtttcgtccaaattggtaacattcattcttcacttcataggagtgacgtacgagggacatttggttgtttagcccaggcgtactgtgttttcgatgag

SEQ ID NO: 32836 - DNA, 1418 bp, Zea Mays
ggtgaactactactgctaggaaaatctgtcgctctctctctctctcaacgacgccgcgatccagatccagccaggtatcaagtcatccttccgccgccgcgtactgcgcctatcttgcttctccggcggacgggcgtacccatcgtcctcgatcatcccccggactggatcggaacggagatccagccggacctgcggtgatcccttccttttctcgtgagctagccaatgaagaggtaaattcgtcaggcttgtatcaagttagtagttcatggtgcctggatgagcagtagagatgctactggccgtggaaggaggagggttcttctcgtcttcagcttcggggtacagccatggccttgctctcttgctactcggacggaaagctgaggagaagcccgtcaaggcttcgccgtggaaccagtaccggctagtcgaccgggaggccgagcaggtgtaccacctgccctccgccaaggatcaggcgcctgggaaatgtgctccctttgtctgtttcggatgcacggctaatggcctcgaggtggcgtctccttccaaagcggtctccagcaatgcgctcggtaggggtacctcacaggaagaagcatcttgttcagcacacaaggcgttgacaactagtgcttccatcagtggcagtgagagacgtggctgtcttaagagcaactccaaaagggattctttggagcaccgtatagtggtgagcgagggggaagaaccacgcgagtctgtggaagaggtgcagaccttgagatctagcatagaacggaggaaagttcagtggacagatacatgtggaaaggagctttttgagataagggagtttgaaacaagcgacgagggcctgtcggatgatgatgcagaaaacgatggtttccggaaatgtgaatgtgtgattcagtagatttcatctctgcacaacaagcctgacagaaacatctcatgggaagcctgccctgctgggaaagatgtgccacggagactactttgccgctgaaatgatcgacgacagtcgaaacaaaacaaacagccatgaatcgatatcgtgctagagtatttgttggttatatgcttaactagtctgctcagcagggttatagtttcgatgcccacctgtacaatatcaagatcccctttctttcttttctgtcacattttatttttctcgctttccattgtgttttcacgcccgctgtaccatatgaggctgccatgttacctcctccagggattttggatccctgacatcatgctgttttattttgttttgctcctgacgtatttagtgatggcttgttgatagtttcgtccaaattggtaacattcattcttcacttcataggagtgacgtacgagggacatttggttgtttagcccaggcgtactgtgttttcgatgag

SEQ ID NO: 32837 - DNA, 712 bp, Zea Mays
ccgcctctgtcctggacttgcaatatcgatctatcccatctatcattgtcgattcgtggctataaccggcagtgatgacccaataatccctgctggttggtcctatcactaccggttcttaagcaaccgatggaccgacaatgaagcgacgagggcctgtcggatgatgatgcagaaaacgatggtttccggaaatgtgaatgtgtgattcagtagatttcatctctgcacaacaagcctgacagaaacatctcatgggaagcctgccctgctgggaaagatgtgccacggagactactttgccgctgaaatgatcgacgacagtcgaaacaaaacaaacagccatgaatcgatatcgtgctagagtatttgttggttatatgcttaactagtctgctcagcagggttatagtttcgatgcccacctgtacaatatcaagatcccctttctttcttttctgtcacattttatttttctcgctttccattgtgttttcacgcccgctgtaccatatgaggctgccatgttacctcctccagggattttggatccctgacatcatgctgttttattttgttttgctcctgacgtatttagtgatggcttgttgatagtttcgtccaaattggtaacattcattcttcacttcataggagtgacgtacgagggacatttggttgtttagcccaggcgtactgtgttttcgatgag

SEQ ID NO: 32838 - DNA, 3173 bp, Zea Mays
aagaaaatggcctgagcccaaatccccaaagccaagttgagcccagatggccctcacagaatcgcccgatcccagcccctccaccggcgacccattctgctcacttccatgcgggccccagcccgccacgaatccccgttcccagtcccgcctgctccgacctcgcctttctccatctagggtttctctctccatttccaccccatcggaccggagcttcgcatggagtcatcgcagtctcggaagcggacgcgccaagcgtatgactgcgccgccgcgctgccaccagagcgagaagtggtagcgaggggtggcgcgtcgcctccatggagggaggatgaccgcgacggacactacgtcttcgatctcggcgagaacttgacccgccgatataaaatcttgagcaaaatgggagaaggttcgggttttctgcaatctgtcgtctcctcttctggtgggtatcctcgttattattctaatgaagagggctacgagttgggttttcgtaggtacatttgggcgtgttttggaatgctgggaccgtgaaacacgtgaatatgttgccataaaagttgttcgcagtatccgcaagtaccgtgatgctgcaatgattgagatagatgtgctcaatcgccttgcagaaaatgagaaatacagatctctgtgagtatctcagaaacctgattatgtaaagtataaccctattctgtttctgactcgtcagttcctcttcaattaccagctgtgttcaaatacagagatggtttgactatcgtaatcatatatgcattgtaagtactagcttttggtcaattatactagtttctagaagtcagttaccaattctgagaatgcatttcatttttgtggatttgcggatgtgttgttgtttatattatttatcttactggccctcccaatacgccttgtatggaatgagagactcatctataaaaactatcacaactctcctgtagttagattggcttgacagtaaaatcattttgttcttcactcatgaaggttccctcatatggtcccaaatttaaaatatactttattcaatggatatcgatgattttgtcaggtttttgagaagcttgggccaagcttgtatgattttctaaagagaaatagataccgacctttccctgtggaacttgtgcgggagtttggacggcaactgttggaatctgtagcatatatgcatgacttgaggcttatccacactgatctgaagccagaaaacatactacttgtgtcttctgagtatataaaagttccaagtacaaagaagaattcacaagatgagatgcatttcaagtgcttgccacagtccagtgccataaagctgatagattttggtagtaccgcctttgataatcaggaccataactcgattgtttctacgaggcattacagggcacctgaaataatcttaggtttaggctggagttttccatgtgatatttggagtgttggctgtattcttgttgaactatgctctggggaagcattgtttcagacacatgagaatctggaacacctagcaatgatggagagagttttgggacctctaccagagcatatgatacggaaatcaaggtgtgttatttgcaaccttaacttagtagatcattttatcttttgaacgaaatgtatttgtgttcaaatcagcttgtgataagcatatctttatttgcttgatgtttgttcttttttttggtggggctgggattttgggttttactatgcatttatttgttaaacatttttagaaaatgatgcattcgattctgcctgcagtagagtatcagagttacatttttgtaatcattttgagaaactgacattttctttatttattgaatgtttctaatctggtacaccttcattatatttcatgattagcagagtatcagtgtacttaactctcatatgttttattctattttgtttattgccacttgaattttcaaagctaatggctgcttttctactttgattttcaaggttaataaccgcctttttatggccactatcaatactagcttgctccccctttttttgtttcttgtaccttgattttgatagttttgcgtgtgtatctcttctatgtgtattgcctgcttgttatatttaaccagcgacattgaaatttcttgggaactcttgtaatatatttttgtttcttccatttattttctaatattcttttattgtgcttacatgtgtcacctggaatatgtagttcttctgctcagaaatatttcaggagggcaacacgtttaaattggcctgaaggtgctgtttcaagagaaagcatcagagctgtgaagaaactggatcgactaaaggacttggtatcgaggaacgctggccattcgaaggcagagctggcagacttgctatacagtatcctccggttcgagccatcagaacgtctgacagcgcaagaagctctggagcatccattcttcaggaacccgacatgacttgttggacaggcttgactcgtgtaactctctgcttcaagaaggtatcgaggaagcaggcagagccgtccattgcaaagctgatgggtatcttgctcctcttttaccagagagtttgtgtaagcctgtcagtaaggcttcttgcggtggtgataaagctgatggctttggtcacccaatgtaatgtacactagcattttttttttacctagggagtttagtgcctgtatgttgttaaccgggacgcgctatgagctgcgtcccaatgccctggttccataatccaattgcagatgttgaaaatcaagcatgaagggatccctgcgcagctgtgctcccgtagctgcaatagtctgttggatgcaagtatcgtgatgtcacgagtttgggatttgttgcattccgactgcatgggtggtgtgaagaatgggcatgaaatgccgtgtcctgttgttgagacttgtgtgtagctggtgaagtgttgttgttgatggagtacaacttgtggaaagagagtgcgcataggctagaaagtacagtatcttcatactaggtaagggatgtttctgaagctcatgtgcaccgcgattgcatgttggcaccgaatcttatcgtacctcatggatccctcactcgtgctgtttcgtcctgacatggacacatgaggagaggagagga

SEQ ID NO: 32839 - DNA, 2934 bp, Zea Mays
tgagcccaaatccccaaagccaagttgagcccagatggccctcacagaatcgcccgatcccagcccctccaccggcgacccattctgctcacttccatgcgggccccagcccgccacgaatccccgttcccagtcccgcctgctccgacctcgcctttctccatctagggtttctctctccatttccaccccatcggaccggagcttcgcatggagtcatcgcagtctcggaagcggacgcgccaagcgtatgactgcgccgccgcgctgccaccagagcgagaagtggtagcgaggggtggcgcgtcgcctccatggagggaggatgaccgcgacggacactacgtcttcgatctcggcgagaacttgacccgccgatataaaatcttgagcaaaatgggagaaggttcgggttttctgcaatctgtcgtctcctcttctggtgggtatcctcgttattattctaatgaagagggctacgagttgggttttcgtaggtacatttgggcgtgttttggaatgctgggaccgtgaaacacgtgaatatgttgccataaaagttgttcgcagtatccgcaagtaccgtgatgctgcaatgattgagatagatgtgctcaatcgccttgcagaaaatgagaaatacagatctctctgtgttcaaatacagagatggtttgactatcgtaatcatatatgcattgtaagtactagcttttggtcaattatactagtttctagaagtcagttaccaattctgagaatgcatttcatttttgtggatttgcggatgtgttgttgtttatattatttatcttactggccctcccaatacgccttgtatggaatgagagactcatctataaaaactatcacaactctcctgtagttagattggcttgacagtaaaatcattttgttcttcactcatgaaggttccctcatatggtcccaaatttaaaatatactttattcaatggatatcgatgattttgtcaggtttttgagaagcttgggccaagcttgtatgattttctaaagagaaatagataccgacctttccctgtggaacttgtgcgggagtttggacggcaactgttggaatctgtagcatatatgcatgacttgaggcttatccacactgatctgaagccagaaaacatactacttgtgtcttctgagtatataaaagttccaagtacaaaggtttaggctggagttttccatgtgatatttggagtgttggctgtattcttgttgaactatgctctggggaagcattgtttcagacacatgagaatctggaacacctagcaatgatggagagagttttgggacctctaccagagcatatgatacggaaatcaaggtgtgttatttgcaaccttaacttagtagatcattttatcttttgaacgaaatgtatttgtgttcaaatcagcttgtgataagcatatctttatttgcttgatgtttgttcttttttttggtggggctgggattttgggttttactatgcatttatttgttaaacatttttagaaaatgatgcattcgattctgcctgcagtagagtatcagagttacatttttgtaatcattttgagaaactgacattttctttatttattgaatgtttctaatctggtacaccttcattatatttcatgattagcagagtatcagtgtacttaactctcatatgttttattctattttgtttattgccacttgaattttcaaagctaatggctgcttttctactttgattttcaaggttaataaccgcctttttatggccactatcaatactagcttgctccccctttttttgtttcttgtaccttgattttgatagttttgcgtgtgtatctcttctatgtgtattgcctgcttgttatatttaaccagcgacattgaaatttcttgggaactcttgtaatatatttttgtttcttccatttattttctaatattcttttattgtgcttacatgtgtcacctggaatatgtagttcttctgctcagaaatatttcaggagggcaacacgtttaaattggcctgaaggtgctgtttcaagagaaagcatcagagctgtgaagaaactggatcgactaaaggacttggtatcgaggaacgctggccattcgaaggcagagctggcagacttgctatacagtatcctccggttcgagccatcagaacgtctgacagcgcaagaagctctggagcatccattcttcaggaacccgacatgacttgttggacaggcttgactcgtgtaactctctgcttcaagaaggtatcgaggaagcaggcagagccgtccattgcaaagctgatgggtatcttgctcctcttttaccagagagtttgtgtaagcctgtcagtaaggcttcttgcggtggtgataaagctgatggctttggtcacccaatgtaatgtacactagcattttttttttacctagggagtttagtgcctgtatgttgttaaccgggacgcgctatgagctgcgtcccaatgccctggttccataatccaattgcagatgttgaaaatcaagcatgaagggatccctgcgcagctgtgctcccgtagctgcaatagtctgttggatgcaagtatcgtgatgtcacgagtttgggatttgttgcattccgactgcatgggtggtgtgaagaatgggcatgaaatgccgtgtcctgttgttgagacttgtgtgtagctggtgaagtgttgttgttgatggagtacaacttgtggaaagagagtgcgcataggctagaaagtacagtatcttcatactaggtaagggatgtttctgaagctcatgtgcaccgcgattgcatgttggcaccgaatcttatcgtacctcatggatccctcactcgtgctgtttcgtcctgacatggacacatgaggagaggagagga

SEQ ID NO: 32840 - DNA, 2661 bp, Zea Mays
atggccctcacagaatcgcccgatcccagcccctccaccggcgacccattctgctcacttccatgcgggccccagcccgccacgaatccccgttcccagtcccgcctgctccgacctcgcctttctccatctagggtttctctctccatttccaccccatcggaccggagcttcgcatggagtcatcgcagtctcggaagcggacgcgccaagcgtatgactgcgccgccgcgctgccaccagagcgagaagtggtagcgaggggtggcgcgtcgcctccatggagggaggatgaccgcgacggacactacgtcttcgatctcggcgagaacttgacccgccgatataaaatcttgagcaaaatgggagaaggtacatttgggcgtgttttggaatgctgggaccgtgaaacacgtgaatatgttgccataaaagttgttcgcagtatccgcaagtaccgtgatgctgcaatgattgagatagatgtgctcaatcgccttgcagaaaatgagaaatacagatctctctgtgttcaaatacagagatggtttgactatcgtaatcatatatgcattgtttttgagaagcttgggccaagcttgtatgattttctaaagagaaatagataccgacctttccctgtggaacttgtgcgggagtttggacggcaactgttggaatctgtagcatatatgcatgacttgaggcttatccacactgatctgaagccagaaaacatactacttgtgtcttctgagtatataaaagttccaagtacaaagaagaattcacaagatgagatgcatttcaagtgcttgccacagtccagtgccataaagctgatagattttggtagtaccgcctttgataatcaggaccataactcgattgtttctacgaggcattacagggcacctgaaataatcttaggtttaggctggagttttccatgtgatatttggagtgttggctgtattcttgttgaactatgctctggggaagcattgtttcagacacatgagaatctggaacacctagcaatgatggagagagttttgggacctctaccagagcatatgatacggaaatcaaggtgtgttatttgcaaccttaacttagtagatcattttatcttttgaacgaaatgtatttgtgttcaaatcagcttgtgataagcatatctttatttgcttgatgtttgttcttttttttggtggggctgggattttgggttttactatgcatttatttgttaaacatttttagaaaatgatgcattcgattctgcctgcagtagagtatcagagttacatttttgtaatcattttgagaaactgacattttctttatttattgaatgtttctaatctggtacaccttcattatatttcatgattagcagagtatcagtgtacttaactctcatatgttttattctattttgtttattgccacttgaattttcaaagctaatggctgcttttctactttgattttcaaggttaataaccgcctttttatggccactatcaatactagcttgctccccctttttttgtttcttgtaccttgattttgatagttttgcgtgtgtatctcttctatgtgtattgcctgcttgttatatttaaccagcgacattgaaatttcttgggaactcttgtaatatatttttgtttcttccatttattttctaatattcttttattgtgcttacatgtgtcacctggaatatgtagttcttctgctcagaaatatttcaggagggcaacacgtttaaattggcctgaaggtgctgtttcaagagaaagcatcagagctgtgaagaaactggatcgactaaaggacttggtatcgaggaacgctggccattcgaaggcagagctggcagacttgctatacagtatcctccggttcgagccatcagaacgtctgacagcgcaagaagctctggagcatccattcttcaggaacccgacatgacttgttggacaggcttgactcgtgtaactctctgcttcaagaaggtatcgaggaagcaggcagagccgtccattgcaaagctgatgggtatcttgctcctcttttaccagagagtttgtgtaagcctgtcagtaaggcttcttgcggtggtgataaagctgatggctttggtcacccaatgtaatgtacactagcattttttttttacctagggagtttagtgcctgtatgttgttaaccgggacgcgctatgagctgcgtcccaatgccctggttccataatccaattgcagatgttgaaaatcaagcatgaagggatccctgcgcagctgtgctcccgtagctgcaatagtctgttggatgcaagtatcgtgatgtcacgagtttgggatttgttgcattccgactgcatgggtggtgtgaagaatgggcatgaaatgccgtgtcctgttgttgagacttgtgtgtagctggtgaagtgttgttgttgatggagtacaacttgtggaaagagagtgcgcataggctagaaagtacagtatcttcatactaggtaagggatgtttctgaagctcatgtgcaccgcgattgcatgttggcaccgaatcttatcgtacctcatggatccctcactcgtgctgtttcgtcctgacatggacacatgaggagaggagagga

SEQ ID NO: 32841 - DNA, 1815 bp, Zea Mays
atggccctcacagaatcgcccgatcccagcccctccaccggcgacccattctgctcacttccatgcgggccccagcccgccacgaatccccgttcccagtcccgcctgctccgacctcgcctttctccatctagggtttctctctccatttccaccccatcggaccggagcttcgcatggagtcatcgcagtctcggaagcggacgcgccaagcgtatgactgcgccgccgcgctgccaccagagcgagaagtggtagcgaggggtggcgcgtcgcctccatggagggaggatgaccgcgacggacactacgtcttcgatctcggcgagaacttgacccgccgatataaaatcttgagcaaaatgggagaaggttcgggttttctgcaatctgtcgtctcctcttctgatatgcatgacttgaggcttatccacactgatctgaagccagaaaacatactacttgtgtcttctgagtatataaaagttccaagtacaaagaagaattcacaagatgagatgcatttcaagtgcttgccacagtccagtgccataaagctgatagattttggtagtaccgcctttgataatcaggaccataactcgattgtttctacgaggcattacagggcacctgaaataatcttaggtttaggctggagttttccatgtgatatttggagtgttggctgtattcttgttgaactatgctctgttagatctctgctcagttttctcacttttttttcctagtaccagtctggtaattatttttctaacatcacactttttttagggggaagcattgtttcagacacatgagaatctggaacacctagcaatgatggagagagttttgggacctctaccagagcatatgatacggaaatcaagttcttctgctcagaaatatttcaggagggcaacacgtttaaattggcctgaaggtgctgtttcaagagaaagcatcagagctgtgaagaaactggatcgactaaaggacttggtatcgaggaacgctggccattcgaaggcagagctggcagacttgctatacagtatcctccggttcgagccatcagaacgtctgacagcgcaagaagctctggagcatccattcttcaggaacccgacatgacttgttggacaggcttgactcgtgtaactctctgcttcaagaaggtatcgaggaagcaggcagagccgtccattgcaaagctgatgggtatcttgctcctcttttaccagagagtttgtgtaagcctgtcagtaaggcttcttgcggtggtgataaagctgatggctttggtcacccaatgtaatgtacactagcattttttttttacctagggagtttagtgcctgtatgttgttaaccgggacgcgctatgagctgcgtcccaatgccctggttccataatccaattgcagatgttgaaaatcaagcatgaagggatccctgcgcagctgtgctcccgtagctgcaatagtctgttggatgcaagtatcgtgatgtcacgagtttgggatttgttgcattccgactgcatgggtggtgtgaagaatgggcatgaaatgccgtgtcctgttgttgagacttgtgtgtagctggtgaagtgttgttgttgatggagtacaacttgtggaaagagagtgcgcataggctagaaagtacagtatcttcatactaggtaagggatgtttctgaagctcatgtgcaccgcgattgcatgttggcaccgaatcttatcgtacctcatggatccctcactcgtgctgtttcgtcctgacatggacacatgaggagaggagagga

SEQ ID NO: 32842 - DNA, 1942 bp, Zea Mays
atggccctcacagaatcgcccgatcccagcccctccaccggcgacccattctgctcacttccatgcgggccccagcccgccacgaatccccgttcccagtcccgcctgctccgacctcgcctttctccatctagggtttctctctccatttccaccccatcggaccggagcttcgcatggagtcatcgcagtctcggaagcggacgcgccaagcgtatgactgcgccgccgcgctgccaccagagcgagaagtggtagcgaggggtggcgcgtcgcctccatggagggaggatgaccgcgacggacactacgtcttcgatctcggcgagaacttgacccgccgatataaaatcttgagcaaaatgggagaaggttcgggttttctgcaatctgtcgtctcctcttctggtgggtatcctcgttattattctaatgaagagggctacgagttgggttttcgtaggtacatttgggcgtgttttggaatgctgggaccgtgaaacacgtgaatatgttgccataaaagttgttcgcagtatccgcaagtaccgtgatgctgcaatgattgagatagatgtgctcaatcgccttgcagaaaatgagaaatacagatctctatatgcatgacttgaggcttatccacactgatctgaagccagaaaacatactacttgtgtcttctgagtatataaaagttccaagtacaaagaagaattcacaagatgagatgcatttcaagtgcttgccacagtccagtgccataaagctgatagattttggtagtaccgcctttgataatcaggaccataactcgattgtttctacgaggcattacagggcacctgaaataatcttaggtttaggctggagttttccatgtgatatttggagtgttggctgtattcttgttgaactatgctctggggaagcattgtttcagacacatgagaatctggaacacctagcaatgatggagagagttttgggacctctaccagagcatatgatacggaaatcaagttcttctgctcagaaatatttcaggagggcaacacgtttaaattggcctgaaggtgctgtttcaagagaaagcatcagagctgtgaagaaactggatcgactaaaggacttggtatcgaggaacgctggccattcgaaggcagagctggcagacttgctatacagtatcctccggttcgagccatcagaacgtctgacagcgcaagaagctctggagcatccattcttcaggaacccgacatgacttgttggacaggcttgactcgtgtaactctctgcttcaagaaggtatcgaggaagcaggcagagccgtccattgcaaagctgatgggtatcttgctcctcttttaccagagagtttgtgtaagcctgtcagtaaggcttcttgcggtggtgataaagctgatggctttggtcacccaatgtaatgtacactagcattttttttttacctagggagtttagtgcctgtatgttgttaaccgggacgcgctatgagctgcgtcccaatgccctggttccataatccaattgcagatgttgaaaatcaagcatgaagggatccctgcgcagctgtgctcccgtagctgcaatagtctgttggatgcaagtatcgtgatgtcacgagtttgggatttgttgcattccgactgcatgggtggtgtgaagaatgggcatgaaatgccgtgtcctgttgttgagacttgtgtgtagctggtgaagtgttgttgttgatggagtacaacttgtggaaagagagtgcgcataggctagaaagtacagtatcttcatactaggtaagggatgtttctgaagctcatgtgcaccgcgattgcatgttggcaccgaatcttatcgtacctcatggatccctcactcgtgctgtttcgtcctgacatggacacatgaggagaggagagga

SEQ ID NO: 32843 - DNA, 2568 bp, Zea Mays
atggccctcacagaatcgcccgatcccagcccctccaccggcgacccattctgctcacttccatgcgggccccagcccgccacgaatccccgttcccagtcccgcctgctccgacctcgcctttctccatctagggtttctctctccatttccaccccatcggaccggagcttcgcatggagtcatcgcagtctcggaagcggacgcgccaagcgtatgactgcgccgccgcgctgccaccagagcgagaagtggtagcgaggggtggcgcgtcgcctccatggagggaggatgaccgcgacggacactacgtcttcgatctcggcgagaacttgacccgccgatataaaatcttgagcaaaatgggagaaggttcgggttttctgcaatctgtcgtctcctcttctggtgggtatcctcgttattattctaatgaagagggctacgagttgggttttcgtaggtacatttgggcgtgttttggaatgctgggaccgtgaaacacgtgaatatgttgccataaaagttgttcgcagtatccgcaagtaccgtgatgctgcaatgattgagatagatgtgctcaatcgccttgcagaaaatgagaaatacagatctctctgtgttcaaatacagagatggtttgactatcgtaatcatatatgcattgtaagtactagcttttggtcaattatactagtttctagaagtcagttaccaattctgagaatgcatttcatttttgtggatttgcggatgtgttgttgtttatattatttatcttactggccctcccaatacgccttgtatggaatgagagactcatctataaaaactatcacaactctcctgtagttagattggcttgacagtaaaatcattttgttcttcactcatgaaggttccctcatatggtcccaaatttaaaatatactttattcaatggatatcgatgattttgtcaggtttttgagaagcttgggccaagcttgtatgattttctaaagagaaatagataccgacctttccctgtggaacttgtgcgggagtttggacggcaactgttggaatctgtagcatatatgcatgacttgaggcttatccacactgatctgaagccagaaaacatactacttgtgtcttctgagtatataaaagttccaagtacaaaggtacctattcttacccatttttagtgattatctgctaaatctttactaggcatagagtatttgcagttttcttgaatgattgcttggggttgtacagaagaattcacaagatgagatgcatttcaagtgcttgccacagtccagtgccataaagctgatagattttggtagtaccgcctttgataatcaggaccataactcgattgtttctacgaggcattacagggcacctgaaataatcttaggtttaggctggagttttccatgtgatatttggagtgttggctgtattcttgttgaactatgctctgttagatctctgctcagttttctcacttttttttcctagtaccagtctggtaattatttttctaacatcacactttttttagggggaagcattgtttcagacacatgagaatctggaacacctagcaatgatggagagagttttgggacctctaccagagcatatgatacggaaatcaagaaatatttcaggagggcaacacgtttaaattggcctgaaggtgctgtttcaagagaaagcatcagagctgtgaagaaactggatcgactaaaggacttggtatcgaggaacgctggccattcgaaggcagagctggcagacttgctatacagtatcctccggttcgagccatcagaacgtctgacagcgcaagaagctctggagcatccattcttcaggaacccgacatgacttgttggacaggcttgactcgtgtaactctctgcttcaagaaggtatcgaggaagcaggcagagccgtccattgcaaagctgatgggtatcttgctcctcttttaccagagagtttgtgtaagcctgtcagtaaggcttcttgcggtggtgataaagctgatggctttggtcacccaatgtaatgtacactagcattttttttttacctagggagtttagtgcctgtatgttgttaaccgggacgcgctatgagctgcgtcccaatgccctggttccataatccaattgcagatgttgaaaatcaagcatgaagggatccctgcgcagctgtgctcccgtagctgcaatagtctgttggatgcaagtatcgtgatgtcacgagtttgggatttgttgcattccgactgcatgggtggtgtgaagaatgggcatgaaatgccgtgtcctgttgttgagacttgtgtgtagctggtgaagtgttgttgttgatggagtacaacttgtggaaagagagtgcgcataggctagaaagtacagtatcttcatactaggtaagggatgtttctgaagctcatgtgcaccgcgattgcatgttggcaccgaatcttatcgtacctcatggatccctcactcgtgctgtttcgtcctgacatggacacatgaggagaggagagga

SEQ ID NO: 32844 - DNA, 2093 bp, Zea Mays
atggccctcacagaatcgcccgatcccagcccctccaccggcgacccattctgctcacttccatgcgggccccagcccgccacgaatccccgttcccagtcccgcctgctccgacctcgcctttctccatctagggtttctctctccatttccaccccatcggaccggagcttcgcatggagtcatcgcagtctcggaagcggacgcgccaagcgtatgactgcgccgccgcgctgccaccagagcgagaagtggtagcgaggggtggcgcgtcgcctccatggagggaggatgaccgcgacggacactacgtcttcgatctcggcgagaacttgacccgccgatataaaatcttgagcaaaatgggagaaggttcgggttttctgcaatctgtcgtctcctcttctggtgggtatcctcgttattattctaatgaagagggctacgagttgggttttcgtaggtacatttgggcgtgttttggaatgctgggaccgtgaaacacgtgaatatgttgccataaaagttgttcgcagtatccgcaagtaccgtgatgctgcaatgattgagatagatgtgctcaatcgccttgcagaaaatgagaaatacagatctctctgtgttcaaatacagagatggtttgactatcgtaatcatatatgcattgtttttgagaagcttgggccaagcttgtatgattttctaaagagaaatagataccgacctttccctgtggaacttgtgcgggagtttggacggcaactgttggaatctgtagcatatatgcatgacttgaggcttatccacactgatctgaagccagaaaacatactacttgtgtcttctgagtatataaaagttccaagtacaaagaagaattcacaagatgagatgcatttcaagtgcttgccacagtccagtgccataaagctgatagattttggtagtaccgcctttgataatcaggaccataactcgattgtttctacgaggcattacagggcacctgaaataatcttaggtttaggctggagttttccatgtgatatttggagtgttggctgtattcttgttgaactatgctctggggaagcattgtttcagacacatgagaatctggaacacctagcaatgatggagagagttttgggacctctaccagagcatatgatacggaaatcaagaaatatttcaggagggcaacacgtttaaattggcctgaaggtgctgtttcaagagaaagcatcagagctgtgaagaaactggatcgactaaaggacttggtatcgaggaacgctggccattcgaaggcagagctggcagacttgctatacagtatcctccggttcgagccatcagaacgtctgacagcgcaagaagctctggagcatccattcttcaggaacccgacatgacttgttggacaggcttgactcgtgtaactctctgcttcaagaaggtatcgaggaagcaggcagagccgtccattgcaaagctgatgggtatcttgctcctcttttaccagagagtttgtgtaagcctgtcagtaaggcttcttgcggtggtgataaagctgatggctttggtcacccaatgtaatgtacactagcattttttttttacctagggagtttagtgcctgtatgttgttaaccgggacgcgctatgagctgcgtcccaatgccctggttccataatccaattgcagatgttgaaaatcaagcatgaagggatccctgcgcagctgtgctcccgtagctgcaatagtctgttggatgcaagtatcgtgatgtcacgagtttgggatttgttgcattccgactgcatgggtggtgtgaagaatgggcatgaaatgccgtgtcctgttgttgagacttgtgtgtagctggtgaagtgttgttgttgatggagtacaacttgtggaaagagagtgcgcataggctagaaagtacagtatcttcatactaggtaagggatgtttctgaagctcatgtgcaccgcgattgcatgttggcaccgaatcttatcgtacctcatggatccctcactcgtgctgtttcgtcctgacatggacacatgaggagaggagagga

SEQ ID NO: 32845 - DNA, 2546 bp, Zea Mays
atggccctcacagaatcgcccgatcccagcccctccaccggcgacccattctgctcacttccatgcgggccccagcccgccacgaatccccgttcccagtcccgcctgctccgacctcgcctttctccatctagggtttctctctccatttccaccccatcggaccggagcttcgcatggagtcatcgcagtctcggaagcggacgcgccaagcgtatgactgcgccgccgcgctgccaccagagcgagaagtggtagcgaggggtggcgcgtcgcctccatggagggaggatgaccgcgacggacactacgtcttcgatctcggcgagaacttgacccgccgatataaaatcttgagcaaaatgggagaaggtacatttgggcgtgttttggaatgctgggaccgtgaaacacgtgaatatgttgccataaaagttgttcgcagtatccgcaagtaccgtgatgctgcaatgattgagatagatgtgctcaatcgccttgcagaaaatgagaaatacagatctctctgtgttcaaatacagagatggtttgactatcgtaatcatatatgcattatatgcatgacttgaggcttatccacactgatctgaagccagaaaacatactacttgtgtcttctgagtatataaaagttccaagtacaaagaagaattcacaagatgagatgcatttcaagtgcttgccacagtccagtgccataaagctgatagattttggtagtaccgcctttgataatcaggaccataactcgattgtttctacgaggcattacagggcacctgaaataatcttaggtttaggctggagttttccatgtgatatttggagtgttggctgtattcttgttgaactatgctctggggaagcattgtttcagacacatgagaatctggaacacctagcaatgatggagagagttttgggacctctaccagagcatatgatacggaaatcaaggtgtgttatttgcaaccttaacttagtagatcattttatcttttgaacgaaatgtatttgtgttcaaatcagcttgtgataagcatatctttatttgcttgatgtttgttcttttttttggtggggctgggattttgggttttactatgcatttatttgttaaacatttttagaaaatgatgcattcgattctgcctgcagtagagtatcagagttacatttttgtaatcattttgagaaactgacattttctttatttattgaatgtttctaatctggtacaccttcattatatttcatgattagcagagtatcagtgtacttaactctcatatgttttattctattttgtttattgccacttgaattttcaaagctaatggctgcttttctactttgattttcaaggttaataaccgcctttttatggccactatcaatactagcttgctccccctttttttgtttcttgtaccttgattttgatagttttgcgtgtgtatctcttctatgtgtattgcctgcttgttatatttaaccagcgacattgaaatttcttgggaactcttgtaatatatttttgtttcttccatttattttctaatattcttttattgtgcttacatgtgtcacctggaatatgtagttcttctgctcagaaatatttcaggagggcaacacgtttaaattggcctgaaggtgctgtttcaagagaaagcatcagagctgtgaagaaactggatcgactaaaggacttggtatcgaggaacgctggccattcgaaggcagagctggcagacttgctatacagtatcctccggttcgagccatcagaacgtctgacagcgcaagaagctctggagcatccattcttcaggaacccgacatgacttgttggacaggcttgactcgtgtaactctctgcttcaagaaggtatcgaggaagcaggcagagccgtccattgcaaagctgatgggtatcttgctcctcttttaccagagagtttgtgtaagcctgtcagtaaggcttcttgcggtggtgataaagctgatggctttggtcacccaatgtaatgtacactagcattttttttttacctagggagtttagtgcctgtatgttgttaaccgggacgcgctatgagctgcgtcccaatgccctggttccataatccaattgcagatgttgaaaatcaagcatgaagggatccctgcgcagctgtgctcccgtagctgcaatagtctgttggatgcaagtatcgtgatgtcacgagtttgggatttgttgcattccgactgcatgggtggtgtgaagaatgggcatgaaatgccgtgtcctgttgttgagacttgtgtgtagctggtgaagtgttgttgttgatggagtacaacttgtggaaagagagtgcgcataggctagaaagtacagtatcttcatactaggtaagggatgtttctgaagctcatgtgcaccgcgattgcatgttggcaccgaatcttatcgtacctcatggatccctcactcgtgctgtttcgtcctgacatggacacatgaggagaggagagga

SEQ ID NO: 32846 - DNA, 1947 bp, Zea Mays
cttgtttccgtcccattttatgtcagtggtaattagtttagtagctaatggatggatggatgtctgcgtccgtcgtcctcagccacccagacgtatgtatgtgtagaagccgccatgcttgtgcagactgcagttgcatatcccgatcggccaacagcctcgatcacctgatgagtggctctcggtgccattcccctcccagggccaggagtctcctcgctcaatgagttgcaaagcaagacgttcgagacccgggaccctcgcaccggcgaggtgatcgccagcatcgcggagggaggcaaggccgacgtcgacctcgccgtcaaggccgcccgggaggccttcgacaacgggccctggcccaggatgacgggatacgagcgtggtcggatcctccacaggttcgcggacctgatcgacgagcacgtggaggagctggcggcgctggacacggtggacgccggcaagctgttcgccgtgggcaaggcgcgggacatcccgggcgccgcgcacctgctgcgctactacgccggcgccgccgacaaggtgcacggcgcgacgctcaagatggcgcagcggatgcacgggtacacgctcaaggagcccgtgggcgtggtgggccacatcgtgccctggaactaccccaccaccatgttcttcttcaaggtagggcccgcgctcgccgcaggctgcgccgtcgtcgtcaagcccgccgagcagacgccgctgtccgcgctcttctacgcgcacctcgccagggaggccggcgtccccgccggcgtgctcaacgtcgtgccgggattcgggcccacggccggggccgccgtcgccgcccacatggacgtcgacaaggtcagcttcaccgggtccacggaggtcggccgcctcgtcatgagggccgcggccgagagcaacctcaagcccgtgtcgctcgagctgggcggcaagtctcccgtcatcgtcttcgacgacgccgacctcgacatggccgttaacctcgtcaacttcgccacctacaccaacaagggcgagatctgtgtggccggcacgcgcatctacgtgcaggaagggatctacgacgagttcgtgaagaaggccgccgagctcgccagcaagtccgtggtcggagacccgttcaacccgagtgtcagccaaggcccccaggttgacaaggaccagtacgagaaggtcctcaggtacattgacatcgggaagcgcgaaggcgccacgctggtcaccggagggaagccctgcggcgacaagggctactacatcgagcccaccatcttcacggacgtcaaggacgacatgacgatcgcacaggatgaaatctttgggccggtgatggctctcatgaaattcaagaccgtggaggaggtgatccagaaagcgaacaacacccggtacggcctggccgccggcatcgtgaccaagaacatcgacgtcgccaacaccgtgtcgcggtccatccgcgccggcgccatctggatcaactgctacttcgcgttcgacccggacgcgccgttcggcgggtacaagatgagcgggttcggcaaggacatgggcatggacgcgctcgacaagtacctgcagaccaagaccgtcgtcactccgctgtacaacactccatggctctgaccgacctcatcctgtccgatgaacagttcaacatcacaaacaagaagaaacatgtcttgtaagatactcctccaaaggatcggttgcctgtacctgtactcttacacctgcatggattgatgatgcagtgcaatgtagcattcagaacaataaagacatgtttcggactgctggtgtctgatcggttgaagagcatgtttcagtattactatttcttttcaccgacaaccgcgttggtttcttgtgaacattttttggtgcctattttcgcgataggaacttatggcaatataatgcttggcatatcat

SEQ ID NO: 32847 - DNA, 2036 bp, Zea Mays
aggacgtactgcagatgatctgattacctagataatatatggattgattcgttatattaggtgataaagagtatatataggtaaatagatagatagatggagatagagacagggagggggagtggtccgaggtcaataggatataactccaggactcctctccatcagaatcagagacgagtcgagtgagggggcagaggccacaaaacagagagtacccaaacgatcgatctgtgcatctccccgtccgtcccgcaaccatctaattcagaagcagacatcaatggcgagcaacggctgcaacggcaacggcaacggcaacggcaacggcaaggcggctccggcgggtgtggtggtaccggagatcaagttcaccaagctcttcatcaacggcgagttcgtcgacgccgcctccggcaagacattcgataccagggacccacggaccggcgacgtgctggcccacgtagcagaggcagacaaagctgatgtggacctggcggtgaagtccgcccgggacgccttcgagcacggcaagtggccccgcatgtcaggctacgagcgcgggcggatcatgagcaagctggcggacctggtggagcagcacacggaggagctggcggcgctggacggtgccgacgccgggaagctgctgctgctgggcaagatcatcgacatccccgcggccacgcagatgctgcgctactacgccggcgccgccgacaagatccacggcgacgtcctgcgcgtctccggcaggtaccagggctacacgctcaaggagcctatcggcgtcgtgggcgtcatcatcccctggaacttccccaccatgatgttcttcctcaaggtcagcccggcgctcgccgcgggctgcaccgtcgtcgtcaagcccgccgagcagacgccgctttccgcgctctactacgcgcacctcgcaaagatggccggcgtccccgacggagtgatcaacgtcgtccccgggttcggccccaccgccggcgccgcgctcgcctcccacatggacgtcgacagcgtggccttcaccggctccacagaggtgggtcgcctcatcatggagtcggccgcgcggagcaacctcaagacggtctcgctggagctcggcggcaagtcgccgctcatcatcttcgacgacgccgacgtcgacatggccgttaacctgtcgaggcttgccgtcttcttcaacaagggagaggtttgcgtggcgggatcgcgcgtgtacgtgcaggaagggatctatgacgagttcgtcaagaaggccgtggaggccgcgcggagctggaaggttggagacccgttcgatgtcaccagcaacatgggccctcaggttgacaaggaccagtttgagagggtcctaaagtacattgagcatggcaagagcgagggagcgactctgctcaccggcggcaagcctgccgccgacaaagggaggacatgaagatcgcgcaggaagagatcttcggccccgtcatgtccctcatgaagttcaagacggttgatgaggtgatcgagaaggccaactgcaccaggtacgggctcgccgccgggatcgtgaccaagagcctggacgtcgccaaccgggtgtcccggtcggtgcgcgccggcaccgtgtgggtgaactgctacttcgccttcgacccggacgcgcccttcggcgggtacaagatgagcggcttcggccgggaccaggggctggcagccatggacaagtacctgcaggtcaagagcgtcatcaccgcgctcccggactcgccatggtactgagttgagccagggaccgatggaaccccatcgatctcttcttgtgcagtgtacatgcgtcatgcgtgcgtgctcacacagctgggttgctgctttgtgcttgtgttcgtctctggtttgtggctcatgtgtgttagtctgcaccctatccttctgtacgtagctgccggacatgcaaatagtatgttaagtacaccatataaactcttgttttataaattcaagtttagcttggagccttcactccttcagccttg

SEQ ID NO: 32848 - DNA, 1978 bp, Zea Mays
gacgtactgcagatgatctgattacctagataatatatggattgattcgttatattaggtgataaagagtatatataggtaaatagatagatagatggagatagagacagggagggggagtggtccgaggtcaataggatataactccaggactcctctccatcagaatcagagacgagtcgagtgagggggcagaggccacaaaacagagagtacccaaacgatcgatctgtgcatctccccgtccgtcccgcaaccatctaattcagaagcagacatcaatggcgagcaacggctgcaacggcaacggcaacggcaacggcaacggcaaggcggctccggcgggtgtggtggtaccggagatcaagttcaccaagctcttcatcaacggcgagttcgtcgacgccgcctccggcaagacattcgataccagggacccacggaccggcgacgtgctggcccacgtagcagaggcagacaaagctgatgtggacctggcggtgaagtccgcccgggacgccttcgagcacggcaagtggccccgcatgtcaggctacgagcgcgggcggatcatgagcaagctggcggacctggtggagcagcacacggaggagctggcggcgctggacggtgccgacgccgggaagctgctgctgctgggcaagatcatcgacatccccgcggccacgcagatgctgcgctactacgccggcgccgccgacaagatccacggcgacgtcctgcgcgtctccggcaggtaccagggctacacgctcaaggagcctatcggcgtcgtgggcgtcatcatcccctggaacttccccaccatgatgttcttcctcaaggtcagcccggcgctcgccgcgggctgcaccgtcgtcgtcaagcccgccgagcagacgccgctttccgcgctctactacgcgcacctcgcaaagatggccggcgtccccgacggagtgatcaacgtcgtccccgggttcggccccaccgccggcgccgcgctcgcctcccacatggacctcggcggcaagtcgccgctcatcatcttcgacgacgccgacgtcgacatggccgttaacctgtcgaggcttgccgtcttcttcaacaagggagaggtttgcgtggcgggatcgcgcgtgtacgtgcaggaagggatctatgacgagttcgtcaagaaggccgtggaggccgcgcggagctggaaggttggagacccgttcgatgtcaccagcaacatgggccctcaggttgacaaggaccagtttgagagggtcctaaagtacattgagcatggcaagagcgagggagcgactctgctcaccggcggcaagcctgccgccgacaaagggtactacattgagcccaccatctttgtcgatgtcactgaggacatgaagatcgcgcaggaagagatcttcggccccgtcatgtccctcatgaagttcaagacggttgatgaggtgatcgagaaggccaactgcaccaggtacgggctcgccgccgggatcgtgaccaagagcctggacgtcgccaaccgggtgtcccggtcggtgcgcgccggcaccgtgtgggtgaactgctacttcgccttcgacccggacgcgcccttcggcgggtacaagatgagcggcttcggccgggaccaggggctggcagccatggacaagtacctgcaggtcaagagcgtcatcaccgcgctcccggactcgccatggtactgagttgagccagggaccgatggaaccccatcgatctcttcttgtgcagtgtacatgcgtcatgcgtgcgtgctcacacagctgggttgctgctttgtgcttgtgttcgtctctggtttgtggctcatgtgtgttagtctgcaccctatccttctgtacgtagctgccggacatgcaaatagtatgttaagtacaccatataaactcttgttttataaattcaagtttagcttggagccttcactccttcagccttg

SEQ ID NO: 32849 - DNA, 458 bp, Zea Mays
ggagaagctcctgtgatctggcatgaccacctcccagtcccagtcccacacatcctggctcgcatccatggagagacctgctctgctcctcctcgtattgcattgcaagcaagctgatagcctgatacataagggcgaggtgagggcggctgctaaagtcctgactattacaaattagctgcaaattgctcaagtgttactatgagcaactccacgatagttccttgtaattgcgcccctaattttaaaaagggacaggtcccaaacaaaatcctaacatccaacagtgtgcgctctgcattgtttgacgccggcaacaactacaaggacatgccgcctttcattctcttccgtatgctttgtttattctatgggcgtgttcggctggctacaagccgacactgttgcagctgtttggactgctgcagctgcaatccatagagagaaaaatactgtag

SEQ ID NO: 32850 - DNA, 793 bp, Zea Mays
caaagattcattatcacacacaccgcgccctaccttccttccgcccaggctgtcagcctgcttgcaatgcaatacgaggaggagcagagcagcaggtgtctccatggatgcaagccaggatgtgtgggactgggactgggagctggtcctgccagaccacaggagcttctccctgagcaatggcggcaagaatcttgatgataaagaaacagtcgagcatgatctgctgcccccatcaggagacgttgacgtgcacgacgagtgcaagggcatcggcgtgctggatgagacctgcaaatccgccgtgcctagtgttgccgatccgataatgaattctgagggtggcgaggaagagaaggcaatccagagacctgatgccgaggagtccgtcaccgccgacagcaagtttgctcaagaggaggaggaggaagaagaagatatcaagaaggacggcgacgataaggttggagccctgatcggcgcgctgtgctcgtttggggtcgcagccgccaccgcctgcgtctttctcatcggcggcaggctgcatcatcaccacacgcagcagcacaaaattcagctgcagttcttcggcgatgataagaggatccagcaagttgtgcgccagacgtcaaggctgaaccagaaggccatgtcgtttgcgatgggggcaggagcgtcacggcattttggaaggccacgtgtaaaacgtagcaaaaaacattagttactaaaatgtatatatatatgtacacataataatatatatgctattcatcacctaagttaaacttca

SEQ ID NO: 32851 - DNA, 3142 bp, Zea Mays
cggttcctgtgcgccgccgccctgtcgagcctgccggtgccgcgagcatcgactcatcccgttccaaatcgacccaaacccattgcagaccaacacacaatatggcaagtgcggtgccgcgcgccctgcgcatgtcccacgcgcaattcatcgagcaccttcgctgcgcggcctcgtccgaccgcacccctcgcaccggcgaggctcttcacggctgggcgctcaagtccggcgcagcctcccacgcgcctgtctccaactctctcatcaccttctactgttccctcccgcggcctctactcggcgcagcctacgtcgtcttcgccgacatccccgccgccttgcgcgacgtcgcctcgtggaactccctcctcaacccgctctcccgccaccaccccgtctccgcgctctcccatttccgctccatgatgtcctcccccgaggccgttctcccctcgccgcactccttcgctgccgcgttcactgccgccgcccgtgtgccctctgcgtccgctggcgccgtcacgcacgcgctcgcgtgcaagctgccatcctcctgcggctccaataatgtcttcgtctcgaccgcccttctaaacatgtactgcaagctgggagctgtttctgatgccaagagagtgtttgatggaatgctacatcgcaatgcagtgtcctgggctgccatggtgtcaggttatgccactgggaagtgttctgaggaggcctttgagctcttccggctgatgcttcagaagtgcccattggagaaaaatgagtttgtaaccacagcagttcttagcgcagttagcgtgccactgggtttgcttatggggacgcagttgcatgggctggtattaaaggatggtttggtgggatttgtgtctgttgagaattcgcttgtcacaatgtatgcaaaggctgagtgtatggatgcagcaatgagggtgtttgggtcatctaaggagaggaactccatcacatggtcagcaatgatcacagggtatgctcagaatggagaagccaattgtgcagctaggatgttcctacagatgcattcgtcaggatttacgccaactgaattcacctttgttggggtactgaacgcatgcagtgacatgggcgcattagtggttgggaagcagacacattgtttgatggtgaagcttgggtttgaaacgcaggtttatgtgaagagtgcactggtggacatgtatgccaagtgtggttgtattggtgatgcaaaagatgggtttcatcaattatatgatgttgatgatgttgtcctttggacagcaatgattaccggacatgtgcagaatggggagcatgaggaagccctgatgttgtattccaggatggacaaacagggcattatacccagttatttaactgtaactagtgtacttagagcctgtgcatgccttgcagcactggaccttgggaagcaattgcatgcacaaatattgaagtgtagatttagcttggggggttctgttggaacagctctgtccactatgtattcgaagtgtggaaaccttgaagatagcatggttgtcttcagaaggatgcctgatagggatgttatttcatggaactcaattatttctgttttttcacaacatgggcgtggaagtgatgcacttgacatgtttgaggagatgaagctagagggaacggcaccagatcatataacattcattaatttgctatctgcttgtagccacatgggcttagttgacagaggctggttttattttagggcaatgaccaaagactataatttaattcctacacttgatcactatgcttgcatggttgatattcttagccgtgcaggccagttaaaagaagcaaaggacttcatagattcgataactattgaccatggtacatgcctatggcgtatagtcctaggggcatgtcgcagtttacgtgattttgatgttggagcatatgcaggtgagcagctgatggagttaggtactgaggactcatctgcttatatactgttatcaaacatctatgctgcccagcggaagtggaatgatgttgagcgggtgagacatttgatgagactccgaggtgttagcaaagatctggggtgtagctgggttgagctctacaaccgagttcatgtgtttgttgttggggaacaacaacatcctgaagcggaaaatataaatgtagagttgataaggctagcgaagcatatgaaggacgaagagtgtttcctgtttgatgacgaaaaggatgaactaggagattctcatgaaggtgaacaaatggaattgatatcaacaacatattactgagttcgcaagagattgatcccatgatgtcagacaaacaccctgttaaagcaatgtgtgacatccgtgatttggggttattttatgttgtattttcttttcctgacaaatccaaccctcctgtttttgacaagtgtgattggcactgtgtttcacatattgaagcagcttgggatcttgcatattctattgcatctgtgtgttcggcgatggttctgatcccaagtcacagatccattggtaagccatctacagaaaatgtgctaaccgtgctggcaagaggaaggagcaagcactactattccaaaaagggtctggtagtgacagtgttgttacttacccagttctacacaaaattagaggagaaacataaagctttggaagcaaagaaggacaaggctgatgccaggaaaaagattgaggctcattctggtggcctaaatgatatagcagtctctcgaccaaataagcaaccttttgatgtcacctgggagatgataaactgattaagaaattatttacactcgaaggacacaaggtgactgtgtattctatatcccagtgtaatctttattctaaacaagatcgatgttattacaatgaatcagaattgctgaatcaagagtttgtataacctataaacttttatgaattgctgatttttttttctgagtttcgataaggcgcctttatattctagttaattacaaggtcaagaaaaatcctcatggaaacagagatcacggatggattattttgagggcagaaagacaacggtgtatgggtcatacatccaactttatcatcgccgtagaactgcagctggattttct

SEQ ID NO: 32852 - DNA, 3161 bp, Zea Mays
cggttcctgtgcgccgccgccctgtcgagcctgccggtgccgcgagcatcgactcatcccgttccaaatcgacccaaacccattgcagaccaacacacaatatggcaagtgcggtgccgcgcgccctgcgcatgtcccacgcgcaattcatcgagcaccttcgctgcgcggcctcgtccgaccgcacccctcgcaccggcgaggctcttcacggctgggcgctcaagtccggcgcagcctcccacgcgcctgtctccaactctctcatcaccttctactgttccctcccgcggcctctactcggcgcagcctacgtcgtcttcgccgacatccccgccgccttgcgcgacgtcgcctcgtggaactccctcctcaacccgctctcccgccaccaccccgtctccgcgctctcccatttccgctccatgatgtcctcccccgaggccgttctcccctcgccgcactccttcgctgccgcgttcactgccgccgcccgtgtgccctctgcgtccgctggcgccgtcacgcacgcgctcgcgtgcaagctgccatcctcctgcggctccaataatgtcttcgtctcgaccgcccttctaaacatgtactgcaagctgggagctgtttctgatgccaagagagtgtttgatggaatgctacatcgcaatgcagtgtcctgggctgccatggtgtcaggttatgccactgggaagtgttctgaggaggcctttgagctcttccggctgatgcttcagaagtgcccattggagaaaaatgagtttgtaaccacagcagttcttagcgcagttagcgtgccactgggtttgcttatggggacgcagttgcatgggctggtattaaaggatggtttggtgggatttgtgtctgttgagaattcgcttgtcacaatgtatgcaaaggctgagtgtatggatgcagcaatgagggtgtttgggtcatctaaggagaggaactccatcacatggtcagcaatgatcacagggtatgctcagaatggagaagccaattgtgcagctaggatgttcctacagatgcattcgtcaggatttacgccaactgaattcacctttgttggggtactgaacgcatgcagtgacatgggcgcattagtggttgggaagcagacacattgtttgatggtgaagcttgggtttgaaacgcaggtttatgtgaagagtgcactggtggacatgtatgccaagtgtggttgtattggtgatgcaaaagatgggtttcatcaattatatgatgttgatgatgttgtcctttggacagcaatgattaccggacatgtgcagaatggggagcatgaggaagccctgatgttgtattccaggatggacaaacagggcattatacccagttatttaactgtaactagtgtacttagagcctgtgcatgccttgcagcactggaccttgggaagcaattgcatgcacaaatattgaagtgtagatttagcttggggggttctgttggaacagctctgtccactatgtattcgaagtgtggaaaccttgaagatagcatggttgtcttcagaaggatgcctgatagggatgttatttcatggaactcaattatttctgttttttcacaacatgggcgtggaagtgatgcacttgacatgtttgaggagatgaagctagagggaacggcaccagatcatataacattcattaatttgctatctgcttgtagccacatgggcttagttgacagaggctggttttattttagggcaatgaccaaagactataatttaattcctacacttgatcactatgcttgcatggttgatattcttagccgtgcaggccagttaaaagaagcaaaggacttcatagattcgataactattgaccatggtacatgcctatggcgtatagtcctaggggcatgtcgcagtttacgtgattttgatgttggagcatatgcaggtgagcagctgatggagttaggtactgaggactcatctgcttatatactgttatcaaacatctatgctgcccagcggaagtggaatgatgttgagcgggtgagacatttgatgagactccgaggtgttagcaaagatctggggtgtagctgggttgagctctacaaccgagttcatgtgtttgttgttggggaacaacaacatcctgaagcggaaaatataaatgtagagttgataaggctagcgaagcatatgaaggacgaagagtgtttcctgtttgatgacgaaaaggatgaactaggagattctcatgaaggtgaacaaatggaattgatatcaacaacatattactgagttcgcaagagattgatcccatgatgtcagacaaacaccctgttaaagcaatgtgtgacatccgtgatttggggttattttatgttgtattttcttttcctgacaaatccaaccctcctgtttttgacaagtgtgattggcactgtgtttcacatattgaagcagcttgggatcttgcatattctattgcatctgtgtgttcggcgatggttctgatcccaagtcacagatccattggtaagccatctacagaaaatgtgctaaccgtgctggcaagaggaaggagttctacacaaaattagaggagaaacataaagctttggaagcaaagaaggacaaggctgatgccaggaaaaaggagttgcattcatgaaacatttgatccatctacatgcatatcaaccgccagatgagacgcaacatgttctaaagattgaggctcattctggtggcctaaatgatatagcagtctctcgaccaaataagcaaccttttgatgtcacctgggagatgataaactgattaagaaattatttacactcgaaggacacaaggtgactgtgtattctatatcccagtgtaatctttattctaaacaagatcgatgttattacaatgaatcagaattgctgaatcaagagtttgtataacctataaacttttatgaattgctgatttttttttctgagtttcgataaggcgcctttatattctagttaattacaaggtcaagaaaaatcctcatggaaacagagatcacggatggattattttgagggcagaaagacaacggtgtatgggtcatacatccaactttatcatcgccgtagaactgcagctggattttct

SEQ ID NO: 32853 - DNA, 822 bp, Zea Mays
atgattgatcccatgatgtcagacaaacaccctgttaaagcaatgtgtgacatccgtgatttggggttattttatgttgtattttcttttcctgacaaatccaaccctcctgtttttgacaagtgtgattggcactgtgtttcacatattgaagcagcttgggatcttgcatattctattgcatctgtgtgttcggcgatggttctgatcccaagtcacagatccattggtaagccatctacagaaaatgtgctaaccgtgctggcaagaggaaggagcaagcactactattccaaaaagggtctggtagtgacagtgttgttacttacccagttctacacaaaattagaggagaaacataaagctttggaagcaaagaaggacaaggctgatgccaggaaaaagattgaggctcattctggtggcctaaatgatatagcagtctctcgaccaaataagcaaccttttgatgtcacctgggagatgataaactgattaagaaattatttacactcgaaggacacaaggtgactgtgtattctatatcccagtgtaatctttattctaaacaagatcgatgttattacaatgaatcagaattgctgaatcaagagtttgtataacctataaacttttatgaattgctgatttttttttctgagtttcgataaggcgcctttatattctagttaattacaaggtcaagaaaaatcctcatggaaacagagatcacggatggattattttgagggcagaaagacaacggtgtatgggtcatacatccaactttatcatcgccgtagaactgcagctggattttct

SEQ ID NO: 32854 - DNA, 896 bp, Zea Mays
atgattgatcccatgatgtcagacaaacaccctgttaaagcaatgtgtgacatccgtgatttggggttattttatgttgtattttcttttcctgacaaatccaaccctcctgtttttgacaagtgtgattggcactgtgtttcacatattgaagcagcttgggatcttgcatattctattgcatctgtgtgttcggcgatggttctgatcccaagtcacagatccattggtaagccatctacagaaaatgtgctaaccgtgctggcaagaggaaggagcaagcactactattccaaaaagggtctggtagtgacagtgttgttacttacccagttctacacaaaattagaggagaaacataaagctttggaagcaaagaaggacaaggctgatgccaggaaaaaggagttgcattcatgaaacatttgatccatctacatgcatatcaaccgccagatgagacgcaacatgttctaaagattgaggctcattctggtggcctaaatgatatagcagtctctcgaccaaataagcaaccttttgatgtcacctgggagatgataaactgattaagaaattatttacactcgaaggacacaaggtgactgtgtattctatatcccagtgtaatctttattctaaacaagatcgatgttattacaatgaatcagaattgctgaatcaagagtttgtataacctataaacttttatgaattgctgatttttttttctgagtttcgataaggcgcctttatattctagttaattacaaggtcaagaaaaatcctcatggaaacagagatcacggatggattattttgagggcagaaagacaacggtgtatgggtcatacatccaactttatcatcgccgtagaactgcagctggattttct

SEQ ID NO: 32855 - DNA, 841 bp, Zea Mays
atgattgatcccatgatgtcagacaaacaccctgttaaagcaatgtgtgacatccgtgatttggggttattttatgttgtattttcttttcctgacaaatccaaccctcctgtttttgacaagtgtgattggcactgtgtttcacatattgaagcagcttgggatcttgcatattctattgcatctgtgtgttcggcgatggttctgatcccaagtcacagatccattggtaagccatctacagaaaatgtgctaaccgtgctggcaagaggaaggagttctacacaaaattagaggagaaacataaagctttggaagcaaagaaggacaaggctgatgccaggaaaaaggagttgcattcatgaaacatttgatccatctacatgcatatcaaccgccagatgagacgcaacatgttctaaagattgaggctcattctggtggcctaaatgatatagcagtctctcgaccaaataagcaaccttttgatgtcacctgggagatgataaactgattaagaaattatttacactcgaaggacacaaggtgactgtgtattctatatcccagtgtaatctttattctaaacaagatcgatgttattacaatgaatcagaattgctgaatcaagagtttgtataacctataaacttttatgaattgctgatttttttttctgagtttcgataaggcgcctttatattctagttaattacaaggtcaagaaaaatcctcatggaaacagagatcacggatggattattttgagggcagaaagacaacggtgtatgggtcatacatccaactttatcatcgccgtagaactgcagctggattttct

SEQ ID NO: 32856 - DNA, 1557 bp, Zea Mays
gccaaatacaaaaattgagtatagttagtgttagtcatagtcttataattttgtttctttaagttagtatcactattcatacaactgttttcgattgtaataattaatttgtattggctgtacgtattatcattgctaaatccggaattcatattttcattataaaagatgcattctagcaatgcggggtcggcagaattcaaattttcaattttcgaacccttctgccgttcgtgtgcacctggatggggtccataaatatagaaggcctcttcatcttcctattctcctttctctaaaccgccgcttctgttctgatctgctccccgaaactactaaaacaaatcgaagtggggaacagacaagagagaagggagatggcggaggcggtggcggtggcgtacgaggagcaacggcggaggcagatagaaatgaacaagcggaagctggaggagctgcagctccaccacctctccgccgccgtcagagaggccgccgccgctgccaaaccctcgtcggccaagaagcggaaggcgccggtgccgcgggacgccgccacggagccgccaaggcggtccgaccgactcgccaacctccctgagaagccaatgtaccgcgaggtcagggtgaacttgccatttccggagggcagcaagtccaatgcgcgggtgccgctggacgctgccaactccgtggtggtggagccactacggtggtccgaccgactcgccaacctccccaagaagcccatgtaccacgaggattcggacgaggagaggagctacgccatctctaaggctgaggagctggtgcaagagctgggctccagcttccccatcttcacccagcccatgacactgtcccatgtctccggaggcttctggctgggcctcccgaagcatttctgccgggagcacctgcctaagagtgatgagacgatcaccttggtggatgaggaggatgacgagtcagacacgttctaccttgcaatgcaggctggcctcagcactggatggaaagagttcgccatccagcacaagctgcttgatggagattgcttggtcttccaactgattgagcggacaaagttcaaggtctacataattcgagcaactttgtacttcgaaagtgatcactgatgaaactagtagcttctaatatggttattggagcacggttatgaggcagttgcgttggacaagctctcatctggaatttgctcggcatcttgaactttttgggtggcagaaagttagctgatatataaatgtttacttaacctagtatctagttatttagcagctgctaatttgtgtaattgggcttaccaattgcacggttcagaaacctgcactatgtaaggggatgttgatggcaattgacctcattttataaatgattgatgtctgtccatatttctcttggatcaatttcagtgttcagtcaatcctgtgtggttcattttcttatagttatttggtaccaccattagtggctttgtggtgttagtattcagacacatggtcttgtaaattggactaggcttgctatagggat

SEQ ID NO: 32857 - DNA, 1672 bp, Zea Mays
aattttcgaacccttctgccgttcgtgtgcacctggatggggtccataaatatagaaggcctcttcatcttcctattctcctttctctaaaccgccgcttctgttctgatctgctccccgaaactactaaaacaaatcgaagtggggaacagacaagagagaagggagatggcggaggcggtggcggtggcgtacgaggagcaacggcggaggcagatagaaatgaacaagcggaagctggaggagctgcagctccaccacctctccgccgccgtcagagaggccgccgccgctgccaaaccctcgtcggccaagaagcggaaggcgccggtgccgcgggacgccgccacggagccgccaaggcggtccgaccgactcgccaacctccctgagaagccaatgtaccgcgaggtcagggtgaacttgccatttccggagggcagcaagtccaatgcgcgggtgccgctggacgctgccaactccgtggtggtggagccactacggtggtccgaccgactcgccaacctccccaagaagcccatgtaccacgaggattcggacgaggagaggagctacgccatctctaaggctgaggagctggtgcaagagctgggctccagcttccccatcttcacccagcccatgacactgtcccatgtctccggaggcttctggctgggcctcccgaagcatttctgccgggagcacctgcctaagagtgatgagacgatcaccttggtggatgaggaggatgacgagtcagacacgttctaccttgcaatgcaggctggcctcagcactggatggaaagagttcgccatccagcacaagctgcttgatggagattgcttggtcttccaactgattgagcggacaaagttcaaggtgattgagatctattttgcattgcaataacgtgtatgaatcatctatagaacttgcatggccgctgattattaaagggaactgaataacaataactgaaatttacagaatcaaatatcctttagaaagaaataaaaatgtcttgtttcaaacttggtctttgtacaaatttacttcaattgtttccagttatcagatcagttgttatcatggcttcttatctatcatgttccagtaacatctgtttttcttaaggactaagttggaggaatctatgattataataatgctgaccaagcaatttctcttgtgcaagtgttgcaggtctacataattcgagcaactttgtacttcgaaagtgatcactgatgaaactagtagcttctaatatggttattggagcacggttatgaggcagttgcgttggacaagctctcatctggaatttgctcggcatcttgaactttttgggtggcagaaagttagctgatatataaatgtttacttaacctagtatctagttatttagcagctgctaatttgtgtaattgggcttaccaattgcacggttcagaaacctgcactatgtaaggggatgttgatggcaattgacctcattttataaatgattgatgtctgtccatatttctcttggatcaatttcagtgttcagtcaatcctgtgtggttcattttcttatagttatttggtaccaccattagtggctttgtggtgttagtattcagacacatggtcttgtaaattggactaggcttgctatagggat

SEQ ID NO: 32858 - DNA, 1356 bp, Zea Mays
aattttcgaacccttctgccgttcgtgtgcacctggatggggtccataaatatagaaggcctcttcatcttcctattctcctttctctaaaccgccgcttctgttctgatctgctccccgaaactactaaaacaaatcgaagtggggaacagacaagagagaagggagatggcggaggcggtggcggtggcgtacgaggagcaacggcggaggcagatagaaatgaacaagcggaagctggaggagctgcagctccaccacctctccgccgccgtcagagaggccgccgccgctgccaaaccctcgtcggccaagaagcggaaggcgccggtgccgcgggacgccgccacggagccgccaaggcggtccgaccgactcgccaacctccctgagaagccaatgtaccgcgaggtcagggtgaacttgccatttccggagggcagcaagtccaatgcgcgggtgccgctggacgctgccaactccgtggtggtggagccactacggtggtccgaccgactcgccaacctccccaagaagcccatgtaccacgaggattcggacgaggagaggagctacgccatctctaaggctgaggagctggtgcaagagctgggctccagcttccccatcttcacccagcccatgacactgtcccatgtctccggaggcttctggctgggcctcccgaagcatttctgccgggagcacctgcctaagagtgatgagacgatcaccttggtggatgaggaggatgacgagtcagacacgttctaccttgcaatgcaggctggcctcagcactggatggaaagagttcgccatccagcacaagctgcttgatggagattgcttggtcttccaactgattgagcggacaaagttcaagtgttgcaggtctacataattcgagcaactttgtacttcgaaagtgatcactgatgaaactagtagcttctaatatggttattggagcacggttatgaggcagttgcgttggacaagctctcatctggaatttgctcggcatcttgaactttttgggtggcagaaagttagctgatatataaatgtttacttaacctagtatctagttatttagcagctgctaatttgtgtaattgggcttaccaattgcacggttcagaaacctgcactatgtaaggggatgttgatggcaattgacctcattttataaatgattgatgtctgtccatatttctcttggatcaatttcagtgttcagtcaatcctgtgtggttcattttcttatagttatttggtaccaccattagtggctttgtggtgttagtattcagacacatggtcttgtaaattggactaggcttgctatagggat

SEQ ID NO: 32859 - DNA, 6637 bp, Zea Mays
ctcgcacccaagcagcaaggcctggaagccaaaggctgcaatcgaacactccggtacttcgccacaccgcgaaagcacggcggctcctatcccgcgcgggcatcgccatgcccgctatccccctcgtgatccccaacgcactagctggctaggcgctcaccgacgttcctctccatggcggcgtcggagcgggaggccgcgctcctcacacgcgtggcagcgaaccacctctttctcgcgcagttcgagcccctgcgtgcggtgctcctcagcctccgccgccgtgacccggtgctatgtgcggacttcctccgcgcggtcgccgctgcgggcggccgcgtcccgggcgtgctctggtccgctccccctgcctgcccgtccccatcccacctcgcctggcttgccgtgctcgaactcgccgccctcccctccactcccaatcccgaggcgctgcgcctgaaggcagagttcctggtcctcctccagcccatcgctgacgaccccgccattggcgccgaggccagagaaatcctcacgaaactgctggatttgggggtgacgaggttgaagctcgaggtcgaaggcggaggggacgcaggtgctagtgccgaggaagcctccgtgaaggatctgagagggctatgggaagtgttcctcgacaacgcctttgtgtttgatgcgttgtgcataggcgtctcgaggcagatcgccttggacaggggtttcggtgtggatgtgctcctatggctgcggcggaacgtgcaacttgcccatttggatgccgtgaagactcttgtcacggaaggtgatctggatgctgctcctggccatcttcggtttctttgccttgaccatggactggagaaggatgagtacaaggttgtcatagcagagcttctcagaaagggatgggcaaaaacatccaattatggtggaacatggtctgagttgcagaataggataactaaattatatggagcagctcttcaatctactagtcccgagctcgtgcaacttgttcagctcattctggataacattctttctgaagaaattgaagatcatgatgtctctgatgctaatgggatgcctcttcctttcgaaaaatttctcgaaacattgttgttggagagggatactgactcagatgacaaggtcttgttggatgcggctataacgtcctgcaaaaaagatctgtaccattattgccgattgtctggaaagcacatgcttgaagtagtcttggaaactgctctatcatcaattaagagggagcagcttcttgaggctgttgatgttgtttcgttgttcccccttctccacccactggttgctgtcttgggatgggatattttgaagggtaaaacaggtctgcggagaaagctaatgcagctgttctggacaagcaaatcccaaggtctacgactacaggaatattcacattaccgtagcccgacagatgaggtgctatttgacgtagtcccaggaataaaatttcaagatgcgatcgagcttgttggtatgcagccacttccttcaacaactgccgcttggaagaggatgcatgatattgaactgatgcacatgcgatattctcttcagtcagttgcgcttgctctaggagagatggaaaagtgtacagattttcatggttagcattattttatccttgttacacatggatgattgtgccaaattgtctcaatctgtcccttctgagtgctatgttagtcatgaatgccatgatataaatatcgaatctgagggaaagaacgtggtggtatattttgttgggcttttacttgatatacttcgtcataatctcgaatcaaaaggctctgatacggatcacctttcaagtactggtctgtcgcctgctggtagacaagcgttagaatggaggctcaaacatgccaaacattctattgaagacctggattggcgtctatctgttctaaaacgtcttccacctctgtctgagcggcaatggagttggaaggaggcattagttcttctacgtgctgctccttcgaaattactgaatctatgcatgcaaagggaaaactatgatataggagaagaagctgtgcaacgattttctttacctgctgaggataaagcttcccttgaactagctgaatgggtagctggtgcatataaaagagcactggttgaggatgctgttaatcgtgtcacagataatacaaatgcagcacatgaattggatattttgtcattacgcacgcagcttggttctttaactacaattctgctttgtgttgatgttgctgcaacatctgctaagtcagttcatatgtgccgatttcttctcgatgaggcaacaagcatgttatctgaaatatttccaggaaggtcccccaaagtaggaccaacttactgggatcagatccaagaacttgctaccatatcagtgataaagcgcatacttcagcgtctgcatgacatcttggatctggatactcttccatctcttcaagtgttctttactgagatgagcatctcttcgtcaacggaatgtagcagagttggacaaaagcaacgtcctcttgggcttctgcaccaaatgattgatgacgccttcaaaggaaagcgacagttcttgagtggtaagcttcacaatgttgctagagctattgttgatgaggactttgatactgtttattcgaaagaaggtgtcaacttagaaaagaaggatattttgagctctgaaaaaggcatactccttggtcacgggcttagaattctaaaacaagcatctaggagtgaccttgcatcttcaaatgttgtggatagtggtccagaacacaaaggttctgcaaacagatatctgggccctctatctaccaagccgtcaacatatttatcaaacttcataatatatactgcaaccattggtgacatagttgatggaactgacacaactcatgatttcaactatttctcgttagtctatgaatggccaaaagatctattaactcgtctggtttttgagcgtggaagcactgatgcagcagcaaaggttgctgacacaatgagtgttgattttgtgcatgagattatatcagcatgtgtgccacctgttttacctccacgaacaggacaaggatgggcttgcattcctgtcatacctaccatttgtaatattagttcagaaaacagactatgcaccaagtcttctcctgctcaaggatggagtgcacatgattcgtccttgtcttctcgtcaagaacccctctatcctctccaattaaatttagtgaagcatttagcccagttatcttcagtaagagcagttttggcctgtgtatttggaagcagcatactatctggggacaatgaatcatcttttactcatgtgaaagattcaacacaagctccagaaactgagagatcattttttgaatttgctcttgagcaatcagagagatatccaaccttgaaccggtggatacagatgcagtctaatcttcatcgagtatccgagtcttctataacagataaatccgaagtctctttgcatcaatccaagggaaagttttgtatgaagcgaacccgtgagtctgacagtgatggtgaatcagagcttgaagagaatgtcataagcgggaacaccagttcaagttcactagaatccactaaacatgaagacgctaggctagagccaacaacttttatttcatttgattgggagaatgaagcaccatatgaaaaagctgttgagaggttaattagtgaaggaaaattaagtgatgctcttgctgtgtctgatcgttgtttgcgcaatggagcatctgataatttgcttcagttgctcatcgaacagaaggaagaaaaaggtccaggcacaggacaaattcatccatatggatctcacagtcttgggaatgatacttctcagtactgcttgaggctgagagacaaaaaagttgcagctcagctcgctctaaagtacttgcacagctgggaccttgatgctgcaaccaatgttctaactatgtgcatgtgccacttacctgagaatgatcctatgcgcagtgaggtgttgcacatgaagcaatctttacagaggtatggccatatcatgagtgctgatgagcactacactagatggcaagaggtggaagctgattgtgaagatgacccagagggcttggcactccgtcttgctgccaaaggagctgtttccgctgctttggaggttgctgaaagtgcctctttatcaattgatttgcggagggagttgcaaggccgtcagcttgtcaaactgctaatcactgatccacttaatggcggaggcccagctgcagcttcaagatttctgtcaactttaagggattccaatgatgctcttcctgtagccattggtgctatgaatttattacctgacctgcgttcaaagcagcttcttgtgcatttcttcctcaagcgtacagttgggaatctatcagatgctgagattgcacggcttaatttgtgggcattaggtctccgtgttctttccttattgccattgccatcacaacagcgttgttcttctctgcacgaacaccctcagttgatcgtagaagtactgttgatgatgaaacaactccagtctgcttctttgattttgaaagaattttcttccttgagggatgataagttaattattgcgtatgctaaaaaagcaatctcaattaacgttagctcagctcctagggaacgtcgatcgaatatctctgcatcaagggcaaaacaaaaaaaggctacaactccagctaaaacaaattttgtgcaaagttttggtaactttcagagagaagcacgcaaagcattctcatgggtcccccgtgatagtggcactaaaacacccccaaaagatatccttcggaaaagaaagagttcaggctctggaggtgatagatcctcttgggaagcaatgcctggtttacaggaggagcggacacctgtatatccttctgaggcgcaagaaagacttccttttgtctctgctcctgatgagtgggtgctgacgggagatcctgacaaggatgatgcaactcgttcatcccataaatatgaaacctctcctgatatcacactgttcaaggtagttgaaaagtttagaaaaaaggcattgatatccttgtgcaccaatgagtcagtagctgcaaaaggtgcacttgaattgtgtatgactcagatgaaggttgtgctaagctcccaacagttgcctcttgatgcctctatggacaacatagcccgggcttatcatgcaacggaaacttatgtacaggcactctcttatgctaagaatctatttaaaaagctcgttggtagtagtgatttgtcaagtggctctgaaagaagtaaggaagttgatgatgtttctgtggacactggcagttcaagcactgggagccagtatctggatgagctgtctgatttcctaactcaagcagacatgtggttagggcgtgcagagcttcttcaaagcctgctgggatcaggtattattgcctcgctggatgatatagctgacaaagaatcttcaagtagactacgtgacagattggtcaacgatgaacggtacagcatggctgtatatacttgtagaaagtgcaagattgatgctgtaccagtatgggttgcatggggccatgcattagttcgaatggagcactatgctcaagctcgtgtgaagttcaagcaagcacttcaacaatacaaaggcgatgcaacttctgttgttactgaaataatcaacacaattgaaggagggcctccagttgatgtttcttctgtccgttccatgtatgagcatttggcaaagagtgcggcgaccatctttgatgattccctttctgctgatgcttatctgaatgttctgtacatgccatcgacatttccacgatctgagaggtcccgacagtccagaggtcatgtagacagccaattcaggactgctagttcctaccttgaagatggccctcgcagcaatcttgatagtgtccgatatgctgagtgtattcattacttgcaagattatgctcggccacaaatgcttgctttcatgttcaggcatggccattacactgaagcatgctctctgttcttcccattcagtcaaccaaccacggaaggggaaacatctttgtcttcagctccatggagtgatcctttaacaactgattatgggacaattgatgacttgtgtgatctctgtcttggatatggtgccatggctgttttggagaatacaatacggacaataacacaatcgcccacatatcatgaggcacacatgattcagtacatgaacactattatcacccgcatttgcaactattgtgaaacacacaggcattttaattatctctacaacttcctggttctaaaagatgaccatgttgcttctggcctttgttgtattcaattatttatgaattcaatgtctcaagaggaggctttgaggcatttgggacatgccaagacacatttcgaagaagccttatctgtacgagatagaacaatcgaggctactaagttggtattgcggtctgctcggaataagggtgcacctggaaaaatgaccagggaaacgataatgaaatattccactcgtgtttcctatcag

SEQ ID NO: 32860 - DNA, 6853 bp, Zea Mays
ctcgcacccaagcagcaaggcctggaagccaaaggctgcaatcgaacactccggtacttcgccacaccgcgaaagcacggcggctcctatcccgcgcgggcatcgccatgcccgctatccccctcgtgatccccaacgcactagctggctaggcgctcaccgacgttcctctccatggcggcgtcggagcgggaggccgcgctcctcacacgcgtggcagcgaaccacctctttctcgcgcagttcgagcccctgcgtgcggtgctcctcagcctccgccgccgtgacccggtgctatgtgcggacttcctccgcgcggtcgccgctgcgggcggccgcgtcccgggcgtgctctggtccgctccccctgcctgcccgtccccatcccacctcgcctggcttgccgtgctcgaactcgccgccctcccctccactcccaatcccgaggcgctgcgcctgaaggcagagttcctggtcctcctccagcccatcgctgacgaccccgccattggcgccgaggccagagaaatcctcacgaaactgctggatttgggggtgacgaggttgaagctcgaggtcgaaggcggaggggacgcaggtgctagtgccgaggaagcctccgtgaaggatctgagagggctatgggaagtgttcctcgacaacgcctttgtgtttgatgcgttgtgcataggcgtctcgaggcagatcgccttggacaggggtttcggtgtggatgtgctcctatggctgcggcggaacgtgcaacttgcccatttggatgccgtgaagactcttgtcacggaaggtgatctggatgctgctcctggccatcttcggtttctttgccttgaccatggactggagaaggatgagtacaaggttgtcatagcagagcttctcagaaagggatgggcaaaaacatccaattatggtggaacatggtctgagttgcagaataggataactaaattatatggagcagctcttcaatctactagtcccgagctcgtgcaacttgttcagctcattctggataacattctttctgaagaaattgaagatcatgatgtctctgatgctaatgggatgcctcttcctttcgaaaaatttctcgaaacattgttgttggagagggatactgactcagatgacaaggtcttgttggatgcggctataacgtcctgcaaaaaagatctgtaccattattgccgattgtctggaaagcacatgcttgaagtagtcttggaaactgctctatcatcaattaagagggagcagcttcttgaggctgttgatgttgtttcgttgttcccccttctccacccactggttgctgtcttgggatgggatattttgaagggtaaaacaggtctgcggagaaagctaatgcagctgttctggacaagcaaatcccaaggtctacgactacaggaatattcacattaccgtagcccgacagatgagacatcctgtgaagagtacttgtgtgatcttctatgcttccatctggaccttgcacgttttgtttcaagtgttaattctggctgtttgtggaatttgaggaattcattgttgtttacccaacaagagcaaggttcagatgttaacaatgcagaaatattagacccttttgtcgagaacttgatacttgagcggttagctgttcagagtcccatgagagtgctatttgacgtagtcccaggaataaaatttcaagatgcgatcgagcttgttggtatgcagccacttccttcaacaactgccgcttggaagaggatgcatgatattgaactgatgcacatgcgatattctcttcagtcagttgcgcttgctctaggagagatggaaaagtgtacagattttcatggttagcattattttatccttgttacacatggatgattgtgccaaattgtctcaatctgtcccttctgagtgctatgttagtcatgaatgccatgatataaatatcgaatctgagggaaagaacgtggtggtatattttgttgggcttttacttgatatacttcgtcataatctcgaatcaaaaggctctgatacggatcacctttcaagtactggtctgtcgcctgctggtagacaagcgttagaatggaggctcaaacatgccaaacattctattgaagacctggattggcgtctatctgttctaaaacgtcttccacctctgtctgagcggcaatggagttggaaggaggcattagttcttctacgtgctgctccttcgaaattactgaatctatgcatgcaaagggaaaactatgatataggagaagaagctgtgcaacgattttctttacctgctgaggataaagcttcccttgaactagctgaatgggtagctggtgcatataaaagagcactggttgaggatgctgttaatcgtgtcacagataatacaaatgcagcacatgaattggatattttgtcattacgcacgcagcttggttctttaactacaattctgctttgtgttgatgttgctgcaacatctgctaagtcagttcatatgtgccgatttcttctcgatgaggcaacaagcatgttatctgaaatatttccaggaaggtcccccaaagtaggaccaacttactgggatcagatccaagaacttgctaccatatcagtgataaagcgcatacttcagcgtctgcatgacatcttggatctggatactcttccatctcttcaagtgttctttactgagatgagcatctcttcgtcaacggaatgtagcagagttggacaaaagcaacgtcctcttgggcttctgcaccaaatgattgatgacgccttcaaaggaaagcgacagttcttgagtggtaagcttcacaatgttgctagagctattgttgatgaggactttgatactgtttattcgaaagaaggtgtcaacttagaaaagaaggatattttgagctctgaaaaaggcatactccttggtcacgggcttagaattctaaaacaagcatctaggagtgaccttgcatcttcaaatgttgtggatagtggtccagaacacaaaggttctgcaaacagatatctgggccctctatctaccaagccgtcaacatatttatcaaacttcataatatatactgcaaccattggtgacatagttgatggaactgacacaactcatgatttcaactatttctcgttagtctatgaatggccaaaagatctattaactcgtctggtttttgagcgtggaagcactgatgcagcagcaaaggttgctgacacaatgagtgttgattttgtgcatgagattatatcagcatgtgtgccacctgttttacctccacgaacaggacaaggatgggcttgcattcctgtcatacctaccatttgtaatattagttcagaaaacagactatgcaccaagtcttctcctgctcaaggatggagtgcacatgattcgtccttgtcttctcgtcaagaacccctctatcctctccaattaaatttagtgaagcatttagcccagttatcttcagtaagagcagttttggcctgtgtatttggaagcagcatactatctggggacaatgaatcatcttttactcatgtgaaagattcaacacaagctccagaaactgagagatcattttttgaatttgctcttgagcaatcagagagatatccaaccttgaaccggtggatacagatgcagtctaatcttcatcgagtatccgagtcttctataacagataaatccgaagtctctttgcatcaatccaagggaaagttttgtatgaagcgaacccgtgagtctgacagtgatggtgaatcagagcttgaagagaatgtcataagcgggaacaccagttcaagttcactagaatccactaaacatgaagacgctaggctagagccaacaacttttatttcatttgattgggagaatgaagcaccatatgaaaaagctgttgagaggttaattagtgaaggaaaattaagtgatgctcttgctgtgtctgatcgttgtttgcgcaatggagcatctgataatttgcttcagttgctcatcgaacagaaggaagaaaaaggtccaggcacaggacaaattcatccatatggatctcacagtcttgggaatgatacttctcagtactgcttgaggctgagagacaaaaaagttgcagctcagctcgctctaaagtacttgcacagctgggaccttgatgctgcaaccaatgttctaactatgtgcatgtgccacttacctgagaatgatcctatgcgcagtgaggtgttgcacatgaagcaatctttacagaggtatggccatatcatgagtgctgatgagcactacactagatggcaagaggtggaagctgattgtgaagatgacccagagggcttggcactccgtcttgctgccaaaggagctgtttccgctgctttggaggttgctgaaagtgcctctttatcaattgatttgcggagggagttgcaaggccgtcagcttgtcaaactgctaatcactgatccacttaatggcggaggcccagctgcagcttcaagatttctgtcaactttaagggattccaatgatgctcttcctgtagccattggtgctatgaatttattacctgacctgcgttcaaagcagcttcttgtgcatttcttcctcaagcgtacagttgggaatctatcagatgctgagattgcacggcttaatttgtgggcattaggtctccgtgttctttccttattgccattgccatcacaacagcgttgttcttctctgcacgaacaccctcagttgatcgtagaagtactgttgatgatgaaacaactccagtctgcttctttgattttgaaagaattttcttccttgagggatgataagttaattattgcgtatgctaaaaaagcaatctcaattaacgttagctcagctcctagggaacgtcgatcgaatatctctgcatcaagggcaaaacaaaaaaaggctacaactccagctaaaacaaattttgtgcaaagttttggtaactttcagagagaagcacgcaaagcattctcatgggtcccccgtgatagtggcactaaaacacccccaaaagatatccttcggaaaagaaagagttcaggctctggaggtgatagatcctcttgggaagcaatgcctggtttacaggaggagcggacacctgtatatccttctgaggcgcaagaaagacttccttttgtctctgctcctgatgagtgggtgctgacgggagatcctgacaaggatgatgcaactcgttcatcccataaatatgaaacctctcctgatatcacactgttcaaggtagttgaaaagtttagaaaaaaggcattgatatccttgtgcaccaatgagtcagtagctgcaaaaggtgcacttgaattgtgtatgactcagatgaaggttgtgctaagctcccaacagttgcctcttgatgcctctatggacaacatagcccgggcttatcatgcaacggaaacttatgtacaggcactctcttatgctaagaatctatttaaaaagctcgttggtagtagtgatttgtcaagtggctctgaaagaagtaaggaagttgatgatgtttctgtggacactggcagttcaagcactgggagccagtatctggatgagctgtctgatttcctaactcaagcagacatgtggttagggcgtgcagagcttcttcaaagcctgctgggatcaggtattattgcctcgctggatgatatagctgacaaagaatcttcaagtagactacgtgacagattggtcaacgatgaacggtacagcatggctgtatatacttgtagaaagtgcaagattgatgctgtaccagtatgggttgcatggggccatgcattagttcgaatggagcactatgctcaagctcgtgtgaagttcaagcaagcacttcaacaatacaaaggcgatgcaacttctgttgttactgaaataatcaacacaattgaaggagggcctccagttgatgtttcttctgtccgttccatgtatgagcatttggcaaagagtgcggcgaccatctttgatgattccctttctgctgatgcttatctgaatgttctgtacatgccatcgacatttccacgatctgagaggtcccgacagtccagaggtcatgtagacagccaattcaggactgctagttcctaccttgaagatggccctcgcagcaatcttgatagtgtccgatatgctgagtgtattcattacttgcaagattatgctcggccacaaatgcttgctttcatgttcaggcatggccattacactgaagcatgctctctgttcttcccattcagtcaaccaaccacggaaggggaaacatctttgtcttcagctccatggagtgatcctttaacaactgattatgggacaattgatgacttgtgtgatctctgtcttggatatggtgccatggctgttttggagaatacaatacggacaataacacaatcgcccacatatcatgaggcacacatgattcagtacatgaacactattatcacccgcatttgcaactattgtgaaacacacaggcattttaattatctctacaacttcctggttctaaaagatgaccatgttgcttctggcctttgttgtattcaattatttatgaattcaatgtctcaagaggaggctttgaggcatttgggacatgccaagacacatttcgaagaagccttatctgtacgagatagaacaatcgaggctactaagttggtattgcggtctgctcggaataagggtgcacctggaaaaatgaccagggaaacgataatgaaatattccactcgtgtttcctatcag

SEQ ID NO: 32861 - DNA, 7904 bp, Zea Mays
aaggcctggaagccaaaggctgcaatcgaacactccggtacttcgccacaccgcgaaagcacggcggctcctatcccgcgcgggcatcgccatgcccgctatccccctcgtgatccccaacgcactagctggctaggcgctcaccgacgttcctctccatggcggcgtcggagcgggaggccgcgctcctcacacgcgtggcagcgaaccacctctttctcgcgcagttcgagcccctgcgtgcggtgctcctcagcctccgccgccgtgacccggtgctatgtgcggacttcctccgcgcggtcgccgctgcgggcggccgcgtcccgggcgtgctctggtccgctccccctgcctgcccgtccccatcccacctcgcctggcttgccgtgctcgaactcgccgccctcccctccactcccaatcccgaggcgctgcgcctgaaggcagagttcctggtcctcctccagcccatcgctgacgaccccgccattggcgccgaggccagagaaatcctcacgaaactgctggatttgggggtgacgaggttgaagctcgaggtcgaaggcggaggggacgcaggtgctagtgccgaggaagcctccgtgaaggatctgagagggctatgggaagtgttcctcgacaacgcctttgtgtttgatgcgttgtgcataggcgtctcgaggcagatcgccttggacaggggtttcggtgtggatgtgctcctatggctgcggcggaacgtgcaacttgcccatttggatgccgtgaagactcttgtcacggaaggtgatctggatgctgctcctggccatcttcggtttctttgccttgaccatggactggagaaggatgagtacaaggttgtcatagcagagcttctcagaaagggatgggcaaaaacatccaattatggtggaacatggtctgagttgcagaataggataactaaattatatggagcagctcttcaatctactagtcccgagctcgtgcaacttgttcagctcattctggataacattctttctgaagaaattgaagatcatgatgtctctgatgctaatgggatgcctcttcctttcgaaaaatttctcgaaacattgttgttggagagggatactgactcagatgacaaggtcttgttggatgcggctataacgtcctgcaaaaaagatctgtaccattattgccgattgtctggaaagcacatgcttgaagtagtcttggaaactgctctatcatcaattaagagggagcagcttcttgaggctgttgatgttgtttcgttgttcccccttctccacccactggttgctgtcttgggatgggatattttgaagggtaaaacaggtctgcggagaaagctaatgcagctgttctggacaagcaaatcccaaggtctacgactacaggaatattcacattaccgtagcccgacagatgagacatcctgtgaagagtacttgtgtgatcttctatgcttccatctggaccttgcacgttttgtttcaagtgttaattctggctgtttgtggaatttgaggaattcattgttgtttacccaacaagagcaaggttcagatgttaacaatgcagaaatattagacccttttgtcgagaacttgatacttgagcggttagctgttcagagtcccatgagagtgctatttgacgtagtcccaggaataaaatttcaagatgcgatcgagcttgttggtatgcagccacttccttcaacaactgccgcttggaagaggatgcatgatattgaactgatgcacatgcgatattctcttcagtcagttgcgcttgctctaggagagatggaaaagtgtacaggtgatgagaatgagtgttattatcataaagcattgtcatatctcagggagatgcaaaattttatggaggctatcaaaagttctccaagaaagattttcatggttagcattattttatccttgttacacatggatgattgtgccaaattgtctcaatctgtcccttctgagtgctatgttagtcatgaatgccatgatataaatatcgaatctgagggaaagaacgtggtggtatattttgttgggcttttacttgatatacttcgtcataatctcgaatcaaaaggctctgatacggatcacctttcaagtactggtctgtcgcctgctggtagacaagcgttagaatggaggctcaaacatgccaaacattctattgaagacctggattggcgtctatctgttctaaaacgtcttccacctctgtctgagcggcaatggagttggaaggaggcattagttcttctacgtgctgctccttcgaaattactgaatctatgcatgcaaagggaaaactatgatataggagaagaagctgtgcaacgattttctttacctgctgaggataaagcttcccttgaactagctgaatgggtagctggtgcatataaaagagcactggttgaggatgctgttaatcgtgtcacagataatacaaatgcagcacatgaattggatattttgtcattacgcacgcagcttggttctttaactacaattctgctttgtgttgatgttgctgcaacatctgctaagtcagttcatatgtgccgatttcttctcgatgaggcaacaagcatgttatctgaaatatttccaggaaggtcccccaaagtaggaccaacttactgggatcagatccaagaacttgctaccatatcagtgataaagcgcatacttcagcgtctgcatgacatcttggatctggatactcttccatctcttcaagtgttctttactgagatgagcatctcttcgtcaacggaatgtagcagagttggacaaaagcaacgtcctcttgggcttctgcaccaaatgattgatgacgccttcaaaggaaagcgacagttcttgagtggtaagcttcacaatgttgctagagctattgttgatgaggactttgatactgtttattcgaaagaaggtgtcaacttagaaaagaaggatattttgagctctgaaaaaggcatactccttggtcacgggcttagaattctaaaacaagcatctaggagtgaccttgcatcttcaaatgttgtggatagtggtccagaacacaaaggttctgcaaacagatatctgggccctctatctaccaagccgtcaacatatttatcaaacttcataatatatactgcaaccattggtgacatagttgatggaactgacacaactcatgatttcaactatttctcgttagtctatgaatggccaaaagatctattaactcgtctggtttttgagcgtggaagcactgatgcagcagcaaaggttgctgacacaatgagtgttgattttgtgcatgagattatatcagcatgtgtgccacctgttttacctccacgaacaggacaaggatgggcttgcattcctgtcatacctaccatttgtaatattagttcagaaaacagactatgcaccaagtcttctcctgctcaaggatggagtgcacatgattcgtccttgtcttctcgtcaagaacccctctatcctctccaattaaatttagtgaagcatttagcccagttatcttcagtaagagcagttttggcctgtgtatttggaagcagcatactatctggggacaatgaatcatcttttactcatgtgaaagattcaacacaagctccagaaactgagagatcattttttgaatttgctcttgagcaatcagagagatatccaaccttgaaccggtggatacagatgcagtctaatcttcatcgagtatccgagtcttctataacagataaatccgaagtctctttgcatcaatccaagggaaagttttgtatgaagcgaacccgtgagtctgacagtgatggtgaatcagagcttgaagagaatgtcataagcgggaacaccagttcaagttcactagaatccactaaacatgaagacgctaggctagagccaacaacttttatttcatttgattgggagaatgaagcaccatatgaaaaagctgttgagaggttaattagtgaaggaaaattaagtgatgctcttgctgtgtctgatcgttgtttgcgcaatggagcatctgataatttgcttcagttgctcatcgaacagaaggaagaaaaaggtccaggcacaggacaaattcatccatatggatctcacagtcttgggaatgatacttctcagtactgcttgaggctgagagacaaaaaagttgcagctcagctcgctctaaagtacttgcacagctgggaccttgatgctgcaaccaatgttctaactatgtgcatgtgccacttacctgagaatgatcctatgcgcagtgaggtgttgcacatgaagcaatctttacagaggtatggccatatcatgagtgctgatgagcactacactagatggcaagaggtggaagctgattgtgaagatgacccagagggcttggcactccgtcttgctgccaaaggagctgtttccgctgctttggaggttgctgaaagtgcctctttatcaattgatttgcggagggagttgcaaggccgtcagcttgtcaaactgctaatcactgatccacttaatggcggaggcccagctgcagcttcaagatttctgtcaactttaagggattccaatgatgctcttcctgtagccattggtgctatgaatttattacctgacctgcgttcaaagcagcttcttgtgcatttcttcctcaagcgtacagttgggaatctatcagatgctgagattgcacggcttaatttgtgggcattaggtctccgtgttctttccttattgccattgccatcacaacagcgttgttcttctctgcacgaacaccctcagttgatcgtagaagtactgttgatgatgaaacaactccagtctgcttctttgattttgaaagaattttcttccttgagggatgataagttaattattgcgtatgctaaaaaagcaatctcaattaacagagaagcacgcaaagcattctcatgggtcccccgtgatagtggcactaaaacacccccaaaagatatccttcggaaaagaaagagttcaggctctggaggtgatagatcctcttgggaagcaatgcctggtttacaggaggagcggacacctgtatatccttctgaggcgcaagaaagacttccttttgtctctgctcctgatgagtgggtgctgacgggagatcctgacaaggatgatgcaactcgttcatcccataaatatgaaacctctcctgatatcacactgttcaaggcattgatatccttgtgcaccaatgagtcagtagctgcaaaaggtgcacttgaattgtgtatgactcagatgaaggttgtgctaagctcccaacagttgcctcttgatgcctctatggacaacatagcccgggcttatcatgcaacggaaacttatgtacaggcactctcttatgctaagaatctatttaaaaagctcgttggtagtagtgatttgtcaagtggctctgaaagaagtaaggaagttgatgatgtttctgtggacactggcagttcaagcactgggagccagtatctggatgagctgtctgatttcctaactcaagcagacatgtggttagggcgtgcagagcttcttcaaagcctgctgggatcaggtattattgcctcgctggatgatatagctgacaaagaatcttcaagtagactacgtgacagattggtcaacgatgaacggtacagcatggctgtatatacttgtagaaagtgcaagattgatgctgtaccagtatgggttgcatggggccatgcattagttcgaatggagcactatgctcaagctcgtgtgaagttcaagcaagcacttcaacaatacaaaggcgatgcaacttctgttgttactgaaataatcaacacaattgaaggagggcctccagttgatgtttcttctgtccgttccatgtatgagcatttggcaaagagtgcggcgaccatctttgatgattccctttctgctgatgcttatctgaatgttctgtacatgccatcgacatttccacgatctgagaggtcccgacagtccagaggtcatgtagacagccaattcaggactgctagttcctaccttgaagatggccctcgcagcaatcttgatagtgtccgatatgctgagtgtattcattacttgcaagattatgctcggccacaaatgcttgctttcatgttcaggcatggccattacactgaagcatgctctctgttcttcccattcagtcaaccaaccacggaaggggaaacatctttgtcttcagctccatggagtgatcctttaacaactgattatgggacaattgatgacttgtgtgatctctgtcttggatatggtgccatggctgttttggagaatacaatacggacaataacacaatcgcccacatatcatgaggcacacatgattcagtacatgaacactattatcacccgcatttgcaactattgtgaaacacacaggcattttaattatctctacaacttcctggttctaaaagatgaccatgttgcttctggcctttgttgtattcaattatttatgaattcaatgtctcaagaggaggctttgaggcatttgggacatgccaagacacatttcgaagaagccttatctgtacgagatagaacaatcgaggctactaagttggtattgcggtctgctcggaataagggtgcacctggaaaaatgaccagggaaacgataatgaaatattccactcgtgtttcctatcaggcgaaggtgcatggttgttgaaactctggctgaaaagcattttgatttagctttcagaatgcttcatgagtttgatctcccagctgttgatatttatgctggggtagctgcatccctcgcagaaaggaaaaaagggggccagttgacagagttcttgaagaatataagggggactatagatgatgatgaatgggatcaggttattggtgctgctataaatgtttatgccaacaagcataaagaaagaccagatcgccttatcgacatgctaatcagcaatcacaggaaagtacttgcttgtgttgtctgtggacgtctaaaaagtgcattccaaatagccgcacgaagtggaagtgtcgctgatgttcaatatgttgcccatcaggcattacatgcaaatgcattgacagtgcttgatatgtgtaagcaatggctcgcgcagtacatgtgataccatagatacttgctgagagagttctcacgtgaagacagaaaaactaaggggcatttggtttgaagagtcaatctattttagatgatgttgtgtatcataagtttattttataaatttggtggaataaattcgttctccatattattactaattatgagcttatgatgaatgaaatgctgatgaatcaatttattatattcaacaaactaaaaaagaaagtgagaggtgagaagatgatagactatcttaatccttaaaccaaacatgtcacaagtaatcaaagcaaggaaccatctgaaagctggtgttcaatcctcatatcccatttcaacttctttccgctttccacttcgtgcagcacaatgcctccatgtgtatatgcctctttaagggcatattcgttatactatcctattgcattctttggtctttgctgctccctcggtcctaaattataaaatattttctagatttatagctttttgttatgtatttaaatatacattgtatctaaatatatagtaaaaaataatgtacgtagaaaaatcaaaacgttttataatttagtgttgtaaagctttgtaatttcattacttgtccatccagtgagactgtttaattgtgagcgcttggcagcccacaaaacagtcagtgccagc

SEQ ID NO: 32862 - DNA, 7762 bp, Zea Mays
gccaaaggctgcaatcgaacactccggtacttcgccacaccgcgaaagcacggcggctcctatcccgcgcgggcatcgccatgcccgctatccccctcgtgatccccaacgcactagctggctaggcgctcaccgacgttcctctccatggcggcgtcggagcgggaggccgcgctcctcacacgcgtggcagcgaaccacctctttctcgcgcagttcgagcccctgcgtgcggtgctcctcagcctccgccgccgtgacccggtgctatgtgcggacttcctccgcgcggtcgccgctgcgggcggccgcgtcccgggcgtgctctggtccgctccccctgcctgcccgtccccatcccacctcgcctggcttgccgtgctcgaactcgccgccctcccctccactcccaatcccgaggcgctgcgcctgaaggcagagttcctggtcctcctccagcccatcgctgacgaccccgccattggcgccgaggccagagaaatcctcacgaaactgctggatttgggggtgacgaggttgaagctcgaggtcgaaggcggaggggacgcaggtgctagtgccgaggaagcctccgtgaaggatctgagagggctatgggaagtgttcctcgacaacgcctttgtgtttgatgcgttgtgcataggcgtctcgaggcagatcgccttggacaggggtttcggtgtggatgtgctcctatggctgcggcggaacgtgcaacttgcccatttggatgccgtgaagactcttgtcacggaaggtgatctggatgctgctcctggccatcttcggtttctttgccttgaccatggactggagaaggatgagtacaaggttgtcatagcagagcttctcagaaagggatgggcaaaaacatccaattatggtggaacatggtctgagttgcagaataggataactaaattatatggagcagctcttcaatctactagtcccgagctcgtgcaacttgttcagctcattctggataacattctttctgaagaaattgaagatcatgatgtctctgatgctaatgggatgcctcttcctttcgaaaaatttctcgaaacattgttgttggagagggatactgactcagatgacaaggtcttgttggatgcggctataacgtcctgcaaaaaagatctgtaccattattgccgattgtctggaaagcacatgcttgaagtagtcttggaaactgctctatcatcaattaagagggagcagcttcttgaggctgttgatgttgtttcgttgttcccccttctccacccactggttgctgtcttgggatgggatattttgaagggtaaaacaggtctgcggagaaagctaatgcagctgttctggacaagcaaatcccaaggtctacgactacaggaatattcacattaccgtagcccgacagatgaggtgctatttgacgtagtcccaggaataaaatttcaagatgcgatcgagcttgttggtatgcagccacttccttcaacaactgccgcttggaagaggatgcatgatattgaactgatgcacatgcgatattctcttcagtcagttgcgcttgctctaggagagatggaaaagtgtacagattttcatggttagcattattttatccttgttacacatggatgattgtgccaaattgtctcaatctgtcccttctgagtgctatgttagtcatgaatgccatgatataaatatcgaatctgagggaaagaacgtggtggtatattttgttgggcttttacttgatatacttcgtcataatctcgaatcaaaaggctctgatacggatcacctttcaagtactggtctgtcgcctgctggtagacaagcgttagaatggaggctcaaacatgccaaacattctattgaagacctggattggcgtctatctgttctaaaacgtcttccacctctgtctgagcggcaatggagttggaaggaggcattagttcttctacgtgctgctccttcgaaattactgaatctatgcatgcaaagggaaaactatgatataggagaagaagctgtgcaacgattttctttacctgctgaggataaagcttcccttgaactagctgaatgggtagctggtgcatataaaagagcactggttgaggatgctgttaatcgtgtcacagataatacaaatgcagcacatgaattggatattttgtcattacgcacgcagcttggttctttaactacaattctgctttgtgttgatgttgctgcaacatctgctaagtcagttcatatgtgccgatttcttctcgatgaggcaacaagcatgttatctgaaatatttccaggaaggtcccccaaagtaggaccaacttactgggatcagatccaagaacttgctaccatatcagtgataaagcgcatacttcagcgtctgcatgacatcttggatctggatactcttccatctcttcaagtgttctttactgagatgagcatctcttcgtcaacggaatgtagcagagttggacaaaagcaacgtcctcttgggcttctgcaccaaatgattgatgacgccttcaaaggaaagcgacagttcttgagtggtaagcttcacaatgttgctagagctattgttgatgaggactttgatactgtttattcgaaagaaggtgtcaacttagaaaagaaggatattttgagctctgaaaaaggcatactccttggtcacgggcttagaattctaaaacaagcatctaggagtgaccttgcatcttcaaatgttgtggatagtggtccagaacacaaaggttctgcaaacagatatctgggccctctatctaccaagccgtcaacatatttatcaaacttcataatatatactgcaaccattggtgacatagttgatggaactgacacaactcatgatttcaactatttctcgttagtctatgaatggccaaaagataatacttgtggcttggtgtctctggctcctatgagcgcatttggaaaacttggtacaaaacagctattaactcgtctggtttttgagcgtggaagcactgatgcagcagcaaaggttgctgacacaatgagtgttgattttgtgcatgagattatatcagcatgtgtgccacctgttttacctccacgaacaggacaaggatgggcttgcattcctgtcatacctaccatttgtaatattagttcagaaaacagactatgcaccaagtcttctcctgctcaaggatggagtgcacatgattcgtccttgtcttctcgtcaagaacccctctatcctctccaattaaatttagtgaagcatttagcccagttatcttcagtaagagcagttttggcctgtgtatttggaagcagcatactatctggggacaatgaatcatcttttactcatgtgaaagattcaacacaagctccagaaactgagagatcattttttgaatttgctcttgagcaatcagagagatatccaaccttgaaccggtggatacagatgcagtctaatcttcatcgagtatccgagtcttctataacagataaatccgaagtctctttgcatcaatccaagggaaagttttgtatgaagcgaacccgtgagtctgacagtgatggtgaatcagagcttgaagagaatgtcataagcgggaacaccagttcaagttcactagaatccactaaacatgaagacgctaggctagagccaacaacttttatttcatttgattgggagaatgaagcaccatatgaaaaagctgttgagaggttaattagtgaaggaaaattaagtgatgctcttgctgtgtctgatcgttgtttgcgcaatggagcatctgataatttgcttcagttgctcatcgaacagaaggaagaaaaaggtccaggcacaggacaaattcatccatatggatctcacagtcttgggaatgatacttctcagtactgcttgaggctgagagacaaaaaagttgcagctcagctcgctctaaagtacttgcacagctgggaccttgatgctgcaaccaatgttctaactatgtgcatgtgccacttacctgagaatgatcctatgcgcagtgaggtgttgcacatgaagcaatctttacagaggtatggccatatcatgagtgctgatgagcactacactagatggcaagaggtggaagctgattgtgaagatgacccagagggcttggcactccgtcttgctgccaaaggagctgtttccgctgctttggaggttgctgaaagtgcctctttatcaattgatttgcggagggagttgcaaggccgtcagcttgtcaaactgctaatcactgatccacttaatggcggaggcccagctgcagcttcaagatttctgtcaactttaagggattccaatgatgctcttcctgtagccattggtgctatgaatttattacctgacctgcgttcaaagcagcttcttgtgcatttcttcctcaagcgtacagttgggaatctatcagatgctgagattgcacggcttaatttgtgggcattaggtctccgtgttctttccttattgccattgccatcacaacagcgttgttcttctctgcacgaacaccctcagttgatcgtagaagtactgttgatgatgaaacaactccagtctgcttctttgattttgaaagaattttcttccttgagggatgataagttaattattgcgtatgctaaaaaagcaatctcaattaacgttagctcagctcctagggaacgtcgatcgaatatctctgcatcaagggcaaaacaaaaaaaggctacaactccagctaaaacaaattttgtgcaaagttttggtaactttcagagagaagcacgcaaagcattctcatgggtcccccgtgatagtggcactaaaacacccccaaaagatatccttcggaaaagaaagagttcaggctctggaggtgatagatcctcttgggaagcaatgcctggtttacaggaggagcggacacctgtatatccttctgaggcgcaagaaagacttccttttgtctctgctcctgatgagtgggtgctgacgggagatcctgacaaggatgatgcaactcgttcatcccataaatatgaaacctctcctgatatcacactgttcaaggcattgatatccttgtgcaccaatgagtcagtagctgcaaaaggtgcacttgaattgtgtatgactcagatgaaggttgtgctaagctcccaacagttgcctcttgatgcctctatggacaacatagcccgggcttatcatgcaacggaaacttatgtacaggcactctcttatgctaagaatctatttaaaaagctcgttggtagtagtgatttgtcaagtggctctgaaagaagtaaggaagttgatgatgtttctgtggacactggcagttcaagcactgggagccagtatctggatgagctgtctgatttcctaactcaagcagacatgtggttagggcgtgcagagcttcttcaaagcctgctgggatcaggtattattgcctcgctggatgatatagctgacaaagaatcttcaagtagactacgtgacagattggtcaacgatgaacggtacagcatggctgtatatacttgtagaaagtgcaagattgatgctgtaccagtatgggttgcatggggccatgcattagttcgaatggagcactatgctcaagctcgtgtgaagttcaagcaagcacttcaacaatacaaaggcgatgcaacttctgttgttactgaaataatcaacacaattgaaggagggcctccagttgatgtttcttctgtccgttccatgtatgagcatttggcaaagagtgcggcgaccatctttgatgattccctttctgctgatgcttatctgaatgttctgtacatgccatcgacatttccacgatctgagaggtcccgacagtccagaggtcatgtagacagccaattcaggactgctagttcctaccttgaagatggccctcgcagcaatcttgatagtgtccgatatgctgagtgtattcattacttgcaagattatgctcggccacaaatgcttgctttcatgttcaggcatggccattacactgaagcatgctctctgttcttcccattcagtcaaccaaccacggaaggggaaacatctttgtcttcagctccatggagtgatcctttaacaactgattatgggacaattgatgacttgtgtgatctctgtcttggatatggtgccatggctgttttggagaatacaatacggacaataacacaatcgcccacatatcatgaggcacacatgattcagtacatgaacactattatcacccgcatttgcaactattgtgaaacacacaggcattttaattatctctacaacttcctggttctaaaagatgaccatgttgcttctggcctttgttgtattcaattatttatgaattcaatgtctcaagaggaggctttgaggcatttgggacatgccaagacacatttcgaagaagccttatctgtacgagatagaacaatcgaggctactaagttggtattgcggtctgctcggaataagggtgcacctggaaaaatgaccagggaaacgataatgaaatattccactcgtgtttcctatcaggcgaaggtgcatggttgttgaaactctggctgaaaagcattttgatttagctttcagaatgcttcatgagtttgatctcccagctgttgatatttatgctggggtagctgcatccctcgcagaaaggaaaaaagggggccagttgacagagttcttgaagaatataagggggactatagatgatgatgaatgggatcaggttattggtgctgctataaatgtttatgccaacaagcataaagaaagaccagatcgccttatcgacatgctaatcagcaatcacaggaaagtacttgcttgtgttgtctgtggacgtctaaaaagtgcattccaaatagccgcacgaagtggaagtgtcgctgatgttcaatatgttgcccatcaggcattacatgcaaatgcattgacagtgcttgatatgtgtaagcaatggctcgcgcagtacatgtgataccatagatacttgctgagagagttctcacgtgaagacagaaaaactaaggggcatttggtttgaagagtcaatctattttagatgatgttgtgtatcataagtttattttataaatttggtggaataaattcgttctccatattattactaattatgagcttatgatgaatgaaatgctgatgaatcaatttattatattcaacaaactaaaaaagaaagtgagaggtgagaagatgatagactatcttaatccttaaaccaaacatgtcacaagtaatcaaagcaaggaaccatctgaaagctggtgttcaatcctcatatcccatttcaacttctttccgctttccacttcgtgcagcacaatgcctccatgtgtatatgcctctttaagggcatattcgttatactatcctattgcattctttggtctttgctgctccctcggtcctaaattataaaatattttctagatttatagctttttgttatgtatttaaatatacattgtatctaaatatatagtaaaaaataatgtacgtagaaaaatcaaaacgttttataatttagtgttgtaaagctttgtaatttcattacttgtccatccagtgagactgtttaattgtgagcgcttggcagcccacaaaacagtcagtgccagc

SEQ ID NO: 32863 - DNA, 1922 bp, Zea Mays
ccaaaggctgcaatcgaacactccggtacttcgccacaccgcgaaagcacggcggctcctatcccgcgcgggcatcgccatgcccgctatccccctcgtgatccccaacgcactagctggctaggcgctcaccgacgttcctctccatggcggcgtcggagcgggaggccgcgctcctcacacgcgtggcagcgaaccacctctttctcgcgcagttcgagcccctgcgtgcggtgctcctcagcctccgccgccgtgacccggtgctatgtgcggacttcctccgcgcggtcgccgctgcgggcggccgcgtcccgggcgtgctctggtccgctccccctgcctgcccgtccccatcccacctcgcctggcttgccgtgctcgaactcgccgccctcccctccactcccaatcccgaggcgctgcgcctgaaggcagagttcctggtcctcctccagcccatcgctgacgaccccgccattggcgccgaggccagagaaatcctcacgaaactgctggatttgggggtgacgaggttgaagctcgaggtcgaaggcggaggggacgcaggtgctagtgccgaggaagcctccgtgaaggatctgagagggctatgggaagtgttcctcgacaacgcctttgtgtttgatgcgttgtgcataggcgtctcgaggcagatcgccttggacaggggtttcggtgtggatgtgctcctatggctgcggcggaacgtgcaacttgcccatttggatgccgtgaagactcttgtcacggaaggtgatctggatgctgctcctggccatcttcggtttctttgccttgaccatggactggagaaggatgagtacaaggttgtcatagcagagcttctcagaaagggatgggcaaaaacatccaattatggtggaacatggtctgagttgcagaataggataactaaattatatggagcagctcttcaatctactagtcccgagctcgtgcaacttgttcagctcattctggataacattctttctgaagaaattgaagatcatgatgtctctgatgctaatgggatgcctcttcctttcgaaaaatttctcgaaacattgttgttggagagggatactgactcagatgacaaggtcttgttggatgcggctataacgtcctgcaaaaaagatctgtaccattattgccgattgtctggaaagcacatgcttgaagtagtcttggaaactgctctatcatcaattaagagggagcagcttcttgaggctgttgatgttgtttcgttgttcccccttctccacccactggttgctgtcttgggatgggatattttgaagggtaaaacaggtctgcggagaaagctaatgcagctgttctggacaagcaaatcccaaggtctacgactacaggaatattcacattaccgtagcccgacagatgagacatcctgtgaagagtacttgtgtgatcttctatgcttccatctggaccttgcacgttttgtttcaagtgttaattctggctgtttgtggaatttgaggaattcattgttgtttacccaacaagagcaaggttcagatgttaacaatgcagaaatattagacccttttgtcgagaacttgatacttgagcggttagctgttcagagtcccatgagagtgctatttgacgtagtcccaggaataaaatttcaagatgcgatcgagcttgttggtatgcagccacttccttcaacaactgccgcttggaagaggatgcatgatattgaactgatgcacatgcgatattctcttcagtcagttgcgcttgctctaggagagatggaaaagtgtacaggtgcactttttgttggcgaagacattttattgttcctcgaagtagcaaagttgtggagctatcagttcaatgaactattaggagcaacctaa

SEQ ID NO: 32864 - DNA, 7426 bp, Zea Mays
ccaaaggctgcaatcgaacactccggtacttcgccacaccgcgaaagcacggcggctcctatcccgcgcgggcatcgccatgcccgctatccccctcgtgatccccaacgcactagctggctaggcgctcaccgacgttcctctccatggcggcgtcggagcgggaggccgcgctcctcacacgcgtggcagcgaaccacctctttctcgcgcagttcgagcccctgcgtgcggtgctcctcagcctccgccgccgtgacccggtgctatgtgcggacttcctccgcgcggtcgccgctgcgggcggccgcgtcccgggcgtgctctggtccgctccccctgcctgcccgtccccatcccacctcgcctggcttgccgtgctcgaactcgccgccctcccctccactcccaatcccgaggcgctgcgcctgaaggcagagttcctggtcctcctccagcccatcgctgacgaccccgccattggcgccgaggccagagaaatcctcacgaaactgctggatttgggggtgacgaggttgaagctcgaggtcgaaggcggaggggacgcaggtgctagtgccgaggaagcctccgtgaaggatctgagagggctatgggaagtgttcctcgacaacgcctttgtgtttgatgcgttgtgcataggcgtctcgaggcagatcgccttggacaggggtttcggtgtggatgtgctcctatggctgcggcggaacgtgcaacttgcccatttggatgccgtgaagactcttgtcacggaaggtgatctggatgctgctcctggccatcttcggtttctttgccttgaccatggactggagaaggatgagtacaaggttgtcatagcagagcttctcagaaagggatgggcaaaaacatccaattatggtggaacatggtctgagttgcagaataggataactaaattatatggagcagctcttcaatctactagtcccgagctcgtgcaacttgttcagctcattctggataacattctttctgaagaaattgaagatcatgatgtctctgatgctaatgggatgcctcttcctttcgaaaaatttctcgaaacattgttgttggagagggatactgactcagatgacaaggtcttgttggatgcggctataacgtcctgcaaaaaagatctgtaccattattgccgattgtctggaaagcacatgcttgaagtagtcttggaaactgctctatcatcaattaagagggagcagcttcttgaggctgttgatgttgtttcgttgttcccccttctccacccactggttgctgtcttgggatgggatattttgaagggtaaaacaggtctgcggagaaagctaatgcagctgttctggacaagcaaatcccaaggtctacgactacaggaatattcacattaccgtagcccgacagatgagacatcctgtgaagagtacttgtgtgatcttctatgcttccatctggaccttgcacgttttgtttcaagtgttaattctggctgtttgtggaatttgaggaattcattgttgtttacccaacaagagcaaggttcagatgttaacaatgcagaaatattagacccttttgtcgagaacttgatacttgagcggttagctgttcagagtcccatgagagtgctatttgacgtagtcccaggaataaaatttcaagatgcgatcgagcttgttggtatgcagccacttccttcaacaactgccgcttggaagaggatgcatgatattgaactgatgcacatgcgatattctcttcagtcagttgcgcttgctctaggagagatggaaaagtgtacaggtgatgagaatgagtgttattatcataaagcattgtcatatctcagggagatgcaaaattttatggaggctatcaaaagttctccaagaaagattttcatggttagcattattttatccttgttacacatggatgattgtgccaaattgtctcaatctgtcccttctgagtgctatgttagtcatgaatgccatgatataaatatcgaatctgagggaaagaacgtggtggtatattttgttgggcttttacttgatatacttcgtcataatctcgaatcaaaaggctctgatacggatcacctttcaagtactggtctgtcgcctgctggtagacaagcgttagaatggaggctcaaacatgccaaacattctattgaagacctggattggcgtctatctgttctaaaacgtcttccacctctgtctgagcggcaatggagttggaaggaggcattagttcttctacgtgctgctccttcgaaattactgaatctatgcatgcaaagggaaaactatgatataggagaagaagctgtgcaacgattttctttacctgctgaggataaagcttcccttgaactagctgaatgggtagctggtgcatataaaagagcactggttgaggatgctgttaatcgtgtcacagataatacaaatgcagcacatgaattggatattttgtcattacgcacgcagcttggttctttaactacaattctgctttgtgttgatgttgctgcaacatctgctaagtcagttcatatgtgccgatttcttctcgatgaggcaacaagcatgttatctgaaatatttccaggaaggtcccccaaagtaggaccaacttactgggatcagatccaagaacttgctaccatatcagtgataaagcgcatacttcagcgtctgcatgacatcttggatctggatactcttccatctcttcaagtgttctttactgagatgagcatctcttcgtcaacggaatgtagcagagttggacaaaagcaacgtcctcttgggcttctgcaccaaatgattgatgacgccttcaaaggaaagcgacagttcttgagtggtaagcttcacaatgttgctagagctattgttgatgaggactttgatactgtttattcgaaagaaggtgtcaacttagaaaagaaggatattttgagctctgaaaaaggcatactccttggtcacgggcttagaattctaaaacaagcatctaggagtgaccttgcatcttcaaatgttgtggatagtggtccagaacacaaaggttctgcaaacagatatctgggccctctatctaccaagccgtcaacatatttatcaaacttcataatatatactgcaaccattggtgacatagttgatggaactgacacaactcatgatttcaactatttctcgttagtctatgaatggccaaaagataatacttgtggcttggtgtctctggctcctatgagcgcatttggaaaacttggtacaaaacagctattaactcgtctggtttttgagcgtggaagcactgatgcagcagcaaaggttgctgacacaatgagtgttgattttgtgcatgagattatatcagcatgtgtgccacctgttttacctccacgaacaggacaaggatgggcttgcattcctgtcatacctaccatttgtaatattagttcagaaaacagactatgcaccaagtcttctcctgctcaaggatggagtgcacatgattcgtccttgtcttctcgtcaagaacccctctatcctctccaattaaatttagtgaagcatttagcccagttatcttcagtaagagcagttttggcctgtgtatttggaagcagcatactatctggggacaatgaatcatcttttactcatgtgaaagattcaacacaagctccagaaactgagagatcattttttgaatttgctcttgagcaatcagagagatatccaaccttgaaccggtggatacagatgcagtctaatcttcatcgagtatccgagtcttctataacagataaatccgaagtctctttgcatcaatccaagggaaagttttgtatgaagcgaacccgtgagtctgacagtgatggtgaatcagagcttgaagagaatgtcataagcgggaacaccagttcaagttcactagaatccactaaacatgaagacgctaggctagagccaacaacttttatttcatttgattgggagaatgaagcaccatatgaaaaagctgttgagaggttaattagtgaaggaaaattaagtgatgctcttgctgtgtctgatcgttgtttgcgcaatggagcatctgataatttgcttcagttgctcatcgaacagaaggaagaaaaaggtccaggcacaggacaaattcatccatatggatctcacagtcttgggaatgatacttctcagtactgcttgaggctgagagacaaaaaagttgcagctcagctcgctctaaagtacttgcacagctgggaccttgatgctgcaaccaatgttctaactatgtgcatgtgccacttacctgagaatgatcctatgcgcagtgaggtgttgcacatgaagcaatctttacagaggtatggccatatcatgagtgctgatgagcactacactagatggcaagaggtggaagctgattgtgaagatgacccagagggcttggcactccgtcttgctgccaaaggagctgtttccgctgctttggaggttgctgaaagtgcctctttatcaattgatttgcggagggagttgcaaggccgtcagcttgtcaaactgctaatcactgatccacttaatggcggaggcccagctgcagcttcaagatttctgtcaactttaagggattccaatgatgctcttcctgtagccattggtgctatgaatttattacctgacctgcgttcaaagcagcttcttgtgcatttcttcctcaagcgtacagttgggaatctatcagatgctgagattgcacggcttaatttgtgggcattaggtctccgtgttctttccttattgccattgccatcacaacagcgttgttcttctctgcacgaacaccctcagttgatcgtagaagtactgttgatgatgaaacaactccagtctgcttctttgattttgaaagaattttcttccttgagggatgataagttaattattgcgtatgctaaaaaagcaatctcaattaacgttagctcagctcctagggaacgtcgatcgaatatctctgcatcaagggcaaaacaaaaaaaggctacaactccagctaaaacaaattttgtgcaaagttttggtaactttcagagagaagcacgcaaagcattctcatgggtcccccgtgatagtggcactaaaacacccccaaaagatatccttcggaaaagaaagagttcaggctctggaggtgatagatcctcttgggaagcaatgcctggtttacaggaggagcggacacctgtatatccttctgaggcgcaagaaagacttccttttgtctctgctcctgatgagtgggtgctgacgggagatcctgacaaggatgatgcaactcgttcatcccataaatatgaaacctctcctgatatcacactgttcaaggcattgatatccttgtgcaccaatgagtcagtagctgcaaaaggtgcacttgaattgtgtatgactcagatgaaggttgtgctaagctcccaacagttgcctcttgatgcctctatggacaacatagcccgggcttatcatgcaacggaaacttatgtacaggcactctcttatgctaagaatctatttaaaaagctcgttggtagtagtgatttgtcaagtggctctgaaagaagtaaggaagttgatgatgtttctgtggacactggcagttcaagcactgggagccagtatctggatgagctgtctgatttcctaactcaagcagacatgtggttagggcgtgcagagcttcttcaaagcctgctgggatcaggtattattgcctcgctggatgatatagctgacaaagaatcttcaagtagactacgtgacagattggtcaacgatgaacggtacagcatggctgtatatacttgtagaaagtgcaagattgatgctgtaccagtatgggttgcatggggccatgcattagttcgaatggagcactatgctcaagctcgtgtgaagttcaagcaagcacttcaacaatacaaaggcgatgcaacttctgttgttactgaaataatcaacacaattgaaggagggcctccagttgatgtttcttctgtccgttccatgtatgagcatttggcaaagagtgcggcgaccatctttgatgattccctttctgctgatgcttatctgaatgttctgtacatgccatcgacatttccacgatctgagaggtcccgacagtccagaggtcatgtagacagccaattcaggactgctagttcctaccttgaagatggccctcgcagcaatcttgatagtgtccgatatgctgagtgtattcattacttgcaagattatgctcggccacaaatgcttgctttcatgttcaggcatggccattacactgaagcatgctctctgttcttcccattcagtcaaccaaccacggaaggggaaacatctttgtcttcagctccatggagtgatcctttaacaactgattatgggacaattgatgacttgtgtgatctctgtcttggatatggtgccatggctgttttggagaatacaatacggacaataacacaatcgcccacatatcatgaggcacacatgattcagtacatgaacactattatcacccgcatttgcaactattgtgaaacacacaggcattttaattatctctacaacttcctggttctaaaagatgaccatgttgcttctggcctttgttgtattcaattatttatgaattcaatgtctcaagaggaggctttgaggcatttgggacatgccaaggcgaaggtgcatggttgttgaaactctggctgaaaagcattttgatttagctttcagaatgcttcatgagtttgatctcccagctgttgatatttatgctggggtagctgcatccctcgcagaaaggaaaaaagggggccagttgacagagttcttgaagaatataagggggactatagatgatgatgaatgggatcaggttattggtgctgctataaatgtttatgccaacaagcataaagaaagaccagatcgccttatcgacatgctaatcagcaatcacaggaaagtacttgcttgtgttgtctgtggacgtctaaaaagtgcattccaaatagccgcacgaagtggaagtgtcgctgatgttcaatatgttgcccatcaggtcagttatcttcacaaatttacagatgtttgctgcttattaataatcgaatgaattttatgttgcatctttctactaccatcaatgacttgtagccccctgcccctcttcaaaactatagttcagctttgtactactccctatcctaaaattactgtcattttagctttgaaagtatgtcccacaaagagtgtcgtttcgctagctacggaagtcctgtgcctattgg

SEQ ID NO: 32865 - DNA, 6740 bp, Zea Mays
ctcctatcccgcgcgggcatcgccatgcccgctatccccctcgtgatccccaacgcactagctggctaggcgctcaccgacgttcctctccatggcggcgtcggagcgggaggccgcgctcctcacacgcgtggcagcgaaccacctctttctcgcgcagttcgagcccctgcgtgcggtgctcctcagcctccgccgccgtgacccggtgctatgtgcggacttcctccgcgcggtcgccgctgcgggcggccgcgtcccgggcgtgctctggtccgctccccctgcctgcccgtccccatcccacctcgcctggcttgccgtgctcgaactcgccgccctcccctccactcccaatcccgaggcgctgcgcctgaaggcagagttcctggtcctcctccagcccatcgctgacgaccccgccattggcgccgaggccagagaaatcctcacgaaactgctggatttgggggtgacgaggttgaagctcgaggtcgaaggcggaggggacgcaggtgctagtgccgaggaagcctccgtgaaggatctgagagggctatgggaagtgttcctcgacaacgcctttgtgtttgatgcgttgtgcataggcgtctcgaggcagatcgccttggacaggggtttcggtgtggatgtgctcctatggctgcggcggaacgtgcaacttgcccatttggatgccgtgaagactcttgtcacggaaggtgatctggatgctgctcctggccatcttcggtttctttgccttgaccatggactggagaaggatgagtacaaggttgtcatagcagagcttctcagaaagggatgggcaaaaacatccaattatggtggaacatggtctgagttgcagaataggataactaaattatatggagcagctcttcaatctactagtcccgagctcgtgcaacttgttcagaaattgaagatcatgatgtctctgatgctaatgggatgcctcttcctttcgaaaaatttctcgaaacattgttgttggagagggatactgactcagatgacaaggtcttgttggatgcggctataacgtcctgcaaaaaagatctgtaccattattgccgattgtctggaaagcacatgcttgaagtagtcttggaaactgctctatcatcaattaagagggagcagcttcttgaggctgttgattggttttctgcaggttgtttcgttgttcccccttctccacccactggttgctgtcttgggatgggatattttgaagggtaaaacaggtctgcggagaaagctaatgcagctgttctggacaagcaaatcccaaggtctacgactacaggaatattcacattaccgtagcccgacagatgagacatcctgtgaagagtacttgtgtgatcttctatgcttccatctggaccttgcacgttttgtttcaagtgttaattctggctgtttgtggaatttgaggaattcattgttgtttacccaacaagagcaaggttcagatgttaacaatgcagaaatattagacccttttgtcgagaacttgatacttgagcggttagctgttcagagtcccatgagagtgctatttgacgtagtcccaggaataaaatttcaagatgcgatcgagcttgttggtatgcagccacttccttcaacaactgccgcttggaagaggatgcatgatattgaactgatgcacatgcgatattctcttcagtcagttgcgcttgctctaggagagatggaaaagtgtacaggtgatgagaatgagtgttattatcataaagcattgtcatatctcagggagatgcaaaattttatggaggctatcaaaagttctccaagaaaggttggctcttctgtgatatgttcttattcagattttcatggttagcattattttatccttgttacacatggatgattgtgccaaattgtctcaatctgtcccttctgagtgctatgttagtcatgaatgccatgatataaatatcgaatctgagggaaagaacgtggtggtatattttgttgggcttttacttgatatacttcgtcataatctcgaatcaaaaggctctgatacggatcacctttcaagtactggtctgtcgcctgctggtagacaagcgttagaatggaggctcaaacatgccaaacattctattgaagacctggattggcgtctatctgttctaaaacgtcttccacctctgtctgagcggcaatggagttggaaggaggcattagttcttctacgtgctgctccttcgaaattactgaatctatgcatgcaaagggaaaactatgatataggagaagaagctgtgcaacgattttctttacctgctgaggataaagcttcccttgaactagctgaatgggtagctggtgcatataaaagagcactggttgaggatgctgttaatcgtgtcacagataatacaaatgcagcacatgaattggatattttgtcattacgcacgcagcttggttctttaactacaattctgctttgtgttgatgttgctgcaacatctgctaagtcagttcatatgtgccgatttcttctcgatgaggcaacaagcatgttatctgaaatatttccaggaaggtcccccaaagtaggaccaacttactgggatcagatccaagaacttgctaccatatcagtgataaagcgcatacttcagcgtctgcatgacatcttggatctggatactcttccatctcttcaagtgttctttactgagatgagcatctcttcgtcaacggaatgtagcagagttggacaaaagcaacgtcctcttgggcttctgcaccaaatgattgatgacgccttcaaaggaaagcgacagttcttgagtggtaagcttcacaatgttgctagagctattgttgatgaggactttgatactgtttattcgaaagaaggtgtcaacttagaaaagaaggatattttgagctctgaaaaaggcatactccttggtcacgggcttagaattctaaaacaagcatctaggagtgaccttgcatcttcaaatgttgtggatagtggtccagaacacaaaggttctgcaaacagatatctgggccctctatctaccaagccgtcaacatatttatcaaacttcataatatatactgcaaccattggtgacatagttgatggaactgacacaactcatgatttcaactatttctcgttagtctatgaatggccaaaagatctattaactcgtctggtttttgagcgtggaagcactgatgcagcagcaaaggttgctgacacaatgagtgttgattttgtgcatgagattatatcagcatgtgtgccacctgttttacctccacgaacaggacaaggatgggcttgcattcctgtcatacctaccatttgtaatattagttcagaaaacagactatgcaccaagtcttctcctgctcaaggatggagtgcacatgattcgtccttgtcttctcgtcaagaacccctctatcctctccaattaaatttagtgaagcatttagcccagttatcttcagtaagagcagttttggcctgtgtatttggaagcagcatactatctggggacaatgaatcatcttttactcatgtgaaagattcaacacaagctccagaaactgagagatcattttttgaatttgctcttgagcaatcagagagatatccaaccttgaaccggtggatacagatgcagtctaatcttcatcgagtatccgagtcttctataacagataaatccgaagtctctttgcatcaatccaagggaaagttttgtatgaagcgaacccgtgagtctgacagtgatggtgaatcagagcttgaagagaatgtcataagcgggaacaccagttcaagttcactagaatccactaaacatgaagacgctaggctagagccaacaacttttatttcatttgattgggagaatgaagcaccatatgaaaaagctgttgagaggttaattagtgaaggaaaattaagtgatgctcttgctgtgtctgatcgttgtttgcgcaatggagcatctgataatttgcttcagttgctcatcgaacagaaggaagaaaaaggtccaggcacaggacaaattcatccatatggatctcacagtcttgggaatgatacttctcagtactgcttgaggctgagagacaaaaaagttgcagctcagctcgctctaaagtacttgcacagctgggaccttgatgctgcaaccaatgttctaactatgtgcatgtgccacttacctgagaatgatcctatgcgcagtgaggtgttgcacatgaagcaatctttacagaggtatggccatatcatgagtgctgatgagcactacactagatggcaagaggtggaagctgattgtgaagatgacccagagggcttggcactccgtcttgctgccaaaggagctgtttccgctgctttggaggttgctgaaagtgcctctttatcaattgatttgcggagggagttgcaaggccgtcagcttgtcaaactgctaatcactgatccacttaatggcggaggcccagctgcagcttcaagatttctgtcaactttaagggattccaatgatgctcttcctgtagccattggtgctatgaatttattacctgacctgcgttcaaagcagcttcttgtgcatttcttcctcaagcgtacagttgggaatctatcagatgctgagattgcacggcttaatttgtgggcattaggtctccgtgttctttccttattgccattgccatcacaacagcgttgttcttctctgcacgaacaccctcagttgatcgtagaagtactgttgatgatgaaacaactccagtctgcttctttgattttgaaagaattttcttccttgagggatgataagttaattattgcgtatgctaaaaaagcaatctcaattaacagagaagcacgcaaagcattctcatgggtcccccgtgatagtggcactaaaacacccccaaaagatatccttcggaaaagaaagagttcaggctctggaggtgatagatcctcttgggaagcaatgcctggtttacaggaggagcggacacctgtatatccttctgaggcgcaagaaagacttccttttgtctctgctcctgatgagtgggtgctgacgggagatcctgacaaggatgatgcaactcgttcatcccataaatatgaaacctctcctgatatcacactgttcaaggcattgatatccttgtgcaccaatgagtcagtagctgcaaaaggtgcacttgaattgtgtatgactcagatgaaggttgtgctaagctcccaacagttgcctcttgatgcctctatggacaacatagcccgggcttatcatgcaacggaaacttatgtacaggcactctcttatgctaagaatctatttaaaaagctcgttggtagtagtgatttgtcaagtggctctgaaagaagtaaggaagttgatgatgtttctgtggacactggcagttcaagcactgggagccagtatctggatgagctgtctgatttcctaactcaagcagacatgtggttagggcgtgcagagcttcttcaaagcctgctgggatcaggtattattgcctcgctggatgatatagctgacaaagaatcttcaagtagactacgtgacagattggtcaacgatgaacggtacagcatggctgtatatacttgtagaaagtgcaagattgatgctgtaccagtatgggttgcatggggccatgcattagttcgaatggagcactatgctcaagctcgtgtgaagttcaagcaagcacttcaacaatacaaaggcgatgcaacttctgttgttactgaaataatcaacacaattgaaggagggcctccagttgatgtttcttctgtccgttccatgtatgagcatttggcaaagagtgcggcgaccatctttgatgattccctttctgctgatgcttatctgaatgttctgtacatgccatcgacatttccacgatctgagaggtcccgacagtccagaggtcatgtagacagccaattcaggactgctagttcctaccttgaagatggccctcgcagcaatcttgatagtgtccgatatgctgagtgtattcattacttgcaagattatgctcggccacaaatgcttgctttcatgttcaggcatggccattacactgaagcatgctctctgttcttcccattcagtcaaccaaccacggaaggggaaacatctttgtcttcagctccatggagtgatcctttaacaactgattatgggacaattgatgacttgtgtgatctctgtcttggatatggtgccatggctgttttggagaatacaatacggacaataacacaatcgcccacatatcatgaggcacacatgattcagtacatgaacactattatcacccgcatttgcaactattgtgaaacacacaggcattttaattatctctacaacttcctggttctaaaagatgaccatgttgcttctggcctttgttgtattcaattatttatgaattcaatgtctcaagaggaggctttgaggcatttgggacatgccaagacacatttcgaagaagccttatctgtacgagatagaacaatcgaggctactaagttggtattgcggtctgctcggaataagggtgcacctggaaaaatgaccagggaaacgataatgaaatattccactcgtgtttcctatcag

SEQ ID NO: 32866 - DNA, 5724 bp, Zea Mays
atgacgcacgcagagacggaggagacacactgggtgcggagtccagcgaggagcggaggcagaagagtgcttcatccatcatgggatgcagatatttcttgtggtattcatgccatcatggcatgcaatgcaaatatttcttgtgtattcatgcatacatcatgctatacacactgtgctgtagataatgccttagttcttttttttaatgagctatactatggatatgtggtgccgtgctttggagacttgactgcggttgaggatgctgttaatcgtgtcacagataatacaaatgcagcacatgaattggatattttgtcattacgcacgcagcttggttctttaactacaattctgctttgtgttgatgttgctgcaacatctgctaagtcagttcatatgtgccgatttcttctcgatgaggcaacaagcatgttatctgaaatatttccaggaaggtcccccaaagtaggaccaacttactgggatcagatccaagaacttgctaccatatcagtgataaagcgcatacttcagcgtctgcatgacatcttggatctggatactcttccatctcttcaagtgttctttactgagatgagcatctcttcgtcaacggaatgtagcagagttggacaaaagcaacgtcctcttgggcttctgcaccaaatgattgatgacgccttcaaaggaaagcgacagttcttgagtggtaagcttcacaatgttgctagagctattgttgatgaggactttgatactgtttattcgaaagaaggtgtcaacttagaaaagaaggatattttgagctctgaaaaaggcatactccttggtcacgggcttagaattctaaaacaagcatctaggagtgaccttgcatcttcaaatgttgtggatagtggtccagaacacaaaggttctgcaaacagatatctgggccctctatctaccaagccgtcaacatatttatcaaacttcataatatatactgcaaccattggtgacatagttgatggaactgacacaactcatgatttcaactatttctcgttagtctatgaatggccaaaagatctattaactcgtctggtttttgagcgtggaagcactgatgcagcagcaaaggttgctgacacaatgagtgttgattttgtgcatgagattatatcagcatgtgtgccacctgttttacctccacgaacaggacaaggatgggcttgcattcctgtcatacctaccatttgtaatattagttcagaaaacagactatgcaccaagtcttctcctgctcaaggatggagtgcacatgattcgtccttgtcttctcgtcaagaacccctctatcctctccaattaaatttagtgaagcatttagcccagttatcttcagtaagagcagttttggcctgtgtatttggaagcagcatactatctggggacaatgaatcatcttttactcatgtgaaagattcaacacaagctccagaaactgagagatcattttttgaatttgctcttgagcaatcagagagatatccaaccttgaaccggtggatacagatgcagtctaatcttcatcgagtatccgagtcttctataacagataaatccgaagtctctttgcatcaatccaagggaaagttttgtatgaagcgaacccgtgagtctgacagtgatggtgaatcagagcttgaagagaatgtcataagcgggaacaccagttcaagttcactagaatccactaaacatgaagacgctaggctagagccaacaacttttatttcatttgattgggagaatgaagcaccatatgaaaaagctgttgagaggttaattagtgaaggaaaattaagtgatgctcttgctgtgtctgatcgttgtttgcgcaatggagcatctgataatttgcttcagttgctcatcgaacagaaggaagaaaaaggtccaggcacaggacaaattcatccatatggatctcacagtcttgggaatgatacttctcagtactgcttgaggctgagagacaaaaaagttgcagctcagctcgctctaaagtacttgcacagctgggaccttgatgctgcaaccaatgttctaactatgtgcatgtgccacttacctgagaatgatcctatgcgcagtgaggtgttgcacatgaagcaatctttacagaggtatggccatatcatgagtgctgatgagcactacactagatggcaagaggtggaagctgattgtgaagatgacccagagggcttggcactccgtcttgctgccaaaggagctgtttccgctgctttggaggttgctgaaagtgcctctttatcaattgatttgcggagggagttgcaaggccgtcagcttgtcaaactgctaatcactgatccacttaatggcggaggcccagctgcagcttcaagatttctgtcaactttaagggattccaatgatgctcttcctgtagccattggtgctatgaatttattacctgacctgcgttcaaagcagcttcttgtgcatttcttcctcaagcgtacagttgggaatctatcagatgctgagattgcacggcttaatttgtgggcattaggtctccgtgttctttccttattgccattgccatcacaacagcgttgttcttctctgcacgaacaccctcagttgatcgtagaagtactgttgatgatgaaacaactccagtctgcttctttgattttgaaagaattttcttccttgagggatgataagttaattattgcgtatgctaaaaaagcaatctcaattaacagagaagcacgcaaagcattctcatgggtcccccgtgatagtggcactaaaacacccccaaaagatatccttcggaaaagaaagagttcaggctctggaggtgatagatcctcttgggaagcaatgcctggtttacaggaggagcggacacctgtatatccttctgaggcgcaagaaagacttccttttgtctctgctcctgatgagtgggtgctgacgggagatcctgacaaggatgatgcaactcgttcatcccataaatatgaaacctctcctgatatcacactgttcaaggtagttgaaaagtttagaaaaaaggcattgatatccttgtgcaccaatgagtcagtagctgcaaaaggtgcacttgaattgtgtatgactcagatgaaggttgtgctaagctcccaacagttgcctcttgatgcctctatggacaacatagcccgggcttatcatgcaacggaaacttatgtacaggcactctcttatgctaagaatctatttaaaaagctcgttggtagtagtgatttgtcaagtggctctgaaagaagtaaggaagttgatgatgtttctgtggacactggcagttcaagcactgggagccagtatctggatgagctgtctgatttcctaactcaagcagacatgtggttagggcgtgcagagcttcttcaaagcctgctgggatcaggtattattgcctcgctggatgatatagctgacaaagaatcttcaagtagactacgtgacagattggtcaacgatgaacggtacagcatggctgtatatacttgtagaaagtgcaagattgatgctgtaccagtatgggttgcatggggccatgcattagttcgaatggagcactatgctcaagctcgtgtgaagttcaagcaagcacttcaacaatacaaaggcgatgcaacttctgttgttactgaaataatcaacacaattgaaggagggcctccagttgatgtttcttctgtccgttccatgtatgagcatttggcaaagagtgcggcgaccatctttgatgattccctttctgctgatgcttatctgaatgttctgtacatgccatcgacatttccacgatctgagaggtcccgacagtccagaggtcatgtagacagccaattcaggactgctagttcctaccttgaagatggccctcgcagcaatcttgatagtgtccgatatgctgagtgtattcattacttgcaagattatgctcggccacaaatgcttgctttcatgttcaggcatggccattacactgaagcatgctctctgttcttcccattcagtcaaccaaccacggaaggggaaacatctttgtcttcagctccatggagtgatcctttaacaactgattatgggacaattgatgacttgtgtgatctctgtcttggatatggtgccatggctgttttggagaatacaatacggacaataacacaatcgcccacatatcatgaggcacacatgattcagtacatgaacactattatcacccgcatttgcaactattgtgaaacacacaggcattttaattatctctacaacttcctggttctaaaagatgaccatgttgcttctggcctttgttgtattcaattatttatgaattcaatgtctcaagaggaggctttgaggcatttgggacatgccaagacacatttcgaagaagccttatctgtacgagatagaacaatcgaggctactaagttggtattgcggtctgctcggaataagggtgcacctggaaaaatgaccagggaaacgataatgaaatattccactcgtgtttcctatcaggcgaaggtgcatggttgttgaaactctggctgaaaagcattttgatttagctttcagaatgcttcatgagtttgatctcccagctgttgatatttatgctggggtagctgcatccctcgcagaaaggaaaaaagggggccagttgacagagttcttgaagaatataagggggactatagatgatgatgaatgggatcaggttattggtgctgctataaatgtttatgccaacaagcataaagaaagaccagatcgccttatcgacatgctaatcagcaatcacaggaaagtacttgcttgtgttgtctgtggacgtctaaaaagtgcattccaaatagccgcacgaagtggaagtgtcgctgatgttcaatatgttgcccatcaggcattacatgcaaatgcattgacagtgcttgatatgtgtaagcaatggctcgcgcagtacatgtgataccatagatacttgctgagagagttctcacgtgaagacagaaaaactaaggggcatttggtttgaagagtcaatctattttagatgatgttgtgtatcataagtttattttataaatttggtggaataaattcgttctccatattattactaattatgagcttatgatgaatgaaatgctgatgaatcaatttattatattcaacaaactaaaaaagaaagtgagaggtgagaagatgatagactatcttaatccttaaaccaaacatgtcacaagtaatcaaagcaaggaaccatctgaaagctggtgttcaatcctcatatcccatttcaacttctttccgctttccacttcgtgcagcacaatgcctccatgtgtatatgcctctttaagggcatattcgttatactatcctattgcattctttggtctttgctgctccctcggtcctaaattataaaatattttctagatttatagctttttgttatgtatttaaatatacattgtatctaaatatatagtaaaaaataatgtacgtagaaaaatcaaaacgttttataatttagtgttgtaaagctttgtaatttcattacttgtccatccagtgagactgtttaattgtgagcgcttggcagcccacaaaacagtcagtgccagc

SEQ ID NO: 32867 - DNA, 4196 bp, Zea Mays
cttggcgtgggttgtccctcccagtgcaacgtcaggcaacaagcatgttatctgaaatatttccaggaaggtcccccaaagtaggaccaacttactgggatcagatccaagaacttgctaccatatcagtgataaagcgcatacttcagcgtctgcatgacatcttggatctggatactcttccatctcttcaagtgttctttactgagatgagcatctcttcgtcaacggaatgtagcagagttggacaaaagcaacgtcctcttgggcttctgcaccaaatgattgatgacgccttcaaaggaaagcgacagttcttgagtggtaagcttcacaatgttgctagagctattgttgatgaggactttgatactgtttattcgaaagaaggtgtcaacttagaaaagaaggatattttgagctctgaaaaaggcatactccttggtcacgggcttagaattctaaaacaagcatctaggagtgaccttgcatcttcaaatgttgtggatagtggtccagaacacaaaggttctgcaaacagatatctgggccctctatctaccaagccgtcaacatatttatcaaacttcataatatatactgcaaccattggtgacatagttgatggaactgacacaactcatgatttcaactatttctcgttagtctatgaatggccaaaagatctattaactcgtctggtttttgagcgtggaagcactgatgcagcagcaaaggttgctgacacaatgagtgttgattttgtgcatgagattatatcagcatgtgtgccacctgttttacctccacgaacaggacaaggatgggcttgcattcctgtcatacctaccatttgtaatattagttcagaaaacagactatgcaccaagtcttctcctgctcaaggatggagtgcacatgattcgtccttgtcttctcgtcaagaacccctctatcctctccaattaaatttagtgaagcatttagcccagttatcttcagtaagagcagttttggcctgtgtatttggaagcagcatactatctggggacaatgaatcatcttttactcatgtgaaagattcaacacaagctccagaaactgagagatcattttttgaatttgctcttgagcaatcagagagatatccaaccttgaaccggtggatacagatgcagtctaatcttcatcgagtatccgagtcttctataacagataaatccgaagtctctttgcatcaatccaagggaaagttttgtatgaagcgaacccgtgagtctgacagtgatggtgaatcagagcttgaagagaatgtcataagcgggaacaccagttcaagttcactagaatccactaaacatgaagacgctaggctagagccaacaacttttatttcatttgattgggagaatgaagcaccatatgaaaaagctgttgagaggttaattagtgaaggaaaattaagtgatgctcttgctgtgtctgatcgttgtttgcgcaatggagcatctgataatttgcttcagttgctcatcgaacagaaggaagaaaaaggtccaggcacaggacaaattcatccatatggatctcacagtcttgggaatgatacttctcagtactgcttgaggctgagagacaaaaaagttgcagctcagctcgctctaaagtacttgcacagctgggaccttgatgctgcaaccaatgttctaactatgtgcatgtgccacttacctgagaatgatcctatgcgcagtgaggtgttgcacatgaagcaatctttacagaggtatggccatatcatgagtgctgatgagcactacactagatggcaagaggtggaagctgattgtgaagatgacccagagggcttggcactccgtcttgctgccaaaggagctgtttccgctgctttggaggttgctgaaagtgcctctttatcaattgatttgcggagggagttgcaaggccgtcagcttgtcaaactgctaatcactgatccacttaatggcggaggcccagctgcagcttcaagatttctgtcaactttaagggattccaatgatgctcttcctgtagccattggtgctatgaatttattacctgacctgcgttcaaagcagcttcttgtgcatttcttcctcaagcgtacagttgggaatctatcagatgctgagattgcacggcttaatttgtgggcattaggtctccgtgttctttccttattgccattgccatcacaacagcgttgttcttctctgcacgaacaccctcagttgatcgtagaagtactgttgatgatgaaacaactccagtctgcttctttgattttgaaagaattttcttccttgagggatgataagttaattattgcgtatgctaaaaaagcaatctcaattaacagagaagcacgcaaagcattctcatgggtcccccgtgatagtggcactaaaacacccccaaaagatatccttcggaaaagaaagagttcaggctctggaggtgatagatcctcttgggaagcaatgcctggtttacaggaggagcggacacctgtatatccttctgaggcgcaagaaagacttccttttgtctctgctcctgatgagtgggtgctgacgggagatcctgacaaggatgatgcaactcgttcatcccataaatatgaaacctctcctgatatcacactgttcaaggcattgatatccttgtgcaccaatgagtcagtagctgcaaaaggtgcacttgaattgtgtatgactcagatgaaggttgtgctaagctcccaacagttgcctcttgatgcctctatggacaacatagcccgggcttatcatgcaacggaaacttatgtacaggcactctcttatgctaagaatctatttaaaaagctcgttggtagtagtgatttgtcaagtggctctgaaagaagtaaggaagttgatgatgtttctgtggacactggcagttcaagcactgggagccagtatctggatgagctgtctgatttcctaactcaagcagacatgtggttagggcgtgcagagcttcttcaaagcctgctgggatcaggtattattgcctcgctggatgatatagctgacaaagaatcttcaagtagactacgtgacagattggtcaacgatgaacggtacagcatggctgtatatacttgtagaaagtgcaagattgatgctgtaccagtatgggttgcatggggccatgcattagttcgaatggagcactatgctcaagctcgtgtgaagttcaagcaagcacttcaacaatacaaaggcgatgcaacttctgttgttactgaaataatcaacacaattgaaggagggcctccagttgatgtttcttctgtccgttccatgtatgagcatttggcaaagagtgcggcgaccatctttgatgattccctttctgctgatgcttatctgaatgttctgtacatgccatcgacatttccacgatctgagaggtcccgacagtccagaggtcatgtagacagccaattcaggactgctagttcctaccttgaagatggccctcgcagcaatcttgatagtgtccgatatgctgagtgtattcattacttgcaagattatgctcggccacaaatgcttgctttcatgttcaggcatggccattacactgaagcatgctctctgttcttcccattcagtcaaccaaccacggaaggggaaacatctttgtcttcagctccatggagtgatcctttaacaactgattatgggacaattgatgacttgtgtgatctctgtcttggatatggtgccatggctgttttggagaatacaatacggacaataacacaatcgcccacatatcatgaggcacacatgattcagtacatgaacactattatcacccgcatttgcaactattgtgaaacacacaggcattttaattatctctacaacttcctggttctaaaagatgaccatgttgcttctggcctttgttgtattcaattatttatgaattcaatgtctcaagaggaggctttgaggcatttgggacatgccaagacacatttcgaagaagccttatctgtacgagatagaacaatcgaggctactaagttggtattgcggtctgctcggaataagggtgcacctggaaaaatgaccagggaaacgataatgaaatattccactcgtgtttcctatcag

SEQ ID NO: 32868 - DNA, 4370 bp, Zea Mays
ggcgtgggttgtccctcccagtgcaacgtcaggcaacaagcatgttatctgaaatatttccaggaaggtcccccaaagtaggaccaacttactgggatcagatccaagaacttgctaccatatcagtgataaagcgcatacttcagcgtctgcatgacatcttggatctggatactcttccatctcttcaagtgttctttactgagatgagcatctcttcgtcaacggaatgtagcagagttggacaaaagcaacgtcctcttgggcttctgcaccaaatgattgatgacgccttcaaaggaaagcgacagttcttgagtggtaagcttcacaatgttgctagagctattgttgatgaggactttgatactgtttattcgaaagaaggtgtcaacttagaaaagaaggatattttgagctctgaaaaaggcatactccttggtcacgggcttagaattctaaaacaagcatctaggagtgaccttgcatcttcaaatgttgtggatagtggtccagaacacaaaggttctgcaaacagatatctgggccctctatctaccaagccgtcaacatatttatcaaacttcataatatatactgcaaccattggtgacatagttgatggaactgacacaactcatgatttcaactatttctcgttagtctatgaatggccaaaagataatacttgtggcttggtgtctctggctcctatgagcgcatttggaaaacttggtacaaaacagctattaactcgtctggtttttgagcgtggaagcactgatgcagcagcaaaggttgctgacacaatgagtgttgattttgtgcatgagattatatcagcatgtgtgccacctgttttacctccacgaacaggacaaggatgggcttgcattcctgtcatacctaccatttgtaatattagttcagaaaacagactatgcaccaagtcttctcctgctcaaggatggagtgcacatgattcgtccttgtcttctcgtcaagaacccctctatcctctccaattaaatttagtgaagcatttagcccagttatcttcagtaagagcagttttggcctgtgtatttggaagcagcatactatctggggacaatgaatcatcttttactcatgtgaaagattcaacacaagctccagaaactgagagatcattttttgaatttgctcttgagcaatcagagagatatccaaccttgaaccggtggatacagatgcagtctaatcttcatcgagtatccgagtcttctataacagataaatccgaagtctctttgcatcaatccaagggaaagttttgtatgaagcgaacccgtgagtctgacagtgatggtgaatcagagcttgaagagaatgtcataagcgggaacaccagttcaagttcactagaatccactaaacatgaagacgctaggctagagccaacaacttttatttcatttgattgggagaatgaagcaccatatgaaaaagctgttgagaggttaattagtgaaggaaaattaagtgatgctcttgctgtgtctgatcgttgtttgcgcaatggagcatctgataatttgcttcagttgctcatcgaacagaaggaagaaaaaggtccaggcacaggacaaattcatccatatggatctcacagtcttgggaatgatacttctcagtactgcttgaggctgagagacaaaaaagttgcagctcagctcgctctaaagtacttgcacagctgggaccttgatgctgcaaccaatgttctaactatgtgcatgtgccacttacctgagaatgatcctatgcgcagtgaggtgttgcacatgaagcaatctttacagaggtatggccatatcatgagtgctgatgagcactacactagatggcaagaggtggaagctgattgtgaagatgacccagagggcttggcactccgtcttgctgccaaaggagctgtttccgctgctttggaggttgctgaaagtgcctctttatcaattgatttgcggagggagttgcaaggccgtcagcttgtcaaactgctaatcactgatccacttaatggcggaggcccagctgcagcttcaagatttctgtcaactttaagggattccaatgatgctcttcctgtagccattggtgctatgaatttattacctgacctgcgttcaaagcagcttcttgtgcatttcttcctcaagcgtacagttgggaatctatcagatgctgagattgcacggcttaatttgtgggcattaggtctccgtgttctttccttattgccattgccatcacaacagcgttgttcttctctgcacgaacaccctcagttgatcgtagaagtactgttgatgatgaaacaactccagtctgcttctttgattttgaaagaattttcttccttgagggatgataagttaattattgcgtatgctaaaaaagcaatctcaattaacgttagctcagctcctagggaacgtcgatcgaatatctctgcatcaagggcaaaacaaaaaaaggctacaactccagctaaaacaaattttgtgcaaagttttggtaactttcagagagaagcacgcaaagcattctcatgggtcccccgtgatagtggcactaaaacacccccaaaagatatccttcggaaaagaaagagttcaggctctggaggtgatagatcctcttgggaagcaatgcctggtttacaggaggagcggacacctgtatatccttctgaggcgcaagaaagacttccttttgtctctgctcctgatgagtgggtgctgacgggagatcctgacaaggatgatgcaactcgttcatcccataaatatgaaacctctcctgatatcacactgttcaaggcattgatatccttgtgcaccaatgagtcagtagctgcaaaaggtgcacttgaattgtgtatgactcagatgaaggttgtgctaagctcccaacagttgcctcttgatgcctctatggacaacatagcccgggcttatcatgcaacggaaacttatgtacaggcactctcttatgctaagaatctatttaaaaagctcgttggtagtagtgatttgtcaagtggctctgaaagaagtaaggaagttgatgatgtttctgtggacactggcagttcaagcactgggagccagtatctggatgagctgtctgatttcctaactcaagcagacatgtggttagggcgtgcagagcttcttcaaagcctgctgggatcaggtattattgcctcgctggatgatatagctgacaaagaatcttcaagtagactacgtgacagattggtcaacgatgaacggtacagcatggctgtatatacttgtagaaagtgcaagattgatgctgtaccagtatgggttgcatggggccatgcattagttcgaatggagcactatgctcaagctcgtgtgaagttcaagcaagcacttcaacaatacaaaggcgatgcaacttctgttgttactgaaataatcaacacaattgaaggagggcctccagttgatgtttcttctgtccgttccatgtatgagcatttggcaaagagtgcggcgaccatctttgatgattccctttctgctgatgcttatctgaatgttctgtacatgccatcgacatttccacgatctgagaggtcccgacagtccagaggtcatgtagacagccaattcaggactgctagttcctaccttgaagatggccctcgcagcaatcttgatagtgtccgatatgctgagtgtattcattacttgcaagattatgctcggccacaaatgcttgctttcatgttcaggcatggccattacactgaagcatgctctctgttcttcccattcagtcaaccaaccacggaaggggaaacatctttgtcttcagctccatggagtgatcctttaacaactgattatgggacaattgatgacttgtgtgatctctgtcttggatatggtgccatggctgttttggagaatacaatacggacaataacacaatcgcccacatatcatgaggcacacatgattcagtacatgaacactattatcacccgcatttgcaactattgtgaaacacacaggcattttaattatctctacaacttcctggttctaaaagatgaccatgttgcttctggcctttgttgtattcaattatttatgaattcaatgtctcaagaggaggctttgaggcatttgggacatgccaagacacatttcgaagaagccttatctgtacgagatagaacaatcgaggctactaagttggtattgcggtctgctcggaataagggtgcacctggaaaaatgaccagggaaacgataatgaaatattccactcgtgtttcctatcag

SEQ ID NO: 32869 - DNA, 4367 bp, Zea Mays
ctacaaccttctcatcatgcccagttaaggcaacaagcatgttatctgaaatatttccaggaaggtcccccaaagtaggaccaacttactgggatcagatccaagaacttgctaccatatcagtgataaagcgcatacttcagcgtctgcatgacatcttggatctggatactcttccatctcttcaagtgttctttactgagatgagcatctcttcgtcaacggaatgtagcagagttggacaaaagcaacgtcctcttgggcttctgcaccaaatgattgatgacgccttcaaaggaaagcgacagttcttgagtggtaagcttcacaatgttgctagagctattgttgatgaggactttgatactgtttattcgaaagaaggtgtcaacttagaaaagaaggatattttgagctctgaaaaaggcatactccttggtcacgggcttagaattctaaaacaagcatctaggagtgaccttgcatcttcaaatgttgtggatagtggtccagaacacaaaggttctgcaaacagatatctgggccctctatctaccaagccgtcaacatatttatcaaacttcataatatatactgcaaccattggtgacatagttgatggaactgacacaactcatgatttcaactatttctcgttagtctatgaatggccaaaagataatacttgtggcttggtgtctctggctcctatgagcgcatttggaaaacttggtacaaaacagctattaactcgtctggtttttgagcgtggaagcactgatgcagcagcaaaggttgctgacacaatgagtgttgattttgtgcatgagattatatcagcatgtgtgccacctgttttacctccacgaacaggacaaggatgggcttgcattcctgtcatacctaccatttgtaatattagttcagaaaacagactatgcaccaagtcttctcctgctcaaggatggagtgcacatgattcgtccttgtcttctcgtcaagaacccctctatcctctccaattaaatttagtgaagcatttagcccagttatcttcagtaagagcagttttggcctgtgtatttggaagcagcatactatctggggacaatgaatcatcttttactcatgtgaaagattcaacacaagctccagaaactgagagatcattttttgaatttgctcttgagcaatcagagagatatccaaccttgaaccggtggatacagatgcagtctaatcttcatcgagtatccgagtcttctataacagataaatccgaagtctctttgcatcaatccaagggaaagttttgtatgaagcgaacccgtgagtctgacagtgatggtgaatcagagcttgaagagaatgtcataagcgggaacaccagttcaagttcactagaatccactaaacatgaagacgctaggctagagccaacaacttttatttcatttgattgggagaatgaagcaccatatgaaaaagctgttgagaggttaattagtgaaggaaaattaagtgatgctcttgctgtgtctgatcgttgtttgcgcaatggagcatctgataatttgcttcagttgctcatcgaacagaaggaagaaaaaggtccaggcacaggacaaattcatccatatggatctcacagtcttgggaatgatacttctcagtactgcttgaggctgagagacaaaaaagttgcagctcagctcgctctaaagtacttgcacagctgggaccttgatgctgcaaccaatgttctaactatgtgcatgtgccacttacctgagaatgatcctatgcgcagtgaggtgttgcacatgaagcaatctttacagaggtatggccatatcatgagtgctgatgagcactacactagatggcaagaggtggaagctgattgtgaagatgacccagagggcttggcactccgtcttgctgccaaaggagctgtttccgctgctttggaggttgctgaaagtgcctctttatcaattgatttgcggagggagttgcaaggccgtcagcttgtcaaactgctaatcactgatccacttaatggcggaggcccagctgcagcttcaagatttctgtcaactttaagggattccaatgatgctcttcctgtagccattggtgctatgaatttattacctgacctgcgttcaaagcagcttcttgtgcatttcttcctcaagcgtacagttgggaatctatcagatgctgagattgcacggcttaatttgtgggcattaggtctccgtgttctttccttattgccattgccatcacaacagcgttgttcttctctgcacgaacaccctcagttgatcgtagaagtactgttgatgatgaaacaactccagtctgcttctttgattttgaaagaattttcttccttgagggatgataagttaattattgcgtatgctaaaaaagcaatctcaattaacgttagctcagctcctagggaacgtcgatcgaatatctctgcatcaagggcaaaacaaaaaaaggctacaactccagctaaaacaaattttgtgcaaagttttggtaactttcagagagaagcacgcaaagcattctcatgggtcccccgtgatagtggcactaaaacacccccaaaagatatccttcggaaaagaaagagttcaggctctggaggtgatagatcctcttgggaagcaatgcctggtttacaggaggagcggacacctgtatatccttctgaggcgcaagaaagacttccttttgtctctgctcctgatgagtgggtgctgacgggagatcctgacaaggatgatgcaactcgttcatcccataaatatgaaacctctcctgatatcacactgttcaaggcattgatatccttgtgcaccaatgagtcagtagctgcaaaaggtgcacttgaattgtgtatgactcagatgaaggttgtgctaagctcccaacagttgcctcttgatgcctctatggacaacatagcccgggcttatcatgcaacggaaacttatgtacaggcactctcttatgctaagaatctatttaaaaagctcgttggtagtagtgatttgtcaagtggctctgaaagaagtaaggaagttgatgatgtttctgtggacactggcagttcaagcactgggagccagtatctggatgagctgtctgatttcctaactcaagcagacatgtggttagggcgtgcagagcttcttcaaagcctgctgggatcaggtattattgcctcgctggatgatatagctgacaaagaatcttcaagtagactacgtgacagattggtcaacgatgaacggtacagcatggctgtatatacttgtagaaagtgcaagattgatgctgtaccagtatgggttgcatggggccatgcattagttcgaatggagcactatgctcaagctcgtgtgaagttcaagcaagcacttcaacaatacaaaggcgatgcaacttctgttgttactgaaataatcaacacaattgaaggagggcctccagttgatgtttcttctgtccgttccatgtatgagcatttggcaaagagtgcggcgaccatctttgatgattccctttctgctgatgcttatctgaatgttctgtacatgccatcgacatttccacgatctgagaggtcccgacagtccagaggtcatgtagacagccaattcaggactgctagttcctaccttgaagatggccctcgcagcaatcttgatagtgtccgatatgctgagtgtattcattacttgcaagattatgctcggccacaaatgcttgctttcatgttcaggcatggccattacactgaagcatgctctctgttcttcccattcagtcaaccaaccacggaaggggaaacatctttgtcttcagctccatggagtgatcctttaacaactgattatgggacaattgatgacttgtgtgatctctgtcttggatatggtgccatggctgttttggagaatacaatacggacaataacacaatcgcccacatatcatgaggcacacatgattcagtacatgaacactattatcacccgcatttgcaactattgtgaaacacacaggcattttaattatctctacaacttcctggttctaaaagatgaccatgttgcttctggcctttgttgtattcaattatttatgaattcaatgtctcaagaggaggctttgaggcatttgggacatgccaagacacatttcgaagaagccttatctgtacgagatagaacaatcgaggctactaagttggtattgcggtctgctcggaataagggtgcacctggaaaaatgaccagggaaacgataatgaaatattccactcgtgtttcctatcag

SEQ ID NO: 32870 - DNA, 883 bp, Zea Mays
caatcagggtatgattgccacaggttgttgcacttcccttagtgcgccaccctccttggctatatattgtaatcccttcaccatctaatacattaattctattcagccacttgtcttacaccctcatattttcttcttaataatataatgatgtatgatgtctagttctcttgcgcgtttgagaaaaaaaagttcaccgcacttagccaacttgtccttgactttatcatttgttgaaactacttttcaaaattgtacgcttattattttgcaggcgaaggtgcatggttgttgaaactctggctgaaaagcattttgatttagctttcagaatgcttcatgagtttgatctcccagctgttgatatttatgctggggtagctgcatccctcgcagaaaggaaaaaagggggccagttgacagagttcttgaagaatataagggggactatagatgatgatgaatgggatcaggttattggtgctgctataaatgtttatgccaacaagcataaagaaagaccagatcgccttatcgacatgctaatcagcaatcacagtacttgcttgtgttgtctgtggacgtctaaaaagtgcattccaaatagccgcacgaagtggaagtgtcgctgatgttcaatatgttgcccatcaggtcagttatcttcacaaatttacagatgtttgctgcttattaataatcgaatgaattttatgttgcatctttctactaccatcaatgacttgtagccccctgcccctcttcaaaactatagttcagctttgtactactccctatcctaaaattactgtcattttagctttgaaagtatgtcccacaaagagtgtcgtttcgctagctacggaagtcctgtgcctattgg

SEQ ID NO: 32871 - DNA, 1348 bp, Zea Mays
caatcagggtatgattgccacaggttgttgcacttcccttagtgcgccaccctccttggctatatattgtaatcccttcaccatctaatacattaattctattcagccacttgtcttacaccctcatattttcttcttaataatataatgatgtatgatgtctagttctcttgcgcgtttgagaaaaaaaagttcaccgcacttagccaacttgtccttgactttatcatttgttgaaactacttttcaaaattgtacgcttattattttgcaggcgaaggtgcatggttgttgaaactctggctgaaaagcattttgatttagctttcagaatgcttcatgagtttgatctcccagaaaggaaaaaagggggccagttgacagagttcttgaagaatataagggggactatagatgatgatgaatgggatcaggttattggtgctgctataaatgtttatgccaacaagcataaagaaagaccagatcgccttatcgacatgctaatcagcaatcacaggaaagtacttgcttgtgttgtctgtggacgtctaaaaagtgcattccaaatagccgcacgaagtggaagtgtcgctgatgttcaatatgttgcccatcaggcattacatgcaaatgcattgacagtgcttgatatgtgtaagcaatggctcgcgcagtacatgtgataccatagatacttgctgagagagttctcacgtgaagacagaaaaactaaggggcatttggtttgaagagtcaatctattttagatgatgttgtgtatcataagtttattttataaatttggtggaataaattcgttctccatattattactaattatgagcttatgatgaatgaaatgctgatgaatcaatttattatattcaacaaactaaaaaagaaagtgagaggtgagaagatgatagactatcttaatccttaaaccaaacatgtcacaagtaatcaaagcaaggaaccatctgaaagctggtgttcaatcctcatatcccatttcaacttctttccgctttccacttcgtgcagcacaatgcctccatgtgtatatgcctctttaagggcatattcgttatactatcctattgcattctttggtctttgctgctccctcggtcctaaattataaaatattttctagatttatagctttttgttatgtatttaaatatacattgtatctaaatatatagtaaaaaataatgtacgtagaaaaatcaaaacgttttataatttagtgttgtaaagctttgtaatttcattacttgtccatccagtgagactgtttaattgtgagcgcttggcagcccacaaaacagtcagtgccagc

SEQ ID NO: 32872 - DNA, 1477 bp, Zea Mays
acatcacataaacctttctcttttctctctctctagtctctctcctctgcgcctctgcctctatttcttctcgtcctcccaggacctcaagtccccccctcctcctccccatccccagtccccacacccacccacccggacccggtgccgcgctctgcaggcggaggaagaccagcgacgggcggacgtgcttcatgaggagtgtgccgtgagacaactctgcgagtcaagaacaactggtgaggcgaagaaagccgagaggggagaccaaatggcaactgattcctcagctctgcaggcttcctctgagtcgattgcgcaaaagatggggttcttcagagtccctgaccttcttgtaaaactgagcgccaaatgtttgagcgatctggatgtggttcgcagcccaacatcgcccttggacctcaagtttttcactggccttggcaacaaatcacccggtgacgccagccagaaccagaagatcttgcttggtgacagggttgggcttggacttgtggattccctcactgatgacaaccccgcaccactaggtggtagaaaggttctttttcttggatctgagatgaggattattgataacctgtctcgcaagaacagctccaccgctcctgatcaagctggggaagttgaacagaaggatgataatatgtctgacggactgatgggcagtgccatgtcccttggtgacatcatcaactcagaggattacactcgtgttgtctcccgtggccctaatcctaggactacccacttttttggagatcgtgtttttgagcttcaagctgagcagctgatgcctgttgagagtaaggtcgatcagagtacgtctcctgtggaagacggtctgatgagcttctgttatttttgcagtgagaagctcaaagaagcggaagacatctacatctatcagggtgacaaatccttttgcagcgtggagtgcagggaaaatttcatggtagattatgagatggaagaagcatatcatcctgcgtctcctaggagcccaccctctgacggtggtcggattttccaactgatccgttgagtcagcatcagtaacaactcgatatggtcatatctgaagtgctgtctgaggttaataagttgcagccatggatgtgatcatgtttgcagtagttgttgcccggagattttgtttgtcgcggcactgatgaatttacctcacctattgatttcttttgttttgcgtacttggatcctcgaatttttggaggagtccaaaaaatgactacctccggtcataatattatcttgatcggagatgagtgtgtgtgtgtgtcctcgcgtctcaacttgagttgtttgcttcgaccgcattttcagtggctcactcatatgtggacgcctcttattaatatcatgtatctgaacctatgttttgatattttctgaaatgaaatggtaaagaataaagttttatgttacttgttgtgtg

SEQ ID NO: 32873 - DNA, 1418 bp, Zea Mays
acatcacataaacctttctcttttctctctctctagtctctctcctctgcgcctctgcctctatttcttctcgtcctcccaggacctcaagtccccccctcctcctccccatccccagtccccacacccacccacccggacccggtgccgcgctctgcaggcggaggaagaccagcgacgggcggacgtgcttcatgaggagtgtgccgtgagacaactctgcgagtcaagaacaactggtgaggcgaagcgaagaaagccgagaggggagaccaaatggcaactgattcctcagctctgcaggcttcctctgagtcgattgcgcaaaagatggggttcttcagagtccctgaccttcttgtaaaactgagcgccaaatgtttgagcgatctggatgtggttcgcagcccaacatcgcccttggacctcaagtttttcactggccttggcaacaaatcacccggtgacgccagccagaaccagaagatcttgcttggtgacagggttgggcttggacttgtggattccctcactgatgacaaccccgcaccactaggtggtagaaaggttctttttcttggatctgagatgaggattattgataacctgtctcgcaagaacagctccaccgctcctgatcaagctggggaagttgaacagaaggatgataatatgtctgacggactgatgggcagtgccatgtcccttggtgacatcatcaactcagaggattacactcgtgttgtctcccgtggccctaatcctaggactacccacttttttggagatcgtgtttttgagcttcaagctgagcagctgatgcctgttgagatgagaagctcaaagaagcggaagacatctacatctatcagggtgacaaatccttttgcagcgtggagtgcagggaaaatttcatggtagattatgagatggaagaagcatatcatcctgcgtctcctaggagcccaccctctgacggtggtcggattttccaactgatccgttgagtcagcatcagtaacaactcgatatggtcatatctgaagtgctgtctgaggttaataagttgcagccatggatgtgatcatgtttgcagtagttgttgcccggagattttgtttgtcgcggcactgatgaatttacctcacctattgatttcttttgttttgcgtacttggatcctcgaatttttggaggagtccaaaaaatgactacctccggtcataatattatcttgatcggagatgagtgtgtgtgtgtgtcctcgcgtctcaacttgagttgtttgcttcgaccgcattttcagtggctcactcatatgtggacgcctcttattaatatcatgtatctgaacctatgttttgatattttctgaaatgaaatggtaaagaataaagttttatgttacttgttgtgtg

SEQ ID NO: 32874 - DNA, 1885 bp, Zea Mays
ctatttcttctcgtcctcccaggacctcaagtccccccctcctcctccccatccccagtccccacacccacccacccggacccggtgccgcgctctgcaggcggaggaagaccagcgacgggcggacgtgcttcatgaggagtgtgccgtgagacaactctgcgagtcaagaacaactggtgaggcgaaggtgagaatgggatgatgattgattaatcactaaggcctgccttgcccttttgttttgcttggattctctgagtgatgactgcccatatgaattgcttcctactcctctcatgctttgttcactgaattaatatatgttgcttacaagcgaagaaatctattattaaaacaaaaatagagaagatgctgcgagttcattaaaccctatcagtccgtctgttgattgcgtagtatcgattgctgctgcttgtgaaatgatttcctatccataagggaaaaaatgattcatttaattctgttttgatacggtcaagatcttgttctgaaactgatagcatgagttaacttgtctccagaattgtggatgttcaaactagtagtggtaaataagtcaaactttaccaagttagtagaaatttaaaggcgatgccacatgtctaagttattaactccaaattaatgcagcgaagaaagccgagaggggagaccaaatggcaactgattcctcagctctgcaggcttcctctgagtcgattgcgcaaaagatggggttcttcagagtccctgaccttcttgtaaaactgagcgccaaatgtttgagcgatctggatgtggttcgcagcccaacatcgcccttggacctcaagtttttcactggccttggcaacaaatcacccggtgacgccagccagaaccagaagatcttgcttggtgacagggttgggcttggacttgtggattccctcactgatgacaaccccgcaccactaggtggtagaaaggttctttttcttggatctgagatgaggattattgataacctgtctcgcaagaacagctccaccgctcctgatcaagctggggaagttgaacagaaggatgataatatgtctgacggactgatgggcagtgccatgtcccttggtgacatcatcaactcagaggattacactcgtgttgtctcccgtggccctaatcctaggactacccacttttttggagatcgtgtttttgagcttcaagctgagcagctgatgcctgttgagagtaaggtcgatcagagtacgtctcctgtggaagacggtctgatgagcttctgttatttttgcagtgagaagctcaaagaagcggaagacatctacatctatcaggtgacaaatccttttgcagcgtggagtgcagggaaaatttcatggtagattatgagatggaagaagcatatcatcctgcgtctcctaggagcccaccctctgacggtggtcggattttccaactgatccgttgagtcagcatcagtaacaactcgatatggtcatatctgaagtgctgtctgaggttaataagttgcagccatggatgtgatcatgtttgcagtagttgttgcccggagattttgtttgtcgcggcactgatgaatttacctcacctattgatttcttttgttttgcgtacttggatcctcgaatttttggaggagtccaaaaaatgactacctccggtcataatattatcttgatcggagatgagtgtgtgtgtgtgtcctcgcgtctcaacttgagttgtttgcttcgaccgcattttcagtggctcactcatatgtggacgcctcttattaatatcatgtatctgaacctatgttttgatattttctgaaatgaaatggtaaagaataaagttttatgttacttgttgtgtg

SEQ ID NO: 32875 - DNA, 1901 bp, Zea Mays
gataatattattgttcccgcaaactgttgatcacaggcagcctatagggaccgatcccctttcccccaactcccccccaagcagccgcgaagagagatcccgcgctcaaccaccgcttctcggccgcggcccccttcggccctcctttcctccggtggccgccggggacggggagcgaagaagcctccatccctcctttcctccgttggtcgccggggacggggagcgaataagcctccctccctccttccctccggtggttgccggggacggggagcgaatcctccattcctccttccctccggtggtcgccggggaccgggatcgaagatgttctatggggccatggtttgggatccgtggctgatcgtgtcgcagatcgtgtgcctgcagtgcctctactacctgtcgctgggcgtcgccatggcgctcctcgtcggcacccgcgtcccgcgactcacccttctctacttcttcgacttcgccacgctcaccccgcgcacccccacgggttggtgcgccatcgcatcattcattcttgccgctgtcgcaggtgctgggttcatgctttatgtgattgagagagccaagaagtgcctggactttgcagcaacactctacataatccatctcttcatttgcattgtttatggtggatggccagcttccattacatggtgggttgttaatatcactggtttggcaatcatggctctcctaggtgaatacctatgcatccggcgggagttgaaagaaattccaatatcacggcttcgtgcaagtgtttaatctcacatggtaaaagagtacaggtgtttcaaattgtgttgcccctggaggtgtttgttaatatgttacttaaggaatacaatgaatgccttgttccgtggtttgcaatttgatacttagcaaacttcccatagagcgttcatctgatacccaatctcccagtaggccatgataaactgattggtctcagagttcccaccaacggaaatggcacctcagtttctaaatcattcattcaagtcctctttatgaaaaaaagcctgccctgcctcttatgaaaagaagtgttcctcccttgcctatgttctagtgacagctcgctgcttgacaacgagagttgtgatctaccccgtccttttgatggacgatatgcacagctgtgctcgtgtgaaaaaatggcaataaaggaccgctttcagcccaaagaaaaaagagctcgattggggatcgaaggttaggttactggatcactaattaaaccagtctttaccggtcaaagtagaagtagcgtctttgatttatccatataaatgtactccctctttttttttttgtcgctggatagtgcaaaattgaactattcaacaacaactgaaaagaaacagagggagtatttgtcatgttcttatataaacaagttcttatataaacaaggttaaaccaatcaattattcaaaacctatgtggctagatacaatgtcaatttgctactagtggtggtcaatttgttaccgtttggttctggggtataataggatggaaatggagccgctccactcttaatttattgttgtttgaactggttctgtataggatagaaagactctaaaaaagaaaaaaaatatgtaaagtgttgaaccacccggctctccaaaatctcttagactgagccgctgtctggtatggaaccaaacactacctaggggtttttcatttttccaagagaaattagttcattttttctaagaaaaatacgaaactaacccttaatctatgtccgggatttaggatgttccagcaatgcataaactccagagacaaacaaagaagcagcagaacattataaaaaacaagaagatccaaaacagccgataaaggtaccgagccttata

SEQ ID NO: 32876 - DNA, 2676 bp, Zea Mays
gataatattattgttcccgcaaactgttgatcacaggcagcctatagggaccgatcccctttcccccaactcccccccaagcagccgcgaagagagatcccgcgctcaaccaccgcttctcggccgcggcccccttcggccctcctttcctccggtggccgccggggacggggagcgaagaagcctccatccctcctttcctccgttggtcgccggggacggggagcgaataagcctccctccctccttccctccggtggttgccggggacggggagcgaatcctccattcctccttccctccggtggtcgccggggaccgggatcgaagatgttctatggggccatggtttgggatccgtggctgatcgtgtcgcagatcgtgtgcctgcagtgcctctactacctgtcgctgggcgtcgccatggcgctcctcgtcggcacccgcgtcccgcgactcacccttctctacttcttcgacttcgccacgctcaccccgcgcacccccacgggttggtgcgccatcgcatcattcattcttgccgctgtcgcagggtacgccgcagctccctaacctcactctcatccacttggttcgtctgaaactggaacggtatcttctggtagtagtcaaaacgcgaaatatgcctgtcgcgcgcgtgtgttgccttatcgcttccggttgcgagagctacgactgtcaattgaaagttaagcagcgtgtgtgttcccagatggccagatctatacgtttagggcacactttgacttggaaatttcaaccaacttgtttataaattgttatttctttattaaacaccagttaagtgcaagagctcagaggtatcgaacctgcagtatcagacattcctgtaacactggagcaattggtattgacatactagtcaattcatagtgtggaaaacagtacgtttaaaggtttcggtattagtgtcatgagcactattcattttgccgtccattgtttagtagctgccatatgtattatgaaatactccaagttgttctactgggctccagagtagcaaacaccttaattttcttgttgattgcttattcttgattcatacaccattacttgtttatataaaaaataaagtggcatccaaatgaactagctatctaattttgcaaattttgagtggcatttttgaagaaaacccaaaaaatgccgacaacatattgcacatttgttgaatacatttttgatgaatgggaataagaaggccatatgctgatatgcacatattgcacaattggtgagaaatgatttattgctaatcttgcttccatgcttttgggtaagcagtgctgggttcatgctttatgtgattgagagagccaagaagtgcctggactttgcagcaacactctacataatccatctcttcatttgcattgtttatggtggatggccagcttccattacatggtgggttgttaatatcactggtttggcaatcatggctctcctaggtgaatacctatgcatccggcgggagttgaaagaaattccaatatcacggcttcgtgcaagtgtttaatctcacatggtaaaagagtacaggtgtttcaaattgtgttgcccctggaggtgtttgttaatatgttacttaaggaatacaatgaatgccttgttccgtggtttgcaatttgatacttagcaaacttcccatagagcgttcatctgatacccaatctcccagtaggccatgataaactgattggtctcagagttcccaccaacggaaatggcacctcagtttctaaatcattcattcaagtcctctttatgaaaaaaagcctgccctgcctcttatgaaaagaagtgttcctcccttgcctatgttctagtgacagctcgctgcttgacaacgagagttgtgatctaccccgtccttttgatggacgatatgcacagctgtgctcgtgtgaaaaaatggcaataaaggaccgctttcagcccaaagaaaaaagagctcgattggggatcgaaggttaggttactggatcactaattaaaccagtctttaccggtcaaagtagaagtagcgtctttgatttatccatataaatgtactccctctttttttttttgtcgctggatagtgcaaaattgaactattcaacaacaactgaaaagaaacagagggagtatttgtcatgttcttatataaacaagttcttatataaacaaggttaaaccaatcaattattcaaaacctatgtggctagatacaatgtcaatttgctactagtggtggtcaatttgttaccgtttggttctggggtataataggatggaaatggagccgctccactcttaatttattgttgtttgaactggttctgtataggatagaaagactctaaaaaagaaaaaaaatatgtaaagtgttgaaccacccggctctccaaaatctcttagactgagccgctgtctggtatggaaccaaacactacctaggggtttttcatttttccaagagaaattagttcattttttctaagaaaaatacgaaactaacccttaatctatgtccgggatttaggatgttccagcaatgcataaactccagagacaaacaaagaagcagcagaacattataaaaaacaagaagatccaaaacagccgataaaggtaccgagccttata

SEQ ID NO: 32877 - DNA, 2182 bp, Zea Mays
cactcccaatgcgcgcgccgcgatgacgacgccaccgcgcaacgcgaccctccccgtcctccttgtcctcctcctgctcgcgccgcacctcctcgccacagcgccggcgtttgctagccgcggcctcagcgcgtccgacgccgcccacatccggaggcgccagctgctgcagtaccacggcggcggcgccggcaatggcagcggcgtggtcgtcgacccgtcctacgcgttcccgaacccgcgcctccgcgacgcgtacgtggcgctgcaggcgtggaggcgcgccatcctctccgacccgcacaacgtgacgggctcgtggacgggccccgacgtgtgcgcctacgccggcgtctactgcgcgccctcgccgcaggaccccgacctcaccgtcgtcgcctccgtcgacctcaaccacgccgacctcgccggacacctcccggaggagctgggcctgctcgctgacctcgccgttctccacctcaactccaaccgcttctgcggcctcgtgccccggtcgctggacaagctccacgcgctccacgagctcgacctcagcaacaaccgcctcgtcggcgccttccccgacgtcgtgctccgcctgcccagcctcagatacctcgacctgcgcttcaacgacttcgagggacccgtgcccagcgagctcttcgaccgaccgctcgacgccatcttcatcaactccaaccgattccgtttccagatccccgacaacttcggcaactcgccggcctccgtgctcgtgctcgccaacaacgacttcggcggctgcctcccggcctccgtcgccaacatgtcgtccacgctcaacgagatcatcctcatgaacacggggctcaagtcctgcgtgccgccggagctcggcgcgctcatgggcctcaccgtgctcgacctcagcttcaacaagctgatgggcgccatccccgacgagctcgcgcgcctccacagcatcgagcagctcgacctcggccacaaccgcctcgtcggcgacgtgccggaggagatctgccgcctgccgcacctccagaacttcacctattcctacaacttcatcaccggcgagccgcccgtctgcctgcacgtcaagagccttgacgaccgccggaactgcatcccctaccgccccgaccagaggtcgccagagcaatgcaacttcttcaggaaccaccaccacgtcaactgcgatgccttcaagtgcaagaagttcatcctgccgtcgccacccctgccgccaccaccttcacctcctccgccgtctcctcctccaccgtcgccgtctccaccgccgccttcgcctcccccaccatcccctcctccgccatcaccatcccctcccccaccttcgcctcctccaccatctcctccaccaccttcacctcctccgccgtctcctccacccccgtccccatcccctcctcctccttctcccccaccgccgtctcctccacctccatccccatcacctcctcctccttctccccaaccgccgtcgccacctccaccatctccatcgccgccacctctctattacgaggagtcaccagaggaacggtacctctccccgccgcctccggcctacaccgaggtcccgccgccgccctactacgaggagtcaccggaggagcgttacctctcgccgcctccaccagcgcaccaggagtcgccacctcccatccaccacgacccgccacctccaccctactacgaagtgtctccggaggaccggtacctctcgccgccgccaccaccatccccggctagcttgcccaaatacgactactcgtcgcctccaccgccttcttccccgccgtactcggaggtgtcacctgaggagcggtacccgtcacctccgccgccgccacgggcattgcccaagctgcctgtgtatgactactcgtcgccgccaccgccagcggccgcctggacaccgtagtgaaaaaaaaaattgattcgttcgaggagattttccgtcccttgtgatcatacattgttttaatttgttgtggtaaaaagaagatgatactgaattgatcctttgtttcatttcctcctcttgtatctaaaattttcttcttggatcttttcgctactgatgacgatgatgattgatctggttcgcgggtccgctgcaaattctccaaattgcaactttggattaattaag

SEQ ID NO: 32878 - DNA, 1724 bp, Zea Mays
ggcatttgcggttgcagtgccccgtgccgtaccagttgcacggccccgtccgcctcatccgcgtcctcccctcccgtttcgtactttcgctccacgagtctctgggctctggctgcctgttgtccgctgctcccccgccccccctcctctacgaactctctcaaaacaaaaaccgcagcgtacaagaaaagggaaaaatctcaccataccgcaacgcgccgctcccaaatctagggttcctttttgaccatggccgacccgccggcctccgacgcacagccggagcaggcgcccgccgccgctgctgcttccaatgaccctgccgaggacgccacggtcgagaagcccctcgcggcgccgcccacgccgaagctggacgccgctgcggcggcggatgggtcagcgtatgaggtggaggatgatgagtacgtgagcgatcccaacgatgagccgtttcctacgatgcgtcgtcgagaggccagcgacgacgaggggtccgaggacgggaggcccagggcgcggatcggccctgaccaggacgacgacggccaggggggccccgaggcgtacgacgacgaggtggacgaggaggatgaggagtactacgacgaggaagaggaggacctgggagagggattcgaggagtacgaagggcgcgcggcacctcccatggaggacggcggcggcggcggcggcggccaagtctcgcgcggagaggatggcgtggctggagaggagggattgccggagggggaggccaagggcgagggagaagagaaggagcaggagcccttcgccgtgcccacttccggcgccttctacatgcacgatgaccggtttcaggaggagaaccgcggcaggcgcaggcgaatgtttggtgcaaggaagttatgggatgctaaagatgatcaagcttgggtgcatgacagatttgaggagatgaacttgcatgatgatcgctatgaagaccagcggatgtctagaggtcgttttagaggtcgtggtggtcgaggtaaagcaagaggtggtggccgtggttttcccagaggtgggaagcagcccaattaccatgaagatggcaacacccaaaaccgccccccaaaggtagtgagagggaggggacctcgacgttatgaagctgttgcaaggagcagcagagaggttgttggatcccaacgaaagcactagatttcgagagcctgttccaaatgctgcagcagccagaaattctggtcaagtttcacatgcacaacaagaggctgctcctcccaaaaagaatgtcatcagctcaagcctgaattctgcatcccctccattttatccctctggtgcagcttgtcaagattttccggtagcaactcagaggagagacatacaaacaggaggttctaataagattcctccatcttccatgaagatggatgataactcaatattacaatctggttcaatggttagagggagaacagccatggattatggtgggcgtgataggtttcatgctgatggtcctgttaggtcatcccttggaagggtgcccaacggcgtcactgaattcaggatttacatcatcatttggtaaatcctacccaatccactattgtccgggcttcaggggggcaattcaaacattgtaatatcttcaaataatcagcctacttcatcgcttcaccaaacgtcaaggatttctacacatccacaaagtcatggaccaaagatgcacc

SEQ ID NO: 32879 - DNA, 1294 bp, Zea Mays
ggcatttgcggttgcagtgccccgtgccgtaccagttgcacggccccgtccgcctcatccgcgtcctcccctcccgtttcgtactttcgctccacgagtctctgggctctggctgcctgttgtccgctgctcccccgccccccctcctctacgaactctctcaaaacaaaaaccgcagcgtacaagaaaagggaaaaatctcaccataccgcaacgcgccgctcccaaatctagggttcctttttgaccatggcggcggcggcggcggccaagtctcgcgcggagaggatggcgtggctggagaggagggattgccggagggggaggccaagggcgagggagaagagaaggagcaggagcccttcgccgtgcccacttccggcgccttctacatgcacgatgaccggtttcaggaggagaaccgcggcaggcgcaggcgaatgtttggtgcaaggaagttatgggatgctaaagatgatcaagcttgggtgcatgacagatttgaggagatgaacttgcatgatgatcgctatgaagaccagcggatgtctagaggtcgttttagaggtcgtggtggtcgaggtaaagcaagaggtggtggccgtggttttcccagaggtgggaagcagcccaattaccatgaagatggcaacacccaaaaccgccccccaaaggtagtgagagggaggggacctcgacgttatgaagctgttgcaaggagcagcagagaggttgttggatcccaacgaaagcactagatttcgagagcctgttccaaatgctgcagcagccagaaattctggtcaagtttcacatgcacaacaagaggctgctcctcccaaaaagaatgtcatcagctcaagcctgaattctgcatcccctccattttatccctctggtgcagcttgtcaagattttccggtagcaactcagaggagagacatacaaacaggaggttctaataagattcctccatcttccatgaagatggatgataactcaatattacaatctggttcaatggttagagggagaacagccatggattatggtgggcgtgataggtttcatgctgatggtcctgttaggtcatcccttggaagggtgcccaacggcgtcactgaattcaggatttacatcatcatttggtaaatcctacccaatccactattgtccgggcttcaggggggcaattcaaacattgtaatatcttcaaataatcagcctacttcatcgcttcaccaaacgtcaaggatttctacacatccacaaagtcatggaccaaagatgcacc

SEQ ID NO: 32880 - DNA, 662 bp, Zea Mays
tagagatgacttcagccagtgaagcatcttgtaagcttttctaatatgcaggccctatttaggccctttgtgatctccagttctgatctggagcactttgggtggctttggtatccttacttatgttaggtcttatgcctgttcgtgctggagttatctgatgggtcacttcacagcaaaggaggggtggcatttgttacttgaattgtagtattgctcggttgtgttgcgtcaggaaatgccaaatttgttggttgttgctgcgtctgaagatgtgcacggttgttgaggagagcttgaaaatattggtctggttgggctgataaagttaagagtattttttaagtacaccttgttagtgaatccggttggtgtcggtctactctgctgaagaccaagcggcttcattgccgcagcttgtatcttttggaatccgttgaaatgtgcgtgcggtttgactactttcagcttaaatgagcgtgcccaacatggatttttcggttacctgcaagaaaagccaacagaataatccgcccgtcgtttccccccgggtgatagaaaatttatttcatggttaaaagtttcaaagaacaatgttctattctgtgatgtggaatgaactacattctatcttaccggagctagaaacgaatcaaaacctt

SEQ ID NO: 32881 - DNA, 6851 bp, Zea Mays
ctatcctcaagctccagccaggttgcagcgtgtgtgagggtggtaaatcttctgtccacaccagtgttcacatctccccttcccaagtttgcccagtccctaggtggtgaccatcgtcagcagttagtccacctcgccgtgaccagaactcccagcacgaggactgaagattcaagctgaagtggtgactgaagaggaatctactccagtggctgctgatcaagtggaggagccatctaactgggtagcttgtagagggatctagacctcttcactgcaacaaaggcaagccccggtgcatgcaaccccttccttgtgtttttaaataatttttgcacactttaagtctagtgaaatgtgcattaggtttataggagttgcttgaaaccctttgatgcattgccttccttgatatccatacctttatagatacttctggtgaagtatcaaaatatgattttcaaaaatgcttagccctgcttagatcttgtggatagaggttgtcttttgcaatactgcctagctcaggggttatcctgaggaaagatgacttctacctgcaagaatattttcattgagagcatggtgggatcttactgcaaagttccctttgatgctcttttcatcctaggaacataaacaatcctaaggatgaaagtacttaaatcgggacttgggctaggaacaggtgatgttctacccaggttagttaaggattggatgcgtatgtaggcctgttgatcaaggactatcttaactagccacatgccctagaaatgggacagggtaagcttgaacccggctattccatacatgaaaagacaatcgcgcactgggagtggagagatggcgagagtggcacgtaccctcctggcaaaggatcgcctaaaaggggtggtgtgctctcgggtggcgtggacctgttcatgtagtggaggatccgtgggaacggttgacatatgcaagggttaagtgctacatatgtcgtgtggttagagatcctcggctgagtaaatcgattcggatcgccgttatatccccggagagtggagacttgatctccgacctacaacctaagtcaggttgtaaacattatgaataaaaatgatgttgtattgatgagatggtgaaattagaccagatgcaaatagagtctattaatatttaatctggcgttaaaatattgaaagtaaggactcactttagtaagctagttctgcaaaagtatctaagttgattcttgctaaagcctctccttgattcccaaatccagcatatccttgagagtcttttctttagtcgggtaagtcttgctgagtaattccatactcagggttttattccctgttgtttttcaggttatagttttgtgctgctgttgatggtgttaagtgccggtgggctcggtcttcttatataagtataccccatctttatcttcttattgaggatggtcacttgagctagcatatattttaaacttataaataatttataacagtttaaagttatttctttgaatcacctttgtaatcaccccggtcatgtacaatgtaaaatttttgtaacctgtaaaatttggtactaagatttccgctgcaaaaatgttgtgtgtgtgatttgtgttacttaatcccgcggttctggttgtaagtggtttatccgaggtccttggggcactcagacggatcctgttaagttatttggtgcacatgcatagccgtctgaggtctttgagacaagaacaggtgcatgtgggcccaatatcttgggaggttctaccacaatttccaacatttttcttgtagattctttagattataatttgctttctgtatctcaattatgcaaaataggctacaactgtctatttacacatataggtgttactgtctttagaagaattgatgattcagtagcattaaagggagtattagagggtcacttatacctagttgattttaacaaaactgaacttgatacttgcttaattgctaagactaatatgggttggctctggcattgccgactagcccatgtagggatgaaaaatcttcacaagcttctaaagggagagcacattttaggactaacaaatgtttattttgagaaagatagggtttgtagagcatgtcaagcaggaaagtaagttggcgtacatcatccacacaaaaacattatgacgactgacaggccactcgagctactccacatggatctattcaacccgattgcctacataatcatcggcgggagcaagtactgtctagtaattgtggatgattattctcgcttcacttgggtattctttttacaggaaaaatctcaaacccaaaagaccttaaagggattcttaagacgggctcaaaacgagttccgattaaggataaaaaagataagaagcgacaatgggatggagttcaagaactcacaaatagaaggatttcttgaggatgagggcatcaagcattagttctcttctccctacacacctcaacaaaatggtgtagtggagaggaagaatagaactgtactggacatggcaaggaccatgcttgatgggtacaagactccggaccggttttgggctgaggcgattaacaccacctgctaatccatcaaccagctctatcttcactaaatcctcaagaagacatcatatgaactcctcaccggtaaaaagcctaatgtttcatattttagagtctttggtagcaaatgttttattcttgttaaaagaggtagaaaatcaaaatttgctccttaggctgtagaaggctttttactaggatatgactcaaacacaagggcatatagagtcttcaacaaatccactggattagttgaagtttcttgtgacattgtgttttatgagactaatggctctcaagtagatcaagttgatcttgatgaattagatgatgaagaggatccatgtgtcgcgctaaggaacatgtccattggggatgtgtgtcctaaggaatccgaagagcccacacaagcacaagatcaaccgtcatcttccatgcaagtatctccaccaactcaagatgaggaacatgctcaagatgatgaagatcaagaggatgagccacctcaagaggaggacaatgatcaagagggagatcaagtcaatgagaacaaggaagatgagcaagagattcagggtcaaagaccgccaccccaagagtccaccaagcaattcaacgagatcaccccgtgaactccatcctcggtgacattcataagggggtaaccactagaactcgagttgctcatttctatgaacattactcttttatgtcctctattgagccatacagggtggaggatgcactaagagattcggattgggtgatggctatgcaagaggagctcaacaacttcacgaggaatgaggtatggcatttagttctatgtcctaacaaaaatgttgtaggtaccacgtgggtattccgcaacaagcaagatgagcatggtgtggtgacaaggaacaaagcccgacttgtggccaagagatattcacaagttgaaggtttggatttcggtgaaacctatgcacccatagctagacttgagtcatttcgcatattacttgcctatgctacttaccatggctttaagctttatcaaatggacgtgaaaagtgccttcctaaatggaccgatcaaggaagatgtctatgttgagcaacctcccggctttgaagttagtgagtaccctaaccatgtgtataaactctcaaaggcgctttatgggctcaagcaagccccaagagcatgatatgaatgcctacgagattttcttatcactaatggcttcaaagtcggaaaagtcgatcctacactctttactaaaactattgcaaaagatttgtttgtatgccaaatttatgttgatgatatcatatttgggtctactaacaaatctaattgtgaatagtttagtaggatcataatacagaaattcgagatgtctatgatgggggagttgaagtatttcctaggatttcaagtcaagcaactcaaagatggcaccttcatcagccaaacaaaatacatacaagacatacttaccaagtttggaataaaggatgccaaacccatcaagacacccatgggaaccaatgtgcatctcgacctcgacacgggaggtaagtccgtagatcaaaaggtataccggtcgatgataggttctttactctatttatgtgcatctcgaccggatattatgctttccgtatgcgtgtgtgcaaggttccaagccgatcctaaggaagttcaccttagggccgtgaaaaggatcatgagatatttagtttacactcctaagtttggactttggtaccccaagggattcacttttgatttaataggatattccgatgccgattgggcagggtgtaaaattgataggaagagcacatcagggacttgtcagtttctaggaagatccctggtgtcttgggtttcaaagaaacaaaactcagtacctctttctaccgccgaagccgaatacattgccgtaggccattgctgtgcacaattactttggatgaggcaaaccctcagggactatggctacaaattgagcaatgtccctctcctatgtgacaatgagagtgcaatccgcatggcggacaatcccgttgaacacagccgcactaagcacatagacattcagtatcactttttgagggatcaccaacaaaatggggatatcgagatagcttatgttagcaccaaagaacaattaaccgacatctttaccaagcctttagatgagaaaacctttagcaaacttaggaatgagctaaatattcatgattcttggaactttgattgaaacattgcacacatagctcatttatatacctttgatcatatctctttcatgactacgactaatgtaagggaaatggagtttttcggcgaagacaaggcttccactccactctatcggtatcatttaaccttcgccgtcactccacatcactctcacattggtataatctttcactcacatttcatttaccaatgggggagaaagtaaagagggctcacaaagtctccgtttttggtgattaatgccaaagggggagaaagtattagcccaaagcaaaaggaccgcaccaccatccttcgaaatttttttaattaatatatttcaaattggtatgtttactttcaaattggtatttttcaaaattggaataaattacatatttccaattgatatttattaaaaccctcttgaaagataagaggagaatttcattcagggggagttttgtttagtcaaaggaaaatcatttgaaacagggggagaaatttcaaaacatgaaaatgcttcttgcaatcttattcatatacctttgactatttgcaaaaagactttgaaaagattttcaaaaaaggatttgcaaaaacaaaacaaatggtgcaaatgtggtccaaaatgttaaataaaagaaagcaatccacgcatatcaagtgaaattataaattggtttaattccaagtaacctatgcacttaccttatgcaaactagttcaattctgcacttatatatttgctttggtttgtgttggcatcaatcaccaaaaagggagagattgaaagggaaatagggtttaactttttccaataaataattttggtggttgaatacccaacacaaatattggactaactagtttgctttagattatatattctacaggtgcataaaggttcaacacaaaccaataaaagattgaagttagggatcaaattcaaaggagcaaagaaaccgagtatgccctagtctggcgcaccggactgttcggtgtgccaccggacattgttcggtgcaccagggccgtacaacgtccaattctccactctcgggtttcttagggcgcgctctgctataattcaccagactgtccggtgcaccagcggagcaacggctactcgcgcaacggtcgactgcaaaagccgcgctgaccgttgaacagtgaagaacagtgcacgtagagtcaaagcacagaagtcagaggcgcataggacagtgaacagtgcgtgtccggtgcggcactggactgtctggtgccgcttgaagacaagcctccaacgcttaactgctctggaaccctaacggttgggtgacatagctggcacaccagactgtccgatgcgctcatcgatagcagccatccccaacggctatgtggtggttgagggctataaatacccccaaccaccaccactccaagcatccaagtttgcagcacttcacattcaatacaggagctagtgcattcactccaagacacaatttcaatagaatcaaagcctctccaagtcccaaatacattccactcacctagtgacttgagagagagtttgttcgtgttctttgcgctcttgtttcatggatcgcttttttccttcctcattcttgttctcaagtgacttgtaatcaaggcaagagacaccaagtgtgtggtggtccttgcggggtctaaatgacccatttgattaaggagaaagctcactcggtctaggagaccgtttgagagagggaaagggttgaaagacacccggtccttgtgaccacctcaacggagactaggttctttagaaccgaacctcggtaaaacaaatcatcgtgttcacccgctttatttcttggttgatttgttttccttctctttcggactcgaattcatttctaacactgttggggacttgttctcaaatgctatgagttaagaacaaggcaacacaaaaaatgttaaacgttaaagtccttcgtccttcgaagcattatttcccttgggacataatgattttcggacgaaggttat

SEQ ID NO: 32882 - DNA, 329 bp, Zea Mays
atcctcaagctccagccaggttgcagcgtgtgtgagggtggtaaatcttctgtccacaccagtgttcacatctccccttcccaagtttgcccagtccctaggtggtgaccatcgtcagcagttagtccacctcgccgtgaccagaactcccagcacgaggactgaagattcaagctgaagtggtgactgaagaggaatctactccagtggctgctgatcaagtggaggagccatctaactgggtagcttgtagagggatctagacctcttcactgcaacaaagggcctgattcttagcaatgctctcagggctcagaaaaataccaaag

SEQ ID NO: 32883 - DNA, 1951 bp, Zea Mays
aatgtatcgaagctacaagtgatgaactgcttgggccgtactccaaagcagaagataatgcgttatctgcggccttcgggtgccggaaaaagaagaggccaaatagagtttttgatgccatcggatttatgtatcctgactaccgctacccgccgaaggggcaaaagagaaaaagtgcaacttctgggaaggatattacttcagctgctccgagtgagcccgcgccgaagaggagaaaagtaaaggtacttactcaccgaccgcattacattgaaccggccacagtgcctaagttcggcggtgaatcatcttcggctactaaagtcgaagaacctgccctcacacagaggattgaagaaccggctacaatgccgaaggttaacaaaattgaagaacctagaatcaaagaaacaaaaatatcagttctgagcccttcggcagaagtgacagtgtcgaaggcacaaaaagatcttatagcgacccccaagaggaaaaggatggtcaatgtactagatgtactggagactataaagaattcgagctctactccagggaaaactgttgaagcttcaaaaacacaggctgagacaaaactaactgaagccgaggctgcaaagagccaggccaggactgaaggtgggccttcaaagcctgccaaggagaaatccttggaaaccggagaaaaagaaatggaaaaagaagctgcaacacaaattctgcctgaaaaaactgtcacttcaactctcgaagcatcttccgaagtacctgattatattgtatgacacgcttcgggaaaaaggttatctgaagaagaaaaacgagaagctcaacattatgcctagaaattgaaatatccaaagggggcattgatattcaacgacagcggagaagaagatttcttgttttgtctcccagacagcaaggagatttctatctgccgggaaataggcaaaagcttcggattcccgacactagaagattggcttttggtgctatcgaaagatgaactggcggacagcttagcatataatagtttaaaggcatgagaatgatttttttgtatttaaaaacaaaaaattgttttatttgcttatacttaataccacacttctttttgcagggcctgattcttagcaatgctctcagggctcagaaaaataccaaagacgaaggatgtactatagctctaaacaaccttcattctgaagtaattgaactaaggaacgaaggtcttaaaaaagataaaatcctaaattcattggtgaacaaaataaaataagacgaagttactatcaaaacccaagctgaagctcagaaatgcgaaattgaagatcttcgaaaacagctggctgaagcaaaattgaaatttgctattgctgaagctgaccgagacgccagtggctactggaaaaattactgggaaaaaacagttgtagagcttcgatctttaaaagaaagatgctatgaaaaatctgtagcatgtgtaaaaaagatgaaaactagcttcgccaatgttggcgcatattctagtgaagacaactttgtactgggcgatcccgaaggtccaattgaatggatcagcggcgaggccgatgcctttgaggagattttgaatggtcgcggggatgtctgtgccttttctggtgcaagaggggtcgcagctattttggagaaagcggggtgcgaacatgtgaaaattctggcccaagccgaagctgctttctctattgatgacacgaaggatccctcggccgaagcaagcttagttggtgggaaattctttactgacatatgggaaaatggcggccgagggacagctcacgaaataataaagaaaagtgagaaagacactcacgatgctaaggaagcaacgaaggcagctgaaagagctgcagaactcgaaaggcggataggtattgcttaataggttttaactttattttttattttt

SEQ ID NO: 32884 - DNA, 1204 bp, Zea Mays
attactcttcataaaagaaggcaaagcgtttacggattctttttctagcatttctcaattcttttttgttccggccccaatatgctctgtctcaaagtcaatttgcctacgagttcgaacgaaccgacaagaaggagcaatacacaagagagaagacaaggaatagcgccagcggcggccagggtgccgctcgatctctatgacttgttcttccctccctttcttcccttcacaaggttcctgaggcccgctttgagctgagatggattcgtcccagtagtgttctgggtgctcccgtttcttgatttcttccgttacagtgagtgaagttgaagcactgcatgacctcttccggaaaataagtaattcagttatcagagataatctaattcacaaggaagaattccaacttgctctctttaggggcaagaagcagcaaaatctctttgttgatagggtatttgacttgtttgatcaaaaacgaaatggtgtaattgaatttggtgagtttgttcgatctcttggtgtgtttcatccagatgcaccagaagatcagaaagttgcatttgcatttaagttgtatgacttaaaacagacaggctttatagaacggcatgagttaaaggagatggtgctggctctgctggacgaatcagatttggatattgcgagcgacgctgtcgagatgattgttgacaggacatttgatcaggccgacacaaaaggtgatgggaagatagatcaggaagaatggactgaatatgctaaagacaatccatacgtgctgaggaatatgacccttccatacctcaaggacattactatggtattcccaagctttgtgatgcactcagaaatcagtgaaacagacatggctgtctaacctgaaaagtaactgcaaactcacagcttctctgcacagcctgatgtatattaatgatggaaccggaatcttttcatcaagaaaaggttaatttgcaaccttctctcgtgaacagaaatttgtggactggtgtaaatggtgggaataggaaaggtgttctgttatattaccgacaagcaaacgagcaatctagcatctatctgattgtcgttttcagacactcgtgattagcttcaatatttttcctcaccctatcccatatcttcctcccaccaccgtttctcgtcgcgccctccgcttccattgcccctgcctcatctg

SEQ ID NO: 32885 - DNA, 1655 bp, Zea Mays
gtttacggattctttttctagcatttctcaattcttttttgttccggccccaatatgctctgtctcaaagtcaatttgcctacgagttcgaacgaaccgacaagaaggagcaatacacaagagagaagacaaggaatagcgccagcggcggccagggtgccgctcgatctctatgacttgttcttccctccctttcttcccttcacaaggttcctgaggcccgctttgagctgagatggattcgtcccagtagtgttctgggtgctcccgtttcttgatttcttccgaacttaggcattactgtttacagaatacgaccacaagattccggacactgtgttttgctcttctccgagtttgcactttgcttgatattccatttggaggagctgcgatgggctgtctgcaaacaaagcacgccagtcgatcgccgcacttgctggatacacgggaagctgtagcccttgctgctgaaacatcttgtgagaaagtggatcttccagattttgttaatattgctactggaacactgcggcgtgagaattgaattccatcttccataagaaagaggaatcaaacggttgctttcagatatactgccatgttttcctgcttacattcatgcctacctccttatttttttcccatattttttcggttaacaagcctagcgaaaacaccgtggcattgcaacttctctgactaactctgatacgcatgtattgttgtgtacttgtgttttgggtctagtttgttaagctccacctattgttgcagttacagtgagtgaagttgaagcactgcatgacctcttccggaaaataagtaattcagttatcagagataatctaattcacaaggaagaattccaacttgctctctttaggggcaagaagcagcaaaatctctttgttgatagggtatttgacttgtttgatcaaaaacgaaatggtgtaattgaatttggtgagtttgttcgatctcttggtgtgtttcatccagatgcaccagaagatcagaaagttgcatttgcatttaagttgtatgacttaaaacagacaggctttatagaacggcatgagttaaaggagatggtgctggctctgctggacgaatcagatttggatattgcgagcgacgctgtcgagatgattgttgacagggccgacacaaaaggtgatgggaagatagatcaggaagaatggactgaatatgctaaagacaatccatacgtgctgaggaatatgacccttccatacctcaaggacattactatggtattcccaagctttgtgatgcactcagaaatcagtgaaacagacatggctgtctaacctgaaaagtaactgcaaactcacagcttctctgcacagcctgatgtatattaatgatggaaccggaatcttttcatcaagaaaaggttaatttgcaaccttctctcgtgaacagaaatttgtggactggtgtaaatggtgggaataggaaaggtgttctgttatattaccgacaagcaaacgagcaatctagcatctatctgattgtcgttttcagacactcgtgattagcttcaatatttttcctcaccctatcccatatcttcctcccaccaccgtttctcgtcgcgccctccgcttccattgcccctgcctcatctg

SEQ ID NO: 32886 - DNA, 1188 bp, Zea Mays
gtttacggattctttttctagcatttctcaattcttttttgttccggccccaatatgctctgtctcaaagtcaatttgcctacgagttcgaacgaaccgacaagaaggagcaatacacaagagagaagacaaggaatagcgccagcggcggccagggtgccgctcgatctctatgacttgttcttccctccctttcttcccttcacaaggttcctgaggcccgctttgagctgagatggattcgtcccagtagtgttctgggtgctcccgtttcttgatttcttccgttacagtgagtgaagttgaagcactgcatgacctcttccggaaaataagtaattcagttatcagagataatctaattcacaaggaagaattccaacttgctctctttaggggcaagaagcagcaaaatctctttgttgatagggtatttgacttgtttgatcaaaaacgaaatggtgtaattgaatttggtgagtttgttcgatctcttggtgtgtttcatccagatgcaccagaagatcagaaagttgcatttgcatttaagttgtatgacttaaaacagacaggctttatagaacggcatgagttacgtcgcagttaaaggagatggtgctggctctgctggacgaatcagatttggatattgcgagcgacgctgtcgagatgattgttgacaggacatttgatcaggccgacacaaaaggtgatgggaagatagatcaggaagaatggactgaatatgctaaagacaatccatacgtgctgaggaatatgacccttccatacctcaaggacattactatggtattcccaagctttgtgatgcactcagaaatcagtgaaacagacatggctgtctaacctgaaaagtaactgcaaactcacagcttctctgcacagcctgatgtatattaatgatggaaccggaatcttttcatcaagaaaaggttaatttgcaaccttctctcgtgaacagaaatttgtggactggtgtaaatggtgggaataggaaaggtgttctgttatattaccgacaagcaaacgagcaatctagcatctatctgattgtcgttttcagacactcgtgattagcttcaatatttttcctcaccctatcccatatcttcctcccaccaccgtttctcgtcgcgccctccgcttccattgcccctgcctcatctg

SEQ ID NO: 32887 - DNA, 1360 bp, Zea Mays
gtttacggattctttttctagcatttctcaattcttttttgttccggccccaatatgctctgtctcaaagtcaatttgcctacgagttcgaacgaaccgacaagaaggagcaatacacaagagagaagacaaggaatagcgccagcggcggccagggtgccgctcgatctctatgacttgttcttccctccctttcttcccttcacaaggttcctgaggcccgctttgagctgagatggattcgtcccagtagtgttctgggtgctcccgtttcttgatttcttccgaacttaggcattactgtttacagaatacgaccacaagattccggacactgtgttttgctcttctccgagtttgcactttgcttgatattccatttggaggagctgcgatgggctgtctgcaaacaaagcacgccagtcgatcgccgcacttgctggatacacgggaagctgtagcccttgctgctgaaacatcttttacagtgagtgaagttgaagcactgcatgacctcttccggaaaataagtaattcagttatcagagataatctaattcacaaggaagaattccaacttgctctctttaggggcaagaagcagcaaaatctctttgttgatagggtatttgacttgtttgatcaaaaacgaaatggtgtaattgaatttggtgagtttgttcgatctcttggtgtgtttcatccagatgcaccagaagatcagaaagttgcatttgcatttaagttgtatgacttaaaacagacaggctttatagaacggcatgagttaaaggagatggtgctggctctgctggacgaatcagatttggatattgcgagcgacgctgtcgagatgattgttgacagggccgacacaaaaggtgatgggaagatagatcaggaagaatggactgaatatgctaaagacaatccatacgtgctgaggaatatgacccttccatacctcaaggacattactatggtattcccaagctttgtgatgcactcagaaatcagtgaaacagacatggctgtctaacctgaaaagtaactgcaaactcacagcttctctgcacagcctgatgtatattaatgatggaaccggaatcttttcatcaagaaaaggttaatttgcaaccttctctcgtgaacagaaatttgtggactggtgtaaatggtgggaataggaaaggtgttctgttatattaccgacaagcaaacgagcaatctagcatctatctgattgtcgttttcagacactcgtgattagcttcaatatttttcctcaccctatcccatatcttcctcccaccaccgtttctcgtcgcgccctccgcttccattgcccctgcctcatctg

SEQ ID NO: 32888 - DNA, 1165 bp, Zea Mays
gtttacggattctttttctagcatttctcaattcttttttgttccggccccaatatgctctgtctcaaagtcaatttgcctacgagttcgaacgaaccgacaagaaggagcaatacacaagagagaagacaaggaatagcgccagcggcggccagggtgccgctcgatctctatgacttgttcttccctccctttcttcccttcacaaggttcctgaggcccgctttgagctgagatggattcgtcccagtagtgttctgggtgctcccgtttcttgatttcttccgttacagtgagtgaagttgaagcactgcatgacctcttccggaaaataagtaattcagttatcagagataatctaattcacaaggaagaattccaacttgctctctttaggggcaagaagcagcaaaatctctttgttgatagggtatttgacttgtttgatcaaaaacgaaatggtgtaattgaatttggtgagtttgttcgatctcttggtgtgtttcatccagatgcaccagaagatcagaaagttgcatttgcatttaagttgtatgacttaaaacagacaggctttatagaacggcatgagttaaaggagatggtgctggctctgctggacgaatcagatttggatattgcgagcgacgctgtcgagatgattgttgacagggccgacacaaaaggtgatgggaagatagatcaggaagaatggactgaatatgctaaagacaatccatacgtgctgaggaatatgacccttccatacctcaaggacattactatggtattcccaagctttgtgatgcactcagaaatcagtgaaacagacatggctgtctaacctgaaaagtaactgcaaactcacagcttctctgcacagcctgatgtatattaatgatggaaccggaatcttttcatcaagaaaaggttaatttgcaaccttctctcgtgaacagaaatttgtggactggtgtaaatggtgggaataggaaaggtgttctgttatattaccgacaagcaaacgagcaatctagcatctatctgattgtcgttttcagacactcgtgattagcttcaatatttttcctcaccctatcccatatcttcctcccaccaccgtttctcgtcgcgccctccgcttccattgcccctgcctcatctg

SEQ ID NO: 32889 - DNA, 1394 bp, Zea Mays
gttctgttatgttcatccaaaaaatcacatacggaacacaaggaatttattttgagggaagaaataaaggcagaaatcagtccgcacgcgggggattgcaaccaacaaagaattacatgcaccaaaatcaacaattgagcgagcaaattattgaggcaatgttgcaacgatgtgcccgtctttgctggcattcagcactaggtaaactcttacaaagaaacaaaattgtgaaccaaggcaggtaccatcgtcgtcgtttcgacaagcatcagctaagagtatcaattataaagcaggtcttgaccagtggaaatcatctagaccttatagccggtcaaggtgaaacctctgccgacaatctcgcctacgcagaaccatgcatagagctcaactccaaataaactcgcaatgccaaggtcctcgaccgtgaggtccttcctgttcttccatacctgcttgacacaatcaagctccttccagaatgactcatagcgacctggtaggctgaacaaacacaacaaaggttagaaaccatgaaaagtaaaatcctgaatggcacaagttacatattgcgtctaactgctgttcctaatgctattattaagtttcaacaggccatttgcatttagacaaacaatgatgtactaattggagctccttgatacttaaaattttgtcaagccatttctatttataatggtcaaattcagaatacctctgaacttttacctctgttcttaactgtaagtcgtcttggcttgtttagggatatagcttttgctagattacactatctctaaatacatagtaaaaatggatctagaaaagcagaatccacttctaatttggaccggagggggtattaattagcaccaggtctgagaagaaatatttccgccttatgttaataaacacttccatccttgctacctagaagtatcactttgacttgggacatttgaagagaaactacaggcctccaaaaaacgcacctgccactgtactaaaatggtttttagcattgtttagtgttgtgctcagctaactagctaatacaaaaggaaatacaagatcatgacagggccaagtgcccatcatttcatcctatcacatgcaaattgtttatttagatatatgagagtaaagtgggaaataaaatccggatacggatacggatacacctgcatgctgcacccagcaaatcttacactctaatcaaagcaaattttcaacatttgaggctaaagatgttatgcataaactcttataaaccatatatgcgtgcgcgcacagcattttcctgtcaatcaaccaacatccaaaataaacaagaatgcaatcacattcgccaatagccaatcaagttatcagtttttatatgcaaagctgaatct

SEQ ID NO: 32890 - DNA, 2449 bp, Zea Mays
ccaccacctcccccctccatctcgctctcgctctcgctccgcccctctctccctctctcattggccattccgcccgcatgaaaccccaaaccctcgccggcatcgccgtcgccgcagcagcgcccgcgtagcccgcccctctcgccctcgccccccctccccgcgccccgatcccgcccgctccgcagccgatcctgccgggagcacgaccgatgacgatgaacggcgccgctgcaccggagcgctcgcccccagcctcgcccccgcctctggtccaggcccaggcgcctccgtcgccatctccgactcagccgctcgagtggaggttctcgcaggtgttcggtgagcgcagcgccggggaggaagtccaggatgttgacatcatctcagcaatagagttcaataaatcgggacatcatcttgccactggagacaggggtggacgagttgttttatttgaaaggactgatgtcaaagatcaggcatcctgagtttcgctacaaaactgagtttcaaagccatgagccagagtttgattacctcaagagcttggaaattgaagagaagattaaccaaataaagtggtgtcaagcaacaaattgtgcattgtttcttctatccacaaatgacaaaacgataaagttttggaaggtccaagaaaagaaagtaaaaaaggtatctgagatgaatttggaccgttcaactgctcctacaaatggtagtcctggtggtacgggatatctgcgcccatctctctcaaatggcaatgttctaaaacctggcggacttcctttgctacgccttcctgtggttacaacccaagaaacaagccttgctgcgagttgccgaagagtatatgctcatgcacatgactatcatataaattcaatatcaaataacagtgatggtgagacatttatatcagctgatgatttgcggataaatctttggaatttggaaatcagcaatcaaagtttcaatattattgatgttaagcctacaaacatggaagatctcactgaggtgataacatctgctgaattccatcctactcattgcaatacattggcgtatagtagctctaagggctccattcgacttgttgatctgcggcaatcagccctttgcgacaatcattcccaaatctttgagcagcatgaggccccaggttcaagatcatttttcactgagattatagcttcaatttcggacataaaattttcgaaggatgggaggcatattctcagtcgtgactacatgactctgaagctttgggatgttaagatgaattctggtcctgttgcaacattccaggttcatgagtatctaaggcctaagttatgtgatttatatgaaaatgactcaattttcgacaaatttgagtgttgtcaaagtggtgatggattaagagtagcaactggttcctacagcaacatttttcgcgtgtttggttgccgttctggtagcagtgaagcaacaacacttgaagcaacccgaaaccctacaaggcggcaggtccagactacctctagagctaccagatccctaagtactctgacaagggccgttagacgaggtggagagagcactggaatagatgccaatggaaattcctatgatctgagcacaaagttgctccatttggcctggcacccatctgaaaatctaattgcttgtgctgcagccaatagcttgtacatgtactacgcataaacaagcgaaacgaacagagcgacagtttttttttgttggttgctcccggtgagaaagacacgtttagccaatggtggattgaagccaggagttggtggagatggtgtattttgtgccagtcggaagcagttcttttcggtgccatatagagctgtccagagtccaagaggaagtgactcgatcattcccgggaagcagctttgattctgattattattattttttgtgtggggaaaggcttgtctttcccccataggttcatttagatttaaatataaggtcctagcttgacaacatctgggcatctgtagtagacgatgttaaaggggatgggtatggcgacgatccaccgttgtattcatgttgccatgggtttgtaacttcagggtggccgttggagcttttcatagttttatcttacagatcgaccttattttttttcccttgcgtggggaaccttgttttcgaagaatgccaggaccttcgtcatgtttgatgcgaaccctagaataggaaacatactgtcattttattgtatgtacatttttaataggttggagtggttcttctgttgtttagttatattcttttaccagtgcaacatgtcaacatgcccttgtcagctttgtcatacccttcatcacaggttcatcttggactggagcttagaaaccgggaacatgacatggtcaccggaacgtggcaacaatttgattcatgtggtgttaaatcttag

SEQ ID NO: 32891 - DNA, 2446 bp, Zea Mays
ccaccacctcccccctccatctcgctctcgctctcgctccgcccctctctccctctctcattggccattccgcccgcatgaaaccccaaaccctcgccggcatcgccgtcgccgcagcagcgcccgcgtagcccgcccctctcgccctcgccccccctccccgcgccccgatcccgcccgctccgcagccgatcctgccgggagcacgaccgatgacgatgaacggcgccgctgcaccggagcgctcgcccccagcctcgcccccgcctctggtccaggcccaggcgcctccgtcgccatctccgactcagccgctcgagtggaggttctcgcaggtgttcggtgagcgcagcgccggggaggaagtccaggatgttgacatcatctcagcaatagagttcaataaatcgggacatcatcttgccactggagacaggggtggacgagttgttttatttgaaaggactgatgtcaaagatcatgcctctagaaaagatgctgagaaagctgattattctatcagcaggcatcctgagtttcgctacaaaactgagtttcaaagccatgagccagagtttgattacctcaagagcttggaaattgaagagaagattaaccaaataaagtggtgtcaagcaacaaattgtgcattgtttcttctatccacaaatgacaaaacgataaagttttggaaggtccaagaaaagaaagtaaaaaaggtatctgagatgaatttggaccgttcaactgctcctacaaatggtagtcctggtggtacgggatatctgcgcccatctctctcaaatggttacaacccaagaaacaagccttgctgcgagttgccgaagagtatatgctcatgcacatgactatcatataaattcaatatcaaataacagtgatggtgagacatttatatcagctgatgatttgcggataaatctttggaatttggaaatcagcaatcaaagtttcaatattattgatgttaagcctacaaacatggaagatctcactgaggtgataacatctgctgaattccatcctactcattgcaatacattggcgtatagtagctctaagggctccattcgacttgttgatctgcggcaatcagccctttgcgacaatcattcccaaatctttgagcagcatgaggccccaggttcaagatcatttttcactgagattatagcttcaatttcggacataaaattttcgaaggatgggaggcatattctcagtcgtgactacatgactctgaagctttgggatgttaagatgaattctggtcctgttgcaacattccaggttcatgagtatctaaggcctaagttatgtgatttatatgaaaatgactcaattttcgacaaatttgagtgttgtcaaagtggtgatggattaagagtagcaactggttcctacagcaacatttttcgcgtgtttggttgccgttctggtagcagtgaagcaacaacacttgaagcaacccgaaaccctacaaggcggcaggtccagactacctctagagctaccagatccctaagtactctgacaagggccgttagacgaggtggagagagcactggaatagatgccaatggaaattcctatgatctgagcacaaagttgctccatttggcctggcacccatctgaaaatctaattgcttgtgctgcagccaatagcttgtacatgtactacgcataaacaagcgaaacgaacagagcgacagtttttttttgttggttgctcccggtgagaaagacacgtttagccaatggtggattgaagccaggagttggtggagatggtgtattttgtgccagtcggaagcagttcttttcggtgccatatagagctgtccagagtccaagaggaagtgactcgatcattcccgggaagcagctttgattctgattattattattttttgtgtggggaaaggcttgtctttcccccataggttcatttagatttaaatataaggtcctagcttgacaacatctgggcatctgtagtagacgatgttaaaggggatgggtatggcgacgatccaccgttgtattcatgttgccatgggtttgtaacttcagggtggccgttggagcttttcatagttttatcttacagatcgaccttattttttttcccttgcgtggggaaccttgttttcgaagaatgccaggaccttcgtcatgtttgatgcgaaccctagaataggaaacatactgtcattttattgtatgtacatttttaataggttggagtggttcttctgttgtttagttatattcttttaccagtgcaacatgtcaacatgcccttgtcagctttgtcatacccttcatcacaggttcatcttggactggagcttagaaaccgggaacatgacatggtcaccggaacgtggcaacaatttgattcatgtggtgttaaatcttag

SEQ ID NO: 32892 - DNA, 2470 bp, Zea Mays
ccaccacctcccccctccatctcgctctcgctctcgctccgcccctctctccctctctcattggccattccgcccgcatgaaaccccaaaccctcgccggcatcgccgtcgccgcagcagcgcccgcgtagcccgcccctctcgccctcgccccccctccccgcgccccgatcccgcccgctccgcagccgatcctgccgggagcacgaccgatgacgatgaacggcgccgctgcaccggagcgctcgcccccagcctcgcccccgcctctggtccaggcccaggcgcctccgtcgccatctccgactcagccgctcgagtggaggttctcgcaggtgttcggtgagcgcagcgccggggaggaagtccaggatgttgacatcatctcagcaatagagttcaataaatcgggacatcatcttgccactggagacaggggtggacgagttgttttatttgaaaggactgatgtcaaagatcatgcctctagaaaagatgctgagaaagctgattattctatcagcaggcatcctgagtttcgctacaaaactgagtttcaaagccatgagccagagtttgattacctcaagagcttggaaattgaagagaagattaaccaaataaagtggtgtcaagcaacaaattgtgcattgtttcttctatccacaaatgacaaaacgataaagttttggaaggtccaagaaaagaaagtaaaaaaggtatctgagatgaatttggaccgttcaactgctcctacaaatggtagtcctggtggtacgggatatctgcgcccatctctctcaaatggcaatgttctaaaacctggcggacttcctttgctacgccttcctgtggttacaacccaagaaacaagccttgctgcgagttgccgaagagtatatgctcatgcacatgactatcatataaattcaatatcaaataacagctgatgatttgcggataaatctttggaatttggaaatcagcaatcaaagtttcaatattattgatgttaagcctacaaacatggaagatctcactgaggtgataacatctgctgaattccatcctactcattgcaatacattggcgtatagtagctctaagggctccattcgacttgttgatctgcggcaatcagccctttgcgacaatcattcccaaatctttgagcagcatgaggccccaggttcaagatcatttttcactgagattatagcttcaatttcggacataaaattttcgaaggatgggaggcatattctcagtcgtgactacatgactctgaagctttgggatgttaagatgaattctggtcctgttgcaacattccaggttcatgagtatctaaggcctaagttatgtgatttatatgaaaatgactcaattttcgacaaatttgagtgttgtcaaagtggtgatggattaagagtagcaactggttcctacagcaacatttttcgcgtgtttggttgccgttctggtagcagtgaagcaacaacacttgaagcaacccgaaaccctacaaggcggcaggtccagactacctctagagctaccagatccctaagtactctgacaagggccgttagacgaggtggagagagcactggaatagatgccaatggaaattcctatgatctgagcacaaagttgctccatttggcctggcacccatctgaaaatctaattgcttgtgctgcagccaatagcttgtacatgtactacgcataaacaagcgaaacgaacagagcgacagtttttttttgttggttgctcccggtgagaaagacacgtttagccaatggtggattgaagccaggagttggtggagatggtgtattttgtgccagtcggaagcagttcttttcggtgccatatagagctgtccagagtccaagaggaagtgactcgatcattcccgggaagcagctttgattctgattattattattttttgtgtggggaaaggcttgtctttcccccataggttcatttagatttaaatataaggtcctagcttgacaacatctgggcatctgtagtagacgatgttaaaggggatgggtatggcgacgatccaccgttgtattcatgttgccatgggtttgtaacttcagggtggccgttggagcttttcatagttttatcttacagatcgaccttattttttttcccttgcgtggggaaccttgttttcgaagaatgccaggaccttcgtcatgtttgatgcgaaccctagaataggaaacatactgtcattttattgtatgtacatttttaataggttggagtggttcttctgttgtttagttatattcttttaccagtgcaacatgtcaacatgcccttgtcagctttgtcatacccttcatcacaggttcatcttggactggagcttagaaaccgggaacatgacatggtcaccggaacgtggcaacaatttgattcatgtggtgttaaatcttag

SEQ ID NO: 32893 - DNA, 2640 bp, Zea Mays
ccaccacctcccccctccatctcgctctcgctctcgctccgcccctctctccctctctcattggccattccgcccgcatgaaaccccaaaccctcgccggcatcgccgtcgccgcagcagcgcccgcgtagcccgcccctctcgccctcgccccccctccccgcgccccgatcccgcccgctccgcagccgatcctgccgggagcacgaccgatgacgatgaacggcgccgctgcaccggagcgctcgcccccagcctcgcccccgcctctggtccaggcccaggcgcctccgtcgccatctccgactcagccgctcgagtggaggttctcgcaggtgttcggtgagcgcagcgccggggaggaagtccaggatgttgacatcatctcagcaatagagttcaataaatcgggacatcatcttgccactggagacaggggtggacgagttgttttatttgaaaggactgatgtcaaagatgcatcctgagtttcgctacaaaactgagtttcaaagccatgagccagagtttgattacctcaagagcttggaaattgaagagaagattaaccaaataaagtggtgtcaagcaacaaattgtgcattgtttcttctatccacaaatgacaaaacgataaagttttggaaggtccaagaaaagaaagtaaaaaaggtatctgagatgaatttggaccgttcaactgctcctacaaatggtagtcctggtggtacgggatatctgcgcccatctctctcaaatggcaatgttctaaaacctggcggacttcctttgctacgccttcctgtggtagctgtacttaactcagtttcatttattcacctggcaaaaagcatattctaattatttagaaccattatgccattacctggaatttatgcagcgggaaaatgcattttagtcgattcatcgtccttcctgtctatgtaaccaactttttttttcacaatttgttacactgacccagtctaaactgtaaacaggttacaacccaagaaacaagccttgctgcgagttgccgaagagtatatgctcatgcacatgactatcatataaattcaatatcaaataacagtgatggtgagacatttatatcagctgatgatttgcggataaatctttggaatttggaaatcagcaatcaaagtttcaatattattgatgttaagcctacaaacatggaagatctcactgaggtgataacatctgctgaattccatcctactcattgcaatacattggcgtatagtagctctaagggctccattcgacttgttgatctgcggcaatcagccctttgcgacaatcattcccaaatctttgagcagcatgaggccccaggttcaagatcatttttcactgagattatagcttcaatttcggacataaaattttcgaaggatgggaggcatattctcagtcgtgactacatgactctgaagctttgggatgttaagatgaattctggtcctgttgcaacattccaggttcatgagtatctaaggcctaagttatgtgatttatatgaaaatgactcaattttcgacaaatttgagtgttgtcaaagtggtgatggattaagagtagcaactggttcctacagcaacatttttcgcgtgtttggttgccgttctggtagcagtgaagcaacaacacttgaagcaacccgaaaccctacaaggcggcaggtccagactacctctagagctaccagatccctaagtactctgacaagggccgttagacgaggtggagagagcactggaatagatgccaatggaaattcctatgatctgagcacaaagttgctccatttggcctggcacccatctgaaaatctaattgcttgtgctgcagccaatagcttgtacatgtactacgcataaacaagcgaaacgaacagagcgacagtttttttttgttggttgctcccggtgagaaagacacgtttagccaatggtggattgaagccaggagttggtggagatggtgtattttgtgccagtcggaagcagttcttttcggtgccatatagagctgtccagagtccaagaggaagtgactcgatcattcccgggaagcagctttgattctgattattattattttttgtgtggggaaaggcttgtctttcccccataggttcatttagatttaaatataaggtcctagcttgacaacatctgggcatctgtagtagacgatgttaaaggggatgggtatggcgacgatccaccgttgtattcatgttgccatgggtttgtaacttcagggtggccgttggagcttttcatagttttatcttacagatcgaccttattttttttcccttgcgtggggaaccttgttttcgaagaatgccaggaccttcgtcatgtttgatgcgaaccctagaataggaaacatactgtcattttattgtatgtacatttttaataggttggagtggttcttctgttgtttagttatattcttttaccagtgcaacatgtcaacatgcccttgtcagctttgtcatacccttcatcacaggttcatcttggactggagcttagaaaccgggaacatgacatggtcaccggaacgtggcaacaatttgattcatgtggtgttaaatcttag

SEQ ID NO: 32894 - DNA, 1488 bp, Zea Mays
taaggttcgggcacacgtggatagctctcggtttcctcctatccagggctaattctttggaggtgataacatctgctgaattccatcctactcattgcaatacattggcgtatagtagctctaagggctccattcgacttgttgatctgcggcaatcagccctttgcgacaatcattcccaaatctttgagcagcatgaggccccaggttcaagatcatttttcactgagattatagcttcaatttcggacataaaattttcgaaggatgggaggcatattctcagtcgtgactacatgactctgaagctttgggatgttaagatgaattctggtcctgttgcaacattccaggttcatgagtatctaaggcctaagttatgtgatttatatgaaaatgactcaattttcgacaaatttgagtgttgtcaaagtggtgatggattaagagtagcaactggttcctacagcaacatttttcgcgtgtttggttgccgttctggtagcagtgaagcaacaacacttgaagcaacccgaaaccctacaaggcggcaggtccagactacctctagagctaccagatccctaagtactctgacaagggccgttagacgaggtggagagagcactggaatagatgccaatggaaattcctatgatctgagcacaaagttgctccatttggcctggcacccatctgaaaatctaattgcttgtgctgcagccaatagcttgtacatgtactacgcataaacaagcgaaacgaacagagcgacagtttttttttgttggttgctcccggtgagaaagacacgtttagccaatggtggattgaagccaggagttggtggagatggtgtattttgtgccagtcggaagcagttcttttcggtgccatatagagctgtccagagtccaagaggaagtgactcgatcattcccgggaagcagctttgattctgattattattattttttgtgtggggaaaggcttgtctttcccccataggttcatttagatttaaatataaggtcctagcttgacaacatctgggcatctgtagtagacgatgttaaaggggatgggtatggcgacgatccaccgttgtattcatgttgccatgggtttgtaacttcagggtggccgttggagcttttcatagttttatcttacagatcgaccttattttttttcccttgcgtggggaaccttgttttcgaagaatgccaggaccttcgtcatgtttgatgcgaaccctagaataggaaacatactgtcattttattgtatgtacatttttaataggttggagtggttcttctgttgtttagttatattcttttaccagtgcaacatgtcaacatgcccttgtcagctttgtcatacccttcatcacaggttcatcttggactggagcttagaaaccgggaacatgacatggtcaccggaacgtggcaacaatttgattcatgtggtgttaaatcttag

SEQ ID NO: 32895 - DNA, 3052 bp, Zea Mays
aaacttccgaagcccgccgttcgggatacctctgctccaaataactccttccctcgacctccccgaacccgaactcctctcaggtcgagcctagggttagggtttcgtccctccggccccgattcgaaccaatccgcctcggcctccgccgcgccatggccgccggctccatcgtggtggacttcccttccatgggcgccgccctctgcttccccagcctcgattcactcctccgcgactccgcctcgggcttcctcgctgccgtctccaacgccccagcccccggcgcagccgacctcaccaactttcaccgcgtcttctcgcgcgtcctcagcgcctacccggacccaccgctcgaggctgtctggttcttctccgcgctctccttccacgaccgtcccgacgacctccgctccctgctccagctcctctccgccttcaccgcctcctcgcccggcaccgccaagccgcttgcccttctcgcccctgtcgtttccgagctcttccacgccgacaagccgcgcagggagaccgagaccctcgttgaggccgtcctcagctacatcagcatctgcagcaaccgctctgccccctcttcgaccgtgggcgccaccgcagacgctgtgagcctgctgccggcctttggggagctcgtcaaagtgtggagcgtgcgctactcgagggagaggtgcccgttccaagtgctgttcccgctcgctggggacgaggccaggcgggagctcatgaaggaaggctgcagcgttgactacctcgccggggtggtgctggctgaggcgttccttctcaggctctgcctcaaggtgcagaatgcaacaggggtgcctcgctctgagctgcagaaggagctcaagatctgggcagtcagctccatcccggtcttccagaaccaccgattcttcggggtcttgctgaacatgctcttgaactctccactgcctgtttactctctagtgcattttgctgtcatcatatgcaaggagcatgacttaagttggagttaatgactcatctttgtgacatgcaaacagagcgctgatgatgaaatcttgttgagagatgtcctttatgattctcttatcctggtggactattctttcattaacaatggtgttggagttgatcttttgcctatatacgtgttgagattggttatcactcttgatgctgtcaatgatgccaggaggaaaggtgatcaagggagagcagtgtcatttatcaatgctttctcaacctcaaatgttcccaattttctcatcaagtgggctacttttcaagctggctctggtgcactcagcaaaccaattgccaatacaccgcaatctattattaagtggcttgtcgaccttgaagtcaaggggctcaaagtgtttggagactacagttcttgtattatggagaggtttgcttatgatggggtcaagaatggccatgggaacatgattcattcagatgcggaccttttcttttttgataagcagagtggtagggagtttatggacaccaaaggcagcgaggatgaagctgtggatgagatggagactgcaggtaataatgcttttatggctgctgcccagtcaatgaagggggtgactgacggcatgaggaagaggaagagctgcggatacgaagatgcaacagctgtgaagtttgtgaagtacaaggttgaagacagctcgctgaaggactacctatcagcagctaatggcataagcagtggcagtgaggtagagaacccgcagtctgatgatgagatggaagaatcaaactgatgcatagaaacgagatcacccgctaatgcttactttggacagttgcttttgagagttccttggacagccgcctttttttggagccaggaccagtcttgtttcagctgccgcttgttaatgatgccgtgcagaatccgcaagacggccccatctccagctaggcattcggatgtagtagtaaccgttagctgaccatacttgacatggagcatatgatgtttgctatgggccatatcgtgctctctgttgttatgacgcagctatagtagagtagagacctaaaaatgtagtcttgcttcaagttacttttgtaatagctgggtacttcgttatcccacggaaccagttggaagtaatgaaatcttaaccttctcctgtgtatagtgtctttttttgtgctgacgacatgcggtcaaacagtacgttttctttttttcttttgtgaatgatgagtgaatatggtgaaatattaccaacatgtttggtttgatgaatgaggtagtctatcatcttcttacttactttcttgtttggttttggtttgtggaatagacttataatacatcccctcatttaggatggattgttttttccaaccaaacacactatacatctccttttctttttggtcaatggtgattgagaacgtgatgaaatcatgaaactatcagatgtaagcaactggaaagccttccggagttacgaggaagaggaaggcattgttttttctgtatgcatctccgttctcagtgacgcatatgtcgccggcctcccccttatcgccagcttcttcatgcgcgcctcacctgacgatgtgatcctctcctcttctacccatgccgatctgcgctccgcgctgacgcccatgcccacgaatcgactagtccgagggtctccgctgccggccctgcgagtctacgctaccggacaagtcgtcacgacgcactgctcggccttggcgttcgctgcgagtgcggccgcctggccgacgaccggaaggcatttgatagaatgctgcaccgagacgtggtcgccaggaccgccgtgatgtccgcgcgtcgccacgcggaatgggtctgcgattgcacggtgcccatggcctgtacggtgctcggtggtactggacctggtgttcatggggtaggtctaagttttcactttgcatgtggaacccaacgggatctcttctgtagggtttctgtcagcttctagtcgtgtggtgtgggctactcgatgaatgaactacttttactttatactag

SEQ ID NO: 32896 - DNA, 2743 bp, Zea Mays
ctctgctccaaataactccttccctcgacctccccgaacccgaactcctctcaggtcgagcctagggttagggtttcgtccctccggccccgattcgaaccaatccgcctcggcctccgccgcgccatggccgccggctccatcgtggtggacttcccttccatgggcgccgccctctgcttccccagcctcgattcactcctccgcgactccgcctcgggcttcctcgctgccgtctccaacgccccagcccccggcgcagccgacctcaccaactttcaccgcgtcttctcgcgcgtcctcagcgcctacccggacccaccgctcgaggctgtctggttcttctccgcgctctccttccacgaccgtcccgacgacctccgctccctgctccagctcctctccgccttcaccgcctcctcgcccggcaccgccaagccgcttgcccttctcgcccctgtcgtttccgagctcttccacgccgacaagccgcgcagggagaccgagaccctcgttgaggccgtcctcagctacatcagcatctgcagcaaccgctctgccccctcttcgaccgtgggcgccaccgcagacgctgtgagcctgctgccggcctttggggagctcgtcaaagtgtggagcgtgcgctactcgagggagaggtgcccgttccaagtgctgttcccgctcgctggggacgaggccaggcgggagctcatgaaggaaggctgcagcgttgactacctcgccggggtggtgctggctgaggcgttccttctcaggctctgcctcaaggtgcagaatgcaacaggggtgcctcgctctgagctgcagaaggagctcaagatctgggcagtcagctccatcccggtcttccagaaccaccgattcttcggaggaaaggtgatcaagggagagcagtgtcatttatcaatgctttctcaacctcaaatgttcccaattttctcatcaagtgggctacttttcaagctggctctggtgcactcagcaaaccaattgccaatacaccgcaatctattattaagtggcttgtcgaccttgaagtcaaggggctcaaagtgtttggagactacagttcttgtattatggagaggtttgcttatgatggggtcaagaatggccatgggaacatgattcattcagatgcggaccttttcttttttgataagcagagtggtagggagtttatggacaccaaaggcagcgaggatgaagctgtggatgagatggagactgcaggtaataatgcttttatggctgctgcccagtcaatgaagggggtgactgacggcatgaggaagaggaagagctgcggatacgaagatgcaacagctgtgaagtttgtgaagtacaaggttgaagacagctcgctgaaggactacctatcagcagctaatggcataagcagtggcagtgaggtagagaacccgcagtctgatgatgagatggaagaatcaaactgatgcatagaaacgagatcacccgctaatgcttactttggacagttgcttttgagagttccttggacagccgcctttttttggagccaggaccagtcttgtttcagctgccgcttgttaatgatgccgtgcagaatccgcaagacggccccatctccagctaggcattcggatgtagtagtaaccgttagctgaccatacttgacatggagcatatgatgtttgctatgggccatatcgtgctctctgttgttatgacgcagctatagtagagtagagacctaaaaatgtagtcttgcttcaagttacttttgtaatagctgggtacttcgttatcccacggaaccagttggaagtaatgaaatcttaaccttctcctgtgtatagtgtctttttttgtgctgacgacatgcggtcaaacagtacgttttctttttttcttttgtgaatgatgagtgaatatggtgaaatattaccaacatgtttggtttgatgaatgaggtagtctatcatcttcttacttactttcttgtttggttttggtttgtggaatagacttataatacatcccctcatttaggatggattgttttttccaaccaaacacactatacatctccttttctttttggtcaatggtgattgagaacgtgatgaaatcatgaaactatcagatgtaagcaactggaaagccttccggagttacgaggaagaggaaggcattgttttttctgtatgcatctccgttctcagtgacgcatatgtcgccggcctcccccttatcgccagcttcttcatgcgcgcctcacctgacgatgtgatcctctcctcttctacccatgccgatctgcgctccgcgctgacgcccatgcccacgaatcgactagtccgagggtctccgctgccggccctgcgagtctacgctaccggacaagtcgtcacgacgcactgctcggccttggcgttcgctgcgagtgcggccgcctggccgacgaccggaaggcatttgatagaatgctgcaccgagacgtggtcgccaggaccgccgtgatgtccgcgcgtcgccacgcggaatgggtctgcgattgcacggtgcccatggcctgtacggtgctcggtggtactggacctggtgttcatggggtaggtctaagttttcactttgcatgtggaacccaacgggatctcttctgtagggtttctgtcagcttctagtcgtgtggtgtgggctactcgatgaatgaactacttttactttatactag

SEQ ID NO: 32897 - DNA, 3173 bp, Zea Mays
ccttccctcgacctccccgaacccgaactcctctcaggtcgagcctagggttagggtttcgtccctccggccccgattcgaaccaatccgcctcggcctccgccgcgccatggccgccggctccatcgtggtggacttcccttccatgggcgccgccctctgcttccccagcctcgattcactcctccgcgactccgcctcgggcttcctcgctgccgtctccaacgccccagcccccggcgcagccgacctcaccaactttcaccgcgtcttctcgcgcgtcctcagcgcctacccggacccaccgctcgaggctgtctggttcttctccgcgctctccttccacgaccgtcccgacgacctccgctccctgctccagctcctctccgccttcaccgcctcctcgcccggcaccgccaagccgcttgcccttctcgcccctgtcgtttccgagctcttccacgccgacaagccgcgcagggagaccgagaccctcgttgaggccgtcctcagctacatcagcatctgcagcaaccgctctgccccctcttcgaccgtgggcgccaccgcagacgctgtgagcctgctgccggcctttggggagctcgtcaaagtgtggagcgtgcgctactcgagggagaggtgcccgttccaagtgctgttcccgctcgctggggacgaggccaggcgggagctcatgaaggaaggctgcagcgttgactacctcgccggggtggtgctggctgaggcgttccttctcaggctctgcctcaaggtgcagaatgcaacaggggtgcctcgctctgagctgcagaaggagctcaagatctgggcagtcagctccatcccggtcttccagaaccaccgattcttcggggtcttgctgaacatgctcttgaactctccactgcctgtttactctctagtggtatgtgtttcctgactaatgagcaattagagaacatgacttagcaagctagtattattgtgaatccactagttattatctaagttataagagtattaattaagcattcacaaggcatgtggtacttgtatggaccattgttattgtagcattttgctgtcatcatatgcaaggagcatgacttaagttggagttaatgactcatctttgtgacatgcaaacaggttgaagcctgatctgtgagcgctgatgatgaaatcttgttgagagatgtcctttatgattctcttatcctggtggactattctttcattaacaatggtgttggagttgatcttttgcctatatacgtgttgagattggttatcactcttgatgctgtcaatgatgccaggaggaaaggtgatcaagggagagcagtgtcatttatcaatgctttctcaacctcaaatgttcccaattttctcatcaagtgggctacttttcaagctggctctggtgcactcagcaaaccaattgccaatacaccgcaatctattattaagtggcttgtcgaccttgaagtcaaggggctcaaagtgtttggagactacagttcttgtattatggagaggtttgcttatgatggggtcaagaatggccatgggaacatgattcattcagatgcggaccttttcttttttgataagcagagtggtagggagtttatggacaccaaaggcagcgaggatgaagctgtggatgagatggagactgcaggtaataatgcttttatggctgctgcccagtcaatgaagggggtgactgacggcatgaggaagaggaagagctgcggatacgaagatgcaacagctgtgaagtttgtgaagtacaaggttgaagacagctcgctgaaggactacctatcagcagctaatggcataagcagtggcagtgaggtagagaacccgcagtctgatgatgagatggaagaatcaaactgatgcatagaaacgagatcacccgctaatgcttactttggacagttgcttttgagagttccttggacagccgcctttttttggagccaggaccagtcttgtttcagctgccgcttgttaatgatgccgtgcagaatccgcaagacggccccatctccagctaggcattcggatgtagtagtaaccgttagctgaccatacttgacatggagcatatgatgtttgctatgggccatatcgtgctctctgttgttatgacgcagctatagtagagtagagacctaaaaatgtagtcttgcttcaagttacttttgtaatagctgggtacttcgttatcccacggaaccagttggaagtaatgaaatcttaaccttctcctgtgtatagtgtctttttttgtgctgacgacatgcggtcaaacagtacgttttctttttttcttttgtgaatgatgagtgaatatggtgaaatattaccaacatgtttggtttgatgaatgaggtagtctatcatcttcttacttactttcttgtttggttttggtttgtggaatagacttataatacatcccctcatttaggatggattgttttttccaaccaaacacactatacatctccttttctttttggtcaatggtgattgagaacgtgatgaaatcatgaaactatcagatgtaagcaactggaaagccttccggagttacgaggaagaggaaggcattgttttttctgtatgcatctccgttctcagtgacgcatatgtcgccggcctcccccttatcgccagcttcttcatgcgcgcctcacctgacgatgtgatcctctcctcttctacccatgccgatctgcgctccgcgctgacgcccatgcccacgaatcgactagtccgagggtctccgctgccggccctgcgagtctacgctaccggacaagtcgtcacgacgcactgctcggccttggcgttcgctgcgagtgcggccgcctggccgacgaccggaaggcatttgatagaatgctgcaccgagacgtggtcgccaggaccgccgtgatgtccgcgcgtcgccacgcggaatgggtctgcgattgcacggtgcccatggcctgtacggtgctcggtggtactggacctggtgttcatggggtaggtctaagttttcactttgcatgtggaacccaacgggatctcttctgtagggtttctgtcagcttctagtcgtgtggtgtgggctactcgatgaatgaactacttttactttatactag

SEQ ID NO: 32898 - DNA, 2844 bp, Zea Mays
ctcgacctccccgaacccgaactcctctcaggtcgagcctagggttagggtttcgtccctccggccccgattcgaaccaatccgcctcggcctccgccgcgccatggccgccggctccatcgtggtggacttcccttccatgggcgccgccctctgcttccccagcctcgattcactcctccgcgactccgcctcgggcttcctcgctgccgtctccaacgccccagcccccggcgcagccgacctcaccaactttcaccgcgtcttctcgcgcgtcctcagcgcctacccggacccaccgctcgaggctgtctggttcttctccgcgctctccttccacgaccgtcccgacgacctccgctccctgctccagctcctctccgccttcaccgcctcctcgcccggcaccgccaagccgcttgcccttctcgcccctgtcgtttccgagctcttccacgccgacaagccgcgcagggagaccgagaccctcgttgaggccgtcctcagctacatcagcatctgcagcaaccgctctgccccctcttcgaccgtgggcgccaccgcagacgctgtgagcctgctgccggcctttggggagctcgtcaaagtgtggagcgtgcgctactcgagggagaggtgcccgttccaagtgctgttcccgctcgctggggacgaggccaggcgggagctcatgaaggaaggctgcagcgttgactacctcgccggggtggtgctggctgaggcgttccttctcaggctctgcctcaaggtgcagaatgcaacaggggtgcctcgctctgagctgcagaaggagctcaagatctgggcagtcagctccatcccggtcttccagaaccaccgattcttcggggtcttgctgaacatgctcttgaactctccactgcctgtttactctctagtggtgatgaggagttattgtaatcaaaacttagctggggtggaaatatcttctcatttcatttcttctgacaggaggaaaggtgatcaagggagagcagtgtcatttatcaatgctttctcaacctcaaatgttcccaattttctcatcaagtgggctacttttcaagctggctctggtgcactcagcaaaccaattgccaatacaccgcaatctattattaagtggcttgtcgaccttgaagtcaaggggctcaaagtgtttggagactacagttcttgtattatggagaggtttgcttatgatggggtcaagaatggccatgggaacatgattcattcagatgcggaccttttcttttttgataagcagagtggtagggagtttatggacaccaaaggcagcgaggatgaagctgtggatgagatggagactgcaggtaataatgcttttatggctgctgcccagtcaatgaagggggtgactgacggcatgaggaagaggaagagctgcggatacgaagatgcaacagctgtgaagtttgtgaagtacaaggttgaagacagctcgctgaaggactacctatcagcagctaatggcataagcagtggcagtgaggtagagaacccgcagtctgatgatgagatggaagaatcaaactgatgcatagaaacgagatcacccgctaatgcttactttggacagttgcttttgagagttccttggacagccgcctttttttggagccaggaccagtcttgtttcagctgccgcttgttaatgatgccgtgcagaatccgcaagacggccccatctccagctaggcattcggatgtagtagtaaccgttagctgaccatacttgacatggagcatatgatgtttgctatgggccatatcgtgctctctgttgttatgacgcagctatagtagagtagagacctaaaaatgtagtcttgcttcaagttacttttgtaatagctgggtacttcgttatcccacggaaccagttggaagtaatgaaatcttaaccttctcctgtgtatagtgtctttttttgtgctgacgacatgcggtcaaacagtacgttttctttttttcttttgtgaatgatgagtgaatatggtgaaatattaccaacatgtttggtttgatgaatgaggtagtctatcatcttcttacttactttcttgtttggttttggtttgtggaatagacttataatacatcccctcatttaggatggattgttttttccaaccaaacacactatacatctccttttctttttggtcaatggtgattgagaacgtgatgaaatcatgaaactatcagatgtaagcaactggaaagccttccggagttacgaggaagaggaaggcattgttttttctgtatgcatctccgttctcagtgacgcatatgtcgccggcctcccccttatcgccagcttcttcatgcgcgcctcacctgacgatgtgatcctctcctcttctacccatgccgatctgcgctccgcgctgacgcccatgcccacgaatcgactagtccgagggtctccgctgccggccctgcgagtctacgctaccggacaagtcgtcacgacgcactgctcggccttggcgttcgctgcgagtgcggccgcctggccgacgaccggaaggcatttgatagaatgctgcaccgagacgtggtcgccaggaccgccgtgatgtccgcgcgtcgccacgcggaatgggtctgcgattgcacggtgcccatggcctgtacggtgctcggtggtactggacctggtgttcatggggtaggtctaagttttcactttgcatgtggaacccaacgggatctcttctgtagggtttctgtcagcttctagtcgtgtggtgtgggctactcgatgaatgaactacttttactttatactag

SEQ ID NO: 32899 - DNA, 5382 bp, Zea Mays
ggaaagacggaagggcgaagatggtacttccgcggtcgacggcaatgggggctgtgcgctgtggtggtggtcgtggagtcaggaggtggaagaggtagtacaagttagcgcggagccatgaggttttaattgcaatcggcgcacttgtctctttaatggccactgcttccaacgcctctgtcccggcttccacgcgttcgcagtgagggctagggtttccccgcgtcccgtcgccgtcgccgtcgctctgcaaggtggagagggtgctgcactgctgctgccgtcggtggcggttggaggctggagctcgttcgtcgctgtcgcttccccggcattactggttgtcttgaagaagaagatgatggtgggctcttcccgccaccagctgctgcagaggaaggggaagtccgtggctgacaagggcgccgccgccgccgccgccactgtggcggcagagaaggtggtggtcgcggtgagggcagccacgagggagatctccaagacggccatcatctgggcgctcacgcatgtcgtgcagccaggcggaagcatcatacttcttgtcgtcatcccggcacacagctctggcagaaagttctggggctttccgctgttcgctggagactgtgcaagtggccataagtctatgttggatcagaaatgtgatttatcagagttgtgttctcaaatgttgaagaaaattgatgtgtatgacatagacaagataaatgtgaggtataagcttgtttccggctctccttctggtgttgtagctgctgagtgcaagcaagcacaggcaagctgggttgtgctagacaaggatttgaagcatgaggagaagcgttgtgtggaggagcttcagtgcaacattgttgttatgaagcgatctcagcctaaagtccttcgacttaatcttgtgggatctcctgataaagagtctaaagcaacatgtgcagttccacctgtgctagatggttctaccagtaaaattgcaactgatgttaaggaagcacggagttcaattcgaggacctgttgtaaccccaaatagcagcccagacctggagacacctttcggaagtactgaagcgggaacttcctctgtctcgagttcagaccctgggacatctccgttttctgcttctgaaacaaatggttctctgaagaaagaggtgcaacaaacaaaggataaaattcagcattcagatgctaatatttctgattcagacagtgaaacattgagccctccagcaaatttctcacttcagccatggatgtctgatattctacagggaccagcatcgtcaagatcacttggaaaagttccacgaaaaaatcgcactgcaactgcagatgttttgttggaaaagttttccaagctggatctcctgaatgaaattaatgctatgagaagcaggtcagacttaaacttccgaggagatgtcagggatgttgttttgttggcaaggaatgcacctcctggaccacctccgctttgttcaatatgtcagcacaaggcacctgtttttggaaagcctcctcgctggtttagttatgctgaactggaacttgcaactggtggtttctcacaagcaaacttcttagctgaaggtggatttgggtctgttcatcgaggtgtccttcctgatggccaggctattgctgttaagcaacacaagcttgctagttcccagggtgatgttgagttctgctcagaggtggaagttcttagttgtgcacaacatcgaaatgttgtaatgctgataggtttttgcgttgaggacagaaggcgtttattggtttacgagtacatctgcaatagatctttggattcacatctctatggtcataatcgagaaacattggagtggactgcacgacaaaagattgcagttggtgctgctcgtgggctgcggtaccttcacgaggaatgtagggttggctgcataatccatcgtgacatgagaccaaacaacatccttgtcacacatgatttcgaaccactggttggagatttcggcctggcgcgatggcaacccgatggagacatgggcgttgaaacaagagttatcggcacattcggctatctggctcctgaatatgcacagagtgggcaaataacagagaaggctgatgtatactctttcggggttgtgttagtggaacttgtcactgggcggaaggctgttgacattaaccgaccaaagggtcagcagttactaactgaatgggcacgcccattcttggaggagtatgcaattgacgagctcatagacccacgactcggagagcgctactctgaaaatgaggtgtactgcatgctgcacgcggcaaacttgtgcataagacgcgacccacattcaaggcctcgcatgtcccatgttcttcgcattcttgagggtgacatggtcgtggaatctggtggttctgttactggcagtagtgattctgggagcagaagctggaggatgctgaacgaacagcaacattgccaggagtacagtagcccggctcaacaagagtcgcaaagggcaggcgaggggaaacgctcctacagtgccttgagggcctcttgggaccgagacaagcagagtatctccaacagatattagtgccgtctcataatgcagtgcagctgagattgtttagtcctgtattattccttcgccctacctcccggtctcaattttttttggcttgctcttttgtcttcacttcgtagcaatttgtaggccgaaagcttttgctgatacattgccctggtgtatagtagaaatgggtaatttcctatattacaaagccggttggaaaacggcgttgattaaggtatccacgtcacctcatttgatatcagccgtatgatctagatctactggatacgagccatcttgctcccacctgccgccagccgcctccacataaatatttttttcctgaatctccacactaccagagtcttccagcggcttcctctccctcctcagattcctctcctcgcgttctccctcgctaccacgcttgcgtgaatgccctcaccgcctctccccgtgctcgcccaaatcaccgcctctccctccctgtcgcccctgcgccacggtggttcacgcctttgaagtcacctcactcatcctgccgatgcagtcacccacaccgcctcctcccctccgctcaagccgcaccgcgatagctacacgccgcgacatcagctgccagcagcgccccccctaacaacgtcgcggcgtcctcgtgggctaaccccctccatcacttcttctcgccgggagctccatccaccttctccagcacccccacccccgctcaaatggtgtcagaaggtacgggaaccaatgggtttgaaggctgttcttatggaatataatgagctagccattaaaccacggaaggtacacatcattttctcattataagttatcttatattgtacaaagacacttcatgttgcccacagtttatgtcgtcatgggctcatggcttggccacattatcacgttcataatgcatgagcgttgatcagctactcaactggcatctatacctgcaactatgatcgcttgatttatttacctaattatttgaaccgttcctagggctgagagaaaattgggaggtggaagagatgcgctcaccaatcatctctgcgagagaaagcagtgccacatgggcccagcaatagcagcgtcacatggtggtggccatcgtcacgtcgagctagagatgtcaatgggtaattccccatcgggttatagcatcccagacccatccccatcatgtttgatacatccccatacccatacccatacccatcatgggtacaaaactcatcccatacccatctccattcgggtttcgggtccccaatgggtccccatccccaattaaggaataactaggtactaacatctagcacaaactatccagatttcatacatcaccacatcggcaagcactcatccacgaactattgtccattcatccattcatcagaagagaaatcagtacttgggaccaatataagaaatggagtctgccgggtttgatggccgactcggcctcaactcattcatacaaacaggacatgtgtacgcatatgaaataaccatgggtaatcgggttcggattattgcttcccaaacccatacccgtttacccaatgggtggagattttgtcccatatccatacccatggggacaatttttgtcccatacccgtaccctaataggggaattccccatgggttatcgggtatcgggtccccattgacatctctacgtcgagctctccctctccaccaactaacagttcctgacagtggagcagaaattcattaagagcatatagggattcacaagtgattttgagcccaacaatctcgctgccaccgatactcctggttcgtatatttggttactcaaaacatgagatgatcctctgaagtagaaagggaaacactgaatacgctcttgctgaaatattctatagaaagacacaattccattttggcagatgcaagtgaaagatctacagggaaggtatcttttgttcttatattttggttgcttaacaaataccttacgtagaaactataatcttctctctaatcatatcttagtggaaagtttattcttccattgaacatcccactgagtgtaatacatatgcagaaattggggtagcatataaccgccgcaagggaaaatatggtgtagcagatgaggatataatcttatatggtcaatgtgtttgaattggtccaaccattgatattgcttcacggttgctagacttgagagtcgcggttttgcatagtcctatattttatctgcactaagagtaatatatacagccaagcagacgtttggtttaacatttacaaggtatgtttggtacttttgtttttttggaattaatggttgtccgatgcttgtcattcatatgagttctaatatcatgcccccttaaagtactcatcatcaaaagtttccatgtgaatgttttaaatgtatatttaaagggttggaagacatcagactgttattcaaacaggatcttaagtgtcgtgaaagactacaagtgaggttcaacttggcaaattatttttccagtaactaaggagcaacaattttatgtattttagcttgacatatgaatctaggtacttacatttttggaatcgggcaaacagtgatagtttgaatcacatgttttgccaaaaggaattattagaactgttcaaagttggaaaaaatacatatttatgttttcttatgcatggataaattgctctgttcatatataaaaaaataactgtagtattattgcttatattgattttaaatgatgaccttattagatgtgccatcg

SEQ ID NO: 32900 - DNA, 6498 bp, Zea Mays
gaaagacggaagggcgaagatggtacttccgcggtcgacggcaatgggggctgtgcgctgtggtggtggtcgtggagtcaggaggtggaagagtgagggctagggtttccccgcgtcccgtcgccgtcgccgtcgctctgcaaggtggagagggtgctgcactgctgctgccgtcggtggcggttggaggctggagctcgttcgtcgctgtcgcttccccggcattactggttgtcttgaagaagaagatgatggtgggctcttcccgccaccagctgctgcagaggaaggggaagtccgtggctgacaagggcgccgccgccgccgccgccactgtggcggcagagaaggtggtggtcgcggtgagggcagccacgagggagatctccaagacggccatcatctgggcgctcacgcatgtcgtgcagccaggcggaagcatcatacttcttgtcgtcatcccggcacacagctctggcagaaagttctggggctttccgctgttcgctggagactgtgcaagtggccataagtctatgttggatcagaaatgtgatttatcagagttgtgttctcaaatgttgaagaaaattgatgtgtatgacatagacaagataaatgtgaggtataagcttgtttccggctctccttctggtgttgtagctgctgagtgcaagcaagcacaggcaagctgggttgtgctagacaaggatttgaagcatgaggagaagcgttgtgtggaggagcttcagtgcaacattgttgttatgaagcgatctcagcctaaagtccttcgacttaatcttgtgggatctcctgataaagagtctaaagcaacatgtgcagttccacctgtgctagatggttctaccagtaaaattgcaactgatgttaaggaagcacggagttcaattcgaggacctgttgtaaccccaaatagcagcccagacctggagacacctttcggaagtactgaagcgggaacttcctctgtctcgagttcagaccctgggacatctccgttttctgcttctgaaacaaatggttctctgaagaaagaggtgcaacaaacaaaggataaaattcagcattcagatgctaatatttctgattcagacagtgaaacattgagccctccagcaaatttctcacttcagccatggatgtctgatattctacagggaccagcatcgtcaagatcacttggaaaagttccacgaaaaaatcgcactgcaactgcagatgttttgttggaaaagttttccaagctggatctcctgaatgaaattaatgctatgagaagcaggtcagacttaaacttccgaggagatgtcagggatgttgttttgttggcaaggaatgcacctcctggaccacctccgctttgttcaatatgtcagcacaaggcacctgtttttggaaagcctcctcgctggtttagttatgctgaactggaacttgcaactggtggtttctcacaagcaaacttcttagctgaaggtggatttgggtctgttcatcgaggtgtccttcctgatggccaggctattgctgttaagcaacacaagcttgctagttcccagggtgatgttgagttctgctcagaggtggaagttcttagttgtgcacaacatcgaaatgttgtaatgctgataggtttttgcgttgaggacagaaggcgtttattggtttacgagtacatctgcaatagatctttggattcacatctctatggtcataatcgagaaacattggagtggactgcacgacaaaagattgcagttggtgctgctcgtgggctgcggtaccttcacgaggaatgtagggttggctgcataatccatcgtgacatgagaccaaacaacatccttgtcacacatgatttcgaaccactggttggagatttcggcctggcgcgatggcaacccgatggagacatgggcgttgaaacaagagttatcggcacattcggctatctggctcctgaatatgcacagagtgggcaaataacagagaaggctgatgtatactctttcggggttgtgttagtggaacttgtcactgggcggaaggctgttgacattaaccgaccaaagggtcagcagttactaactgaatgggcacgcccattcttggaggagtatgcaattgacgagctcatagacccacgactcggagagcgctactctgaaaatgaggtgtactgcatgctgcacgcggcaaacttgtgcataagacgcgacccacattcaaggcctcgcatgtcccatgttcttcgcattcttgagggtgacatggtcgtggaatctggtggttctgttactggcagtagtgattctgggagcagaagctggaggatgctgaacgaacagcaacattgccaggagtacagtagcccggctcaacaagagtcgcaaagggcaggcgaggggaaacgctcctacagtgccttgagggcctcttgggaccgagacaagcagagtatctccaacagatattagtgccgtctcataatgcagtgcagctgagattgtttagtcctgtattattccttcgccctacctcccggtctcaattttttttggcttgctcttttgtcttcacttcgtagcaatttgtaggccgaaagcttttgctgatacattgccctggtgtatagtagaaatgggtaatttcctatattacaaagccggttggaaaacggcgttgattaaggtatccacgtcacctcatttgatatcagccgtatgatctagatctactggatacgagccatcttgctcccacctgccgccagccgcctccacataaatatttttttcctgaatctccacactaccagagtcttccagcggcttcctctccctcctcagattcctctcctcgcgttctccctcgctaccacgcttgcgtgaatgccctcaccgcctctccccgtgctcgcccaaatcaccgcctctccctccctgtcgcccctgcgccacggtggttcacgcctttgaagtcacctcactcatcctgccgatgcagtcacccacaccgcctcctcccctccgctcaagccgcaccgcgatagctacacgccgcgacatcagctgccagcagcgccccccctaacaacgtcgcggcgtcctcgtgggctaaccccctccatcacttcttctcgccgggagctccatccaccttctccagcacccccacccccgctcaaatggtgtcagaaggtacgggaaccaatgggtttgaaggctgttcttatggaatataatgagctagccattaaaccacggaaggtacacatcattttctcattataagttatcttatattgtacaaagacacttcatgttgcccacagtttatgtcgtcatgggctcatggcttggccacattatcacgttcataatgcatgagcgttgatcagctactcaactggcatctatacctgcaactatgatcgcttgatttatttacctaattatttgaaccgttcctagggctgagagaaaattgggaggtggaagagatgcgctcaccaatcatctctgcgagagaaagcagtggtattttcctaaacaaagagataaaagaagaatagaccatgtcgctgcctcatttatcggatacttaggggctcctgcagtcctgctccgtcagaccgtcaccttcaaagtcaataagattctagcttaaatttgggagatgcatataaagtaccttgcttttatgcaaccaatttgcatttttctctattggttttgtcattgtattttgtttttgctgttttaactaactcccatgtgttaaaaaacatggcagtgaaagtaccttgcttttatgcaactaatttacattttctcaattggtttttgtcatggcagcatatagctcaaatattagttatcctttttcagacatatggacattagacttactactatcaggatcaaaacatatgcatatcattaggcaggaataaggaatatgtgactactatcgacacttttatgtattttagcttgacatatgaatctaggtacttacatttttggaatcgggcaaacagcgatagtttgaatcacatgttttgccaaaaggaattattagaactgttcaaagttggaaaaaaatacatatttatgttttcttatgcacgggtaaattgctctgttcatatataaaaaaataactgtagtattattgcttatattgattttaaatgatgaccttattagatgtgccatcgagaccacatatattagcattttgtgactagaaatacaatgcatgaatatatatagataacctttacatcgtgctacatgctttcgggaaataaggaaccattacaacatatatatttttatgatgtacaatttcgtcatcggatataccatgtgcatatgtgcagtaacccattatgcttttgtttgtgtatacaacaagttacgcatcaacatacatggacaaaatcaaacaagataataaaccgttttgtcataaattattcttcagaataaaaaatgtttaagaactgtataagcacacctacaattagcaacctctgaagatttgtatgaactaatatttatgtgtaaccatgacaacatcacacgttagacccttgaaagaagccatatcatgtttccaaatattaggctaaatgtctgaataaaagaagaaaaaacactaggtgcagtttttgctaagatagtgccgacgaggaaacaacagacacattgtaagtgattcttgcagtaccaatattcccatgaacttattactaaagaagatgtctttgtgatggtacatttgtccatatttcttaatcatatatatggcacactatacattttccctcccggtgttttggaatccttatttgtggtactaataagtagcattctaatctgcgtatggttgttttgttacaaagtcatattctgtcactataatttattagagagaaaaatgtttggttgcacaattacaagcttgctttgtttgattctattctacctgcagcgcagccacatgggcccagcaatagcagcgtcacatggtggtggccatcgtcacgtcgagctagagatgtcaatgggtaattccccatcgggttatagcatcccagacccatccccatcatgtttgatacatccccatacccatacccatacccatcatggatttcatacatcaccacatcggcaagcactcatccacgaactattgtccattcatccattcatcagaagagaaatcagtacttgggaccaatataagaaatggagtctgccgggtttgatggccgactcggcctcaactcattcatacaaacaggacatgtgtacgcatatgaaataaccatgggtaatcgggttcggattattgcttcccaaacccatacccgtttacccaatgggtggagattttgtcccatatccatacccatggggacaatttttgtcccatacccgtaccctaataggggaattccccatgggttatcgggtatcgggtccccattgacatctctacgtcgagctctccctctccaccaactaacagttcctgacagtggagcagaaattcattaagagcatatagggattcacaagtgattttgagcccaacaatctcgctgccaccgatactcctggttcgtatatttggttactcaaaacatgagatgatcctctgaagtagaaagggaaacactgaatacgctcttgctgaaatattctatagaaagacacaattccattttggcagatgcaagtgaaagatctacagggaagaaattggggtagcatataaccgccgcaagggaaaatatggtgtagcagatgaggatataatcttatatggtcaatgtgtttgaattggtccaaccattgatattgcttcacggttgctagacttgagagtcgcggttttgcatagtcctatattttatctgcactaagagtaatatatacagccaagcagacgtttggtttaacatttacaaggtatgtttggtacttttgtttttttggaattaatggttgtccgatgcttgtcattcatatgagttctaatatcatgcccccttaaagtactcatcatcaaaagtttccatgtgaatgttttaaatgtatatttaaagggttggaagacatcagactgttattcaaacaggatcttaagtgtcgtgaaagactacaagtgaggttcaacttggcaaattatttttccagtaactaaggagcaacaattttatgtattttagcttgacatatgaatctaggtacttacatttttggaatcgggcaaacagtgatagtttgaatcacatgttttgccaaaaggaattattagaactgttcaaagttggaaaaaatacatatttatgttttcttatgcatggataaattgctctgttcatatataaaaaaataactgtagtattattgcttatattgattttaaatgatgaccttattagatgtgccatcg

SEQ ID NO: 32901 - DNA, 5296 bp, Zea Mays
gaaagacggaagggcgaagatggtacttccgcggtcgacggcaatgggggctgtgcgctgtggtggtggtcgtggagtcaggaggtggaagaggtagtacaagttagcgcggagccatgaggttttaattgcaatcggcgcacttgtctctttaatggccactgcttccaacgcctctgtcccggcttccacgcgttcgcagtgagggctagggtttccccgcgtcccgtcgccgtcgccgtcgctctgcaaggtggagagggtgctgcactgctgctgccgtcggtggcggttggaggctggagctcgttcgtcgctgtcgcttccccggcattactggttgtcttgaagaagaagatgatggtgggctcttcccgccaccagctgctgcagaggaaggggaagtccgtggctgacaagggcgccgccgccgccgccgccactgtggcggcagagaaggtggtggtcgcggtgagggcagccacgagggagatctccaagacggccatcatctgggcgctcacgcatgtcgtgcagccaggcggaagcatcatacttcttgtcgtcatcccggcacacagctctggcagaaagttctggggctttccgctgttcgctggagactgtgcaagtggccataagtctatgttggatcagaaatgtgatttatcagagttgtgttctcaaatgttgaagaaaattgatgtgtatgacatagacaagataaatgtgaggtataagcttgtttccggctctccttctggtgttgtagctgctgagtgcaagcaagcacaggcaagctgggttgtgctagacaaggatttgaagcatgaggagaagcgttgtgtggaggagcttcagtgcaacattgttgttatgaagcgatctcagcctaaagtccttcgacttaatcttgtgggatctcctgataaagagtctaaagcaacatgtgcagttccacctgtgctagatggttctaccagtaaaattgcaactgatgttaaggaagcacggagttcaattcgaggacctgttgtaaccccaaatagcagcccagacctggagacacctttcggaagtactgaagcgggaacttcctctgtctcgagttcagaccctgggacatctccgttttctgcttctgaaacaaatggttctctgaagaaagaggtgcaacaaacaaaggataaaattcagcattcagatgctaatatttctgattcagacagtgaaacattgagccctccagcaaatttctcacttcagccatggatgtctgatattctacagggaccagcatcgtcaagatcacttggaaaagttccacgaaaaaatcgcactgcaactgcagatgttttgttggaaaagttttccaagctggatctcctgaatgaaattaatgctatgagaagcaggtcagacttaaacttccgaggagatgtcagggatgttgttttgttggcaaggaatgcacctcctggaccacctccgctttgttcaatatgtcagcacaaggcacctgtttttggaaagcctcctcgctggtttagttatgctgaactggaacttgcaactggtggtttctcacaagcaaacttcttagctgaaggtggatttgggtctgttcatcgaggtgtccttcctgatggccaggctattgctgttaagcaacacaagcttgctagttcccagggtgatgttgagttctgctcagaggtggaagttcttagttgtgcacaacatcgaaatgttgtaatgctgataggtttttgcgttgaggacagaaggcgtttattggtttacgagtacatctgcaatagatctttggattcacatctctatggtcataatcgagaaacattggagtggactgcacgacaaaagattgcagttggtgctgctcgtgggctgcggtaccttcacgaggaatgtagggttggctgcataatccatcgtgacatgagaccaaacaacatccttgtcacacatgatttcgaaccactggttggagatttcggcctggcgcgatggcaacccgatggagacatgggcgttgaaacaagagttatcggcacattcggctatctggctcctgaatatgcacagagtgggcaaataacagagaaggctgatgtatactctttcggggttgtgttagtggaacttgtcactgggcggaaggctgttgacattaaccgaccaaagggtcagcagttactaactgaatgggcacgcccattcttggaggagtatgcaattgacgagctcatagacccacgactcggagagcgctactctgaaaatgaggtgtactgcatgctgcacgcggcaaacttgtgcataagacgcgacccacattcaaggcctcgcatgtcccatgttcttcgcattcttgagggtgacatggtcgtggaatctggtggttctgttactggcagtagtgattctgggagcagaagctggaggatgctgaacgaacagcaacattgccaggagtacagtagcccggctcaacaagagtcgcaaagggcaggcgaggggaaacgctcctacagtgccttgagggcctcttgggaccgagacaagcagagtatctccaacagatattagtgccgtctcataatgcagtgcagctgagattgtttagtcctgtattattccttcgccctacctcccggtctcaattttttttggcttgctcttttgtcttcacttcgtagcaatttgtaggccgaaagcttttgctgatacattgccctggtgtatagtagaaatgggtaatttcctatattacaaagccggttggaaaacggcgttgattaaggtatccacgtcacctcatttgatatcagccgtatgatctagatctactggatacgagccatcttgctcccacctgccgccagccgcctccacataaatatttttttcctgaatctccacactaccagagtcttccagcggcttcctctccctcctcagattcctctcctcgcgttctccctcgctaccacgcttgcgtgaatgccctcaccgcctctccccgtgctcgcccaaatcaccgcctctccctccctgtcgcccctgcgccacggtggttcacgcctttgaagtcacctcactcatcctgccgatgcagtcacccacaccgcctcctcccctccgctcaagccgcaccgcgatagctacacgccgcgacatcagctgccagcagcgccccccctaacaacgtcgcggcgtcctcgtgggctaaccccctccatcacttcttctcgccgggagctccatccaccttctccagcacccccacccccgctcaaatggtgtcagaaggtacgggaaccaatgggtttgaaggctgttcttatggaatataatgagctagccattaaaccacggaagggctgagagaaaattgggaggtggaagagatgcgctcaccaatcatctctgcgagagaaagcagtgccacatgggcccagcaatagcagcgtcacatggtggtggccatcgtcacgtcgagctagagatgtcaatgggtaattccccatcgggttatagcatcccagacccatccccatcatgtttgatacatccccatacccatacccatacccatcatgggtacaaaactcatcccatacccatctccattcgggtttcgggtccccaatgggtccccatccccaattaaggaataactaggtactaacatctagcacaaactatccagatttcatacatcaccacatcggcaagcactcatccacgaactattgtccattcatccattcatcagaagagaaatcagtacttgggaccaatataagaaatggagtctgccgggtttgatggccgactcggcctcaactcattcatacaaacaggacatgtgtacgcatatgaaataaccatgggtaatcgggttcggattattgcttcccaaacccatacccgtttacccaatgggtggagattttgtcccatatccatacccatggggacaatttttgtcccatacccgtaccctaataggggaattccccatgggttatcgggtatcgggtccccattgacatctctacgtcgagctctccctctccaccaactaacagttcctgacagtggagcagaaattcattaagagcatatagggattcacaagtggtacatgtattctgcctatctttatttcttagtattatataaactacatactgtatttggagatgcattgtttattctctgcaatcggttaaccctggactgcttgcaactatccccagttacgaaatagtgcttcttttctgtcataacttttcaggcgtccatagtaaatgaaattggtgcatatatttgagttgactaacaatgcgataactaacatgtgatttgtcgattttcctttttactgctagattttgagcccaacaatctcgctgccaccgatactcctggttcgtatatttggttactcaaaacatgagatgatcctctgaagtagaaagggaaacactgaatacgctcttgctgaaatattctatagaaagacacaattccattttggcagatgcaagtgaaagatctacagggaagaaattggggtagcatataaccgccgcaagggaaaatatggtgtagcagatgaggatataatcttatatggtcaatgtgtttgaattggtccaaccattgatattgcttcacggttgctagacttgagagtcgcggttttgcatagtcctatattttatctgcactaagagtaatatatacagccaagcagacgtttggtttaacatttacaaggtatgtttggtacttttgtttttttggaattaatggttgtccgatgcttgtcattcatatgagttctaatatcatgcccccttaaagtactcatcatcaaaagtttccatgtgaatgttttaaatgtatatttaaagggttggaagacatcagactgttattcaaacaggatcttaagtgtcgtgaaagactacaagtgaggttcaacttggcaaattatttttccagtaactaaggagcaacaattttatgtattttagcttgacatatgaatctaggtacttacatttttggaatcgggcaaacagtgatagtttgaatcacatgttttgccaaaaggaattattagaactgttcaaagttggaaaaaatacatatttatgttttcttatgcatggataaattgctctgttcatatataaaaaaataactgtagtattattgcttatattgattttaaatgatgaccttattagatgtgccatcg

SEQ ID NO: 32902 - DNA, 4806 bp, Zea Mays
gaaagacggaagggcgaagatggtacttccgcggtcgacggcaatgggggctgtgcgctgtggtggtggtcgtggagtcaggaggtggaagaggtagtacaagttagcgcggagccatgaggttttaattgcaatcggcgcacttgtctctttaatggccactgcttccaacgcctctgtcccggcttccacgcgttcgcagtgagggctagggtttccccgcgtcccgtcgccgtcgccgtcgctctgcaaggtggagagggtgctgcactgctgctgccgtcggtggcggttggaggctggagctcgttcgtcgctgtcgcttccccggcattactggttgtcttgaagaagaagatgatggtgggctcttcccgccaccagctgctgcagaggaaggggaagtccgtggctgacaagggcgccgccgccgccgccgccactgtggcggcagagaaggtggtggtcgcggtgagggcagccacgagggagatctccaagacggccatcatctgggcgctcacgcatgtcgtgcagccaggcggaagcatcatacttcttgtcgtcatcccggcacacagctctggcagaaagttctggggctttccgctgttcgctggagactgtgcaagtggccataagtctatgttggatcagaaatgtgatttatcagagttgtgttctcaaatgttgaagaaaattgatgtgtatgacatagacaagataaatgtgaggtataagcttgtttccggctctccttctggtgttgtagctgctgagtgcaagcaagcacaggcaagctgggttgtgctagacaaggatttgaagcatgaggagaagcgttgtgtggaggagcttcagtgcaacattgttgttatgaagcgatctcagcctaaagtccttcgacttaatcttgtgggatctcctgataaagagtctaaagcaacatgtgcagttccacctgtgctagatggttctaccagtaaaattgcaactgatgttaaggaagcacggagttcaattcgaggacctgttgtaaccccaaatagcagcccagacctggagacacctttcggaagtactgaagcgggaacttcctctgtctcgagttcagaccctgggacatctccgttttctgcttctgaaacaaatggttctctgaagaaagaggtgcaacaaacaaaggataaaattcagcattcagatgctaatatttctgattcagacagtgaaacattgagccctccagcaaatttctcacttcagccatggatgtctgatattctacagggaccagcatcgtcaagatcacttggaaaagttccacgaaaaaatcgcactgcaactgcagatgttttgttggaaaagttttccaagctggatctcctgaatgaaattaatgctatgagaagcaggtcagacttaaacttccgaggagatgtcagggatgttgttttgttggcaaggaatgcacctcctggaccacctccgctttgttcaatatgtcagcacaaggcacctgtttttggaaagcctcctcgctggtttagttatgctgaactggaacttgcaactggtggtttctcacaagcaaacttcttagctgaaggtggatttgggtctgttcatcgaggtgtccttcctgatggccaggctattgctgttaagcaacacaagcttgctagttcccagggtgatgttgagttctgctcagaggtggaagttcttagttgtgcacaacatcgaaatgttgtaatgctgataggtttttgcgttgaggacagaaggcgtttattggtttacgagtacatctgcaatagatctttggattcacatctctatggtcataatcgagaaacattggagtggactgcacgacaaaagattgcagttggtgctgctcgtgggctgcggtaccttcacgaggaatgtagggttggctgcataatccatcgtgacatgagaccaaacaacatccttgtcacacatgatttcgaaccactggttggagatttcggcctggcgcgatggcaacccgatggagacatgggcgttgaaacaagagttatcggcacattcggctatctggctcctgaatatgcacagagtgggcaaataacagagaaggctgatgtatactctttcggggttgtgttagtggaacttgtcactgggcggaaggctgttgacattaaccgaccaaagggtcagcagttactaactgaatgggcacgcccattcttggaggagtatgcaattgacgagctcatagacccacgactcggagagcgctactctgaaaatgaggtgtactgcatgctgcacgcggcaaacttgtgcataagacgcgacccacattcaaggcctcgcatgtcccatgttcttcgcattcttgagggtgacatggtcgtggaatctggtggttctgttactggcagtagtgattctgggagcagaagctggaggatgctgaacgaacagcaacattgccaggagtacagtagcccggctcaacaagagtcgcaaagggcaggcgaggggaaacgctcctacagtgccttgagggcctcttgggaccgagacaagcagagtatctccaacagatattagtgccgtctcataatgcagtgcagctgagattgtttagtcctgtattattccttcgccctacctcccggtctcaattttttttggcttgctcttttgtcttcacttcgtagcaatttgtaggccgaaagcttttgctgatacattgccctggtgtatagtagaaatgggtaatttcctatattacaaagccggttggaaaacggcgttgattaaggtatccacgtcacctcatttgatatcagccgtatgatctagatctactggatacgagccatcttgctcccacctgccgccagccgcctccacataaatatttttttcctgaatctccacactaccagagtcttccagcggcttcctctccctcctcagattcctctcctcgcgttctccctcgctaccacgcttgcgtgaatgccctcaccgcctctccccgtgctcgcccaaatcaccgcctctccctccctgtcgcccctgcgccacggtggttcacgcctttgaagtcacctcactcatcctgccgatgcagtcacccacaccgcctcctcccctccgctcaagccgcaccgcgatagctacacgccgcgacatcagctgccagcagcgccccccctaacaacgtcgcggcgtcctcgtgggctaaccccctccatcacttcttctcgccgggagctccatccaccttctccagcacccccacccccgctcaaatggtgtcagaagcgcagccacatgggcccagcaatagcagcgtcacatggtggtggccatcgtcacgtcgagctagagatgtcaatgggtaattccccatcgggttatagcatcccagacccatccccatcatgtttgatacatccccatacccatacccatacccatcatggatttcatacatcaccacatcggcaagcactcatccacgaactattgtccattcatccattcatcagaagagaaatcagtacttgggaccaatataagaaatggagtctgccgggtttgatggccgactcggcctcaactcattcatacaaacaggacatgtgtacgcatatgaaataaccatgggtaatcgggttcggattattgcttcccaaacccatacccgtttacccaatgggtggagattttgtcccatatccatacccatggggacaatttttgtcccatacccgtaccctaataggggaattccccatgggttatcgggtatcgggtccccattgacatctctacgtcgagctctccctctccaccaactaacagttcctgacagtggagcagaaattcattaagagcatatagggattcacaagtgattttgagcccaacaatctcgctgccaccgatactcctggttcgtatatttggttactcaaaacatgagatgatcctctgaagtagaaagggaaacactgaatacgctcttgctgaaatattctatagaaagacacaattccattttggcagatgcaagtgaaagatctacagggaagaaattggggtagcatataaccgccgcaagggaaaatatggtgtagcagatgaggatataatcttatatggtcaatgtgtttgaattggtccaaccattgatattgcttcacggttgctagacttgagagtcgcggttttgcatagtcctatattttatctgcactaagagtaatatatacagccaagcagacgtttggtttaacatttacaaggtatgtttggtacttttgtttttttggaattaatggttgtccgatgcttgtcattcatatgagttctaatatcatgcccccttaaagtactcatcatcaaaagtttccatgtgaatgttttaaatgtatatttaaagggttggaagacatcagactgttattcaaacaggatcttaagtgtcgtgaaagactacaagtgaggttcaacttggcaaattatttttccagtaactaaggagcaacaattttatgtattttagcttgacatatgaatctaggtacttacatttttggaatcgggcaaacagtgatagtttgaatcacatgttttgccaaaaggaattattagaactgttcaaagttggaaaaaatacatatttatgttttcttatgcatggataaattgctctgttcatatataaaaaaataactgtagtattattgcttatattgattttaaatgatgaccttattagatgtgccatcg

SEQ ID NO: 32903 - DNA, 2742 bp, Zea Mays
gaaagacggaagggcgaagatggtacttccgcggtcgacggcaatgggggctgtgcgctgtggtggtggtcgtggagtcaggaggtggaagagtgagggctagggtttccccgcgtcccgtcgccgtcgccgtcgctctgcaaggtggagagggtgctgcactgctgctgccgtcggtggcggttggaggctggagctcgttcgtcgctgtcgcttccccggcattactggttgtcttgaagaagaagatgatggtgggctcttcccgccaccagctgctgcagaggaaggggaagtccgtggctgacaagggcgccgccgccgccgccgccactgtggcggcagagaaggtggtggtcgcggtgagggcagccacgagggagatctccaagacggccatcatctgggcgctcacgcatgtcgtgcagccaggcggaagcatcatacttcttgtcgtcatcccggcacacagctctggcagaaagttctggggctttccgctgttcgctggagactgtgcaagtggccataagtctatgttggatcagaaatgtgatttatcagagttgtgttctcaaatgttgaagaaaattgatgtgtatgacatagacaagataaatgtgaggtataagcttgtttccggctctccttctggtgttgtagctgctgagtgcaagcaagcacaggcaagctgggttgtgctagacaaggatttgaagcatgaggagaagcgttgtgtggaggagcttcagtgcaacattgttgttatgaagcgatctcagcctaaagtccttcgacttaatcttgtgggatctcctgataaagagtctaaagcaacatgtgcagttccacctgtgctagatggttctaccagtaaaattgcaactgatgttaaggaagcacggagttcaattcgaggacctgttgtaaccccaaatagcagcccagacctggagacacctttcggaagtactgaagcgggaacttcctctgtctcgagttcagaccctgggacatctccgttttctgcttctgaaacaaatggttctctgaagaaagaggtgcaacaaacaaaggataaaattcagcattcagatgctaatatttctgattcagacagtgaaacattgagccctccagcaaatttctcacttcagccatggatgtctgatattctacagggaccagcatcgtcaagatcacttggaaaagttccacgaaaaaatcgcactgcaactgcagatgttttgttggaaaagttttccaagctggatctcctgaatgaaattaatgctatgagaagcaggtcagacttaaacttccgaggagatgtcagggatgttgttttgttggcaaggaatgcacctcctggaccacctccgctttgttcaatatgtcagcacaaggcacctgtttttggaaagcctcctcgctggtttagttatgctgaactggaacttgcaactggtggtttctcacaagcaaacttcttagctgaaggtggatttgggtctgttcatcgaggtgtccttcctgatggccaggctattgctgttaagcaacacaagcttgctagttcccagggtgatgttgagttctgctcagaggtggaagttcttagttgtgcacaacatcgaaatgttgtaatgctgataggtttttgcgttgaggacagaaggcgtttattggtttacgagtacatctgcaatagatctttggattcacatctctatggtcataatcgagaaacattggagtggactgcacgacaaaagattgcagttggtgctgctcgtgggctgcggtaccttcacgaggaatgtagggttggctgcataatccatcgtgacatgagaccaaacaacatccttgtcacacatgatttcgaaccactggttggagatttcggcctggcgcgatggcaacccgatggagacatgggcgttgaaacaagagttatcggcacattcggctatctggctcctgaatatgcacagagtgggcaaataacagagaaggctgatgtatactctttcggggttgtgttagtggaacttgtcactgggcggaaggctgttgacattaaccgaccaaagggtcagcagttactaactgaatgggcacgcccattcttggaggagtatgcaattgacgagctcatagacccacgactcggagagcgctactctgaaaatgaggtgtactgcatgctgcacgcggcaaacttgtgcataagacgcgacccacattcaaggcctcgcatgtcccatgttcttcgcattcttgagggtgacatggtcgtggaatctggtggttctgttactggcagtagtgattctgggagcagaagctggaggatgctgaacgaacagcaacattgccaggagtacagtagcccggctcaacaagagtcgcaaagggcaggcgaggggaaacgctcctacagtgccttgagggcctcttgggaccgagacaagcagagtatctccaacagatattagtgccgtctcataatgcagtgcagctgagattgtttagtcctgtattattccttcgccctacctcccggtctcaattttttttggcttgctcttttgtcttcacttcgtagcaatttgtaggccgaaagcttttgctgatacattgccctggtgtatagtagaaatgggtaataggtttacaagtatattgagctgcaagttagaccctctccaacaaggactcgtaaacgcactacaccaa

SEQ ID NO: 32904 - DNA, 5270 bp, Zea Mays
gtcaatcttttcccggctacagtggcggcgaggacactcacagcacaggcgccgcgcagggcagcggagcggtggcgcccgctcccatctgcggccgcccataaatgctgcgatctttctctcaatccgcggcctcgggtcgggtcgggtcgggacccagcccaacactttgaactggggaaacggccgcctccttttttaacgcaatcatctctaccgggcgtgttgctcgcctttttgcttccgctccgcctgccaagcaggcccggcgtccaactctggtggcaactgccagggcagcccggcattactggttgtcttgaagaagaagatgatggtgggctcttcccgccaccagctgctgcagaggaaggggaagtccgtggctgacaagggcgccgccgccgccgccgccactgtggcggcagagaaggtggtggtcgcggtgagggcagccacgagggagatctccaagacggccatcatctgggcgctcacgcatgtcgtgcagccaggcggaagcatcatacttcttgtcgtcatcccggcacacagctctggcagaaagttctggggctttccgctgttcgctggagactgtgcaagtggccataagtctatgttggatcagaaatgtgatttatcagagttgtgttctcaaatgttgaagaaaattgatgtgtatgacatagacaagataaatgtgaggtataagcttgtttccggctctccttctggtgttgtagctgctgagtgcaagcaagcacaggcaagctgggttgtgctagacaaggatttgaagcatgaggagaagcgttgtgtggaggagcttcagtgcaacattgttgttatgaagcgatctcagcctaaagtccttcgacttaatcttgtgggatctcctgataaagagtctaaagcaacatgtgcagttccacctgtgctagatggttctaccagtaaaattgcaactgatgttaaggaagcacggagttcaattcgaggacctgttgtaaccccaaatagcagcccagacctggagacacctttcggaagtactgaagcgggaacttcctctgtctcgagttcagaccctgggacatctccgttttctgcttctgaaacaaatggttctctgaagaaagaggtgcaacaaacaaaggataaaattcagcattcagatgctaatatttctgattcagacagtgaaacattgagccctccagcaaatttctcacttcagccatggatgtctgatattctacagggaccagcatcgtcaagatcacttggaaaagttccacgaaaaaatcgcactgcaactgcagatgttttgttggaaaagttttccaagctggatctcctgaatgaaattaatgctatgagaagcaggtcagacttaaacttccgaggagatgtcagggatgttgttttgttggcaaggaatgcacctcctggaccacctccgctttgttcaatatgtcagcacaaggcacctgtttttggaaagcctcctcgctggtttagttatgctgaactggaacttgcaactggtggtttctcacaagcaaacttcttagctgaaggtggatttgggtctgttcatcgaggtgtccttcctgatggccaggctattgctgttaagcaacacaagcttgctagttcccagggtgatgttgagttctgctcagaggtggaagttcttagttgtgcacaacatcgaaatgttgtaatgctgataggtttttgcgttgaggacagaaggcgtttattggtttacgagtacatctgcaatagatctttggattcacatctctatggtcataatcgagaaacattggagtggactgcacgacaaaagattgcagttggtgctgctcgtgggctgcggtaccttcacgaggaatgtagggttggctgcataatccatcgtgacatgagaccaaacaacatccttgtcacacatgatttcgaaccactggttggagatttcggcctggcgcgatggcaacccgatggagacatgggcgttgaaacaagagttatcggcacattcggctatctggctcctgaatatgcacagagtgggcaaataacagagaaggctgatgtatactctttcggggttgtgttagtggaacttgtcactgggcggaaggctgttgacattaaccgaccaaagggtcagcagttactaactgaatgggcacgcccattcttggaggagtatgcaattgacgagctcatagacccacgactcggagagcgctactctgaaaatgaggtgtactgcatgctgcacgcggcaaacttgtgcataagacgcgacccacattcaaggcctcgcatgtcccatgttcttcgcattcttgagggtgacatggtcgtggaatctggtggttctgttactggcagtagtgattctgggagcagaagctggaggatgctgaacgaacagcaacattgccaggagtacagtagcccggctcaacaagagtcgcaaagggcaggcgaggggaaacgctcctacagtgccttgagggcctcttgggaccgagacaagcagagtatctccaacagatattagtgccgtctcataatgcagtgcagctgagattgtttagtcctgtattattccttcgccctacctcccggtctcaattttttttggcttgctcttttgtcttcacttcgtagcaatttgtaggccgaaagcttttgctgatacattgccctggtgtatagtagaaatgggtaatttcctatattacaaagccggttggaaaacggcgttgattaaggtatccacgtcacctcatttgatatcagccgtatgatctagatctactggatacgagccatcttgctcccacctgccgccagccgcctccacataaatatttttttcctgaatctccacactaccagagtcttccagcggcttcctctccctcctcagattcctctcctcgcgttctccctcgctaccacgcttgcgtgaatgccctcaccgcctctccccgtgctcgcccaaatcaccgcctctccctccctgtcgcccctgcgccacggtggttcacgcctttgaagtcacctcactcatcctgccgatgcagtcacccacaccgcctcctcccctccgctcaagccgcaccgcgatagctacacgccgcgacatcagctgccagcagcgccccccctaacaacgtcgcggcgtcctcgtgggctaaccccctccatcacttcttctcgccgggagctccatccaccttctccagcacccccacccccgctcaaatggtgtcagaaggtacgggaaccaatgggtttgaaggctgttcttatggaatataatgagctagccattaaaccacggaagggctgagagaaaattgggaggtggaagagatgcgctcaccaatcatctctgcgagagaaagcagtgccacatgggcccagcaatagcagcgtcacatggtggtggccatcgtcacgtcgagctagagatgtcaatgggtaattccccatcgggttatagcatcccagacccatccccatcatgtttgatacatccccatacccatacccatacccatcatgggtacaaaactcatcccatacccatctccattcgggtttcgggtccccaatgggtccccatccccaattaaggaataactaggtactaacatctagcacaaactatccagatttcatacatcaccacatcggcaagcactcatccacgaactattgtccattcatccattcatcagaagagaaatcagtacttgggaccaatataagaaatggagtctgccgggtttgatggccgactcggcctcaactcattcatacaaacaggacatgtgtacgcatatgaaataaccatgggtaatcgggttcggattattgcttcccaaacccatacccgtttacccaatgggtggagattttgtcccatatccatacccatggggacaatttttgtcccatacccgtaccctaataggggaattccccatgggttatcgggtatcgggtccccattgacatctctacgtcgagctctccctctccaccaactaacagttcctgacagtggagcagaaattcattaagagcatatagggattcacaagtggtacatgtattctgcctatctttatttcttagtattatataaactacatactgtatttggagatgcattgtttattctctgcaatcggttaaccctggactgcttgcaactatccccagttacgaaatagtgcttcttttctgtcataacttttcaggcgtccatagtaaatgaaattggtgcatatatttgagttgactaacaatgcgataactaacatgtgatttgtcgattttcctttttactgctagattttgagcccaacaatctcgctgccaccgatactcctggttcgtatatttggttactcaaaacatgagatgatcctctgaagtagaaagggaaacactgaatacgctcttgctgaaatattctatagaaagacacaattccattttggcagatgcaagtgaaagatctacagggaagaaattggggtagcatataaccgccgcaagggaaaatatggtgtagcagatgaggatataatcttatatggtcaatgtgtttgaattggtccaaccattgatattgcttcacggttgctagacttgagagtcgcggttttgcatagtcctatattttatctgcactaagagtaatatatacagccaagcagacgtttggtttaacatttacaaggtatgtttggtacttttgtttttttggaattaatggttgtccgatgcttgtcattcatatgagttctaatatcatgcccccttaaagtactcatcatcaaaagtttccatgtgaatgttttaaatgtatatttaaagggttggaagacatcagactgttattcaaacaggatcttaagtgtcgtgaaagactacaagtgaggttcaacttggcaaattatttttccagtaactaaggagcaacaattttatgtattttagcttgacatatgaatctaggtacttacatttttggaatcgggcaaacagtgatagtttgaatcacatgttttgccaaaaggaattattagaactgttcaaagttggaaaaaatacatatttatgttttcttatgcatggataaattgctctgttcatatataaaaaaataactgtagtattattgcttatattgattttaaatgatgaccttattagatgtgccatcg

SEQ ID NO: 32905 - DNA, 4927 bp, Zea Mays
cccagcccaacactttgaactggggaaacggccgcctccttttttaacgcaatcatctctaccgggcgtgttgctcgcctttttgcttccgctccgcctgccaagcaggcccggcgtccaactctggtggcaactgccagggcagcccggcattactggttgtcttgaagaagaagatgatggtgggctcttcccgccaccagctgctgcagaggaaggggaagtccgtggctgacaagggcgccgccgccgccgccgccactgtggcggcagagaaggtggtggtcgcggtgagggcagccacgagggagatctccaagacggccatcatctgggcgctcacgcatgtcgtgcagccaggcggaagcatcatacttcttgtcgtcatcccggcacacagctctggcagaaagttctggggctttccgctgttcgctggagactgtgcaagtggccataagtctatgttggatcagaaatgtgatttatcagagttgtgttctcaaatgttgaagaaaattgatgtgtatgacatagacaagataaatgtgaggtataagcttgtttccggctctccttctggtgttgtagctgctgagtgcaagcaagcacaggcaagctgggttgtgctagacaaggatttgaagcatgaggagaagcgttgtgtggaggagcttcagtgcaacattgttgttatgaagcgatctcagcctaaagtccttcgacttaatcttgtgggatctcctgataaagagtctaaagcaacatgtgcagttccacctgtgctagatggttctaccagtaaaattgcaactgatgttaaggaagcacggagttcaattcgaggacctgttgtaaccccaaatagcagcccagacctggagacacctttcggaagtactgaagcgggaacttcctctgtctcgagttcagaccctgggacatctccgttttctgcttctgaaacaaatggttctctgaagaaagaggtgcaacaaacaaaggataaaattcagcattcagatgctaatatttctgattcagacagtgaaacattgagccctccagcaaatttctcacttcagccatggatgtctgatattctacagggaccagcatcgtcaagatcacttggaaaagttccacgaaaaaatcgcactgcaactgcagatgttttgttggaaaagttttccaagctggatctcctgaatgaaattaatgctatgagaagcaggtcagacttaaacttccgaggagatgtcagggatgttgttttgttggcaaggaatgcacctcctggaccacctccgctttgttcaatatgtcagcacaaggcacctgtttttggaaagcctcctcgctggtttagttatgctgaactggaacttgcaactggtggtttctcacaagcaaacttcttagctgaaggtggatttgggtctgttcatcgaggtgtccttcctgatggccaggctattgctgttaagcaacacaagcttgctagttcccagggtgatgttgagttctgctcagaggtggaagttcttagttgtgcacaacatcgaaatgttgtaatgctgataggtttttgcgttgaggacagaaggcgtttattggtttacgagtacatctgcaatagatctttggattcacatctctatggtcataatcgagaaacattggagtggactgcacgacaaaagattgcagttggtgctgctcgtgggctgcggtaccttcacgaggaatgtagggttggctgcataatccatcgtgacatgagaccaaacaacatccttgtcacacatgatttcgaaccactggttggagatttcggcctggcgcgatggcaacccgatggagacatgggcgttgaaacaagagttatcggcacattcggctatctggctcctgaatatgcacagagtgggcaaataacagagaaggctgatgtatactctttcggggttgtgttagtggaacttgtcactgggcggaaggctgttgacattaaccgaccaaagggtcagcagttactaactgaatgggcacgcccattcttggaggagtatgcaattgacgagctcatagacccacgactcggagagcgctactctgaaaatgaggtgtactgcatgctgcacgcggcaaacttgtgcataagacgcgacccacattcaaggcctcgcatgtcccatgttcttcgcattcttgagggtgacatggtcgtggaatctggtggttctgttactggcagtagtgattctgggagcagaagctggaggatgctgaacgaacagcaacattgccaggagtacagtagcccggctcaacaagagtcgcaaagggcaggcgaggggaaacgctcctacagtgccttgagggcctcttgggaccgagacaagcagagtatctccaacagatattagtgccgtctcataatgcagtgcagctgagattgtttagtcctgtattattccttcgccctacctcccggtctcaattttttttggcttgctcttttgtcttcacttcgtagcaatttgtaggccgaaagcttttgctgatacattgccctggtgtatagtagaaatgggtaatttcctatattacaaagccggttggaaaacggcgttgattaaggtatccacgtcacctcatttgatatcagccgtatgatctagatctactggatacgagccatcttgctcccacctgccgccagccgcctccacataaatatttttttcctgaatctccacactaccagagtcttccagcggcttcctctccctcctcagattcctctcctcgcgttctccctcgctaccacgcttgcgtgaatgccctcaccgcctctccccgtgctcgcccaaatcaccgcctctccctccctgtcgcccctgcgccacggtggttcacgcctttgaagtcacctcactcatcctgccgatgcagtcacccacaccgcctcctcccctccgctcaagccgcaccgcgatagctacacgccgcgacatcagctgccagcagcgccccccctaacaacgtcgcggcgtcctcgtgggctaaccccctccatcacttcttctcgccgggagctccatccaccttctccagcacccccacccccgctcaaatggtgtcagaagggctgagagaaaattgggaggtggaagagatgcgctcaccaatcatctctgcgagagaaagcagtgccacatgggcccagcaatagcagcgtcacatggtggtggccatcgtcacgtcgagctagagatgtcaatgggtaattccccatcgggttatagcatcccagacccatccccatcatgtttgatacatccccatacccatacccatacccatcatgggtacaaaactcatcccatacccatctccattcgggtttcgggtccccaatgggtccccatccccaattaaggaataactaggtactaacatctagcacaaactatccagatttcatacatcaccacatcggcaagcactcatccacgaactattgtccattcatccattcatcagaagagaaatcagtacttgggaccaatataagaaatggagtctgccgggtttgatggccgactcggcctcaactcattcatacaaacaggacatgtgtacgcatatgaaataaccatgggtaatcgggttcggattattgcttcccaaacccatacccgtttacccaatgggtggagattttgtcccatatccatacccatggggacaatttttgtcccatacccgtaccctaataggggaattccccatgggttatcgggtatcgggtccccattgacatctctacgtcgagctctccctctccaccaactaacagttcctgacagtggagcagaaattcattaagagcatatagggattcacaagtgattttgagcccaacaatctcgctgccaccgatactcctggttcgtatatttggttactcaaaacatgagatgatcctctgaagtagaaagggaaacactgaatacgctcttgctgaaatattctatagaaagacacaattccattttggcagatgcaagtgaaagatctacagggaaggtatcttttgttcttatattttggttgcttaacaaataccttacgtagaaactataatcttctctctaatcatatcttagtggaaagtttattcttccattgaacatcccactgagtgtaatacatatgcagaaattggggtagcatataaccgccgcaagggaaaatatggtgtagcagatgaggatataatcttatatggtcaatgtgtttgaattggtccaaccattgatattgcttcacggttgctagacttgagagtcgcggttttgcatagtcctatattttatctgcactaagagtaatatatacagccaagcagacgtttggtttaacatttacaaggtatgtttggtacttttgtttttttggaattaatggttgtccgatgcttgtcattcatatgagttctaatatcatgcccccttaaagtactcatcatcaaaagtttccatgtgaatgttttaaatgtatatttaaagggttggaagacatcagactgttattcaaacaggatcttaagtgtcgtgaaagactacaagtgaggttcaacttggcaaattatttttccagtaactaaggagcaacaattttatgtattttagcttgacatatgaatctaggtacttacatttttggaatcgggcaaacagtgatagtttgaatcacatgttttgccaaaaggaattattagaactgttcaaagttggaaaaaatacatatttatgttttcttatgcatggataaattgctctgttcatatataaaaaaataactgtagtattattgcttatattgattttaaatgatgaccttattagatgtgccatcg

SEQ ID NO: 32906 - DNA, 4996 bp, Zea Mays
cccagcccaacactttgaactggggaaacggccgcctccttttttaacgcaatcatctctaccgggcgtgttgctcgcctttttgcttccgctccgcctgccaagcaggcccggcgtccaactctggtggcaactgccagggcagcccggcattactggttgtcttgaagaagaagatgatggtgggctcttcccgccaccagctgctgcagaggaaggggaagtccgtggctgacaagggcgccgccgccgccgccgccactgtggcggcagagaaggtggtggtcgcggtgagggcagccacgagggagatctccaagacggccatcatctgggcgctcacgcatgtcgtgcagccaggcggaagcatcatacttcttgtcgtcatcccggcacacagctctggcagaaagttctggggctttccgctgttcgctggagactgtgcaagtggccataagtctatgttggatcagaaatgtgatttatcagagttgtgttctcaaatgttgaagaaaattgatgtgtatgacatagacaagataaatgtgaggtataagcttgtttccggctctccttctggtgttgtagctgctgagtgcaagcaagcacaggcaagctgggttgtgctagacaaggatttgaagcatgaggagaagcgttgtgtggaggagcttcagtgcaacattgttgttatgaagcgatctcagcctaaagtccttcgacttaatcttgtgggatctcctgataaagagtctaaagcaacatgtgcagttccacctgtgctagatggttctaccagtaaaattgcaactgatgttaaggaagcacggagttcaattcgaggacctgttgtaaccccaaatagcagcccagacctggagacacctttcggaagtactgaagcgggaacttcctctgtctcgagttcagaccctgggacatctccgttttctgcttctgaaacaaatggttctctgaagaaagaggtgcaacaaacaaaggataaaattcagcattcagatgctaatatttctgattcagacagtgaaacattgagccctccagcaaatttctcacttcagccatggatgtctgatattctacagggaccagcatcgtcaagatcacttggaaaagttccacgaaaaaatcgcactgcaactgcagatgttttgttggaaaagttttccaagctggatctcctgaatgaaattaatgctatgagaagcaggtcagacttaaacttccgaggagatgtcagggatgttgttttgttggcaaggaatgcacctcctggaccacctccgctttgttcaatatgtcagcacaaggcacctgtttttggaaagcctcctcgctggtttagttatgctgaactggaacttgcaactggtggtttctcacaagcaaacttcttagctgaaggtggatttgggtctgttcatcgaggtgtccttcctgatggccaggctattgctgttaagcaacacaagcttgctagttcccagggtgatgttgagttctgctcagaggtggaagttcttagttgtgcacaacatcgaaatgttgtaatgctgataggtttttgcgttgaggacagaaggcgtttattggtttacgagtacatctgcaatagatctttggattcacatctctatggtcataatcgagaaacattggagtggactgcacgacaaaagattgcagttggtgctgctcgtgggctgcggtaccttcacgaggaatgtagggttggctgcataatccatcgtgacatgagaccaaacaacatccttgtcacacatgatttcgaaccactggttggagatttcggcctggcgcgatggcaacccgatggagacatgggcgttgaaacaagagttatcggcacattcggctatctggctcctgaatatgcacagagtgggcaaataacagagaaggctgatgtatactctttcggggttgtgttagtggaacttgtcactgggcggaaggctgttgacattaaccgaccaaagggtcagcagttactaactgaatgggcacgcccattcttggaggagtatgcaattgacgagctcatagacccacgactcggagagcgctactctgaaaatgaggtgtactgcatgctgcacgcggcaaacttgtgcataagacgcgacccacattcaaggcctcgcatgtcccatgttcttcgcattcttgagggtgacatggtcgtggaatctggtggttctgttactggcagtagtgattctgggagcagaagctggaggatgctgaacgaacagcaacattgccaggagtacagtagcccggctcaacaagagtcgcaaagggcaggcgaggggaaacgctcctacagtgccttgagggcctcttgggaccgagacaagcagagtatctccaacagatattagtgccgtctcataatgcagtgcagctgagattgtttagtcctgtattattccttcgccctacctcccggtctcaattttttttggcttgctcttttgtcttcacttcgtagcaatttgtaggccgaaagcttttgctgatacattgccctggtgtatagtagaaatgggtaatttcctatattacaaagccggttggaaaacggcgttgattaaggtatccacgtcacctcatttgatatcagccgtatgatctagatctactggatacgagccatcttgctcccacctgccgccagccgcctccacataaatatttttttcctgaatctccacactaccagagtcttccagcggcttcctctccctcctcagattcctctcctcgcgttctccctcgctaccacgcttgcgtgaatgccctcaccgcctctccccgtgctcgcccaaatcaccgcctctccctccctgtcgcccctgcgccacggtggttcacgcctttgaagtcacctcactcatcctgccgatgcagtcacccacaccgcctcctcccctccgctcaagccgcaccgcgatagctacacgccgcgacatcagctgccagcagcgccccccctaacaacgtcgcggcgtcctcgtgggctaaccccctccatcacttcttctcgccgggagctccatccaccttctccagcacccccacccccgctcaaatggtgtcagaaggtacgggaaccaatgggtttgaaggctgttcttatggaatataatgagctagccattaaaccacggaagggctgagagaaaattgggaggtggaagagatgcgctcaccaatcatctctgcgagagaaagcagtgccacatgggcccagcaatagcagcgtcacatggtggtggccatcgtcacgtcgagctagagatgtcaatgggtaattccccatcgggttatagcatcccagacccatccccatcatgtttgatacatccccatacccatacccatacccatcatgggtacaaaactcatcccatacccatctccattcgggtttcgggtccccaatgggtccccatccccaattaaggaataactaggtactaacatctagcacaaactatccagatttcatacatcaccacatcggcaagcactcatccacgaactattgtccattcatccattcatcagaagagaaatcagtacttgggaccaatataagaaatggagtctgccgggtttgatggccgactcggcctcaactcattcatacaaacaggacatgtgtacgcatatgaaataaccatgggtaatcgggttcggattattgcttcccaaacccatacccgtttacccaatgggtggagattttgtcccatatccatacccatggggacaatttttgtcccatacccgtaccctaataggggaattccccatgggttatcgggtatcgggtccccattgacatctctacgtcgagctctccctctccaccaactaacagttcctgacagtggagcagaaattcattaagagcatatagggattcacaagtgattttgagcccaacaatctcgctgccaccgatactcctggttcgtatatttggttactcaaaacatgagatgatcctctgaagtagaaagggaaacactgaatacgctcttgctgaaatattctatagaaagacacaattccattttggcagatgcaagtgaaagatctacagggaaggtatcttttgttcttatattttggttgcttaacaaataccttacgtagaaactataatcttctctctaatcatatcttagtggaaagtttattcttccattgaacatcccactgagtgtaatacatatgcagaaattggggtagcatataaccgccgcaagggaaaatatggtgtagcagatgaggatataatcttatatggtcaatgtgtttgaattggtccaaccattgatattgcttcacggttgctagacttgagagtcgcggttttgcatagtcctatattttatctgcactaagagtaatatatacagccaagcagacgtttggtttaacatttacaaggtatgtttggtacttttgtttttttggaattaatggttgtccgatgcttgtcattcatatgagttctaatatcatgcccccttaaagtactcatcatcaaaagtttccatgtgaatgttttaaatgtatatttaaagggttggaagacatcagactgttattcaaacaggatcttaagtgtcgtgaaagactacaagtgaggttcaacttggcaaattatttttccagtaactaaggagcaacaattttatgtattttagcttgacatatgaatctaggtacttacatttttggaatcgggcaaacagtgatagtttgaatcacatgttttgccaaaaggaattattagaactgttcaaagttggaaaaaatacatatttatgttttcttatgcatggataaattgctctgttcatatataaaaaaataactgtagtattattgcttatattgattttaaatgatgaccttattagatgtgccatcg

SEQ ID NO: 32907 - DNA, 5315 bp, Zea Mays
cccagcccaacactttgaactggggaaacggccgcctccttttttaacgcaatcatctctaccgggcgtgttgctcgcctttttgcttccgctccgcctgccaagcaggcccggcgtccaactctggtggcaactgccagggcagcccggcattactggttgtcttgaagaagaagatgatggtgggctcttcccgccaccagctgctgcagaggaaggggaagtccgtggctgacaagggcgccgccgccgccgccgccactgtggcggcagagaaggtggtggtcgcggtgagggcagccacgagggagatctccaagacggccatcatctgggcgctcacgcatgtcgtgcagccaggcggaagcatcatacttcttgtcgtcatcccggcacacagctctggcagaaagttctggggctttccgctgttcgctggagactgtgcaagtggccataagtctatgttggatcagaaatgtgatttatcagagttgtgttctcaaatgttgaagaaaattgatgtgtatgacatagacaagataaatgtgaggtataagcttgtttccggctctccttctggtgttgtagctgctgagtgcaagcaagcacaggcaagctgggttgtgctagacaaggatttgaagcatgaggagaagcgttgtgtggaggagcttcagtgcaacattgttgttatgaagcgatctcagcctaaagtccttcgacttaatcttgtgggatctcctgataaagagtctaaagcaacatgtgcagttccacctgtgctagatggttctaccagtaaaattgcaactgatgttaaggaagcacggagttcaattcgaggacctgttgtaaccccaaatagcagcccagacctggagacacctttcggaagtactgaagcgggaacttcctctgtctcgagttcagaccctgggacatctccgttttctgcttctgaaacaaatggttctctgaagaaagaggtgcaacaaacaaaggataaaattcagcattcagatgctaatatttctgattcagacagtgaaacattgagccctccagcaaatttctcacttcagccatggatgtctgatattctacagggaccagcatcgtcaagatcacttggaaaagttccacgaaaaaatcgcactgcaactgcagatgttttgttggaaaagttttccaagctggatctcctgaatgaaattaatgctatgagaagcaggtcagacttaaacttccgaggagatgtcagggatgttgttttgttggcaaggaatgcacctcctggaccacctccgctttgttcaatatgtcagcacaaggcacctgtttttggaaagcctcctcgctggtttagttatgctgaactggaacttgcaactggtggtttctcacaagcaaacttcttagctgaaggtggatttgggtctgttcatcgaggtgtccttcctgatggccaggctattgctgttaagcaacacaagcttgctagttcccagggtgatgttgagttctgctcagaggtggaagttcttagttgtgcacaacatcgaaatgttgtaatgctgataggtttttgcgttgaggacagaaggcgtttattggtttacgagtacatctgcaatagatctttggattcacatctctatggtcataatcgagaaacattggagtggactgcacgacaaaagattgcagttggtgctgctcgtgggctgcggtaccttcacgaggaatgtagggttggctgcataatccatcgtgacatgagaccaaacaacatccttgtcacacatgatttcgaaccactggttggagatttcggcctggcgcgatggcaacccgatggagacatgggcgttgaaacaagagttatcggcacattcggctatctggctcctgaatatgcacagagtgggcaaataacagagaaggctgatgtatactctttcggggttgtgttagtggaacttgtcactgggcggaaggctgttgacattaaccgaccaaagggtcagcagttactaactgaatgggcacgcccattcttggaggagtatgcaattgacgagctcatagacccacgactcggagagcgctactctgaaaatgaggtgtactgcatgctgcacgcggcaaacttgtgcataagacgcgacccacattcaaggcctcgcatgtcccatgttcttcgcattcttgagggtgacatggtcgtggaatctggtggttctgttactggcagtagtgattctgggagcagaagctggaggatgctgaacgaacagcaacattgccaggagtacagtagcccggctcaacaagagtcgcaaagggcaggcgaggggaaacgctcctacagtgccttgagggcctcttgggaccgagacaagcagagtatctccaacagatattagtgccgtctcataatgcagtgcagctgagattgtttagtcctgtattattccttcgccctacctcccggtctcaattttttttggcttgctcttttgtcttcacttcgtagcaatttgtaggccgaaagcttttgctgatacattgccctggtgtatagtagaaatgggtaatttcctatattacaaagccggttggaaaacggcgttgattaaggtatccacgtcacctcatttgatatcagccgtatgatctagatctactggatacgagccatcttgctcccacctgccgccagccgcctccacataaatatttttttcctgaatctccacactaccagagtcttccagcggcttcctctccctcctcagattcctctcctcgcgttctccctcgctaccacgcttgcgtgaatgccctcaccgcctctccccgtgctcgcccaaatcaccgcctctccctccctgtcgcccctgcgccacggtggttcacgcctttgaagtcacctcactcatcctgccgatgcagtcacccacaccgcctcctcccctccgctcaagccgcaccgcgatagctacacgccgcgacatcagctgccagcagcgccccccctaacaacgtcgcggcgtcctcgtgggctaaccccctccatcacttcttctcgccgggagctccatccaccttctccagcacccccacccccgctcaaatggtgtcagaaggtacgggaaccaatgggtttgaaggctgttcttatggaatataatgagctagccattaaaccacggaaggtacacatcattttctcattataagttatcttatattgtacaaagacacttcatgttgcccacagtttatgtcgtcatgggctcatggcttggccacattatcacgttcataatgcatgagcgttgatcagctactcaactggcatctatacctgcaactatgatcgcttgatttatttacctaattatttgaaccgttcctagggctgagagaaaattgggaggtggaagagatgcgctcaccaatcatctctgcgagagaaagcagtgccacatgggcccagcaatagcagcgtcacatggtggtggccatcgtcacgtcgagctagagatgtcaatgggtaattccccatcgggttatagcatcccagacccatccccatcatgtttgatacatccccatacccatacccatacccatcatgggtacaaaactcatcccatacccatctccattcgggtttcgggtccccaatgggtccccatccccaattaaggaataactaggtactaacatctagcacaaactatccagatttcatacatcaccacatcggcaagcactcatccacgaactattgtccattcatccattcatcagaagagaaatcagtacttgggaccaatataagaaatggagtctgccgggtttgatggccgactcggcctcaactcattcatacaaacaggacatgtgtacgcatatgaaataaccatgggtaatcgggttcggattattgcttcccaaacccatacccgtttacccaatgggtggagattttgtcccatatccatacccatggggacaatttttgtcccatacccgtaccctaataggggaattccccatgggttatcgggtatcgggtccccattgacatctctacgtcgagctctccctctccaccaactaacagttcctgacagtggagcagaaattcattaagagcatatagggattcacaagtggtacatgtattctgcctatctttatttcttagtattatataaactacatactgtatttggagatgcattgtttattctctgcaatcggttaaccctggactgcttgcaactatccccagttacgaaatagtgcttcttttctgtcataacttttcaggcgtccatagtaaatgaaattggtgcatatatttgagttgactaacaatgcgataactaacatgtgatttgtcgattttcctttttactgctagattttgagcccaacaatctcgctgccaccgatactcctggttcgtatatttggttactcaaaacatgagatgatcctctgaagtagaaagggaaacactgaatacgctcttgctgaaatattctatagaaagacacaattccattttggcagatgcaagtgaaagatctacaggaaattggggtagcatataaccgccgcaagggaaaatatggtgtagcagatgaggatataatcttatatggtcaatgtgtttgaattggtccaaccattgatattgcttcacggttgctagacttgagagtcgcggttttgcatagtcctatattttatctgcactaagagtaatatatacagccaagcagacgtttggtttaacatttacaaggtatgtttggtacttttgtttttttggaattaatggttgtccgatgcttgtcattcatatgagttctaatatcatgcccccttaaagtactcatcatcaaaagtttccatgtgaatgttttaaatgtatatttaaagggttggaagacatcagactgttattcaaacaggatcttaagtgtcgtgaaagactacaagtgaggttcaacttggcaaattatttttccagtaactaaggagcaacaattttatgtattttagcttgacatatgaatctaggtacttacatttttggaatcgggcaaacagtgatagtttgaatcacatgttttgccaaaaggaattattagaactgttcaaagttggaaaaaatacatatttatgttttcttatgcatggataaattgctctgttcatatataaaaaaataactgtagtattattgcttatattgattttaaatgatgaccttattagatgtgccatcg

SEQ ID NO: 32908 - DNA, 6535 bp, Zea Mays
cccagcccaacactttgaactggggaaacggccgcctccttttttaacgcaatcatctctaccgggcgtgttgctcgcctttttgcttccgctccgcctgccaagcaggcccggcgtccaactctggtggcaactgccagggcagcccggcattactggttgtcttgaagaagaagatgatggtgggctcttcccgccaccagctgctgcagaggaaggggaagtccgtggctgacaagggcgccgccgccgccgccgccactgtggcggcagagaaggtggtggtcgcggtgagggcagccacgagggagatctccaagacggccatcatctgggcgctcacgcatgtcgtgcagccaggcggaagcatcatacttcttgtcgtcatcccggcacacagctctggcagaaagttctggggctttccgctgttcgctggagactgtgcaagtggccataagtctatgttggatcagaaatgtgatttatcagagttgtgttctcaaatgttgaagaaaattgatgtgtatgacatagacaagataaatgtgaggtataagcttgtttccggctctccttctggtgttgtagctgctgagtgcaagcaagcacaggcaagctgggttgtgctagacaaggatttgaagcatgaggagaagcgttgtgtggaggagcttcagtgcaacattgttgttatgaagcgatctcagcctaaagtccttcgacttaatcttgtgggatctcctgataaagagtctaaagcaacatgtgcagttccacctgtgctagatggttctaccagtaaaattgcaactgatgttaaggaagcacggagttcaattcgaggacctgttgtaaccccaaatagcagcccagacctggagacacctttcggaagtactgaagcgggaacttcctctgtctcgagttcagaccctgggacatctccgttttctgcttctgaaacaaatggttctctgaagaaagaggtgcaacaaacaaaggataaaattcagcattcagatgctaatatttctgattcagacagtgaaacattgagccctccagcaaatttctcacttcagccatggatgtctgatattctacagggaccagcatcgtcaagatcacttggaaaagttccacgaaaaaatcgcactgcaactgcagatgttttgttggaaaagttttccaagctggatctcctgaatgaaattaatgctatgagaagcaggtcagacttaaacttccgaggagatgtcagggatgttgttttgttggcaaggaatgcacctcctggaccacctccgctttgttcaatatgtcagcacaaggcacctgtttttggaaagcctcctcgctggtttagttatgctgaactggaacttgcaactggtggtttctcacaagcaaacttcttagctgaaggtggatttgggtctgttcatcgaggtgtccttcctgatggccaggctattgctgttaagcaacacaagcttgctagttcccagggtgatgttgagttctgctcagaggtggaagttcttagttgtgcacaacatcgaaatgttgtaatgctgataggtttttgcgttgaggacagaaggcgtttattggtttacgagtacatctgcaatagatctttggattcacatctctatggtcataatcgagaaacattggagtggactgcacgacaaaagattgcagttggtgctgctcgtgggctgcggtaccttcacgaggaatgtagggttggctgcataatccatcgtgacatgagaccaaacaacatccttgtcacacatgatttcgaaccactggttggagatttcggcctggcgcgatggcaacccgatggagacatgggcgttgaaacaagagttatcggcacattcggctatctggctcctgaatatgcacagagtgggcaaataacagagaaggctgatgtatactctttcggggttgtgttagtggaacttgtcactgggcggaaggctgttgacattaaccgaccaaagggtcagcagttactaactgaatgggcacgcccattcttggaggagtatgcaattgacgagctcatagacccacgactcggagagcgctactctgaaaatgaggtgtactgcatgctgcacgcggcaaacttgtgcataagacgcgacccacattcaaggcctcgcatgtcccatgttcttcgcattcttgagggtgacatggtcgtggaatctggtggttctgttactggcagtagtgattctgggagcagaagctggaggatgctgaacgaacagcaacattgccaggagtacagtagcccggctcaacaagagtcgcaaagggcaggcgaggggaaacgctcctacagtgccttgagggcctcttgggaccgagacaagcagagtatctccaacagatattagtgccgtctcataatgcagtgcagctgagattgtttagtcctgtattattccttcgccctacctcccggtctcaattttttttggcttgctcttttgtcttcacttcgtagcaatttgtaggccgaaagcttttgctgatacattgccctggtgtatagtagaaatgggtaatttcctatattacaaagccggttggaaaacggcgttgattaaggtatccacgtcacctcatttgatatcagccgtatgatctagatctactggatacgagccatcttgctcccacctgccgccagccgcctccacataaatatttttttcctgaatctccacactaccagagtcttccagcggcttcctctccctcctcagattcctctcctcgcgttctccctcgctaccacgcttgcgtgaatgccctcaccgcctctccccgtgctcgcccaaatcaccgcctctccctccctgtcgcccctgcgccacggtggttcacgcctttgaagtcacctcactcatcctgccgatgcagtcacccacaccgcctcctcccctccgctcaagccgcaccgcgatagctacacgccgcgacatcagctgccagcagcgccccccctaacaacgtcgcggcgtcctcgtgggctaaccccctccatcacttcttctcgccgggagctccatccaccttctccagcacccccacccccgctcaaatggtgtcagaaggtacgggaaccaatgggtttgaaggctgttcttatggaatataatgagctagccattaaaccacggaaggtacacatcattttctcattataagttatcttatattgtacaaagacacttcatgttgcccacagtttatgtcgtcatgggctcatggcttggccacattatcacgttcataatgcatgagcgttgatcagctactcaactggcatctatacctgcaactatgatcgcttgatttatttacctaattatttgaaccgttcctagggctgagagaaaattgggaggtggaagagatgcgctcaccaatcatctctgcgagagaaagcagtggtattttcctaaacaaagagataaaagaagaatagaccatgtcgctgcctcatttatcggatacttaggggctcctgcagtcctgctccgtcagaccgtcaccttcaaagtcaataagattctagcttaaatttgggagatgcatataaagtaccttgcttttatgcaaccaatttgcatttttctctattggttttgtcattgtattttgtttttgctgttttaactaactcccatgtgttaaaaaacatggcagtgaaagtaccttgcttttatgcaactaatttacattttctcaattggtttttgtcatggcagcatatagctcaaatattagttatcctttttcagacatatggacattagacttactactatcaggatcaaaacatatgcatatcattaggcaggaataaggaatatgtgactactatcgacacttttatgtattttagcttgacatatgaatctaggtacttacatttttggaatcgggcaaacagcgatagtttgaatcacatgttttgccaaaaggaattattagaactgttcaaagttggaaaaaaatacatatttatgttttcttatgcacgggtaaattgctctgttcatatataaaaaaataactgtagtattattgcttatattgattttaaatgatgaccttattagatgtgccatcgagaccacatatattagcattttgtgactagaaatacaatgcatgaatatatatagataacctttacatcgtgctacatgctttcgggaaataaggaaccattacaacatatatatttttatgatgtacaatttcgtcatcggatataccatgtgcatatgtgcagtaacccattatgcttttgtttgtgtatacaacaagttacgcatcaacatacatggacaaaatcaaacaagataataaaccgttttgtcataaattattcttcagaataaaaaatgtttaagaactgtataagcacacctacaattagcaacctctgaagatttgtatgaactaatatttatgtgtaaccatgacaacatcacacgttagacccttgaaagaagccatatcatgtttccaaatattaggctaaatgtctgaataaaagaagaaaaaacactaggtgcagtttttgctaagatagtgccgacgaggaaacaacagacacattgtaagtgattcttgcagtaccaatattcccatgaacttattactaaagaagatgtctttgtgatggtacatttgtccatatttcttaatcatatatatggcacactatacattttccctcccggtgttttggaatccttatttgtggtactaataagtagcattctaatctgcgtatggttgttttgttacaaagtcatattctgtcactataatttattagagagaaaaatgtttggttgcacaattacaagcttgctttgtttgattctattctacctgcagcgcagccacatgggcccagcaatagcagcgtcacatggtggtggccatcgtcacgtcgagctagagatgtcaatgggtaattccccatcgggttatagcatcccagacccatccccatcatgtttgatacatccccatacccatacccatacccatcatgggtacaaaactcatcccatacccatctccattcgggtttcgggtccccaatgggtccccatccccaattaaggaataactaggtactaacatctagcacaaactatccagatttcatacatcaccacatcggcaagcactcatccacgaactattgtccattcatccattcatcagaagagaaatcagtacttgggaccaatataagaaatggagtctgccgggtttgatggccgactcggcctcaactcattcatacaaacaggacatgtgtacgcatatgaaataaccatgggtaatcgggttcggattattgcttcccaaacccatacccgtttacccaatgggtggagattttgtcccatatccatacccatggggacaatttttgtcccatacccgtaccctaataggggaattccccatgggttatcgggtatcgggtccccattgacatctctacgtcgagctctccctctccaccaactaacagttcctgacagtggagcagaaattcattaagagcatatagggattcacaagtgattttgagcccaacaatctcgctgccaccgatactcctggttcgtatatttggttactcaaaacatgagatgatcctctgaagtagaaagggaaacactgaatacgctcttgctgaaatattctatagaaagacacaattccattttggcagatgcaagtgaaagatctacagggaagaaattggggtagcatataaccgccgcaagggaaaatatggtgtagcagatgaggatataatcttatatggtcaatgtgtttgaattggtccaaccattgatattgcttcacggttgctagacttgagagtcgcggttttgcatagtcctatattttatctgcactaagagtaatatatacagccaagcagacgtttggtttaacatttacaaggtatgtttggtacttttgtttttttggaattaatggttgtccgatgcttgtcattcatatgagttctaatatcatgcccccttaaagtactcatcatcaaaagtttccatgtgaatgttttaaatgtatatttaaagggttggaagacatcagactgttattcaaacaggatcttaagtgtcgtgaaagactacaagtgaggttcaacttggcaaattatttttccagtaactaaggagcaacaattttatgtattttagcttgacatatgaatctaggtacttacatttttggaatcgggcaaacagtgatagtttgaatcacatgttttgccaaaaggaattattagaactgttcaaagttggaaaaaatacatatttatgttttcttatgcatggataaattgctctgttcatatataaaaaaataactgtagtattattgcttatattgattttaaatgatgaccttattagatgtgccatcg

SEQ ID NO: 32909 - DNA, 5718 bp, Zea Mays
aagcagtcgaacaatattcaccataatctattatggtcctggggaatttttgataacaattagtgaggtcgcgtaaaactatcagcatataaacagattttgtttttgtctgtacttcatacctgctagtgtcagattgcgtatcacacaaatattcgcgtagagctaacacagtttgcatctccgaatcaagtgaaatctggtcaacctgaggagtgtttgtagctggatcggtttcaacagaaacctaaaaagatatatgaaaatatataacaatctgtgaacagttttggcaactataataaaaatgaaaattactgagctgacatgttcagatggagtctgatcaaagcatggaccattgtcagggagatctgtttctgccgcctgttggacgccgccgggagactaacaattatggtataaataaattagatgtttagtaaactactaataataatatagaaaaacaacgaggtgatgtactcatacctttatttgcggcgtcgcatcaaatatcggcgagcaagattccgtatgtggtgttgcttgaggagtgacgtttgtgttggtcggcatgttcttgccaacgtcaccatgtttaccctgaaaaaattgtaatggttatatgctttttaaagaaaacgatgaatacaacccttcaatgaaaatacaagtaataaaaaaaacattaccactggggttgtaggtgttttggtctatttcgttatatttgtataaaccagtggatcaatgtcagcttcatcggggcaactttctaatagtacacgaatatgttgttgccttaacagtaattcatgtatctgtgtgtctgtcaactacgtatcctgctgaaatgctggagtagacatatctgttacagtttgtggggccgaacacgtacatccttctttacgtatcatttaaacaaaaaaacatcgttttaaataatggcatcataacgatatcgacaaatgtttgaataatttttttatattgacgtaaagaccataaaactgactaacctgccgactggggaagaatatcatctgattttgtagttgttttctgcacatcataaacatcttcattgtctcccgactcggcacggaggacctcatctattaactcgctaaaaacatcagatagattgtattgtttctcaacaatctgctgaagagtctgtttaataactaaataagccttaccaaccttcatatcataatgtgacaacttctctatgaaacccagacgatggcaggatggaagctaattcagcttgcttgatatcaaatccctgaagagcaggagttcgatgtgaatggtgtgatgtccagatgggtcaggacgcggtacatcaaaagtgtttgtcctgttcttatgctgttgtaaaataaaagttattaagtaaatatatagcgtataactgaatattatgttgaaattttatgacaaaaaatatataaatagaatcttgccttaaattgtgcttcaacaggtggtacagctgtgtagcaggtctctgtggtgcttcggaactaaaaaatatgtgaaagatggagtaaaacttatacacacatataaagtggagtttcatttgtaaatataaacgacactgcttctatcgaaaatacatcataacagttatgtagcaatctgaatgtacatcgacttgttttatagcatataactttgtcgtatgtagcataaatgtaagttcgaaaatacataacactggccataaactgtttagattgtgaaacttataaagcatagaacgttgtcgaatgtagcatacatgtatgtgcaactatgcataacatggcgttgtttattgcataaactggtgagactgtgaagcatgactgtacaaagagatatttccagtatagaacggtgataattgtatcataaacttgagacaaaaaagcataatgtatgggcataaaacggtgataattgtatcataaatgtatgggcaacaatgcataacacgatgttgtttactgcataaactggtcacacagtgaagcttatgactgtatagcggtgataattatatcataaacttgagagaaaataagcataacacgaggttgttgacagcataaaatttaaacgacactgcacatcatataaagtggagtttcatttgtaaatataaacgacagtgcttctatctatgtaccatatataaggcaaattaaattgataaaaaatatgataaacgcataaaaaatactgaacaatgtccaaattgttcttattctttgcgtatcttgcccttgtcagctcttgtcaatgcttgaataatattcttatcaaaatatttgatgcgtggtgttccacgtttattctgaggtgcagctgaatcatgaagatgattcaaataatacagttgcaaaagcataacatgaatcgttgtgagacataacaaaacataatctaaatgtatatgaattttgcataaaaaatatggctacatataaaagacaaaaaagtgatatgcttacaagaatgatgatggaacatccgtaaattgttgtagaaacatttgtaacgctcctagtatgtcacttcttggcagtttggcataaatcattgaatattagttggtaccagtctatctcgtggaaacgatacatttcctcagttaaaagaacctcatggttagttattccccagctggcagtagggaacaacaacctattgcacagtatcaggaagaaggatctaatgcttagatcatcgtcaaaccctttccttagacgatcttacgatgtcttatgtttccgtttacgaaacagtaatccacgtgtcggtccatgggccttcgcgttgatttcgcccagcagattacgtgtatcgggcccacgaatccagcaaccaagcacgcagtttttccagctctcctcacccgtaacgctcgcggcggccgaaccctagctttatcgccgccatctgcttcttctccactgcggttgccgaaccctagagattctccccccgtcgcccgaacgtcgtcgcattcaccttctccaccgcatagagggagacgatgtcgccttgttcttcttcaccggtgagggacccagaatcgcagagaaggtggcgctgcccccttgttcttctccaccgcagagaacgagccgcatttgatccaccgcggcgccgaaccctaggcaatccacccgccgtcgcgagcaccgtctccaacgctgagtccgacccgccgtcaacttcagcgtcccctacgcattgaccaagccgcacgtcgccttgggcttctccactgcagagggtcccgaaatcggccggccttcaggcacctccacacacgggaacatcatacatgaagaacgtagaccgacctccatctaatccaaagcggattataattcagtctactcaagagtgctttagtgtcgacataccccgtgttccggcgaaaactgttagacacaaaccaatgcaggctggtgatgaggacgataactttatgccattatcgaagaagcggaaggagctcaaaattacaaaggagacggtgcaacttattttggggttaccaaatgctggtggagaaacggcattaggcattgatgaagctgttgctgcaaacaatttaagggctaaacttggtttatcaaaagaagattttagtgttgcagctcttcaagatcgtttaaggaaagggtttgacgatgatctaagcagcagatccttcttcctgatactgtgcaataggttgttgttccctactgccagctggggaataactaaccatgaggttcttttaactgaggaaatgtatcgtttccacgagatagactggtaccagctaatattcaatgatttatgccaaactgccaagaagtgacatactaggagcgttacaaatgtttctacaacaatttacggatgttccatcatcattcttgtaagcatgtcactttttgtcttttatatgtagccatatttttttatgcaaaattcatatacatttagattatattttgttatgtctcacaatgattcatgttatgcttttgcagctgtattatttggatcatcttcatgattcagctacacctcagaataaacgtggaacaccacgcatcaaatattttgataggaatattattcaagcattgacaagagctgacaagggcaagatacgccaaggacaagaaccatttgtacattgttcggtatttttttatgcgtttatcatattttttttatcaatttaatttgtcttatatatggtatatggatagaagcagtgtcgtttatatttacaaatgaaactccactttatatgatgtgcagtgtcatttaaattttatgttgtcaacaatctcgtgttatgcttgttttctctcaagtttatgatataattatcaccgctgtacagtcataaacttcactgtgtgaccagtttatgcagtaaacaacgtcgtgttatgcattgttgcccatacttttataatacaattatcactgttttatgcttgttttgtctcaagtttatgatacaattatcaccgttttatactggaaacatctctttgtacagtcatgcttcacaggctgaccagtttatacaataaacaacgccatgttatgcatagttgcacatatatgtatgctacattcgacaatgttctatgctttataagtttcacaatctgaacaattcaacgctatgttttgaacatgtgttatgtatccttggatttccagctaccctttcagcattctttccttccattgaacaattcaaccatttacaattcttacgctccctatatttcttcaacgaaaatccaacctcgtatgcatattgactataaaaattatacgcctcgtccacgttactaaatgtcataccgactttaggtatcaatcttatatcaatattgtccggctgcgcacaaaaatttaacgtttacgattcaatagcgattaaatctaacgtaatataggtacaacattaaaaaaagtatgtaagaaaataatagtatcataattgggagaacttacatggctttgaagaatatgaggtgtatcctgttcatgcgccccaatatgtctcatgggaatgtgcttatctgcgccgaccacgtctaccgattttgtgtgctcatcaatatgtcaaggtgccctcaatgtcgcggggggagtaacagatacaccctctgtgtaactggtgatcgcagacgctacaggatgcatgtccattgaaatagacgtacatgttgatctatgcacagacgctacaggttgcatgtcatcgccagcgccgatgctggacattttctcgccgttaatcgccacccggtgctctcccttccgccgccgttaaccgccgccaatatcaaagatacgaacgtggacgagcggctgtaaattagaatttgtttcctcccgtaactgtgcctttatttacgcgaacgtggagcacgtctttccttatctcaaagcggtggagatttaaatgttgcatggtttatactatcatgttacacagcgttatgcagtcgtaaacggtgtgcacatggtaatatttgttcccgtgattcgtggcacaaaagattccttctatacatgatttatgcacattactacatatttttatgcgtgcgtaaaacgcctgtcacgtatcatccgggattcatggctatcatatgcatgactgacgcagcttgcgtacag

SEQ ID NO: 32910 - DNA, 3158 bp, Zea Mays
ccgaaccctagctttatcgccgccatctgcttcttctccactgcggttgccgaaccctagagattctccccccgtcgcccgaacgtcgtcgcattcaccttctccaccgcatagagggagacgatgtcgccttgttcttcttcaccggtgagggacccagaatcgcagagaaggtggcgctgcccccttgttcttctccaccgcagagaacgagccgcatttgatccaccgcggcgccgaaccctaggcaatccacccgccgtcgcgagcaccgtctccaacgctgagtccgacccgccgtcaacttcagcgtcccctacgcattgaccaagccgcacgtcgccttgggcttctccactgcagagggtcccgaaatcggccggccttcaggcacctccacacacgggtaagtcctcaagcgccaactcttacatttgcatatttacacaatctgaatcgtaaatcggtttcacattattagtaactcaattgtttcatttatcaaaaaacaattcagcataaattcattgttaaatggatacacaaatttatactcttcaacgtctcacacgtttatgcactaaacaataccgtgttatgctattttgttgacaaaattatgatatatacgtcaacatgttatgccataaacatctcgccgtacatttagggccagtacgcacgaaatagccagcttatacattaattggatgttgcatatgagcagaatttttattgctccattacgttttttatgtatatgtgttgtttgatttggcaggaacatcatacatgaagaacgtagaccgacctccatctaatccaaagcggattataattcagtctactcaagagtgctttagtgtcgacataccccgtgttccggcgaaaactgttagacacaaaccaatgcaggctggtgatgaggacgataactttatgccattatcgaagaagcggaaggagctcaaaattacaaaggagacggtgcaacttattttggggttaccaaatgctggtggagaaacggcattaggcattgatgaagctgttgctgcaaacaatttaagggctaaacttggtttatcaaaagaagattttagtgttgcagctcttcaagatcgtttaaggaaagggtttgacgatgatctaagcagcagatccttcttcctgatactgtgcaataggttgttgttccctactgccagctggggaataactaaccatgaggttcttttaactgaggaaatgtatcgtttccacgagatagactggtaccagctaatattcaatgatttatgccaaactgccaagaagtgacatactaggagcgttacaaatgtttctacaacaatttacggatgttccatcatcattcttgtaagcatgtcactttttgtcttttatatgtagccatatttttttatgcaaaattcatatacatttagattatattttgttatgtctcacaatgattcatgttatgcttttgcagctgtattatttggatcatcttcatgattcagctacacctcagaataaacgtggaacaccacgcatcaaatattttgataggaatattattcaagcattgacaagagctgacaagggcaagatacgccaaggacaagaaccatttgtacattgttcggtatttttttatgcgtttatcatattttttttatcaatttaatttgtcttatatatggtatatggatagaagcagtgtcgtttatatttacaaatgaaactccactttatatgatgtgcagtgtcatttaaattttatgttgtcaacaatctcgtgttatgcttgttttctctcaagtttatgatataattatcaccgctgtacagtcataaacttcactgtgtgaccagtttatgcagtaaacaacgtcgtgttatgcattgttgcccatacttttataatacaattatcactgttttatgcttgttttgtctcaagtttatgatacaattatcaccgttttatactggaaacatctctttgtacagtcatgcttcacaggctgaccagtttatacaataaacaacgccatgttatgcatagttgcacatatatgtatgctacattcgacaatgttctatgctttataagtttcacaatctgaacaattcaacgctatgttttgaacatgtgttatgtatccttggatttccagctaccctttcagcattctttccttccattgaacaattcaaccatttacaattcttacgctccctatatttcttcaacgaaaatccaacctcgtatgcatattgactataaaaattatacgcctcgtccacgttactaaatgtcataccgactttaggtatcaatcttatatcaatattgtccggctgcgcacaaaaatttaacgtttacgattcaatagcgattaaatctaacgtaatataggtacaacattaaaaaaagtatgtaagaaaataatagtatcataattgggagaacttacatggctttgaagaatatgaggtgtatcctgttcatgcgccccaatatgtctcatgggaatgtgcttatctgcgccgaccacgtctaccgattttgtgtgctcatcaatatgtcaaggtgccctcaatgtcgcggggggagtaacagatacaccctctgtgtaactggtgatcgcagacgctacaggatgcatgtccattgaaatagacgtacatgttgatctatgcacagacgctacaggttgcatgtcatcgccagcgccgatgctggacattttctcgccgttaatcgccacccggtgctctcccttccgccgccgttaaccgccgccaatatcaaagatacgaacgtggacgagcggctgtaaattagaatttgtttcctcccgtaactgtgcctttatttacgcgaacgtggagcacgtctttccttatctcaaagcggtggagatttaaatgttgcatggtttatactatcatgttacacagcgttatgcagtcgtaaacggtgtgcacatggtaatatttgttcccgtgattcgtggcacaaaagattccttctatacatgatttatgcacattactacatatttttatgcgtgcgtaaaacgcctgtcacgtatcatccgggattcatggctatcatatgcatgactgacgcagcttgcgtacag

SEQ ID NO: 32911 - DNA, 2805 bp, Zea Mays
atggcttctgtaaatctacaccgtccgcccctgcttacgcccacgttcgtcctcgtctccacgcccatgttcgtcccccgcctccccctattccacccccctgttcgcacctgccgcccctgctccccctgttcgcacccgccgcccctgctccccctgtcccgcgccgcggtgacaggatccgagaacacccctgcggacgcgtccaggattcaaggcctccccctcccttcccctgccctcactcgtacgccgtcgccccctccaccgccgtcgtgcgagagggaggagggacctctggatctccgtggggcgtggaggagtgggacgacgcacgcggaggcagccccggtcggttgctgctgtatccgtccaggatcgggggaattccaggaggcagtgatgtccaacagagacgaggtgtctgtttttgtcaagtgcttgcggcttggcgccgccgagtacctggtgaagccgctgcgcacgaatgagctgctgaacctttggacccatgtgtggcagcggagacggatgcttggtttgcccaagaaaaacttcttcaatgacaacttcgagttggtgctctcagaacctagcgatgccaataccaatagcaccaccctcctctcagatgagaccgacgataggcctaaaggaaacacgaatcaagaaacaggcacctcaaagcaacttgaatacgagtctaatcctttagttgctgagcccgaccagagagaaaagatggagggtgttccaggctctgccctagatgccagtcaaaaatcctctccgagaagagtgttttcacgccctataaaaactaacctgagggttgccgagtcgtctgcatttctagcatatgtcaagtcaagcaccccagccaccagctcatttgacagcgaattacaaaggggtggcagccgattagattccttggataaccagggtaattgctctagcgcaaccgatagaagtgacaccggtactgatgtaaatattcggaacaaagaagcttttgagatgcctgcgcagtaccctatggtatggttttcttcctctaacatgcatatggagcgaagcagcgaaggccataatgatacttcaggaactccacctgcataccatttcccattttattatccagggatggtagagcacaacatggcactttcgtcggcgcaagattttcaagcaaacataaacaatgctcaagcacatacaccgcaagaaggcacatttaagatttgccattatgcaggggagctcttctatatgcaacatgatagtggtcctgattggctgattttcattccaggctcaactgttcaagctgatgcagtagttggagaatatgggtttcttctcttgcgttcgattgcatctcaagacccacttagtgtttcaattgctgttttgcaacagttgaacatcccccctgaaatgtatcaagttggctacacaaaattgtttttccgtacaggacaggttgctgcactggaaaatgctaaaatacagatgcttcatggaaccctccgtattcagaaacacttccggggtatgcattctcgtcagggatatcaacgactcaagaaagcggcaatgaatttgcaatcatttatacgtggtgaaagagcaagaatacactttgataatcttgtcaagagatggagggcagctgttctaatacagaagtacactaggcgtcgacttgcagctaacatgtttaatgatcaactgaatcatatcattcttcttcagtctgtgatgcgtgggtgcctgactagaaggaaatacaagtgcctgcagaatgaaaaggagtcaaaggccagtcacaacatagttccaggggaaacaaggaagaataatgctgagtcaagaataagccattgtgtagattttagaaatttaccaattcacattcgtacaccattgattcatttgaagtgtcaggatgtgaaatatgggaagcgtgtgcacattcttccaattgatggtacagttcaaggcattacagggaacctatttgatgccttcttgaaacatactgaaatattttgtgatggggagcctattaagagagaggatgaggagcgtcttgatgaagttggttattatgatgttggtggagttagaaagcaaatggcccaaatcagagagcttgttgagcttccactacgtcatcctcagcttttcaaatctattggtgtgaagccaccaaagggcatattgctatatgggccacctggttctggaaagactcttattgctcgtgctgttgcaaacgagactggagcctttttctttctaatcaatggcttagctgttccattgaattggcgcccgctcagtacaaaattcgtcagtactatgatcggcggtggcatccaatagaagagaccctatccctatccaatcttgtagcagcacaccccgacgggtcaacaggcaacccaggaggcacctcatgttctgttcctccatgaatgagaacgatgattgtccttgcttgcgtgcgccaccgtgcacgggccaccacgctgcaaacacagtggcatcttgctcgcagccttggccagccaccgttgctagctggagcacagcactacacgggttgcttcaaacaagccggcgtcaaggagggagctgccctggcccggtggcccatggccgtcgtcgcgtctgccgcggcgcacaggaacgcaggcaggcaatgatgagcgctgctctggcaaccgctgacatgcagtatgatgccgggatgtgatagatcatacgccggcctcgaccggacggcggacgtgtcgc

SEQ ID NO: 32912 - DNA, 2642 bp, Zea Mays
atggcttctgtaaatctacaccgtccgcccctgcttacgcccacgttcgtcctcgtctccacgcccatgttcgtcccccgcctccccctattccacccccctgttcgcacctgccgcccctgctccccctgttcgcacccgccgcccctgctccccctgtcccgcgccgcggtgacaggatccgagaacacccctgcggacgcgtccaggattcaaggcctccccctcccttcccctgccctcactcgtacgccgtcgccccctccaccgccgtcgtgcgagagggaggagggacctctggatctccgtggggcgtggaggagtgggacgacgcacgcggaggcagccccggtcggttgctgctgtatccgtccaggatcgggggaattccaggaggcagtgatgtccaacagagacgaggtgtctgtttttgtcaagtgcttgcggcttggcgccgccgagtacctggtgaagccgctgcgcacgaatgagctgctgaacctttggacccatgtgtggcagcggagacggatgcttggtttgcccaagaaaaacttcttcaatgacaacttcgagttggtgctctcagaacctagcgatgccaataccaatagcaccaccctcctctcagatgagaccgacgataggcctaaaggaaacacgaatcaagaaacaggcacctcaaagcaacttgaatacgagtctaatcctttagttgctgagcccgaccagagagaaaagatggagggtgttccaggctctgccctagatgccagtcaaaaatcctctccgagaagagtgttttcacgccctataaaaactaacctgagggttgccgagtcgtctgcatttctagcatatgtcaagtcaagcaccccagccaccagctcatttgacagcgaattacaaaggggtggcagccgattagattccttggataaccagggtaattgctctagcgcaaccgatagaagtgacaccggtactgatgtaaatattcggaacaaagaagcttttgagatgcctgcgcagtaccctatgggatggtagagcacaacatggcactttcgtcggcgcaagattttcaagcaaacataaacaatgctcaagcacatacaccgcaagaaggcacatttaagatttgccattatgcaggggagctcttctatatgcaacatgatagtggtcctgattggctgattttcattccaggctcaactgttcaagctgatgcagtagttggagaatatgggtttcttctcttgcgttcgattgcatctcaagacccacttagtgtttcaattgctgttttgcaacagttgaacatcccccctgaaatgtatcaagttggctacacaaaattgtttttccgtacaggacaggttgctgcactggaaaatgctaaaatacagatgcttcatggaaccctccgtattcagaaacacttccgggttatacgtggtgaaagagcaagaatacactttgataatcttgtcaagagatggagggcagctgttctaatacagaagtacactaggcgtcgacttgcagctaacatgtttaatgatcaactgaatcatatcattcttcttcagtctgtgatgcgtgggtgcctgactagaaggaaatacaagtgcctgcagaatgaaaaggagtcaaaggccagtcacaacatagttccaggggaaacaaggaagaataatgctgagtcaagaataagccattgtgtagattttagaaatttaccaattcacattcgtacaccattgattcatttgaagtgtcaggatgtgaaatatgggaagcgtgtgcacattcttccaattgatggtacagttcaaggcattacagggaacctatttgatgccttcttgaaacatactgaaatattttgtgatggggagcctattaagagagaggatgaggagcgtcttgatgaagttggttattatgatgttggtggagttagaaagcaaatggcccaaatcagagagcttgttgagcttccactacgtcatcctcagcttttcaaatctattggtgtgaagccaccaaagggcatattgctatatgggccacctggttctggaaagactcttattgctcgtgctgttgcaaacgagactggagcctttttctttctaatcaatggcttagctgttccattgaattggcgcccgctcagtacaaaattcgtcagtactatgatcggcggtggcatccaatagaagagaccctatccctatccaatcttgtagcagcacaccccgacgggtcaacaggcaacccaggaggcacctcatgttctgttcctccatgaatgagaacgatgattgtccttgcttgcgtgcgccaccgtgcacgggccaccacgctgcaaacacagtggcatcttgctcgcagccttggccagccaccgttgctagctggagcacagcactacacgggttgcttcaaacaagccggcgtcaaggagggagctgccctggcccggtggcccatggccgtcgtcgcgtctgccgcggcgcacaggaacgcaggcaggcaatgatgagcgctgctctggcaaccgctgacatgcagtatgatgccgggatgtgatagatcatacgccggcctcgaccggacggcggacgtgtcgc

SEQ ID NO: 32913 - DNA, 2014 bp, Zea Mays
atcaagttaccactaaagtccaaactacacgacctagaagtgggcagcaagtaatatcacttttgtgtggtttgccacccaataaacatatccacatcgacagccaagcattcatgacacagagaaccatatttatatagtgggctctccgtaagtttctttgagccgggtagctacacagtacgcacacctatcccggctgcagcgcggttccagccactggtgccacgtggtttgtgctcttgtgggcacactggcctccacccatctctctcacgtctccccatccgcagcaaaggcacacagtacagattcggcccatcgttttatagccacaccatggctaggaagtgctcacactgtggcaactgcggccacaactccaggacctgcgggagagaaaccatgctctgcgaagctggcgacaacggcggccatggcggcctaaggctcttcggagtgcaggtccgtatcggcggcggcggcgcaggctcggcgtccatgaagaagagctacagcatggactgcctgcagctcgcggctcctggttgttccctcgtctcgccgtcgacgtcctcctcgtcgtcgtcgctgctgctgatgtcgattgaggagggatcggagaggggggcgccaaatgggtacctttctgacggacctcatggcagagctgtgcaggagaggaaaaaaggtacgtgaagacgcgagcagttaatttttcctgtttttttctctctctctctcttctggatgagcacatgcatgatgcatagtttaggtactagtacctgtttttcattttctctgatgatgaaaagagaaaagaagaagatttgtcctttggaaatccaaaatcttttctttagcccaaattgttttcttattggttggtggtagtattgtgcatcagtctgactctgacctaaagagttgcattatgctttactttcttggtaaaaataaagtcgctttatcttccctgcctgatagtgcaatcttgcaactgtaaatcaagccactgagagatatagtcggttgaataatcggttggttggtaacatagcagctggtgtgtttctaagcataagcaatactgcaggagttccatggagcgaggaggagcacaggcagttcctttccggcctggagaagctgggcaagggcgactggcgaggcatctccaggagctacgtgccgacgaggaccccgacgcaggtcgccagccatgcacagaagttcttcctcaggcagagcagcttggggaagaagaagcgccgctccagcctctttgacatggtgccgatttgcgagaacagtgcgagcatctccgatccgctgagcagcgaaggggcctcaacctctctgtcgctgaacgtgccacgccacggcgtcacctccgtctccgagagggcggccttggacctgaattcgacggaggaagacgacagcagggcggacgcgtcgtcggcatcggcatcaggtgcagggaccagaccaccgttcccggcagcgcagacggagccgctgcagccttcgtcgcttggccgtgggcgcggtcaccactgctctccgttggacctggagctggccatgtcgctgcctgccccatccatcggaacatgacgcgccgccgccgccgccgtacttatcgccatggaatcccacgcaggtcgcgccagaattcttcagcgcaggttgccaaggccgaggccgtgcgtgcctgctgtctcgcacaaacgtcccacgtgtaatcagaaccgggtctgctcctgtatgagtatgacatgactatgccatgttccccgcgcaggattgaaaccgtaaggttacgctagttgctagctttttattttgaacccttgtgaatgatattgttacgaaaaatagctcctaacataggttcactgtgatatatgttatatacactgtgatatatgttatgtagaccatatgttcgctttgatattaaatttattttttatggctattaaatatgactacgtgtcatctcaac

SEQ ID NO: 32914 - DNA, 2378 bp, Zea Mays
ccagttgttcaacacgcgcgcgctccgtctctgttttctttttccgaataacctgcgcgctccctccgacttccagcggtgcgcagtggcctttctttgtggcttccagcggctgtgactgggcgagcgccgacgctgctctactacagctgcccaggtcttcgtcgggcactttgccagcgacgtgcaccaaccagggtagaattttctgcaaaaccacaaaatggctcaggccgcaaggctgaatctgagaatgcagaaagagattaagcttctattggatgatccaccccatggggtttctcttaatctttctgaagacaaaaatgtcttgtcatcgttatcaagtatcgaagccaaaattgaaggacccgagggaacagtttatgccaagggagttttcattttgaagatacaaattcctgaaaggtacccttttcaaccaccgaatgtgacttttgttactcccatttatcatcccaatattgacaatggaggacgcatttgccttgatattctcaatttgcccccaaagtttttgttgttgatgatgatattgttgcacagggagcctggcaaccatcactcaacattgctactgtgttgacaagcattggcttgctgctaagtgagccaaacccggatgatgggttgatggctgaaataagccgagaatacaaatacaatagacaagtatttgacacaactgctcagttatggacagataagtatgctagttctgctgctgttggtgctagcggttggtgttctgtagatgctgatgtcctggcacagaatacacagatggaggacacaaataacctgggatcactgccaaatgtttctaaaaaagtttgtgaagggaatcaaaggaagatgcggttactgggacaaaagttatcactaaagtatgaaagatctgaagagagtatgaaaactgtcaagcaagacccagttgctagctacctaccatccatggcaggatccacttatcctactgcttgtttttcagatgtttcaggcagaaagaatgatacttcagagaacatgtctatcagtactgatagtggagtggtttcaaagcaagatcaccaaggccataaaaaggaattgcagttacctggccagagtctttttgttacctcagaagccccttgcaaaagcagcgatgccagtgatatgctatctaatcatcttccaatagatgcatctgatgctaaagatcatgtcatgcaatcttctgatggcattttagagaataattcggcaaggagaattggcggatcatcagctagcgcatataaagcaccggaaggaaaccgaaggaatatcagggcactgaagttgtcactgaaatcagtaaagcctgaaaagaaaaacaacgatcaaaatgaaaatatggctccaaaccatctgccttcacagtcaagctttagctatttgcagaaaaggcccttagatgctgtttcaaggaaaaaattcgacggaggtcctgcactggttcaacagaatcctaacactgagcagaaaccatcgaacactaacatggtatcaaatgaagagcgcaaccaaggtctaaagatgctgtgttcacaacgcaggaggctgtcactgaaatcggagccgcggctgcctagagtagaaaatgcctgtgaaaaggagactaagcgacccaataattttcctctaagcgatgagaaactcaatgaactgccatcatctgaaccaatccccaaaggtgaacccgtggcacccagtgaactcccattttcggcgccagcagtcctcaaaagtcaaaccagggcccttggctctgctggtggacagaaagactccagctcaggcaattcctgtgtcaatgaaaacacgcttgccatcgagaatgctgttgtttcagacagtgaagatagcgcagacgagcgtgaaaggcccccaagatcaaggctatcattgatgcggagacgactgggtggaaagctgaggacttagtgtcaccgcagaactatttctatgctgcgttgtaaattcttggaaggcgagtattccaatttgctcaaacaaattgtgcctgcgtttgtggtagatcaggccctataggttagtatatgtgttagagaactctgtcgtcctacaacgtcgtggagggtgctctgttggtggtactccttttgttggtaacgaaatttgaagaactagatttttcttatgcaattcagttttagcagctgcgtattgagcaagtattggtggttctacttttttttaaccagatgtttccggagggcatgtacagtgtaggaatgctaagagaacagtggaagtcttgtacatgatggcaagatcctttgatatttggttctactaaagttctttgttct

SEQ ID NO: 32915 - DNA, 2337 bp, Zea Mays
ccagttgttcaacacgcgcgcgctccgtctctgttttctttttccgaataacctgcgcgctccctccgacttccagcggtgcgcagtggcctttctttgtggcttccagcggctgtgactgggcgagcgccgacgctgctctactacagctgcccaggtcttcgtcgggcactttgccagcgacgtgcaccaaccagggtagaattttctgcaaaaccacaaaatggctcaggccgcaaggctgaatctgagaatgcagaaagagattaagcttctattggatgatccaccccatggggtttctcttaatctttctgaagacaaaaatgtcttgtcatcgttatcaagtatcgaagccagacccgagggaacagtttatgccaagggagttttcattttgaagatacaaattcctgaaaggtacccttttcaaccaccgaatgtgacttttgttactcccatttatcatcccaatattgacaatggaggacgcatttgccttgatattctcaatttgcccccaaagggagcctggcaaccatcactcaacattgctactgtgttgacaagcattggcttgctgctaagtgagccaaacccggatgatgggttgatggctgaaataagccgagaatacaaatacaatagacaagtatttgacacaactgctcagttatggacagataagtatgctagttctgctgctgttggtgctagcggttggtgttctgtagatgctgatgtcctggcacagaatacacagatggaggacacaaataacctgggatcactgccaaatgtttctaaaaaagtttgtgaagggaatcaaaggaagatgcggttactgggacaaaagttatcactaaagtatgaaagatctgaagagagtatgaaaactgtcaagcaagacccagttgctagctacctaccatccatggcaggatccacttatcctactgcttgtttttcagatgtttcaggcagaaagaatgatacttcagagaacatgtctatcagtactgatagtggagtggtttcaaagcaagatcaccaaggccataaaaaggaattgcagttacctggccagagtctttttgttacctcagaagccccttgcaaaagcagcgatgccagtgatatgctatctaatcatcttccaatagatgcatctgatgctaaagatcatgtcatgcaatcttctgatggcattttagagaataattcggcaaggagaattggcggatcatcagctagcgcatataaagcaccggaaggaaaccgaaggaatatcagggcactgaagttgtcactgaaatcagtaaagcctgaaaagaaaaacaacgatcaaaatgaaaatatggctccaaaccatctgccttcacagtcaagctttagctatttgcagaaaaggcccttagatgctgtttcaaggaaaaaattcgacggaggtcctgcactggttcaacagaatcctaacactgagcagaaaccatcgaacactaacatggtatcaaatgaagagcgcaaccaaggtctaaagatgctgtgttcacaacgcaggaggctgtcactgaaatcggagccgcggctgcctagagtagaaaatgcctgtgaaaaggagactaagcgacccaataattttcctctaagcgatgagaaactcaatgaactgccatcatctgaaccaatccccaaaggtgaacccgtggcacccagtgaactcccattttcggcgccagcagtcctcaaaagtcaaaccagggcccttggctctgctggtggacagaaagactccagctcaggcaattcctgtgtcaatgaaaacacgcttgccatcgagaatgctgttgtttcagacagtgaagatagcgcagacgagcgtgaaaggcccccaagatcaaggctatcattgatgcggagacgactgggtggaaagctgaggacttagtgtcaccgcagaactatttctatgctgcgttgtaaattcttggaaggcgagtattccaatttgctcaaacaaattgtgcctgcgtttgtggtagatcaggccctataggttagtatatgtgttagagaactctgtcgtcctacaacgtcgtggagggtgctctgttggtggtactccttttgttggtaacgaaatttgaagaactagatttttcttatgcaattcagttttagcagctgcgtattgagcaagtattggtggttctacttttttttaaccagatgtttccggagggcatgtacagtgtaggaatgctaagagaacagtggaagtcttgtacatgatggcaagatcctttgatatttggttctactaaagttctttgttct

SEQ ID NO: 32916 - DNA, 2341 bp, Zea Mays
ccagttgttcaacacgcgcgcgctccgtctctgttttctttttccgaataacctgcgcgctccctccgacttccagcggtgcgcagtggcctttctttgtggcttccagcggctgtgactgggcgagcgccgacgctgctctactacagctgcccaggtcttcgtcgggcactttgccagcgacgtgcaccaaccagaattttctgcaaaaccacaaaatggctcaggccgcaaggctgaatctgagaatgcagaaagagattaagcttctattggatgatccaccccatggggtttctcttaatctttctgaagacaaaaatgtcttgtcatcgttatcaagtatcgaagccaaaattgaaggacccgagggaacagtttatgccaagggagttttcattttgaagatacaaattcctgaaaggtacccttttcaaccaccgaatgtgacttttgttactcccatttatcatcccaatattgacaatggaggacgcatttgccttgatattctcaatttgcccccaaagggagcctggcaaccatcactcaacattgctactgtgttgacaagcattggcttgctgctaagtgagccaaacccggatgatgggttgatggctgaaataagccgagaatacaaatacaatagacaagtatttgacacaactgctcagttatggacagataagtatgctagttctgctgctgttggtgctagcggttggtgttctgtagatgctgatgtcctggcacagaatacacagatggaggacacaaataacctgggatcactgccaaatgtttctaaaaaagtttgtgaagggaatcaaaggaagatgcggttactgggacaaaagttatcactaaagtatgaaagatctgaagagagtatgaaaactgtcaagcaagacccagttgctagctacctaccatccatggcaggatccacttatcctactgcttgtttttcagatgtttcaggcagaaagaatgatacttcagagaacatgtctatcagtactgatagtggagtggtttcaaagcaagatcaccaaggccataaaaaggaattgcagttacctggccagagtctttttgttacctcagaagccccttgcaaaagcagcgatgccagtgatatgctatctaatcatcttccaatagatgcatctgatgctaaagatcatgtcatgcaatcttctgatggcattttagagaataattcggcaaggagaattggcggatcatcagctagcgcatataaagcaccggaaggaaaccgaaggaatatcagggcactgaagttgtcactgaaatcagtaaagcctgaaaagaaaaacaacgatcaaaatgaaaatatggctccaaaccatctgccttcacagtcaagctttagctatttgcagaaaaggcccttagatgctgtttcaaggaaaaaattcgacggaggtcctgcactggttcaacagaatcctaacactgagcagaaaccatcgaacactaacatggtatcaaatgaagagcgcaaccaaggtctaaagatgctgtgttcacaacgcaggaggctgtcactgaaatcggagccgcggctgcctagagtagaaaatgcctgtgaaaaggagactaagcgacccaataattttcctctaagcgatgagaaactcaatgaactgccatcatctgaaccaatccccaaaggtgaacccgtggcacccagtgaactcccattttcggcgccagcagtcctcaaaagtcaaaccagggcccttggctctgctggtggacagaaagactccagctcaggcaattcctgtgtcaatgaaaacacgcttgccatcgagaatgctgttgtttcagacagtgaagatagcgcagacgagcgtgaaaggcccccaagatcaaggctatcattgatgcggagacgactgggtggaaagctgaggacttagtgtcaccgcagaactatttctatgctgcgttgtaaattcttggaaggcgagtattccaatttgctcaaacaaattgtgcctgcgtttgtggtagatcaggccctataggttagtatatgtgttagagaactctgtcgtcctacaacgtcgtggagggtgctctgttggtggtactccttttgttggtaacgaaatttgaagaactagatttttcttatgcaattcagttttagcagctgcgtattgagcaagtattggtggttctacttttttttaaccagatgtttccggagggcatgtacagtgtaggaatgctaagagaacagtggaagtcttgtacatgatggcaagatcctttgatatttggttctactaaagttctttgttct

SEQ ID NO: 32917 - DNA, 2242 bp, Zea Mays
ccagttgttcaacacgcgcgcgctccgtctctgttttctttttccgaataacctgcgcgctccctccgacttccagcggtgcgcagtggcctttctttgtggcttccagcggctgtgactgggcgagcgccgacgctgctctactacagctgcccaggtcttcgtcgggcactttgccagcgacgtgcaccaaccagggtagaattttctgcaaaaccacaaaatggctcaggccgcaaggctgaatctgagaatgcagaaagagattaagcttctattggatgatccaccccatggggtttctcttaatctttctgaagacaaaaatgtcttgtcatcgttatcaagtatcgaagccaaaattgaaggacccgagggaacagtttatgccaagggagttttcattttgaagatacaaattcctgaaaggtacccttttcaaccaccgaatgtgacttttgttactcccatttatcatcccaatattgacaatggaggacgcatttgccttgatattctcaatttgcccccaaagggagcctggcaaccatcactcaacattgctactgtgttgacaagcattggcttgctgctaagtgagccaaacccggatgatgggttgatggctgaaataagccgagaatacaaatacaatagacaagtatttgacacaactgctcagttatggacagataagtatgctagttctgctgctgttggtgctagcggttggtgttctgtagatgctgatgtcctggcacagaatacacagatggaggacacaaataacctgggatcactgccaaatgtttctaaaaaagtttgtgaagggaatcaaaggaagatgcggttactgggacaaaagttatcactaaaatgtttcaggcagaaagaatgatacttcagagaacatgtctatcagtactgatagtggagtggtttcaaagcaagatcaccaaggccataaaaaggaattgcagttacctggccagagtctttttgttacctcagaagccccttgcaaaagcagcgatgccagtgatatgctatctaatcatcttccaatagatgcatctgatgctaaagatcatgtcatgcaatcttctgatggcattttagagaataattcggcaaggagaattggcggatcatcagctagcgcatataaagcaccggaaggaaaccgaaggaatatcagggcactgaagttgtcactgaaatcagtaaagcctgaaaagaaaaacaacgatcaaaatgaaaatatggctccaaaccatctgccttcacagtcaagctttagctatttgcagaaaaggcccttagatgctgtttcaaggaaaaaattcgacggaggtcctgcactggttcaacagaatcctaacactgagcagaaaccatcgaacactaacatggtatcaaatgaagagcgcaaccaaggtctaaagatgctgtgttcacaacgcaggaggctgtcactgaaatcggagccgcggctgcctagagtagaaaatgcctgtgaaaaggagactaagcgacccaataattttcctctaagcgatgagaaactcaatgaactgccatcatctgaaccaatccccaaaggtgaacccgtggcacccagtgaactcccattttcggcgccagcagtcctcaaaagtcaaaccagggcccttggctctgctggtggacagaaagactccagctcaggcaattcctgtgtcaatgaaaacacgcttgccatcgagaatgctgttgtttcagacagtgaagatagcgcagacgagcgtgaaaggcccccaagatcaaggctatcattgatgcggagacgactgggtggaaagctgaggacttagtgtcaccgcagaactatttctatgctgcgttgtaaattcttggaaggcgagtattccaatttgctcaaacaaattgtgcctgcgtttgtggtagatcaggccctataggttagtatatgtgttagagaactctgtcgtcctacaacgtcgtggagggtgctctgttggtggtactccttttgttggtaacgaaatttgaagaactagatttttcttatgcaattcagttttagcagctgcgtattgagcaagtattggtggttctacttttttttaaccagatgtttccggagggcatgtacagtgtaggaatgctaagagaacagtggaagtcttgtacatgatggcaagatcctttgatatttggttctactaaagttctttgttct

SEQ ID NO: 32918 - DNA, 600 bp, Zea Mays
ctttttttcagtggttctctccttttgtcatattttctgtgagtcgagtgatcaagaccaagagcgttgagtacatgcccttcctcctgtcgctggtgagcttcctcaacggctgctgctggacggcctacgcgctcatccgcttcgacctctacgtcacgatcccgaacgccctgggcgcattcttcggcctcgtccagctgatcctctacttctgctactacaagtcgacccccaagaaggagaagaacgtggagctgcccaccgtctccagcaacgtcggcggcggcaacgtcaccgtcagcgttgagcgatagatgatgtagctgccgccgcccgtcgagaacgaactcgacgagacgtgctttacccacaagtagttttggccttgtctaattgctcttctcggatgatcgtttaagtgagtgttagttagttttgccctgcgtgtgatgtcaggaacaattaatatatccatgtggctgtgtttgccattctagataattaagaacaatcgtatctgattgctaccacttatcccttctttctgcatcattatcctagagtgaggatggatctagatattgcattgctaatttt

SEQ ID NO: 32919 - DNA, 1634 bp, Zea Mays
aatttaattttagctaggcgtgtgatgcacgtgggaatgggatttgcggggagggggagaatgagaaagacagtgcggggagggggtaatgggaatggcagaacaacacagaatggcagccgggaagacagtgtgggaatgggaatggcagaacacggaatggcagcctaccccttaccgccttaataagtagtagagatatataccacaacatgtatttgatgtttatggaaatcttttttctttctatgaaacttatagacggtaccagcggcggctctaaccctgccgtatgacaatggagcaatgcagtaagcgccgaggagggcgagactcagaggggaaaacctgacagccgtcgaggaggagcaatggaggggcgagactgggagcaattgagccgctcgcgaggagcaatggagccgatccgttttgtggaacggatctaagaaaaccagtcgtaacaacgctcagtatacgaagaaagcgcgtttgagtaaaaaaaccaagacggaaggtgttgtaatactacaatcttaattgtcacgttcggaatactaattttcggaagcccagtaaaggcttgttcggttctaccccaatccatatggattgagggagtttcaatccctagtaaggtgtcgttcgtttctttcggaatggaggcatggaataattcgtagccggtttgtttctctaatttatataagttttgatcagctggaatgatttctagtccattcctggacaaatgagcaagacataggtcaaaatctctttcaatccgtattaatccccttcaattcatatagattgaaaataaccgaacaagctacaactacaatagaagttgcttggttcaaaaaaaaaactcgtctctctcggggtgctcacctgctcacacgtggttaatttctcgctttggttgcagcatttagctgtagtgagatggatatcctttatcagtgtaaggaggttttgaagatccagaagtttcggcgtatggtgtcatatgctggattctactgcttcacttccctcattacttatgcttacacaagcaatacgacaagggctgggatgtcaagggctgaccagtattattcctcctaccctgctggtactgaactactaactgacactgcaaagctttacaaggctgcattgggcaattgttttgaagtagatgaatggggcccaatagagttctccatcatggcaaaacattttgaccggcaagggaaaccaccatatgcctaccatgctcaatatctggcacaccttctctcccatgggcagctcgatggaagcggttaaatgcaggatgtattgttggtaactgcatcaacgcaactagaatttcactatatcttgtataaaaatgttgcctttgctagaacaatgagttcagactgcaccagtttagaagttacagaactggcatcagaaacaagttctgaatttttttggtcattggctggtacgatatcagtgttgaatttgtgcgatcgccgaacaatttctgaaaaaaaacatgaccttgtcttgttggaacatttacactgtccttttattgttgaataaaccactgaatgttaatgcatgcattaattcggccgttgtgtgaacaaata

SEQ ID NO: 32920 - DNA, 1671 bp, Zea Mays
aatttaattttagctaggcgtgtgatgcacgtgggaatgggatttgcggggagggggagaatgagaaagacagtgcggggagggggtaatgggaatggcagaacaacacagaatggcagccgggaagacagtgtgggaatgggaatggcagaacacggaatggcagcctaccccttaccgccttaataagtagtagagatatataccacaacatgtatttgatgtttatggaaatcttttttctttctatgaaacttatagacggtaccagcggcggctctaaccctgccgtatgacaatggagcaatgcagtaagcgccgaggagggcgagactcagaggggaaaacctgacagccgtcgaggaggagcaatggaggggcgagactgggagcaattgagccgctcgcgaggagcaatggagccgatccgttttgtggaacggatctaagaaaaccagtcgtaacaacgctcagtatacgaagaaagcgcgtttgagtaaaaaaaccaagacggaaggtgttgtaatactacaatcttaattgtcacgttcggaatactaattttcggaagcccagtaaaggcttgttcggttctaccccaatccatatggattgagggagtttcaatccctagtaaggtgtcgttcgtttctttcggaatggaggcatggaataattcgtagccggtttgtttctctaatttatataagttttgatcagctggaatgatttctagtccattcctggacaaatgagcaagacataggtcaaaatctctttcaatccgtattaatccccttcaattcatatagattgaaaataaccgaacaagctacaactacaatagaagttgcttggttcaaaaaaaaaactcgtctctctcggggtgctcacctgctcacacgtggttaatttctcgctttggttgcaggcaatgtcgtatccttcggcctcttcctctccccagtcatttagctgtagtgagatggatatcctttatcagtgtaaggaggttttgaagatccagaagtttcggcgtatggtgtcatatgctggattctactgcttcacttccctcattacttatgcttacacaagcaatacgacaagggctgggatgtcaagggctgaccagtattattcctcctaccctgctggtactgaactactaactgacactgcaaagctttacaaggctgcattgggcaattgttttgaagtagatgaatggggcccaatagagttctccatcatggcaaaacattttgaccggcaagggaaaccaccatatgcctaccatgctcaatatctggcacaccttctctcccatgggcagctcgatggaagcggttaaatgcaggatgtattgttggtaactgcatcaacgcaactagaatttcactatatcttgtataaaaatgttgcctttgctagaacaatgagttcagactgcaccagtttagaagttacagaactggcatcagaaacaagttctgaatttttttggtcattggctggtacgatatcagtgttgaatttgtgcgatcgccgaacaatttctgaaaaaaaacatgaccttgtcttgttggaacatttacactgtccttttattgttgaataaaccactgaatgttaatgcatgcattaattcggccgttgtgtgaacaaata

SEQ ID NO: 32921 - DNA, 1951 bp, Zea Mays
aatttaattttagctaggcgtgtgatgcacgtgggaatgggatttgcggggagggggagaatgagaaagacagtgcggggagggggtaatgggaatggcagaacaacacagaatggcagccgggaagacagtgtgggaatgggaatggcagaacacggaatggcagcctaccccttaccgccttaataagtagtagagatatataccacaacatgtatttgatgtttatggaaatcttttttctttctatgaaacttatagacggtaccagcggcggctctaaccctgccgtatgacaatggagcaatgcagtaagcgccgaggagggcgagactcagaggggaaaacctgacagccgtcgaggaggagcaatggaggggcgagactgggagcaattgagccgctcgcgaggagcaatggagccgatccgttttgtggaacggatctaagaaaaccagtcgtaacaacgctcagtatacgaagaaagcgcgtttgagtaaaaaaaccaagacggaaggtgttgtaatactacaatcttaattgtcacgttcggaatactaattttcggaagcccagtaaaggcttgttcggttctaccccaatccatatggattgagggagtttcaatccctagtaaggtgtcgttcgtttctttcggaatggaggcatggaataattcgtagccggtttgtttctctaatttatataagttttgatcagctggaatgatttctagtccattcctggacaaatgagcaagacataggtcaaaatctctttcaatccgtattaatccccttcaattcatatagattgaaaataaccgaacaagctacaactacaatagaagttgcttggttcaaaaaaaaaactcgtctctctcggggtgctcacctgctcacacgtggttaatttctcgctttggttgcaggcaatgtcgtatccttcggcctcttcctctccccagtgtaggcgctcatcgatcggtccgggttcatctggctctgggtggttttttgatttggttagggttttgtttgtactgatatatggagaggaactgagaccaactgcggtctgcggcactgcgctcgccgccagcctccctagggtttccttccccgtcgaccatcagcgcctccccagatttggacctaagccctcgcggacgtgcgcgccggccgcctggttgccggtcgaatccgccctccagccgctgccaacgtcgatctgctactgacgcaccgcaagggagctgtagtgagatggatatcctttatcagtgtaaggaggttttgaagatccagaagtttcggcgtatggtgtcatatgctggattctactgcttcacttccctcattacttatgcttacacaagcaatacgacaagggctgggatgtcaagggctgaccagtattattcctcctaccctgctggtactgaactactaactgacactgcaaagctttacaaggctgcattgggcaattgttttgaagtagatgaatggggcccaatagagttctccatcatggcaaaacattttgaccggcaagggaaaccaccatatgcctaccatgctcaatatctggcacaccttctctcccatgggcagctcgatggaagcggttaaatgcaggatgtattgttggtaactgcatcaacgcaactagaatttcactatatcttgtataaaaatgttgcctttgctagaacaatgagttcagactgcaccagtttagaagttacagaactggcatcagaaacaagttctgaatttttttggtcattggctggtacgatatcagtgttgaatttgtgcgatcgccgaacaatttctgaaaaaaaacatgaccttgtcttgttggaacatttacactgtccttttattgttgaataaaccactgaatgttaatgcatgcattaattcggccgttgtgtgaacaaata

SEQ ID NO: 32922 - DNA, 1860 bp, Zea Mays
aatttaattttagctaggcgtgtgatgcacgtgggaatgggatttgcggggagggggagaatgagaaagacagtgcggggagggggtaatgggaatggcagaacaacacagaatggcagccgggaagacagtgtgggaatgggaatggcagaacacggaatggcagcctaccccttaccgccttaataagtagtagagatatataccacaacatgtatttgatgtttatggaaatcttttttctttctatgaaacttatagacggtaccagcggcggctctaaccctgccgtatgacaatggagcaatgcagtaagcgccgaggagggcgagactcagaggggaaaacctgacagccgtcgaggaggagcaatggaggggcgagactgggagcaattgagccgctcgcgaggagcaatggagccgatccgttttgtggaacggatctaagaaaaccagtcgtaacaacgctcagtatacgaagaaagcgcgtttgagtaaaaaaaccaagacggaaggtgttgtaatactacaatcttaattgtcacgttcggaatactaattttcggaagcccagtaaaggcttgttcggttctaccccaatccatatggattgagggagtttcaatccctagtaaggtgtcgttcgtttctttcggaatggaggcatggaataattcgtagccggtttgtttctctaatttatataagttttgatcagctggaatgatttctagtccattcctggacaaatgagcaagacataggtcaaaatctctttcaatccgtattaatccccttcaattcatatagattgaaaataaccgaacaagctacaactacaatagaagttgcttggttcaaaaaaaaaactcgtctctctcggggtgctcacctgctcacacgtggttaatttctcgctttggttgcagggttttgtttgtactgatatatggagaggaactgagaccaactgcggtctgcggcactgcgctcgccgccagcctccctagggtttccttccccgtcgaccatcagcgcctccccagatttggacctaagccctcgcggacgtgcgcgccggccgcctggttgccggtcgaatccgccctccagccgctgccaacgtcgatctgctactgacgcaccgcaagggagcatttagctgtagtgagatggatatcctttatcagtgtaaggaggttttgaagatccagaagtttcggcgtatggtgtcatatgctggattctactgcttcacttccctcattacttatgcttacacaagcaatacgacaagggctgggatgtcaagggctgaccagtattattcctcctaccctgctggtactgaactactaactgacactgcaaagctttacaaggctgcattgggcaattgttttgaagtagatgaatggggcccaatagagttctccatcatggcaaaacattttgaccggcaagggaaaccaccatatgcctaccatgctcaatatctggcacaccttctctcccatgggcagctcgatggaagcggttaaatgcaggatgtattgttggtaactgcatcaacgcaactagaatttcactatatcttgtataaaaatgttgcctttgctagaacaatgagttcagactgcaccagtttagaagttacagaactggcatcagaaacaagttctgaatttttttggtcattggctggtacgatatcagtgttgaatttgtgcgatcgccgaacaatttctgaaaaaaaacatgaccttgtcttgttggaacatttacactgtccttttattgttgaataaaccactgaatgttaatgcatgcattaattcggccgttgtgtgaacaaata

SEQ ID NO: 32923 - DNA, 1822 bp, Zea Mays
aatttaattttagctaggcgtgtgatgcacgtgggaatgggatttgcggggagggggagaatgagaaagacagtgcggggagggggtaatgggaatggcagaacaacacagaatggcagccgggaagacagtgtgggaatgggaatggcagaacacggaatggcagcctaccccttaccgccttaataagtagtagagatatataccacaacatgtatttgatgtttatggaaatcttttttctttctatgaaacttatagacggtaccagcggcggctctaaccctgccgtatgacaatggagcaatgcagtaagcgccgaggagggcgagactcagaggggaaaacctgacagccgtcgaggaggagcaatggaggggcgagactgggagcaattgagccgctcgcgaggagcaatggagccgatccgttttgtggaacggatctaagaaaaccagtcgtaacaacgctcagtatacgaagaaagcgcgtttgagtaaaaaaaccaagacggaaggtgttgtaatactacaatcttaattgtcacgttcggaatactaattttcggaagcccagtaaaggcttgttcggttctaccccaatccatatggattgagggagtttcaatccctagtaaggtgtcgttcgtttctttcggaatggaggcatggaataattcgtagccggtttgtttctctaatttatataagttttgatcagctggaatgatttctagtccattcctggacaaatgagcaagacataggtcaaaatctctttcaatccgtattaatccccttcaattcatatagattgaaaataaccgaacaagctacaactacaatagaagttgcttggttcaaaaaaaaaactcgtctctctcggggtgctcacctgctcacacgtggttaatttctcgctttggttgcaggcaatgtcgtatccttcggcctcttcctctccccagtgtaggcgctcatcgatcggtccgggttcatctggctctgggtggttttttgatttggttagggttttgtttgtactgatatatggagaggaactgagaccaactgcggtctgcggcactgcgctcgccgccagcctccctagggtttccttccccgtcgaccatcagcgcctccccagatttggacctaagccctcgcggacgtgcgcgccggccgcctggttgccggtcgaatccgccctccagccgctgccaacgtcgatctgctactgacgcaccgcaagggaggacaagggctgggatgtcaagggctgaccagtattattcctcctaccctgctggtactgaactactaactgacactgcaaagctttacaaggctgcattgggcaattgttttgaagtagatgaatggggcccaatagagttctccatcatggcaaaacattttgaccggcaagggaaaccaccatatgcctaccatgctcaatatctggcacaccttctctcccatgggcagctcgatggaagcggttaaatgcaggatgtattgttggtaactgcatcaacgcaactagaatttcactatatcttgtataaaaatgttgcctttgctagaacaatgagttcagactgcaccagtttagaagttacagaactggcatcagaaacaagttctgaatttttttggtcattggctggtacgatatcagtgttgaatttgtgcgatcgccgaacaatttctgaaaaaaaacatgaccttgtcttgttggaacatttacactgtccttttattgttgaataaaccactgaatgttaatgcatgcattaattcggccgttgtgtgaacaaata

SEQ ID NO: 32924 - DNA, 976 bp, Zea Mays
ctgacactaaaataagctgaagttataaataacctcataaatgacatttattgtaagacgacgcttgatgacatttatctctcgagccaggttcaccaggaggcgaaacaatctcgcctactcccctacccgttcagacttctccacacagccgccgcgagacatgctacggcgcgccgccactacggctacgctcaatggccgcgcggcggcgtggttccgtcacctcacccgtaggccgatgacgcttccgcccgctcatctcgggcgccaccatctgcaggcccaactccgaccaccacgcgtcgtgtgggtgccgccgctcccgcacttgtgtggcgcgcggggctacagctacactcgcatggcgcggcgcatcccaatcgcgaggcccgacgggtactccagctccgacggcgaggcagaggatccggacgcgggcgaggccggggagatcacggagcctgtcggcgagggcgcggagggcgacaactcggagggcagcgagaccgaggtggaggggttcatgctggacttgtcatctgacaacttgttcggcgacagcgacggtgacggcgacggcgacgaggaaggcacagaagagggagggaaatagcgaggcgggatttcgctgtggggagctggcgaatcgagcttcgtcttggggaagcttctgcatgcggattattggattgatgaccaacaggacagtggagaagtaacgcgcatccgcgcattctgatgaccaattgtattggctatgcatatcacactctgttatcacgcttcatgtgagagtacatccaatttcttcttcgccgagcctacgatggcttcaggttaggtttgcatcgggttaatctttcagttttcaattttttttttttggattcctgggtgaaaatagtggcattttggaaaagtacaaatttttttactgacatgggatgatgggaaattgggaattcaatacttt

SEQ ID NO: 32925 - DNA, 670 bp, Zea Mays
aagacgacgcttgatgacatttatctctcgagccaggttcaccaggaggcgaaacaatctcgcctactcccctacccgttcagacttctccacacagccgccgcgagacatgctacggcgcgccgccactacggctacgctcaatggccgcgcggcggcgtggttccgtcacctcacccgtaggccgatgacgcttccgcccgctcatctcgggcgccaccatctgcaggcccaactccgaccaccacgcgtcgtgtgggtgccgccgctcccgcacttgtgtggcgcgcggggctacagctacactcgcatggcgcggcgcatcccaatcgcgaggcccgacgggtactccagctccgacggcgaggcagaggatccggacgcgggcgaggccggggagatcacggagcctgtcggcgagggcgcggagggcgacaactcggagggcagcgagaccgaggtggaggggttcatgctggacttgtcatctgacaacttgttcggcgacagcgacggtgacggcgacggcgacgaggaaggcacagaagagggagggaaatagcgaggcgggatttcgctgtggggagctggcgaatcgagcttcgtcttggggaagcatcaagtatctttagcttcgtctccacctttggttgctccacacgtctctgag

SEQ ID NO: 32926 - DNA, 1079 bp, Zea Mays
cgaaattccaccaccataaatttatattgaaagacaacacactctctaggtatcaccttgcaatcaagcatgcttgtttaccctctctttttacgaggagaaattcaatctgactagagttttggctactattataggtcactaaatgagattctcttccttaagagagtgttggatatcaataggtcaaaagctaccacaaactacaagactttttctccctcctgattcctattaccatatccaaaacctttatgaaccacctcaaaacttgcacttgttctgcctacatgttcaattaaggcctcctatgaaaagcttcttggtagtaggtatagctctaaccttaccatttaagtttttctagaaaagtttcttagcactctcattctacttggtggacatacacactaattatgttgaagaacatatcacccactgcaagcttgactaaaataaccctatcttcttgccttctcgcatccaccatattcttgatgctcttatcagtcaaaacttctactccatttctatatacattttttcctatgtaccaaagcttgaaaccgatatgtccatcttccgacccttctatttagtatcttggacgcaatagatattttcacacattatgttgttgccttagctaacccacttaacttgtaaatgattctatattccaactacctaaacgagttttacttggttcgactagctttcttaccctttttacatgttcatgaaaaatgtaaaataaaaaatgttagaaactactattctacatcaccattttcaacggagacaacaaacagactattctgcagtctgcaccaccattttcaacagaaacaaccaacgaagcatccaaagggcaagtaggaaaaaatccacgtcattcaactaagcattgtttcacaatagctttcaacacgggaaggtttccatctgcatacgactgaatattcacttcactaagaagtgaactttgagaacaagctcactgctcactttcatgagtctacatgatgaagattttaatcttatattgttccaattgaatttatttgccagaattctgc

SEQ ID NO: 32927 - DNA, 1338 bp, Zea Mays
cccgtctctgtccgccgagatattttctctcctgtgcggccactgccacccgccccgttcgttattatatatacaacaacaggctgccagtctccctcgttgacatcggttcaccgtccgcccgggtacattccgtacgtacaagaggcggtcgcgacgctctagcttgcattgcaccagcgcgcagagcggaaggaggtggaaagcgcccagagagatctcgagagagagagagaggctggtcggcacatactagttcattccgtttggatagagacgcacgcaacgcaggccaccacaacgtgaggagcgggaggaggagggagagggaggatgcaggcgcatcaccgtcagtcgtactacgcggtgctcggcgtgcagccgggcgccaccgccgccgagatccgcgccgcctaccaccgcctcgccatgaggtggcacccggacaagatcgccagcggcggcggcggcgccgatccggcgcgcgcggaggaggccaagagcaggttccagcagatacacgaggcgtaccaagtgctgtcggatgacaagaggagggcgctgtacgacgccggcatgtacgacccgctggacgacgacgacgaccaggaggacgtcgagggattccacgacttcgtgcaggagatggtctcgctcatggccagagaggagcccgtgtacagcttggccgagctgcaatccatgctggacgggatgatcaaggatttcaccgcgccacagccttggcctagcggcttctacactggtggcggtggcggtggggcgtcgtcgccgtcgccgctcggcaaaccaagcagccaagagcagagtacggcttcgtcacgcttgcatccctacgggttcggggacgcgccgtgcttcagccgcacggcgttctcacaatgatggcgatgatgaataaataaatttatacatggatcgagcttttatccttctggcagcaatgggggttttctcgctcgtggaggtggagggagagtaagaacccgtgaaagccatcgtccgccagggtcagactctgattggcagttgcaattgctttggactgcggctgcagggatgaaagaaggctcaagcaaataagggaagggcgctgacaagatttctaacaaggctgattagcccatccatcagtcattgcctactgcagatggattcagcaagcaaggaagggaatgactctgagaagatcgctagcaaatttgattggcccatcgatccgccattgcctaccgcagctggatcactcactctgctgcctgcttgattcatacatttgcttattttctgtggctctttatatgctcgagcattttc

SEQ ID NO: 32928 - DNA, 998 bp, Zea Mays
acacgtttctttatcgtaactttttcactgctccagtgaaggcacacatccgccgccgtttcttctcccatcatcttcctcgcagcgccggcgctccctctcccgctcccttccttactcgcgctcggcacacaggcggcggcgctcgggctctcagcgacggcgtcagcggcttaccctcgcgccctcgcctccggtcctccgcacaccggccggtgaccctgcgacaacattgcatctgaactgcattggatcctaagagatgatggatgagtcttttcttgataggatggtttcccaacttcggtcaacatgcaagtactacactggatatcccaaggacttagggcgatcaagaattataccattcacatctgagcgtcagtttgtgcagctattacatgaaggcaggtgcacatatacacagcatcttgataaagttctggaagaggccgcagctaaattttatccacatatcaagtttgtccgagttgagtgcccgaagtaccctgggttttgcctcacaaggcaaaggaacgaatatccatttgttgaagtattctacaacccagaacaggctgcaagcccaggaaagagcgtggatcctaacatcaccaagtattctgtaaaagtgctaccgttcaactatgaccaaagcgtgtatggatttcgagaatatttcaagaagcatggtttcaagtattctgaaacaaactagatctgttgttaaagatctgcctcgagagtagtcctagggacttgagtagcatgtggaggcagttgttgtatggagttgaaatggcgtgaggctctaatgggaggccttgactagttcattcgagaatgcctgtcatgtattcatttgtatacgggctactgctcatgcctagagatttgcttttccgtacctatgaaccattggatttggtaatgttttacctctcaaagcccggagtgagcaatttgcatcattttttcaagcactgtcgatttgagat

SEQ ID NO: 32929 - DNA, 994 bp, Zea Mays
acacgtttctttatcgtaactttttcactgctccagtgaaggcacacatccgccgccgtttcttctcccatcatcttcctcgcagcgccggcgctccctctcccgctcccttccttactcgcgctcggcacacaggcggcggcgctcgggctctcagcgacggcgtcagcggcttaccctcgcgccctcgcctccggtcctccgcacaccggccggtgaccctgcgacaacattgcatctgaactgcattggatcctaagagatgatggatgagtcttttcttgataggatggtttcccaacttcggtcaacatgcaagtactacactggatatcccaaggacttagggcgatcaagaattataccattcacatctgagcgtcagtttgtgcagctattacatgaaggtgcacatatacacagcatcttgataaagttctggaagaggccgcagctaaattttatccacatatcaagtttgtccgagttgagtgcccgaagtaccctgggttttgcctcacaaggcaaaggaacgaatatccatttgttgaagtattctacaacccagaacaggctgcaagcccaggaaagagcgtggatcctaacatcaccaagtattctgtaaaagtgctaccgttcaactatgaccaaagcgtgtatggatttcgagaatatttcaagaagcatggtttcaagtattctgaaacaaactagatctgttgttaaagatctgcctcgagagtagtcctagggacttgagtagcatgtggaggcagttgttgtatggagttgaaatggcgtgaggctctaatgggaggccttgactagttcattcgagaatgcctgtcatgtattcatttgtatacgggctactgctcatgcctagagatttgcttttccgtacctatgaaccattggatttggtaatgttttacctctcaaagcccggagtgagcaatttgcatcattttttcaagcactgtcgatttgagat

SEQ ID NO: 32930 - DNA, 1733 bp, Zea Mays
acacgtttctttatcgtaactttttcactgctccagtgaaggcacacatccgccgccgtttcttctcccatcatcttcctcgcagcgccggcgctccctctcccgctcccttccttactcgcgctcggcacacaggcggcggcgctcgggctctcagcgacggcgtcagcggcttaccctcgcgccctcgcctccggtcctccgcacaccggccggtgaccctgcgtgcgtgcctatctctctcatcccgcccccggtggatcgtcaacgccaccggccccgccagctgcgccgcgcgcggcctgatggctgcgggagccagcagccgctgctccaccaaggcgttcgcgccgctttggtagcgcttatgccccaaagcgaagcgttacccgtcctcctagcgcttcagcgcgctgaagcgtgcgcttagtgccgccttttggaaccctggcctcttcgcatttgcagggagaagactcagtttatcccttgcactcccttcccagaccccactcatgtagagcctccggcactgggtctgtcctttattactataactgtgatacttttagttctgattctgattgggcagttgatcgtgtggtgcagtccagtgagggaaattattggttggttctcacaggctctctaacttatgccagtcctgttataggttatcagttcctctgtatattagtcatatatacagcacttgcccttgggaatgggggagacaaatgttcagttttatgtacttatgtcagaaatctcatattactatatgagataagtctcttcctaattactatattagataagcttccaaccagtgtttattcataccattgtctctctctgtctaatatgttgtttaatgaactctgtttcccccttattagtgcatgcatgattgtccattcttatttttgtccatcattaattacctgttcattaccataggacaacattgcatctgaactgcattggatcctaagagatgatggatgagtcttttcttgataggatggtttcccaacttcggtcaacatgcaagtactacactggatatcccaaggacttagggcgatcaagaattataccattcacatctgagcgtcagtttgtgcagctattacatgaaggcaggtgcacatatacacagcatcttgataaagttctggaagaggccgcagctaaattttatccacatatcaagtttgtccgagttgagtgcccgaagtaccctgggttttgcctcacaaggcaaaggaacgaatatccatttgttgaagtattctacaacccagaacaggctgcaagcccaggaaagagcgtggatcctaacatcaccaagtattctgtaaaagtgctaccgttcaactatgaccaaagcgtgtatggatttcgagaatatttcaagaagcatggtttcaagtattctgaaacaaactagatctgttgttaaagatctgcctcgagagtagtcctagggacttgagtagcatgtggaggcagttgttgtatggagttgaaatggcgtgaggctctaatgggaggccttgactagttcattcgagaatgcctgtcatgtattcatttgtatacgggctactgctcatgcctagagatttgcttttccgtacctatgaaccattggatttggtaatgttttacctctcaaagcccggagtgagcaatttgcatcattttttcaagcactgtcgatttgagat

SEQ ID NO: 32931 - DNA, 1813 bp, Zea Mays
ctcgggccttgcagccgcggtccacaaagacaattatctcgctgtctgccgactgccggtgtcagcttcctccggatcaagaagcggcaggtagagcagagaagccagctagctagcgagctgaggagagatggaagcgcagaacggctacagcccgcttcttgccggggacgaccacgaggcgatccacgccaccggcgccggtgatgaaggcgacgacgtcaagctcaggctgctcggatacaagcagcagctcaagcgcgacctctcgttcaatgttgtcggacagtgtgtgccgctctatgcagtgggcggtgaccaccagcgtggactactccctggcgcagctgatccaggtgatcatcctgctcgccaccggcggcaagaacggcggcggctacctggcgtccaagtacatggtgatcggcttccacgccgccatcctgctcagccacgccgtcatcaacagcctccccatcaccttcctctcctttttcggccagttcgccgcggcctggaacatgctaggtgtgtttgtcctgatggttgccgtgccgaccgttgccaccgagagggccagcgccgagttcgtgttcacccacttcaacaccgacaacggcgccggcatccgcagcaacttgtacatctttgtcctgggcctgctcatgagccagtacacgctcacaggatacgacgcctcggcgcatatgaccgaagagacgaagaacgcggacaagaacggccccatcggcatcatcagcgccatcggcatctccatcctcgtgggctggggctacatcctcggcgtcaccttcgcggtcaaggacataccctacctgctgagccccgacaacgacgccggcggctacgccatcgccgaggtgttctacctcgccttcaagagccgctacggcagcggcgccggcgggatcgtctgcctgggggtcgtcgccgtcgccgtctacttctgcggcatgagctccgtcaccagcaactccaggatggcctacgccttctccagggacggcgccatgcccttctcctccgtctggcacaaggtcaacaagcaggaggtgcccatcaacgccgtctggctctcggctctcgtcgcgctctgcatggcgctgccgtctctgggaagcctggtggcgttccaggccatggtttccatcgcgacgatcgggctgtacatctcgtacgcgctgccgatcctgttccgggtgacgctggcgcgcaagtacttcgtgccggggccattcaacctgggccgctacggcgtcctggtcggctgggtcgccgtgctctgggtggccaccatcaccgtgctcttctcgctgccggtcacgtacccggtcaccaaggacacgctcaactacacccccgtcgccgtcggcggcctcctcttcctcgtcctcgcgtcctggctgctcagcgccaggcactggttcaagggccccgtcaccaatctggacggatgaatatgtataattggacatgtatagtagagaggctggcagagacggaagagttgttgccaacgacatgttgtaactactttgttccaaaaattaactagcaaggaaaccgacaggatgaattttctcgatcgtgaaatgcatcagcatgtcgattgcgagcaccatgttttgggtgactcaaatcttcatcgtgagggctcaagggtattatgcccagtccgtaggagaagatcatcaaagctagttgaagtgttctttgttgattggattgttgtggcacccaagttgaacgttaagcttaattaggaggcttcttcaatacagaactacataat

SEQ ID NO: 32932 - DNA, 2418 bp, Zea Mays
ggccttgcagccgcggtccacaaagacaattatctcgctgtctgccgactgccggtgtcagcttcctccggatcaagaagcggcaggtagagcagagaagccagctagctagcgagctgaggagagatggaagcgcagaacggctacagcccgcttcttgccggggacgaccacgaggcgatccacgccaccggcgccggtgatgaaggcgacgacgtcaagctcaggctgctcggatacaagcagcagctcaagcgcgacctctcggtggtagccaacttctccgtgagcttctccatcgtgtcggtggtaacgggcgtgacgacgctgttcgggacgggcctccagttcggcgggccggcgacgatggtgtacggctggcccatcgccggcgccttcaccgcggccgtgggcctcgccatggccgagatctgctccgcctaccccacctccggcggcctctacttctggagcgccaggctctgcacccaccgccgctggggacccttcgccgcctggctcaccggctgggtgctgtccaacttcgccttctccttctccatcatctcggtgctgacggggatcacgacgctctacaacacggggctcaacttcggcgggcccgccaccatgacgttcggctggttcgtcgccggcgccttcaccatggccgtcggcgcctccatggccgagatctgctcctccttccccacctccggcggcctctactactggagcgcgcgcctctccggcaagcgctgggcgcccttcgcctcctggatcaccggatggtacgctgctgactggcagtgggcggtgaccaccagcgtggactactccctggcgcagctgatccaggtgatcatcctgctcgccaccggcggcaagaacggcggcggctacctggcgtccaagtacatggtgatcggcttccacgccgccatcctgctcagccacgccgtcatcaacagcctccccatcaccttcctctcctttttcggccagttcgccgcggcctggaacatgctaggtgtgtttgtcctgatggttgccgtgccgaccgttgccaccgagagggccagcgccgagttcgtgttcacccacttcaacaccgacaacggcgccggcatccgcagcaacttgtacatctttgtcctgggcctgctcatgagccagtacacgctcacaggatacgacgcctcggcgcatatgaccgaagagacgaagaacgcggacaagaacggccccatcggcatcatcagcgccatcggcatctccatcctcgtgggctggggctacatcctcggcgtcaccttcgcggtcaaggacataccctacctgctgagccccgacaacgacgccggcggctacgccatcgccgaggtgttctacctcgccttcaagagccgctacggcagcggcgccggcgggatcgtctgcctgggggtcgtcgccgtcgccgtctacttctgcggcatgagctccgtcaccagcaactccaggatggcctacgccttctccagggacggcgccatgcccttctcctccgtctggcacaaggtcaacaagcaggaggtgcccatcaacgccgtctggctctcggctctcgtcgcgctctgcatggcgctgccggtatatgtaaatttcggttttttttttcttccacacacgcatgaaggattcggcagtctcgtctcatcagtcatccatgtgaacccgcgaaccatatatgcagtctctgggaagcctggtggcgttccaggccatggtttccatcgcgacgatcgggctgtacatctcgtacgcgctgccgatcctgttccgggtgacgctggcgcgcaagtacttcgtgccggggccattcaacctgggccgctacggcgtcctggtcggctgggtcgccgtgctctgggtggccaccatcaccgtgctcttctcgctgccggtcacgtacccggtcaccaaggacacgctcaactacacccccgtcgccgtcggcggcctcctcttcctcgtcctcgcgtcctggctgctcagcgccaggcactggttcaagggccccgtcaccaatctggacggatgaatatgtataattggacatgtatagtagagaggctggcagagacggaagagttgttgccaacgacatgttgtaactactttgttccaaaaattaactagcaaggaaaccgacaggatgaattttctcgatcgtgaaatgcatcagcatgtcgattgcgagcaccatgttttgggtgactcaaatcttcatcgtgagggctcaagggtattatgcccagtccgtaggagaagatcatcaaagctagttgaagtgttctttgttgattggattgttgtggcacccaagttgaacgttaagcttaattaggaggcttcttcaatacagaactacataat

SEQ ID NO: 32933 - DNA, 1536 bp, Zea Mays
cgtttgcctgccctgaaccaagcgatgggcggtgaccaccagcgtggactactccctggcgcagctgatccaggtgatcatcctgctcgccaccggcggcaagaacggcggcggctacctggcgtccaagtacatggtgatcggcttccacgccgccatcctgctcagccacgccgtcatcaacagcctccccatcaccttcctctcctttttcggccagttcgccgcggcctggaacatgctaggtgtgtttgtcctgatggttgccgtgccgaccgttgccaccgagagggccagcgccgagttcgtgttcacccacttcaacaccgacaacggcgccggcatccgcagcaacttgtacatctttgtcctgggcctgctcatgagccagtacacgctcacaggatacgacgcctcggcgcatatgaccgaagagacgaagaacgcggacaagaacggccccatcggcatcatcagcgccatcggcatctccatcctcgtgggctggggctacatcctcggcgtcaccttcgcggtcaaggacataccctacctgctgagccccgacaacgacgccggcggctacgccatcgccgaggtgttctacctcgccttcaagagccgctacggcagcggcgccggcgggatcgtctgcctgggggtcgtcgccgtcgccgtctacttctgcggcatgagctccgtcaccagcaactccaggatggcctacgccttctccagggacggcgccatgcccttctcctccgtctggcacaaggtcaacaagcaggaggtgcccatcaacgccgtctggctctcggctctcgtcgcgctctgcatggcgctgccggtatattctctgggaagcctggtggcgttccaggccatggtttccatcgcgacgatcgggctgtacatctcgtacgcgctgccgatcctgttccgggtgacgctggcgcgcaagtacttcgtgccggggccattcaacctgggccgctacggcgtcctggtcggctgggtcgccgtgctctgggtggccaccatcaccgtgctcttctcgctgccggtcacgtacccggtcaccaaggacacgctcaactacacccccgtcgccgtcggcggcctcctcttcctcgtcctcgcgtcctggctgctcagcgccaggcactggttcaagggccccgtcaccaatctggacggatgaatatgtataattggacatgtatagtagagaggctggcagagacggaagagttgttgccaacgacatgttgtaactactttgttccaaaaattaactagcaaggaaaccgacaggatgaattttctcgatcgtgaaatgcatcagcatgtcgattgcgagcaccatgttttgggtgactcaaatcttcatcgtgagggctcaagggtattatgcccagtccgtaggagaagatcatcaaagctagttgaagtgttctttgttgattggattgttgtggcacccaagttgaacgttaagcttaattaggaggcttcttcaatacagaactacataat

SEQ ID NO: 32934 - DNA, 895 bp, Zea Mays
ctgaaaagaccaaaaaaaagagcgaaaataaaaaaaaaataaacaaagaagaaacagaataccagtgtccatcgacatgcaggcaccaggaacctatgcaattgaatccggccaaggacatttaccccgctagctgcgtcgtcacggcgtcggggcggcgggaggcgtgccccccgaccgctcctcctccgacgtggcgcgcacgccctcgctctcctccgtcgtggtccggccgccgtggccggcgccgatctcctcgaccatccttaccacgtcgggggcgtcggggcgcgcgtcggggaccgtggccacgcacgccatggccacctgcagcagggccaccatctcctcctcggcgctggcgcccaggcgcaccagctcgacgtcgaacacctcggcggtccactcctcccgcaccacggactgcacccagcggggcaggtccagcgtgccgtcgccctccagcgacgcgtgcgagggggacttgcccgtcaggagctccagcagcagcacgcccagggagtacacgtccgacttgtacgtcagccgccgcgcgtccaccgcctccggggcgcggtacccgccgccccgcgccgccgtcgacgccgcgaacagctggtgcagcccgaagtcggagagcgccgccgcgtccgcgtccgggcggagcagcacgttcgacgccttcacgttgccgtgcaccaggttgtgcgccgtgtgcaggtgcgccagcccgcgcgcggcggacagcgccgcccgcatgcgcgcctcccagtccagcggcgtccggcccgagccccggctccctgcgcgtgcatgcacaaactcccgtcagaaagctcaaactagcaacacagggaaaaaaaatacacctgcaaaccttcgcaatgacttagcg

SEQ ID NO: 32935 - DNA, 394 bp, Zea Mays
tacttggtcaaaattctgctcccactgattcattagaatgccagtatacggtttacattctctgagaagcgctccgtgcctctgacaggtataaagctacagctggccatggcagcaggaggctcaactcttgtcaaggcttttgttcgcctacaacttctagtgtttctaattctataagcttgaaatacaaaataaactctatacaccgttacatggtactatggtagcttgctcagcctaatcgatgggccgtagatgctacacgcacagcaggtatgcttgtccacccacccacccacagccaacaaacgaatgcaaaaattgccaatggcctgggcctcctgtcctcatctattctggaagttgaacttcatgatggcaaaactgaaca

SEQ ID NO: 32936 - DNA, 228 bp, Zea Mays
atggtaatatctccctcgatatatcccccagtttttctgccagctaagacatccataagggtggtctttccagcaccactaacacccatcaatgcagttagaactcctggcctaaaagaaccactaacgcccttcaaaagaagcaaacgatcttctgtcactccttgcgctttcatcgcctgcttgtaaaaatatattatcaggtaagaaatcttggctatatcatat

SEQ ID NO: 32937 - DNA, 968 bp, Zea Mays
tccactgccccgccccaccacgtctggcgctaggcaaaccacgcacgcacctgacgggctcgcatcgcacccgccacccccaccgcacgcaccctctcgtcctctctgcgccgacccggctcttctcccccaacacaatcctccttccccgatccagtctcgcggtcgcggccacgctgagggacagcgagaagagacagacacagatcgcgcgcggagatgtcgtcggactcgtcgtcgtgggcgcgcgccctggtgcagatctcgccctacaccttctccgcaatcggtatcgccgtctccatcggcgtctccgtcctcggcgcggcatggggtatcttcatcacggggagcagcctcatcggggccgccatcaaggcgcccaggatcacttctaagaacctcatcagtgtcatcttctgtgaggctgtcgcaatttatggcgtaattgtggcaatcatcctccagacaaagcttgaaagtgtgccaacatctcaaatgtatgatccggagtctcttcgagctggctatgcaatctttgcatctggccttatcgttggctttgctaatcttgtttgcggctgcgcactgtctgatgctcagaactcatcactcttcgtaaagattttggtgattgagatcttcggcagcgctctgggactgttcggtgtcattgtgggcatcattatgtcatctcaagcgacatggccagcaaaagcttgattttcaccatttgtagctctgtaaattattcagatggagtgtatcgaaatgtgcatgtggtctaactgcattttcatgttccttttatgtggcgtcttttttggcagaacacgaaatgcggcgcgcgtaccgccaccgattgtagagttgctattcttactgccggagtactccatgtgtgttggatatcttgttggcatattaaataaatgcttggacaaaataaaatgaatttttttgccatc

SEQ ID NO: 32938 - DNA, 2157 bp, Zea Mays
ggcgcatccggccgtccgtccttccggagccccacgcgataggcggcaggagcggccgagcgggacacgcgttgcagttcaacaccgcagtggcattctcgctactgagactgagaggcagcctccctccctcgtgggcgttctaccgcgacgggggtcgctctataaagagcggacgcgcccccgctgctctgctcatcgtcctccgctccagcagctgccacagagacatcagagagcggtcctccttgtgagtctgagctgaagaggaggaggaggaggaggagaagcagcagcgcagccggaggagggagagcgaagatgcgccgcgtcgcgctgttgctcgtcgccgccgtgtgcgcgctggcggcgccggctgccgcggtcgtcactgacggtcttctcccgaacggcaacatcgaggacgaccactcgccgctccccgcctggatgatcgtctcgtccaaggccgtcaagtacgtggacgccgcgcacttcgccgtgccccagggcgcgcgcgccgtcgagctggtgggcggccgggagagcgcgctcgtgcaggaggtccgcaccgtgcctgggtggacctaccgcctcgccttcgccgtgggagactcgggcgacggctgcgcgggctccatggccgccgaggcctacgcggcgcgcgccacggtcaaggtgccctaccagtccaggggcaccggaggatacaagcgcgccgtgctggacttcacggccatcgccaaccgcacccgcgtcgtcttccagagcaccttctaccacatgaagcccgacggcacgctctgcggcccgctcgtcgacgacgcctcgctcgtcggcctgcgcaagaagaagcccgcgcgccgcctcatgcagctcctgtaagcgctgcttccacgtgcactacgcccggacggaccgcgcaagcgatggtgtaatacggctggtatgtgttttttggtttggtgtgtgcgtgcgtggtatacgcgtgccgtgcgcgccctgtggctgtggctgcagtggcgtcgcgttgggtgttttcttgttgtgacgaagaaaaaagggtatgggttggggtggtccgctggccggcgcaccggggttttaatcaacttatattaacctgatgaaggtgaaggtgaaggtgacacgggattaatggcaaaaatgctcctagtactatttttgtaatatctcgtgctcctgcttctcctcgctcagatctccacctccacgtcgcgcgtccagaccttgttgttctcgatcgtagtccagttccaggttgttgatgccgttccggtggaggaagttcttccaccaccgacgaagaagccaaccgctcatatatactcgaactggactctattgtaatccggacaggacgatcaagcatctcctagcgtcttacggctccttgtaggggcaggtttggtttggcgctctgagtccaggatcagttcagatttgatgtcttccatactcagaagccgccagcacttttttttttgcaatatgacactgaattagcctttcaagtttgtggatccgtttctttcttcctcatgcaattcgagaagctacatgcatggtgattcttctgacccagataaaagatctagaggatggggttctatggtgaaaaatatgaatggagaggtattggtggctggggctggggacacaactcgacatgcttcatcggccctacatgcatggcgatgtgccattgtggcctacaagagcattcattcttcatgcaattcagttaggtttatcgcaaatcatattagaaaaaaaaatggatgccatggtgtttcatattcgagacatgatgcaatcagagttttctttttttaatgcctcgttatgtaatagagactgtaataaggtatctgattaattgtttagctatccatggagcttatattttttttttaaaaaaaaagattttgaaaaatgtaaactggctaacacgctatggctgaagcgcatgtgttgttttaaattgttcgccgtacgtgctccatttcacttctcaacagcactcttctcttatttgtcccatgagccttgcctacgggatctgaatcctccgtcgtgcggccgtctcctcctttctccatcgtaacactgcttcgtggtcgtggcattatcctg

SEQ ID NO: 32939 - DNA, 224 bp, Zea Mays
gatgcgacagactttttataaatattaatagattcaatattgaaaataaaaatataaatttacacagtaaattatatatgttacttgtttacaatcaaagaaagaagacaaaaaaattaacatttaaataaagatctaaatccatctctagtagtttcgagaaccaggggaggaggctaagggaagcacagtaatttcaaacaccgagggacgagggaggaggt

SEQ ID NO: 32940 - DNA, 1025 bp, Zea Mays
ctgccctggtccccgtccgtcccgggtcccgccgcctgaacagccacttcccctgtccggtgccccggttgctttatttcctctctgccgtctccgtccccgggtcaaatcgaatcgagcccatccatctccatttccgccgccgccgccgccgagagaccccaaccccacccatccaccaccatgtggcgccgcctccacaccctagcccccgccttgcgcagggctaccgccgccgccgccggggcccctgcggcgtccgcctcctctgcagcccgcgccgccccgctctcctcggcggccgccgctttccgccgcaccagcccgctcctctcaggggacaagccggcgagtgtggaggacgtcatgcccatcgccacggggctcgagcgggaggagctggaggccgagctcaaggggaagaagcggtttgacatggatcccctggtcggccccttcggtaccaaggaggaaccatctgtagttgagtcctactataacaagcggatagtcggctgccctggtggtgagggagaggatgaacacgatgttgtatggttctggttgaaaaaagatgagccgcatgagtgtccagtctgctcgcaatactttgtgcttaaggtcattggtgatggtggtgatccagatggtcatgacgatgaagatgatggacatcactaaggatgccttgtggttctgaaaataagaatttggtgaggcagatgaatccaatacacttctttttctagaaccagactgctccacggcatccttgtttatgaaaagacagttggccatcaagcagatggacgaacaacgacgatacatcatgttaaccaaaggatgagatgacttgccactttgctaacctctacaaaaggacctgtggtttccacgaggaaaccacgttcacgtcacccaaaattctccccagccgttgggccttccatcctgcggctgagattgcttggagccgctttatttcataaaaggggtccagggactttgagacaatgactattgag

SEQ ID NO: 32941 - DNA, 932 bp, Zea Mays
ataaaaaactgtcatttcagacacacaggctacgacagctggtcccagctcctggattctcttccactgcccaatgtcaaatggatttgccctactgcaccaacgcggcctgtcgcggctttcggtggattcccttgcactgcatggttcgatgtggacgagacttcactggacggccacgctgacatcgaaggcatggacgcttcagccgcgcatgtggcgaacctgctgtcctccgagccatctgatgtgagccttgggataggagggttcagcatgggcgctgccgctgcgctccactccgccgcgtgctacgctcacggcagattcaccaacggtgtcgcctatccgatcaacctcagggtcgtcgtcggtttgagtggctggcttcctagctccaggaccctaaggagcaagatcgagagctcgcagctcgcgcttcgaaaagcttccggcttgccaatcctgctcagccatggaatggccgatgaggttgtcacctacaggaacggcgagaggtcagctgagattctacggagctcgggattccagtacacctacttcaaaccctacaacgggcttggtcactacactatccctgaagagatggacgacgtcagcaagtggctgaggtcaacgctgggactctgagcggcctatctcgtggctaatctcaaagtcaaatacgttggcatacatagagaaagagagagagaggtattgacaatatgcagagggtttgataggctatgtgatttgtgagttgactgtcatggcttggtaggctgtaactccacgcgcttaatttctctcactgatacatatacataccatgttagtttaccggtaatgtaccctgttactaccactaaagaggatgcctgtaatgcagtatttgtattgctcggtttttaaatacatatgagtttttg

SEQ ID NO: 32942 - DNA, 3684 bp, Zea Mays
ctcgaggttgttgatctcctagatcttgtgaactccgtactccacagcctacaaacgacagataactgattaggaatcaaagagaacccttgggggatctgaaaacagagggactttcctgccagtaaagttatccatgtgaaaaaaggaggaagaaactaccatccacatggaataaatataaattacagaagataaagaggagcattacagaaaacgcacctgatccctgtgagcaaaccaagcatccaagacttcacacccatttattcgtggagccatttagtggcggcctcttcgaagaattttaaaaaagttatggcaaaagctatttcacttagcagttgtatgaaaaatagtaaatagattatttacaagaaaaataacatggtatattggaaagaatttcattaacagaaagtacacgaacgcatacacgctcaaggcttaaaagaacatgtctccaggtccattgcttcacatcatcattcaatagatagcacactcactaacataatcaacatatgtaatgctttaaacatataacaatcaacacctcaacaatcattcaataattttttacattgttcagttaaaataaagaacataatagaagagcatagattgtggtcacctagattcacctcggtcaaatagtggtgtttactgagtcaagccttgtggtctccaaacagcaaaacaattgacaatacaatagtggtaggtcctctgagaattgaaggtgaacaacatttccattgtctgcccattataccacaacagttccagagtctgtagattttataaacaaaggagttccaaagttgaagaaaagagtttcaggaaatccatgatgacagggaaggtttgaacatcacaattattgaagtcaagggtccgcaacttgttacagttcaaaaatttccctatacctctgttgatgctgcttgtaccatcgcgcaagcaggtttacctactctttacaccaacatgcaagaaggaagaaaaccctttgcacttcatatgtgagctagtgtcgtcgtcactctttgtctgcttgatgggcattgtcatgaaacaacggcgtatgacggtatcaacgcataaactaatgcctgcatctaaggttagatgattagatacagagtacaaaggcccactatagtacaccatggttcggggacctctgcccatgattttatatactattggtttctctgtcaaatgaaggcaatcaagcatgttcatgacaatctgtttgaactgataaataaacaagaataaagacagctcccccacacaaatgtttttgaactgatcgagcatctagcatagtataggcatgatcacgtgtaccttcaaaaaaggaacctacttgttacccccacgatactacataattttccttgtgcaagaatctagcataatctgctacttgcatccctatctagcttacccgtacttaagcatcatcgatacaacaacccatggcaatctgctactccaaggtttagacagactatcaagcatacagagacatggcagtgccagacttgaagtgaaacaatgatggataggttatattcatagaaattagtgtctgcaccagacttatttaattaaaagaaaaccatgaggagatccaaccctaagaaagagcctattggaatcatcagaacgactggctacaagcatatcccacaactaccagattgaggactcgaagctcccgtaatatatcgtcagatcaaagactcaaagcccccgtaacccataacccataataaattgtatataccttgtaaagtattggagagccaaagttgacgctaaagcatcagtattccttagagagcacaattgaggatggggattggggtggccccaaatctgtgtcttggggtggcatggtatttacggaccaccatccttggcgtcgatgggagttggcgtcgatttggggcgaggatttgggctgcatgattctcgttgatgggaggttagcgtcgatttggggcggggataacagggaggtgagaaggaccgccatcctcggtgatgggcgagcgatttggggcgatgtcagggccacacgctgtcgtcaatgtcggggccccgcgctggcgacgatggaaggtgctgtgatttggggaacgagggttgcagtggatggcgacgatggaaggcgccgcgatctggggaagggcgaggatggtggggaagggcggtgatggcgggggcatggtcaagcagaggacagtgtggacggcagtgtggcgggggcaacggtgaagcatgtgaacacccacaatagggtcatatagagtagtagagatatgtgtgaaataaatcaaaacatcaaaaaagccatgtaatctccacatttgaaggaagtatgaaacaacaaagaaaaataaacccaaaaaatcatagatttgaggtttataacatgaaatatgatttcttaatcatgaataaatcaaaacaatgcaactgaaataaatcacaacttcataataaaaatataaagcataaacataacaatgcattttaggtttgaatcaataatgtattaatatataatacaaacattcaaaccaaatgaacagtcgaatcttgtgcaaaaatgaggcccaacgacatgccattctcaattcttccagttttatcctaccaatctagtgatccaaacagtttaattacaagtgaatcaacagaaaacaagatctacagactgcaagtataaaaattaagagcagtggttggaacatagaaaattgagttcactaaacataataagcatatcaaagtcacaaaatggtgaagcagtgcccagattcacaggagctaacaaatctctttttagcctcataccagccaagtgacatgctagaaacataagtggcagaaatatacttatccagaggtgcagatcctatgctagattattcatcaatattttcaattcctggtgtgaaatttgtaggtacgaaaaatatgctggaaatcctattagacattccatggaggcataaaaaccatggtgaaaaagttaaaaggaacatgaacttaggcatgaattacatatacataggaatgtttttaatatgaagtatatatagctttattttgcaggaagtatgaaacaaaaagaaaaataaaccaaaaaacaaagcatagaatataaattcgaggaaaacttgtgtaccgtgattattacacgtggtaggagaaaaaattgtcgatgaggctgcgctcgccgctgatttccaagaccttcggaatctcctcgggccggatcacgctgtataaggaacaaaagtgatcaaagaaaagcatagctatagaagatggcaccagatttcgaacattcagacttcacaaaaatactgaatttaagtagcaaaaaaatatgagaaaaatattgttaatgaagtagtaataaaattgctccatgctagtgaaggtaaaactaccaaaaagaattctcaacggcattgctcacagtaagttcaaaacacaattttgagtaaaaaaggagcatttgagaacaccattctcatttttcgatgactaatgatctcccatgaatacaaggccattgatatgtactttatttcttcaaattaaatacaatttaatgtcattcagcagcagaaattgccaaaacctacatgcataaat

SEQ ID NO: 32943 - DNA, 2478 bp, Zea Mays
cggtaatctctcagcttctcgttgcgcaacctccccggtttcccagtcccgctcaccgccgccatcgccggcgcccatggcggcctcaccaggggcagacgaaccgctggagagctcaacagtggagcatcctgaggcggtccagccgccttcactgccgattgttgaggcggaaccgcctccgcctcttataggggcggcggctgcacatgaagcgatctctccgaagaagtcctcttccccttcgccgcatccggcgaacttggcggtcgaagtttctccagaggtggaggcctcttcctcgtctccgtccccgtcgtcttctccctctccatatccccaaatcatggaggtgttgccgggtgcgccgcaaccactgtctcctccacgtgcttctccgtctgttgcggcgcgtgcttcgacggacctctccattacagaggcgatgtcaatggcgtcccaggaagcagctcgcccacccccgtcccccgagtctacggacgcgcacttgcacaccgcgtccgcgctgccgacgtcgctgatggagattgggcctggagtgttggtgccacagcagcagccgcgaccaccatctccggaaatggcccctccactatgtgattattcagagtccgcacagccatcgccgctgtgtcatccggatggatgcacaggcgcctcgccagacgcaccgatggacgaggtaatgacaggaacgtcaggaaaagcagctgggccgtcgccaggtgaaaactcggagttagcacagtcacagctgccgcatcttccagctgaaaacacatatgtctgttcaaatgcagcgggcaagatatcagcagtgacttcagaagaaggtactcagcctgcgatggcgtcaattgatggtgaggggccattagagattggggcgcagagatcattgcaggagctagaggagacaacaacatccttcaagatggaagctgagccttgttcgccggagatggctcctccagggtttgaagattgtaagtctcaatggttgccactgtcacatcctaatcctctggttgaatccacacacactgtggtacaagtgactactaccaatgccatgggaacgactccagatgcagcaactgggtcactgtcttcacctcgcctacttccactgttgaagagagatacagaggggcaaacacttccaagatcatgctctccaacaacagaagctgcaccatgttcaccagatatgccacctccaggctttgagaattgtaagtcatcgtggctaccactaccaactcttcaacccatagctgaaaccacgcatgtgttgcacgacgtggctcccaccaagtcaatggtagtgggacttatggaaaaggcatgctcagtgctggcattggagcggacagatgtgaagatagactcggagcagagcctattgccgccattggagagtgaaactgagagttcattgcaagggccactgccaaggtcaccttcttccatgatgaaagccattccctgttcaccagatactgcacctccagggtttgaaaatttaaagttcacacagttacagcctccctgtccacctctggtgcagactgcacatgttttgcaaaattcagccaataatgaggccatgcctgtgatatcaaaggaagctcctcagccattgcctgcattggatgcaacggatttagacattgatgccaaacctgtcctggcaccaccatcagagagtaaaccagggcaattgtcaccggaacctccccttctgctacctcatgtagcacagcatacaacgtgttcgccagggatgacacttttagggtctgagaatatcgagtcctcgcagctgctgccacgagctctggttcttcctcttgatcagacttcagacatcttggctgatgcagggaccaagaagacagtcacaatggaagaagtgtgtcatccgctgcctgtagcaggagtggcggaagaagccaataggtctgttcttctaccagtaacggaaaatggctgtgagggccaatcaccacacctagagctacagacttcttcccctgcagtgaatgctgcagctacatcactggagatagctcccggaagttttgagaattcagagtcctctcagttgatctctccttgtctagctcagacaatagaccccactactcatgcatcaggtattatgcctactattgttaagtcagagaaaacgaatctgccactatcttcattacaggctacatgcacagacatggaaagtgcaatcctgtgtcagtcgccatcgaagagtgaagagagatcactgccacaggcagagcaacacccgtcttctccatctgttaaggacactacttgttcaccagaggttgcacccccaggttatgaaaattttgactctttggatcagctgccaccatcaccacctctttgctcaaaatttgtctgctgcgtgaagataagatgtgaaagttcgga

SEQ ID NO: 32944 - DNA, 3795 bp, Zea Mays
aatctctcagcttctcgttgcgcaacctccccggtttcccagtcccgctcaccgccgccatcgccggcgcccatggcggcctcaccaggggcagacgaaccgctggagagctcaacagtggagcatcctgaggcggtccagccgccttcactgccgattgttgaggcggaaccgcctccgcctcttataggggcggcggctgcacatgaagcgatctctccgaagaagtcctcttccccttcgccgcatccggcgaacttggcggtcgaagtttctccagaggtggaggcctcttcctcgtctccgtccccgtcgtcttctccctctccatatccccaaatcatggaggtgttgccgggtgcgccgcaaccactgtctcctccacgtgcttctccgtctgttgcggcgcgtgcttcgacggacctctccattacagaggcgatgtcaatggcgtcccaggaagcagctcgcccacccccgtcccccgagtctacggacgcgcacttgcacaccgcgtccgcgctgccgacgtcgctgatggagattgggcctggagtgttggtgccacagcagcagccgcgaccaccatctccggaaatggcccctccactatgtgattattcagagtccgcacagccatcgccgctgtgtcatccggatggatgcacaggcgcctcgccagacgcaccgatggacgaggtaatgacaggaacgtcaggaaaagcagctgggccgtcgccaggtgaaaactcggagttagcacagtcacagctgccgcatcttccagctgaaaacacatatgtctgttcaaatgcagcgggcaagatatcagcagtgacttcagaagaaggtactcagcctgcgatggcgtcaattgatggtgaggggccattagagattggggcgcagagatcattgcaggagctagaggagacaacaacatccttcaagatggaagctgagccttgttcgccggagatggctcctccagggtttgaagattgtaagtctcaatggttgccactgtcacatcctaatcctctggttgaatccacacacactgtggtacaagtgactactaccaatgccatgggaacgactccagatgcagcaactgggtcactgtcttcacctcgcctacttccactgttgaagagagatacagaggggcaaacacttccaagatcatgctctccaacaacagaagctgcaccatgttcaccagatatgccacctccaggctttgagaattgtaagtcatcgtggctaccactaccaactcttcaacccatagctgaaaccacgcatgtgttgcacgacgtggctcccaccaagtcaatggtagtgggacttatggaaaaggcatgctcagtgctggcattggagcggacagatgtgaagatagactcggagcagagcctattgccgccattggagagtgaaactgagagttcattgcaagggccactgccaaggtcaccttcttccatgatgaaagccattccctgttcaccagatactgcacctccagggtttgaaaatttaaagttcacacagttacagcctccctgtccacctctggtgcagactgcacatgttttgcaaaattcagccaataatgaggccatgcctgtgatatcaaaggaagctcctcagccattgcctgcattggatgcaacggatttagacattgatgccaaacctgtcctggcaccaccatcagagagtaaaccagggcaattgtcaccggaacctccccttctgctacctcatgtagcacagcatacaacgtgttcgccagggatgacacttttagggtctgagaatatcgagtcctcgcagctgctgccacgagctctggttcttcctcttgatcagacttcagacatcttggctgatgcagggaccaagaagacagtcacaatggaagaagtgtgtcatccgctgcctgtagcaggagtggcggaagaagccaataggtctgttcttctaccagtaacggaaaatggctgtgagggccaatcaccacacctagagctacagacttcttcccctgcagtgaatgctgcagctacatcactggagatagctcccggaagttttgagaattcagagtcctctcagttgatctctccttgtctagctcagacaatagaccccactactcatgcatcaggtattatgcctactattgttaagtcagagaaaacgaatctgccactatcttcattacaggctacatgcacagacatggaaagtgcaatcctgtgtcagtcgccatcgaagagtgaagagagatcactgccacaggcagagcaacacccgtcttctccatctgttaaggacactacttgttcaccagaggttgcacccccaggttatgaaaattttgactctttggatcagctgccaccatcaccacctctttgctcaaaatttgaaattggtcaaatggtatgcggatcttgtcgtcagcttgttgcatatcctacgggtgctgttcatgttcagtgttttggttgcttgacaataaatcttgtactggaagaacatcaagttggtaaggtatattgtggacaatgtgatacactcttgatgtatccttttggggctcctgctgtgaaatgttccaactgtctttttgtcactgaaatcggagaacgcaatgttcggccacggatattgatggaacagagtgtctcacctgcggcacaagaggaggttcactagagagctaggtcaggctttaacaacggctggtagtggaacctagatgatatcgctcgtagtaactccagacgctgccatggaaaactcgcaagtcatccggcatgatcctgtagctgtaacctcaaatggcctgtggtctgtggaagtgtggagtggcaccttcagatgcagcctgtagtttagggatgaaaaaggcggatgcagtatggccaggatcaactgctaagcgaaaagattatatccagccgtagccttatcatagggaagataaactgcttaagctcggctgtaactggagcaggttaatcatggttgacggtacggtggtctcagatgatcctcaagttaagtatttgttggggacgagcagagtgcttcagtgcttgggtttgtctacgaaccatggaacaacccacttgtatctttagcgtcacagcacaatcacaagcgctgttgtggcccttcgagggcaacaggaggtaaaaaagtactttatgaaggtaggaatatttggtagcatctcctctctttttttgacaaaagggaaattcattcatttgtcatgagcacaacaaactccattctaagttttgaagccaattggatgttacaacgttgagattgtgctaaagcttgacaagaataaagacaatctcctgtaattgatgccctgccttgcctgttttgttaaactgtctgcaactttgttcatctctctttggatcttgagcacttagtagttccttcctggtgtggcatcaatcagtgccgcaagggttggtccgaggcactaatggctgggttgcggagcacgaagccggaggtagcagcattagccaagtagccaacaccttattatctgttagaatgttggtcacctgcaaatatagagttgacggctagtttggcacctagcagtagaacatgtcctgcctccaatgggtccatgagttgagttatggcaactagaaagaattaaagaactggagcacaagctacgtgtaagattagtaagtgaagatgcgaatgcatgtttgatgttgggttggagtatggtgtaaggag

SEQ ID NO: 32945 - DNA, 2503 bp, Zea Mays
tctctcagcttctcgttgcgcaacctccccggtttcccagtcccgctcaccgccgccatcgccggcgcccatggcggcctcaccaggggcagacgaaccgctggagagctcaacagtggagcatcctgaggcggtccagccgccttcactgccgattgttgaggcggaaccgcctccgcctcttataggggcggcggctgcacatgaagcgatctctccgaagaagtcctcttccccttcgccgcatccggcgaacttggcggtcgaagtttctccagaggtggaggcctcttcctcgtctccgtccccgtcgtcttctccctctccatatccccaaatcatggaggtgttgccgggtgcgccgcaaccactgtctcctccacgtgcttctccgtctgttgcggcgcgtgcttcgacggacctctccattacagaggcgatgtcaatggcgtcccaggaagcagctcgcccacccccgtcccccgagtctacggacgcgcacttgcacaccgcgtccgcgctgccgacgtcgctgatggagattgggcctggagtgttggtgccacagcagcagccgcgaccaccatctccggaaatggcccctccactatgtgattattcagagtccgcacagccatcgccgctgtgtcatccggatggatgcacaggcgcctcgccagacgcaccgatggacgaggtaatgacaggaacgtcaggaaaagcagctgggccgtcgccaggtgaaaactcggagttagcacagtcacagctgccgcatcttccagctgaaaacacatatgtctgttcaaatgcagcgggcaagatatcagcagtgacttcagaagaaggtactcagcctgcgatggcgtcaattgatggtgaggggccattagagattggggcgcagagatcattgcaggagctagaggagacaacaacatccttcaagatggaagctgagccttgttcgccggagatggctcctccagggtttgaagattgtaagtctcaatggttgccactgtcacatcctaatcctctggttgaatccacacacactgtggtacaagtgactactaccaatgccatgggaacgactccagatgcagcaactgggtcactgtcttcacctcgcctacttccactgttgaagagagatacagaggggcaaacacttccaagatcatgctctccaacaacagaagctgcaccatgttcaccagatatgccacctccaggctttgagaattgtaagtcatcgtggctaccactaccaactcttcaacccatagctgaaaccacgcatgtgttgcacgacgtggctcccaccaagtcaatggtagtgggacttatggaaaaggcatgctcagtgctggcattggagcggacagatgtgaagatagactcggagcagagcctattgccgccattggagagtgaaactgagagttcattgcaagggccactgccaaggtcaccttcttccatgatgaaagccattccctgttcaccagatactgcacctccagggtttgaaaatttaaagttcacacagttacagcctccctgtccacctctggtgcagactgcacatgttttgcaaaattcagccaataatgaggccatgcctgtgatatcaaaggaagctcctcagccattgcctgcattggatgcaacggatttagacattgatgccaaacctgtcctggcaccaccatcagagagtaaaccagggcaattgtcaccggaacctccccttctgctacctcatgtagcacagcatacaacgtgttcgccagggatgacacttttagggtctgagaatatcgagtcctcgcagctgctgccacgagctctggttcttcctcttgatcagacttcagacatcttggctgatgcagggaccaagaagacagtcacaatggaagaagtgtgtcatccgctgcctgtagcaggagtggcggaagaagccaataggtctgttcttctaccagtaacggaaaatggctgtgagggccaatcaccacacctagagctacagacttcttcccctgcagtgaatgctgcagctacatcactggagatagctcccggaagttttgagaattcagagtcctctcagttgatctctccttgtctagctcagacaatagaccccactactcatgcatcaggtattatgcctactattgttaagtcagagaaaacgaatctgccactatcttcattacaggctacatgcacagacatggaaagtgcaatcctgtgtcagtcgccatcgaagagtgaagagagatcactgccacaggcagagcaacacccgtcttctccatctgttaaggacactacttgttcaccagaggttgcacccccaggttatgaaaattttgactctttggatcagctgccaccatcaccacctctttgctcaaaatttgtagaaaaaaatctttatggacaataaatagaagatgaaatctgtatgggcggtattgtaatcgag

SEQ ID NO: 32946 - DNA, 3824 bp, Zea Mays
tctctcagcttctcgttgcgcaacctccccggtttcccagtcccgctcaccgccgccatcgccggcgcccatggcggcctcaccaggggcagacgaaccgctggagagctcaacagtggagcatcctgaggcggtccagccgccttcactgccgattgttgaggcggaaccgcctccgcctcttataggggcggcggctgcacatgaagcgatctctccgaagaagtcctcttccccttcgccgcatccggcgaacttggcggtcgaagtttctccagaggtggaggcctcttcctcgtctccgtccccgtcgtcttctccctctccatatccccaaatcatggaggtgttgccgggtgcgccgcaaccactgtctcctccacgtgcttctccgtctgttgcggcgcgtgcttcgacggacctctccattacagaggcgatgtcaatggcgtcccaggaagcagctcgcccacccccgtcccccgagtctacggacgcgcacttgcacaccgcgtccgcgctgccgacgtcgctgatggagattgggcctggagtgttggtgccacagcagcagccgcgaccaccatctccggaaatggcccctccactatgtgattattcagagtccgcacagccatcgccgctgtgtcatccggatggatgcacaggcgcctcgccagacgcaccgatggacgaggtaatgacaggaacgtcaggaaaagcagctgggccgtcgccaggtgaaaactcggagttagcacagtcacagctgccgcatcttccagctgaaaacacatatgtctgttcaaatgcagcgggcaagatatcagcagtgacttcagaagaaggtactcagcctgcgatggcgtcaattgatggtgaggggccattagagattggggcgcagagatcattgcaggagctagaggagacaacaacatccttcaagatggaagctgagccttgttcgccggagatggctcctccagggtttgaagattgtaagtctcaatggttgccactgtcacatcctaatcctctggttgaatccacacacactgtggtacaagtgactactaccaatgccatgggaacgactccagatgcagcaactgggtcactgtcttcacctcgcctacttccactgttgaagagagatacagaggggcaaacacttccaagatcatgctctccaacaacagaagctgcaccatgttcaccagatatgccacctccaggctttgagaattgtaagtcatcgtggctaccactaccaactcttcaacccatagctgaaaccacgcatgtgttgcacgacgtggctcccaccaagtcaatggtagtgggacttatggaaaaggcatgctcagtgctggcattggagcggacagatgtgaagatagactcggagcagagcctattgccgccattggagagtgaaactgagagttcattgcaagggccactgccaaggtcaccttcttccatgatgaaagccattccctgttcaccagatactgcacctccagggtttgaaaatttaaagttcacacagttacagcctccctgtccacctctggtgcagactgcacatgttttgcaaaattcagccaataatgaggccatgcctgtgatatcaaaggaagctcctcagccattgcctgcattggatgcaacggatttagacattgatgccaaacctgtcctggcaccaccatcagagagtaaaccagggcaattgtcaccggaacctccccttctgctacctcatgtagcacagcatacaacgtgttcgccagggatgacacttttagggtctgagaatatcgagtcctcgcagctgctgccacgagctctggttcttcctcttgatcagacttcagacatcttggctgatgcagggaccaagaagacagtcacaatggaagaagtgtgtcatccgctgcctgtagcaggagtggcggaagaagccaataggtctgttcttctaccagtaacggaaaatggctgtgagggccaatcaccacacctagagctacagacttcttcccctgcagtgaatgctgcagctacatcactggagatagctcccggaagttttgagaattcagagtcctctcagttgatctctccttgtctagctcagacaatagaccccactactcatgcatcaggtattatgcctactattgttaagtcagagaaaacgaatctgccactatcttcattacaggctacatgcacagacatggaaagtgcaatcctgtgtcagtcgccatcgaagagtgaagagagatcactgccacaggcagagcaacacccgtcttctccatctgttaaggacactacttgttcaccagaggttgcacccccaggttatgaaaattttgactctttggatcagctgccaccatcaccacctctttgctcaaaatttgaaattggtcaaatggtatgcggatcttgtcgtcagcttgttgcatatcctacgggtgctgttcatgttcagtgttttggttgcttgacaataaatcttgtactggaagaacatcaagttggtaaggtatattgtggacaatgtgatacactcttgatgtatccttttggggctcctgctgtgaaatgttccaactgtctttttgtcactgaaatcggactctcaaactgtctactgtgcctcaacatcggaacgcaatgttcggccacggatattgatggaacagagtgtctcacctgcggcacaagaggaggttcactagagagctaggtcaggctttaacaacggctggtagtggaacctagatgatatcgctcgtagtaactccagacgctgccatggaaaactcgcaagtcatccggcatgatcctgtagctgtaacctcaaatggcctgtggtctgtggaagtgtggagtggcaccttcagatgcagcctgtagtttagggatgaaaaaggcggatgcagtatggccaggatcaactgctaagcgaaaagattatatccagccgtagccttatcatagggaagataaactgcttaagctcggctgtaactggagcaggttaatcatggttgacggtacggtggtctcagatgatcctcaagttaagtatttgttggggacgagcagagtgcttcagtgcttgggtttgtctacgaaccatggaacaacccacttgtatctttagcgtcacagcacaatcacaagcgctgttgtggcccttcgagggcaacaggaggtaaaaaagtactttatgaaggtaggaatatttggtagcatctcctctctttttttgacaaaagggaaattcattcatttgtcatgagcacaacaaactccattctaagttttgaagccaattggatgttacaacgttgagattgtgctaaagcttgacaagaataaagacaatctcctgtaattgatgccctgccttgcctgttttgttaaactgtctgcaactttgttcatctctctttggatcttgagcacttagtagttccttcctggtgtggcatcaatcagtgccgcaagggttggtccgaggcactaatggctgggttgcggagcacgaagccggaggtagcagcattagccaagtagccaacaccttattatctgttagaatgttggtcacctgcaaatatagagttgacggctagtttggcacctagcagtagaacatgtcctgcctccaatgggtccatgagttgagttatggcaactagaaagaattaaagaactggagcacaagctacgtgtaagattagtaagtgaagatgcgaatgcatgtttgatgttgggttggagtatggtgtaaggag

SEQ ID NO: 32947 - DNA, 3685 bp, Zea Mays
tctctcagcttctcgttgcgcaacctccccggtttcccagtcccgctcaccgccgccatcgccggcgcccatggcggcctcaccaggggcagacgaaccgctggagagctcaacagtggagcatcctgaggcggtccagccgccttcactgccgattgttgaggcggaaccgcctccgcctcttataggggcggcggctgcacatgaagcgatctctccgaagaagtcctcttccccttcgccgcatccggcgaacttggcggtcgaagtttctccagaggtggaggcctcttcctcgtctccgtccccgtcgtcttctccctctccatatccccaaatcatggaggtgttgccgggtgcgccgcaaccactgtctcctccacgtgcttctccgtctgttgcggcgcgtgcttcgacggacctctccattacagaggcgatgtcaatggcgtcccaggaagcagctcgcccacccccgtcccccgagtctacggacgcgcacttgcacaccgcgtccgcgctgccgacgtcgctgatggagattgggcctggagtgttggtgccacagcagcagccgcgaccaccatctccggaaatggcccctccactatgtgattattcagagtccgcacagccatcgccgctgtgtcatccggatggatgcacaggcgcctcgccagacgcaccgatggacgaggtaatgacaggaacgtcaggaaaagcagctgggccgtcgccaggtgaaaactcggagttagcacagtcacagctgccgcatcttccagctgaaaacacatatgtctgttcaaatgcagcgggcaagatatcagcagtgacttcagaagaaggtactcagcctgcgatggcgtcaattgatggtgaggggccattagagattggggcgcagagatcattgcaggagctagaggagacaacaacatccttcaagatggaagctgagccttgttcgccggagatggctcctccagggtttgaagattgtaagtctcaatggttgccactgtcacatcctaatcctctggttgaatccacacacactgtggtacaagtgactactaccaatgccatgggaacgactccagatgcagcaactgggtcactgtcttcacctcgcctacttccactgttgaagagagatacagaggggcaaacacttccaagatcatgctctccaacaacagaagctgcaccatgttcaccagatatgccacctccaggctttgagaattgtaagtcatcgtggctaccactaccaactcttcaacccatagctgaaaccacgcatgtgttgcacgacgtggctcccaccaagtcaatggtagtgggacttatggaaaaggcatgctcagtgctggcattggagcggacagatgtgaagatagactcggagcagagcctattgccgccattggagagtgaaactgagagttcattgcaagggccactgccaaggtcaccttcttccatgatgaaagccattccctgttcaccagatactgcacctccagggtttgaaaatttaaagttcacacagttacagcctccctgtccacctctggtgcagactgcacatgttttgcaaaattcagccaataatgaggccatgcctgtgatatcaaaggaagctcctcagccattgcctgcattggatgcaacggatttagacattgatgccaaacctgtcctggcaccaccatcagagagtaaaccagggcaattgtcaccggaacctccccttctgctacctcatgtagcacagcatacaacgtgttcgccagggatgacacttttagggtctgagaatatcgagtcctcgcagctgctgccacgagctctggttcttcctcttgatcagacttcagacatcttggctgatgcagggaccaagaagacagtcacaatggaagaagtgtgtcatccgctgcctgtagcaggagtggcggaagaagccaataggtctgttcttctaccagtaacggaaaatggctgtgagggccaatcaccacacctagagctacagacttcttcccctgcagtgaatgctgcagctacatcactggagatagctcccggaagttttgagaattcagagtcctctcagttgatctctccttgtctagctcagacaatagaccccactactcatgcatcaggtattatgcctactattgttaagtcagagaaaacgaatctgccactatcttcattacaggctacatgcacagacatggaaagtgcaatcctgtgtcagtcgccatcgaagagtgaagagagatcactgccacaggcagagcaacacccgtcttctccatctgttaaggacactacttgttcaccagaggttgcacccccaggttatgaaaattttgactctttggatcagctgccaccatcaccacctctttgctcaaaatttgaacatcaagttggtaaggtatattgtggacaatgtgatacactcttgatgtatccttttggggctcctgctgtgaaatgttccaactgtctttttgtcactgaaatcggagaacgcaatgttcggccacggatattgatggaacagagtgtctcacctgcggcacaagaggaggttcactagagagctaggtcaggctttaacaacggctggtagtggaacctagatgatatcgctcgtagtaactccagacgctgccatggaaaactcgcaagtcatccggcatgatcctgtagctgtaacctcaaatggcctgtggtctgtggaagtgtggagtggcaccttcagatgcagcctgtagtttagggatgaaaaaggcggatgcagtatggccaggatcaactgctaagcgaaaagattatatccagccgtagccttatcatagggaagataaactgcttaagctcggctgtaactggagcaggttaatcatggttgacggtacggtggtctcagatgatcctcaagttaagtatttgttggggacgagcagagtgcttcagtgcttgggtttgtctacgaaccatggaacaacccacttgtatctttagcgtcacagcacaatcacaagcgctgttgtggcccttcgagggcaacaggaggtaaaaaagtactttatgaaggtaggaatatttggtagcatctcctctctttttttgacaaaagggaaattcattcatttgtcatgagcacaacaaactccattctaagttttgaagccaattggatgttacaacgttgagattgtgctaaagcttgacaagaataaagacaatctcctgtaattgatgccctgccttgcctgttttgttaaactgtctgcaactttgttcatctctctttggatcttgagcacttagtagttccttcctggtgtggcatcaatcagtgccgcaagggttggtccgaggcactaatggctgggttgcggagcacgaagccggaggtagcagcattagccaagtagccaacaccttattatctgttagaatgttggtcacctgcaaatatagagttgacggctagtttggcacctagcagtagaacatgtcctgcctccaatgggtccatgagttgagttatggcaactagaaagaattaaagaactggagcacaagctacgtgtaagattagtaagtgaagatgcgaatgcatgtttgatgttgggttggagtatggtgtaaggag

SEQ ID NO: 32948 - DNA, 1734 bp, Zea Mays
gcgacaataactaaactttaatctgggacatgaggagatgattctcccaaagcagcccttatcggaaagatttccactgggccgtctagataacaagcggccccaccacaccgctgcagtcgccgtgctcgcgcatggagcttggaggcggagggcgaggcggcggcgaccgggtccggcggcagttgcagtcggtggggcggctggcagcgtatctcggcggcggtttcctcctcctctccgccacctcttccgtcgccgtccgcgccctccgcgccatctccgacgccaaccagggtgcagcgctgcttgaactgcctgggaaatggttacgcttgaagaagcgatgtcagttttcattatcgatgatagatggttgttggggagttggtaaggaaacaattggaaatttactgatgaattcgttgccttgtgtgattataattgctgtgagtctatgatttttgggtctgtttatgtcgttctgtgactatgaattgtgggcatgatgctaaatttacaaatctctcgttgaagagtcacagttggaactttagccattagtacagggaaagtaaagctgttctttcttgctgttgcttagtgtacctgacggattgttaaaactgaatagtttttgttgggaatttctgtgaagggaagagagtgtggaatcaactcaagctgaaaggtttctgttgggattttgtgtcaaggcaaaagattgccgtttcaactcaactcaaaatgagagataacgggtgaaatggaagtgatatgcttccatgtatccccttatgtgcaagagtccagaagtacaatttctatttgtcaggggaagctgtactcctatagatggttgttatgaagctcatcgtgggccatgcgtacatgccaagatcatggtgtcaagccgttggatgatttctcctatatgttagtttacgaaatagttgattgcatctttgtagtatgtatcttcttggctgtgtttattctaaccacataacaatggtttgttttgcttcaactgaaaccgaagacctgtcgggaaatgagagatgcaggtcaattaatccgattctgatgtctgtatccttaatgacctctcatgttgaaggaaaacgaaagatgcggggctgtacaactattaacactgacagcaacattatgtcttgttttcagacttcttacaagttgtacaggcaagtattcgtcgtcgttgtgcaagaatagtctgaagggtgatgtctagtgcccacagagagaatttaatagagccattccatctgaaagatgtccagatatgtggcgggatgccctgtgaatgatgtcagtgttctttcatctgacgaacatcacttgcatttatgttttggccctttttttctgagggtggatttgtttacgcaacacaaacaaaaaaaaaatataccattgtgtgcactcgcaatcaaattctggtaaaaatgctcgaattcctcagcatcaaggagattcagaggttgttggtcctatagtgcaggtattgcatgcagttgacctgcatgccaatcagtgacgtccagaaactatggatcagattgtcctccatcgtaaccaccatttttttttgtttgcgattttcttcaacttgggccttccaatgatgtctgaaaacgagttacaggaaatctgttggtcagctgttcttggtatctgccacttgtgtactgttgaaggtgaaaatatctt

SEQ ID NO: 32949 - DNA, 1765 bp, Zea Mays
gcgacaataactaaactttaatctgggacatgaggagatgattctcccaaagcagcccttatcggaaagatttccactgggccgtctagataacaagcggccccaccacaccgctgcagtcgccgtgctcgcgcatggagcttggaggcggagggcgaggcggcggcgaccgggtccggcggcagttgcagtcggtggggcggctggcagcgtatctcggcggcggtttcctcctcctctccgccacctcttccgtcgccgtccgcgccctccgcgccatctccgacgccaaccagaggaagttcgcgaagccgtgcggtgcctgcgaggggaagggcagctactcgtgcaggctctgcaggggcagcgccaccatcgagtggtctccgatgcacgacccggtgttcgtgaatccgtgcctctgccctacctgcgatgggactcgggtgcagcgctgcttgaactgcctgggaaatggttacgcttgaagaagcgatgtcagttttcattatcgatgatagatggttgttggggagttggtaaggaaacaattggaaatttactgatgaattcgttgccttgtgtgattataattgctgtgagtctatgatttttgggtctgtttatgtcgttctgtgactatgaattgtgggcatgatgctaaatttacaaatctctcgttgaagagtcacagttggaactttagccattagtacagggaaagtaaagctgttctttcttgctgttgcttagtgtacctgacggattgttaaaactgaatagtttttgttgggaatttctgtgaagggaagagagtgtggaatcaactcaagctgaaaggtttctgttgggattttgtgtcaaggcaaaagattgccgtttcaactcaactcaaaatgagagataacgggtgaaatggaagtgatatgcttccatgtatccccttatgtgcaagagtccagaagtacaatttctatttgtcaggggaagctgtactcctatagatggttgttatgaagctcatcgtgggccatgcgtacatgccaagatcatggtgtcaagccgttggatgatttctcctatatgttagtttacgaaatagttgattgcatctttgtagtatgtatcttcttggctgtgtttattctaaccacataacaatggtttgttttgcttcaactgaaaccgaagacctgtcgggaaatgagagatgcagacttcttacaagttgtacaggcaagtattcgtcgtcgttgtgcaagaatagtctgaagggtgatgtctagtgcccacagagagaatttaatagagccattccatctgaaagatgtccagatatgtggcgggatgccctgtgaatgatgtcagtgttctttcatctgacgaacatcacttgcatttatgttttggccctttttttctgagggtggatttgtttacgcaacacaaacaaaaaaaaaatataccattgtgtgcactcgcaatcaaattctggtaaaaatgctcgaattcctcagcatcaaggagattcagaggttgttggtcctatagtgcaggtattgcatgcagttgacctgcatgccaatcagtgacgtccagaaactatggatcagattgtcctccatcgtaaccaccatttttttttgtttgcgattttcttcaacttgggccttccaatgatgtctgaaaacgagttacaggaaatctgttggtcagctgttcttggtatctgccacttgtgtactgttgaaggtgaaaatatctt

SEQ ID NO: 32950 - DNA, 1066 bp, Zea Mays
ctgggacatgaggagatgattctcccaaagcagcccttatcggaaagatttccactgggccgtctagataacaagcggccccaccacaccgctgcagtcgccgtgctcgcgcatggagcttggaggcggagggcgaggcggcggcgaccgggtccggcggcagttgcagtcggtggggcggctggcagcgtatctcggcggcggtttcctcctcctctccgccacctcttccgtcgccgtccgcgccctccgcgccatctccgacgccaaccagaggaagttcgcgaagccgtgcggtgcctgcgaggggaagggcagctactcgtgcaggctctgcaggggcagcgccaccatcgagtggtctccgatgcacgacccggtgttcgtgaatccgtgcctctgccctacctgcgatgggactcgggtgcagcgctgcttgaactgcctgggaaatggttacgcttgaagaagcgatgtcagttttcattatcgatgatagatggttgttggggagttgacttcttacaagttgtacaggcaagtattcgtcgtcgttgtgcaagaatagtctgaagggtgatgtctagtgcccacagagagaatttaatagagccattccatctgaaagatgtccagatatgtggcgggatgccctgtgaatgatgtcagtgttctttcatctgacgaacatcacttgcatttatgttttggccctttttttctgagggtggatttgtttacgcaacacaaacaaaaaaaaaatataccattgtgtgcactcgcaatcaaattctggtaaaaatgctcgaattcctcagcatcaaggagattcagaggttgttggtcctatagtgcaggtattgcatgcagttgacctgcatgccaatcagtgacgtccagaaactatggatcagattgtcctccatcgtaaccaccatttttttttgtttgcgattttcttcaacttgggccttccaatgatgtctgaaaacgagttacaggaaatctgttggtcagctgttcttggtatctgccacttgtgtactgttgaaggtgaaaatatctt

SEQ ID NO: 32951 - DNA, 1458 bp, Zea Mays
atcggaaagatttccactgggccgtctagataacaagcggccccaccacaccgctgcagtcgccgtgctcgcgcatggagcttggaggcggagggcgaggcggcggcgaccgggtccggcggcagttgcagtcggtggggcggctggcagcgtatctcggcggcggtttcctcctcctctccgccacctcttccgtcgccgtccgcgccctccgcgccatctccgacgccaaccagaggaagttcgcgaagccgtgcggtgcctgcgaggggaagggcagctactcgtgcaggctctgcaggggcagcgccaccatcgagtggtctccgatgcacgacccggtgttcgtgaatccgtgcctctgccctacctgcgatgggactcgggtgcagcgctgcttgaactgcctgggaaatggttacgcttgaagaagcgatgtcagttttcattatcgatgatagatggttgttggggagttgggaagagagtgtggaatcaactcaagctgaaaggtttctgttgggattttgtgtcaaggcaaaagattgccgtttcaactcaactcaaaatgagagataacgggtgaaatggaagtgatatgcttccatgtatccccttatgtgcaagagtccagaagtacaatttctatttgtcaggggaagctgtactcctatagatggttgttatgaagctcatcgtgggccatgcgtacatgccaagatcatggtgtcaagccgttggatgatttctcctatatgttagtttacgaaatagttgattgcatctttgtagtatgtatcttcttggctgtgtttattctaaccacataacaatggtttgttttgcttcaactgaaaccgaagacctgtcgggaaatgagagatgcaggtcaattaatccgattctgatacttcttacaagttgtacaggcaagtattcgtcgtcgttgtgcaagaatagtctgaagggtgatgtctagtgcccacagagagaatttaatagagccattccatctgaaagatgtccagatatgtggcgggatgccctgtgaatgatgtcagtgttctttcatctgacgaacatcacttgcatttatgttttggccctttttttctgagggtggatttgtttacgcaacacaaacaaaaaaaaaatataccattgtgtgcactcgcaatcaaattctggtaaaaatgctcgaattcctcagcatcaaggagattcagaggttgttggtcctatagtgcaggtattgcatgcagttgacctgcatgccaatcagtgacgtccagaaactatggatcagattgtcctccatcgtaaccaccatttttttttgtttgcgattttcttcaacttgggccttccaatgatgtctgaaaacgagttacaggaaatctgttggtcagctgttcttggtatctgccacttgtgtactgttgaaggtgaaaatatctt

SEQ ID NO: 32952 - DNA, 1550 bp, Zea Mays
atcggaaagatttccactgggccgtctagataacaagcggccccaccacaccgctgcagtcgccgtgctcgcgcatggagcttggaggcggagggcgaggcggcggcgaccgggtccggcggcagttgcagtcggtggggcggctggcagcgtatctcggcggcggtttcctcctcctctccgccacctcttccgtcgccgtccgcgccctccgcgccatctccgacgccaaccagaggaagttcgcgaagccgtgcggtgcctgcgaggggaagggcagctactcgtgcaggctctgcaggggcagcgccaccatcgagtggtctccgatgcacgacccggtgttcgtgaatccgtgcctctgccctacctgcgatgggactcgggtgcagcgctgcttgaactgcctgggaaatggttacgcttgaagaagcgatgtcagttttcattatcgatgatagatggttgttggggagttgagagtgtggaatcaactcaagctgaaaggtttctgttgggattttgtgtcaaggcaaaagattgccgtttcaactcaactcaaaatgagagataacgggtgaaatggaagtgatatgcttccatgtatccccttatgtgcaagagtccagaagtacaatttctatttgtcaggggaagctgtactcctatagatggttgttatgaagctcatcgtgggccatgcgtacatgccaagatcatggtgtcaagccgttggatgatttctcctatatgttagtttacgaaatagttgattgcatctttgtagtatgtatcttcttggctgtgtttattctaaccacataacaatggtttgttttgcttcaactgaaaccgaagacctgtcgggaaatgagagatgcaggtcaattaatccgattctgatgtctgtatccttaatgacctctcatgttgaaggaaaacgaaagatgcggggctgtacaactattaacactgacagcaacattatgtcttgttttcagacttcttacaagttgtacaggcaagtattcgtcgtcgttgtgcaagaatagtctgaagggtgatgtctagtgcccacagagagaatttaatagagccattccatctgaaagatgtccagatatgtggcgggatgccctgtgaatgatgtcagtgttctttcatctgacgaacatcacttgcatttatgttttggccctttttttctgagggtggatttgtttacgcaacacaaacaaaaaaaaaatataccattgtgtgcactcgcaatcaaattctggtaaaaatgctcgaattcctcagcatcaaggagattcagaggttgttggtcctatagtgcaggtattgcatgcagttgacctgcatgccaatcagtgacgtccagaaactatggatcagattgtcctccatcgtaaccaccatttttttttgtttgcgattttcttcaacttgggccttccaatgatgtctgaaaacgagttacaggaaatctgttggtcagctgttcttggtatctgccacttgtgtactgttgaaggtgaaaatatctt

SEQ ID NO: 32953 - DNA, 1821 bp, Zea Mays
atcggaaagatttccactgggccgtctagataacaagcggccccaccacaccgctgcagtcgccgtgctcgcgcatggagcttggaggcggagggcgaggcggcggcgaccgggtccggcggcagttgcagtcggtggggcggctggcagcgtatctcggcggcggtttcctcctcctctccgccacctcttccgtcgccgtccgcgccctccgcgccatctccgacgccaaccaggaagttcgcgaagccgtgcggtgcctgcgaggggaagggcagctactcgtgcaggctctgcaggggcagcgccaccatcgagtggtctccgatgcacgacccggtgttcgtgaatccgtgcctctgccctacctgcgatgggactcgggtgcagcgctgcttgaactgcctgggaaatggttacgcttgaagaagcgatgtcagttttcattatcgatgatagatggttgttggggagttggtaaggaaacaattggaaatttactgatgaattcgttgccttgtgtgattataattgctgtgagtctatgatttttgggtctgtttatgtcgttctgtgactatgaattgtgggcatgatgctaaatttacaaatctctcgttgaagagtcacagttggaactttagccattagtacagggaaagtaaagctgttctttcttgctgttgcttagtgtacctgacggattgttaaaactgaatagtttttgttgggaatttctgtgaagggaagagagtgtggaatcaactcaagctgaaaggtttctgttgggattttgtgtcaaggcaaaagattgccgtttcaactcaactcaaaatgagagataacgggtgaaatggaagtgatatgcttccatgtatccccttatgtgcaagagtccagaagtacaatttctatttgtcaggggaagctgtactcctatagatggttgttatgaagctcatcgtgggccatgcgtacatgccaagatcatggtgtcaagccgttggatgatttctcctatatgttagtttacgaaatagttgattgcatctttgtagtatgtatcttcttggctgtgtttattctaaccacataacaatggtttgttttgcttcaactgaaaccgaagacctgtcgggaaatgagagatgcaggtcaattaatccgattctgatgtctgtatccttaatgacctctcatgttgaaggaaaacgaaagatgcggggctgtacaactattaacactgacagcaacattatgtcttgttttcagacttcttacaagttgtacaggcaagtattcgtcgtcgttgtgcaagaatagtctgaagggtgatgtctagtgcccacagagagaatttaatagagccattccatctgaaagatgtccagatatgtggcgggatgccctgtgaatgatgtcagtgttctttcatctgacgaacatcacttgcatttatgttttggccctttttttctgagggtggatttgtttacgcaacacaaacaaaaaaaaaatataccattgtgtgcactcgcaatcaaattctggtaaaaatgctcgaattcctcagcatcaaggagattcagaggttgttggtcctatagtgcaggtattgcatgcagttgacctgcatgccaatcagtgacgtccagaaactatggatcagattgtcctccatcgtaaccaccatttttttttgtttgcgattttcttcaacttgggccttccaatgatgtctgaaaacgagttacaggaaatctgttggtcagctgttcttggtatctgccacttgtgtactgttgaaggtgaaaatatctt

SEQ ID NO: 32954 - DNA, 1788 bp, Zea Mays
cctccgtcttccttccctgtccgtccccctcttccccccaccccatgtcaacggccaccgcgccgtctccgtccccgtccccttctccctcgtctggaactcgccctctgctccggatcggcgcggcccgtcgtttcgccatggcatttccgccatgggcggctctgctctttgcgggggttctggtggtggtgttggcggcggcgggagcggaagcgggaggagggagcgtctgcttcgaccggatgttcagcttcggagactcgctcacggataccggcaacttcctgctctccgtgcccgatgacttcccggaccccgcgcggaaccttccctacggccagaccttcttcggccgcccctccggccgttactccgacggccgcaacctgctcgacttcttcgcggaggcatttgggctgccgtatgtgccaccatacctaggcggcggggacttccagaatggtgcaaactttgcggtcggcggggcaactgccctcaatggctcgttcttccgtgaacgcggcgtggagcctacatggacgcctcactcccttgatgagcagatgcaatggttcaagaagcttctcacatccattgcaccgttggagacagggataaatctgttgatgagctacatgaagttgttcctaatgttgttggtgccataagctcggccatcacggatcttataaatcttggagcaaagaagttagttgttccagggaacttcccaatagggtgcgtcccattatatcttgcaatctttcagagccaaaaagaggattactatgaggaacaaacaggctgcattaagtggctcaatgattttgctgagtaccataataagatgcttcaggaggagttggagaaactcaggaatcttcaccctgatgtgaccatcatttatgctgattactatggtgctgcattgaacatattccgtgccccactccagtttggtttcacagtcccattgaatgcgtgttgtggaagtgatgccccatacaactgttccccttcaatattgtgcgggcgtcctggatctacagtgtgtcctgacccatcaaaatacatctcatgggacggcttacacttcactgaggcgagttacaaagttgtcattcaaggagtacttggggggtatgccaagcctcccctttcagaaacctgcaagggtgcggaattcaaagtttctcagcttcaccaatgtacagataatccaacaaacactgtgtcatacgatgctttgagctcttttatttgatctgctcgtaaaagaagtgcatttagagttacagtgggcagcatagatgatgttgcaggaccgaacatcttggacactttctcaaagccgagaagagatccatcgatgtagggtcattcagttctacaatctacaatccacttggctgctgggaggaggagaaaaaatgggaggggagtttgtagtgcagaaatttgcgattgcttagtgcactactttgctctgctatgtttttcttagcagcttactgctgcaggctgtagaagggacaacgaaagttgacagtctctgcaggtggtcatactactatataggaacctagatcttttaaatcagctcctgagggaaatgtatgcagtacttgatatggtctcaattgccttttaacggatacaagcatatatacattgtagcttcattgattcaaattgtctcgcttgatttataatgtaaaagtattgttcgaaataaaaaaaaatctaggatgtccgtcttgtcttgattcttgagtaaaatggcag

SEQ ID NO: 32955 - DNA, 1426 bp, Zea Mays
cctgtccgtccccctcttccccccaccccatgtcaacggccaccgcgccgtctccgtccccgtccccttctccctcgtctggaactcgccctctgctccggatcggcgcggcccgtcgtttcgccatggcatttccgccatgggcggctctgctctttgcgggggttctggtggtggtgttggcggcggcgggagcggaagcgggaggagggagcgtctgcttcgaccggatgttcagcttcggagactcgctcacggataccggcaacttcctgctctccgtgcccgatgacttcccggaccccgcgcggaaccttccctacggccagaccttcttcggccgcccctccggccgttactccgacggccgcaacctgctcgacttcttcgcggaggcatttgggctgccgtatgtgccaccatacctaggcggcggggacttccagaatggtgcaaactttgcggtcggcggggcaactgccctcaatggctcgttcttccgtgaacgcggcgtggagcctacatggacgcctcactcccttgatgagcagatgcaatggttcaagaagcttctcacatccattgcaccgttggagacaggtttcacagtcccattgaatgcgtgttgtggaagtgatgccccatacaactgttccccttcaatattgtgcgggcgtcctggatctacagtgtgtcctgacccatcaaaatacatctcatgggacggcttacacttcactgaggcgagttacaaagttgtcattcaaggagtacttggggggtatgccaagcctcccctttcagaaacctgcaagggtgcggaattcaaagtttctcagcttcaccaatgtacagataatccaacaaacactgtgtcatacgatgctttgagctcttttatttgatctgctcgtaaaagaagtgcatttagagttacagtgggcagcatagatgatgttgcaggaccgaacatcttggacactttctcaaagccgagaagagatccatcgatgtagggtcattcagttctacaatctacaatccacttggctgctgggaggaggagaaaaaatgggaggggagtttgtagtgcagaaatttgcgattgcttagtgcactactttgctctgctatgtttttcttagcagcttactgctgcaggctgtagaagggacaacgaaagttgacagtctctgcaggtggtcatactactatataggaacctagatcttttaaatcagctcctgagggaaatgtatgcagtacttgatatggtctcaattgccttttaacggatacaagcatatatacattgtagcttcattgattcaaattgtctcgcttgatttataatgtaaaagtattgttcgaaataaaaaaaaatctaggatgtccgtcttgtcttgattcttgagtaaaatggcag

SEQ ID NO: 32956 - DNA, 558 bp, Zea Mays
gtccagacctaacctctgcagtctgcatcaccaactattccactagtaggtctaaattagtagccaagatgacgtcagcagcatcgttccccagcagcctcttccccttcccgaccagagcaagcacgccaccgcttccgtcgtcgtcctcccgaccgtctcactcccgcccccacctccgcatccgatctccgaaacctaataatccaacggtcgcgcccgcgtcctctcggatggaggtggcccagccccaggcgagcaacgcccagggaggggcggagccggccatgaagctactgttcgtggagatgggcgtcggctacgatcagcacggccaagatatcaccgccgccgccgtgcgcgcctgcaaggacgccatcacctccaactccatccccgccttccggggcgggtccattccaggagtgaacacggaccagatgaagctgcagatcaagctcggagtgcctaggtcgacgcagcacttgctggatgctgagagagtcaaggccgtcttcccctagtatcatcaaatcatttggtaaatatccatttgag

SEQ ID NO: 32957 - DNA, 1102 bp, Zea Mays
cctaacctctgcagtctgcatcaccaactattccactagtaggtctaaattagtagccaagatgacgtcagcagcatcgttccccagcagcctcttccccttcccgaccagagcaagcacgccaccgcttccgtcgtcgtcctcccgaccgtctcactcccgcccccacctccgcatccgatctccgaaacctaataatccaacggtcgcgcccgcgtcctctcggatggaggtggcccagccccaggcgagcaacgcccagggaggggcggagccggccatgaagctactgttcgtggagatgggcgtcggctacgatcagcacggccaagatatcaccgccgccgccgtgcgcgcctgcaaggacgccatcacctccaactccatccccgccttccggggcggagtgaacacggaccagatgaagctgcagatcaagctcggagtgcctaggtcgacgcagcacttgctggatgctgagagagtcaaggccgtcttcccctatggcaagataatcagctttgaggtcgttgacggtggcatgatctgttcaagcggcgtgtgcctggaagcaatgggggataagaacgatgactgctacatagtcaacgctgcagtgtatgtcggctactgatgtactgtagtacctggaatggaacagtagagattggttatggttcctccgttatagaaaaaaaaaactgctacctccgtcctaaaataaaatagttgatattttttcttcatagaagccaaatattgtaaactttgactaaaaattactccctccaattttttttatttggcgttttgtagttcagttttgcactatttggcgttaaataaaaaaaggatgtaggtagtataaaatactaatatttataactggatagatctttgaacttatttttgtaataaacttatttattaaagatataaatattgctgatactttctacaaatatagtcaaaggtagttaaaaaaaattgtcgacacgaatattctaacaataataactattttagaacaaacggagtatcacgggatgtttttttgtactgcaacaagccaataagcaagaagttgctatcaacattccca

SEQ ID NO: 32958 - DNA, 810 bp, Zea Mays
gtgattgacaatgtaaaaacctgaccgaaaatcaagtatcatggactggatggtatattgcagtacaagtatgactaacgaaaattaaacaggcatcttctcaaattcactggaatatattttgttagaatgatcagtaccaatgctgcaagctggcggcagagccttttggggcccaggttgcgctactcgtgagtggtggacagctactctggcaagataatcagctttgaggtcgttgacggtggcatgatctgttcaagcggcgtgtgcctggaagcaatgggggataagaacgatgactgctacatagtcaacgctgcagtgtatgtcggctactgatgtactgtagtacctggaatggaacagtagagattggttatggttcctccgttatagaaaaaaaaaactgctacctccgtcctaaaataaaatagttgatattttttcttcatagaagccaaatattgtaaactttgactaaaaattactccctccaattttttttatttggcgttttgtagttcagttttgcactatttggcgttaaataaaaaaaggatgtaggtagtataaaatactaatatttataactggatagatctttgaacttatttttgtaataaacttatttattaaagatataaatattgctgatactttctacaaatatagtcaaaggtagttaaaaaaaattgtcgacacgaatattctaacaataataactattttagaacaaacggagtatcacgggatgtttttttgtactgcaacaagccaataagcaagaagttgctatcaacattccca

SEQ ID NO: 32959 - DNA, 3453 bp, Zea Mays
agcaaaactaacacctccacaacacaaactaaaattttcatagcagcaaatgtcaaacctagcttcaaacaaacgtgagataatttttctaaacttgtaatcatggagcagatcagatcagacctatctacaaataaaaaatagcaacaaaaagttgacttcaggtttcgatatgacctgtaatctccagttaccaccaaagtgtggctcatggttccaatctaacaataaccatattaactataatgagatatttgtgtcgcaggggatataactataaattggaccttatagaaaaaaagagaaggtgcattacaatcaccaatcatacatatagattgcccttggtccaccaaaaatatacacaaatagaaagccataagattaaacacatcatcagaccatgaaaataaagggatttcatatgataatacaatgataatcaacacaacatacacttcatgcaaggtcttttatctatatagaaaatgaaactgcaaagcagtcataagtacatgtgaagcattatcacagataagcattatcacaactatcacaacaaactagcttcatgtatcccttagcagcaaaatttaggagtgcaaactcattccacatttcagatcagaagtagccagaatatgcaagacatccatgtaacaacacttctgaattcagcacaagaaacggatatgctcccaagaggcaaacacctgagtcacacattcactagaattcaatcaataattcagctgagtacatatataaatacaaaatatatacaatacaacattagaatatagatatataatgtttgatacattaagcatacaaactattaaacttagagactacattttttcggagtatgcaatatcaaatatagcagttttgataacaaaaaattgatcttgcaaacctttaaatgcaaatataacgtttggttcagcaagaagattgcaaaacattattataacacaattaaatatattaggcagtaaaaattggatcaaaccatattgctgatgatataagaaaatatccaagctggttgaaagatgttagtcgtagaatcaaaacaaggtggatcaagtgatgtcaaacatctagcgttctgtgacaagatggtaccacaaaagtcgaaagactagttttataggatggcgattagacctgctataatgtatgatgcagaatgttgaccacctacaaaaagacggcatgttcaacgggtgaccaagcgttgtgaaaatgtgtacgctgcgttggatttgtggccatacaagactatctacagcagtctacccatagtttatcgaaaagcactgttttgcattgtagattgcactgttcgcagagtggagtttaaatatgggtatgttggagatatcttaagaaaggattgagtccagagcgatgatacaagatagactaaggttagcaccaattgaagaaaagtgtgtccaacaatggttgaaatggttcaaacatgtccatcatagacctccagcagtgcgtactgggatccaagggcacgatggcaataagaaaagaggcagggaaaggacgatgttgacatgggaagcgacggtaaaaggagacttggaagaatatgactatatgagcataaaaacagttatccatgtgcctaaaccttgacttgtagtttctgttgggtttcaactctaacttacctcaacttgcttgagactaaagaggctttgttgttgttgtataaaaaatgtccaaaaaaacttgaaagatttcattcatgaatcatcaccataaagaaagcacaatgtctaatggacgaaggttaaatttgttttttcaagcatttcacattggccatgatatacatgcaatgctaatagaaatagagataacttcataaagcatatgaagttgccatgcgtaacattgcagaaaaaaatagaccaaacaaaacatctctagcattcaaatacacatttgagggttgtcagtgtatgcgactagtaattttatagtataaaacaaggaaataaaatatttcggatcaacacctcaagcaatacatgcattattaaatttgcgaaacaacataagttctacaaaaggggttcattcacaaaaatgtgacaatgcacatgctcaagtaccaaattggagtcaaggtatgtgtatcaataacatgaatactgaaaaacatgcacgggtaaataattgtacaaaccactaataccagtaaagactatgataataagactgagtaaaaagaaaaggatgcaaataaaaggactgatcaagtagtggagaagatccaaatgcacctattgacaaagcaaacaaagtaaaccaaagcttttaacaaaaaaacaataaatataggtacacattttacaggatgtctggataccatatctactgcaacaattccagcacgcaatgaaatcctaaacgggtcatcataccaatctcagatgtcaacaaacatctagcatcaagtatgaaccagcaaggtgagatacttagatcaagtaactatccaagacatacacattattggccatcatcatgataaaacttgaataccaaatcttagagaccccaagcattaagagataacaaattagaatccaacaagcacatgtgcaagaaactaacaagtgcaggaatgaactcttgtcaaataaacaaccgaataaattcggtggtgaaaaactgaaaatgatgggtggtgcagccagaccaaaaaaggtgttatgctatgctctgagagtaccttccacaataccaaggcaagtctaaggatagacccatacacccaaagtgaagtttcagaacaataaaacaagacaaaataatggcaaatacagtatggaaattaaggtctactacgctgactcattcacagttatcaatccttgaagctatgcccaccaatcaacttcatcagacatgtaattatctcaagtattttacaaagcatcataagaacttcaatcaccaagaaaaccaataaaatcagaacaagtaaacaatactcagccaatcactacttgttagtgcaccaatggccttaaatttcttacaaatcattggagcttaatcaatgaaaatgtttgatttcccagccattcaatgaaagcaaagaaactaacactgtcaacataattcgcaaacacattagtcaagtactctacttcatccaagagaagctaaggaaaaacatctacaggtcaatgcagatttcaccactgttttaaaggtgtcgcctaggcgtccaggcagtggtccaacgcctaggcgccttgcatcgcctaggcgccacctaggcatccaggcagcggtccaatgccttgtctcaccataccactttaaaaaccatggatttcactatacatccaggtttcaaaaacatcatactggaacagtaactaacctatagatataactaataacatatggaag

SEQ ID NO: 32960 - DNA, 3208 bp, Zea Mays
ccgaccgatcaggcgaccccgctccaagaggaaatccaccaccgcggccggggcctcccagatctcgctggaggcagcggcagcggcggcggtggggggcgatggcgctcaacatgaagaccctgacgcaggcgctggcgaaggcgtcggctgtcatcgagaagacggtgtccacgacggtgcaggaggtgacgggcccgcgcccgctgcaggactacgagctgctggaccaggccgggtccggcgggccgggactcgcgtggcggatctacacggcgcgaccgcgggacggcgccccctcggcgccctaccccgtcgtctccgtctgggtgctcgacaagcgcgccctcgccgaggcacgggcgcgggcggggctgtcgaaggcggccgaggacgccttcctcgacctcgtccgcgccgacgcggcgcggctcgtgcgcctgcgccacccgggcgtgctccacgttgtgcaggcgcttgacgagaccaaggccgccatggccatggccactgagcccgtcttcgcctccgtagctaacgcgctcgggtgccttgacaacgtcggcaaggtgcccaaggagctcaagggcatggaaatgggactacttgagattaaacatggactgctacaagttgcagagacgttagattttcttcataacaatgctcatcttgcccatcgagctatatcgcctgagacggtctttataacttctaacggatcttggaagcttggtgggtttggttttgctctttcagttgatcaagccacaggtggtttgacttcatcacagctattccattattcggactatgatgtcgaggatacagctttgcctcttcaaccgtcgttgaactatactgcaccagaattggttcgaagtggagattctaaagttggctctgcttgtgacatgtttagctttggatgtctagcttaccatctggttgctcgtagaccacttctggactgccataacaatgttaaaatgtacatgaatgccttgacatatttaacaagtgaagccttttctaatattccttctgatttggtatcggatttgcaaaggatgatatcgatggatgcagtatcgcgtcctagtgctgtggcctttacaggttcttctttcttccgggatgatacgaggttgcgcgctcttcgtttccttgaccatttgcttgagagagataatatgcagaagacagagtttttgaaggcattatcagatatgtggaaggattttgattcccgagttcttcgatataaagttcttcctcctctttgtgctgagttacgcaacatggttatgcagccaatgattttgcctatggttctaacaatagcagaatctcaggataaaggggattttgaacttgcaacactgcctgcgcttgttccagtgtttacttcagcatcaggtgaaactctacttttgcttgtgaagcatgcagatctcatcattaacaaggccacacaggaacatttgatatcacatattcttccaatgctggttcgggcttatgatgacaatgatccccggttacaggaagaagttctgcgtcgaacagtatcactgtctcgtcaacttgacaccaagctagtcaaacaggctgtgcttcctcgtgtacatggattagctctaaagacgacagttgccgcggtgcgcgtgaatgcgttgcgctgtttaggagatcttgtgccatccctggacaaagaaggtatattgggtatcttggagacggttcggcgttgcacagctgttgaccatactgcgccaactcttatgtgcacacttggtgttgctaatgcaatctataaacaatgcggtgtggagtttgctgcggaatatgtgattcctctcatcttcccattactcacagcacatcaactgaatgtacaacaatttgccaagtatatgctatttgtcaaggacattacaagcaagatcgaagagaagcgtggtgtgactgttacagataatgggaacacagaggtaaaagcatcaccttcattggcaaacgggatccattctgaacctatgccaggacaaataccagctgcaaagagcagccctccatgggatgaagactggggtccttctaagaaaaccggtgttccatctctctcagttgattctagtgcacagacaaagcaaccctcagtacacccttttgacttcagtactcaaacaaagcaatccacaccactcccctttgatttgagcacccgagcaaagcagccatcattagtttctcatgctacagcagctacaatcccacctgcgcaaccacaaccagtacaatctcttgtgcccagttcaggacctcaaacttctggctcatgtgcccctgttgacattgagtggcctcctcgaagaagctcgtcatccgacttcaatgcatccttgtctattagcaaggagaatgaatctggaaggctatctagcgacggacttgacgatattgatccttttgctgattggcccccaaaacctagcaatgttactagcattacagcaaccgagcatcgtccaagcataaatcaaaatatttctggatttagctcaggtaacatagggtttggtggcagcgggaattctatagggcaagcgaaaagcaaccaaatgagctggtcaaacacgcctaatctgatgggcatgaactcaactggcagctatttgaatcagggcagtgcagctctaggttttggaaatccaattggaggattgagcactggcctctccaatccaagcagttccagtacaggcctgagcatgatgcaaccaaaatctgattttggatcactgtccatgtctgccaataatgccgcaaatggcccacccagacttgcccctcctccatctacttcagttggaagagggcgtggtagaaatcaaggacaatcagcactctcccgagcatcaaggcctcctcattcgaactcgtcatcaggacaacaacctatcctggatttactttagtaagagaggcttgcctctattcttggcgatgacgattgtcaatgtgtacatcttcaaacctttgtaagacaaaagacagggacgcgcgcacgcacatatctactcactcatccaccctagaataccttaacaaatcttcattggttgtaaagtcattcgtgattttattaaggagtcattcgtgattttaaaaatgaggcagaaaacaaatcttcattgtgtttgcc

SEQ ID NO: 32961 - DNA, 3397 bp, Zea Mays
gcgaccccgctccaagaggaaatccaccaccgcggccggggcctcccagatctcgctggaggcagcggcagcggcggcggtggggggcgatggcgctcaacatgaagaccctgacgcaggcgctggcgaaggcgtcggctgtcatcgagaagacggtgtccacgacggtgcaggaggtgacgggcccgcgcccgctgcaggactacgagctgctggaccaggccgggtccggcgggccgggactcgcgtggcggatctacacggcgcgaccgcgggacggcgccccctcggcgccctaccccgtcgtctccgtctgggtgctcgacaagcgcgccctcgccgaggcacgggcgcgggcggggctgtcgaaggcggccgaggacgccttcctcgacctcgtccgcgccgacgcggcgcggctcgtgcgcctgcgccacccgggcgtgctccacgttgtgcaggcgcttgacgagaccaaggccgccatggccatggccactgagcccgtcttcgcctccgtagctaacgcgctcgggtgccttgacaacgtcggcaaggtgcccaaggagctcaagggcatggaaatgggactacttgagattaaacatggactgctacaagttgcagagacgttagattttcttcataacaatgctcatcttgcccatcgagctatatcgcctgagcttggtgggtttggttttgctctttcagttgatcaagccacaggtggtttgacttcatcacagctattccattattcggactatgatgtcgaggatacagctttgcctcttcaaccgtcgttgaactatactgcaccagaattggttcgaagtggagattctaaagttggctctgcttgtgacatgtttagctttggatgtctagcttaccatctggttgctcgtagaccacttctggactgccataacaatgttaaaatgtacatgaatgccttgacatatttaacaagtgaagccttttctaatattccttctgatttggtatcggatttgcaaaggatgatatcgatggatgcagtatcgcgtcctagtgctgtggcctttacaggttcttctttcttccgggatgatacgaggttgcgcgctcttcgtttccttgaccatttgcttgagagagataatatgcagaagacagagtttttgaaggcattatcagatatgtggaaggattttgattcccgagttcttcgatataaagttcttcctcctctttgtgctgagttacgcaacatggttatgcagccaatgattttgcctatggttctaacaatagcagaatctcaggataaaggggattttgaacttgcaacactgcctgcgcttgttccagtgtttacttcagcatcaggtgaaactctacttttgcttgtgaagcatgcagatctcatcattaacaaggccacacaggaacatttgatatcacatattcttccaatgctggttcgggcttatgatgacaatgatccccggttacaggaagaagttctgcgtcgaacagtatcactgtctcgtcaacttgacaccaagctagtcaaacaggctgtgcttcctcgtgtacatggattagctctaaagacgacagttgccgcggtgcgcgtgaatgcgttgcgctgtttaggagatcttgtgccatccctggacaaagaaggtatattgggtatcttggagacggttcggcgttgcacagctgttgaccatactgcgccaactcttatgtgcacacttggtgttgctaatgcaatctataaacaatgcggtgtggagtttgctgcggaatatgtgattcctctcatcttcccattactcacagcacatcaactgaatgtacaacaatttgccaagtatatgctatttgtcaaggacattacaagcaagatcgaagagaagcgtggtgtgactgttacagataatgggaacacagaggtaaaagcatcaccttcattggcaaacgggatccattctgaacctatgccaggacaaataccagctgcaaagagcagccctccatgggatgaagactggggtccttctaagaaaaccggtgttccatctctctcagttgattctagtgcacagacaaagcaaccctcagtacacccttttgacttcagtactcaaacaaagcaatccacaccactcccctttgatttgagcacccgagcaaagcagccatcattagtttctcatgctacagcagctacaatcccacctgcgcaaccacaaccagtacaatctcttgtgcccagttcaggacctcaaacttctggctcatgtgcccctgttgacattgagtggcctcctcgaagaagctcgtcatccgacttcaatgcatccttgtctattagcaaggagaatgaatctggaaggctatctagcgacggacttgacgatattgatccttttgctgattggcccccaaaacctagcaatgttactagcattacagcaaccgagcatcgtccaagcataaatcaaaatatttctggatttagctcaggtaacatagggtttggtggcagcgggaattctatagggcaagcgaaaagcaaccaaatgagctggtcaaacacgcctaatctgatgggcatgaactcaactggcagctatttgaatcagggcagtgcagctctaggttttggaaatccaattggaggattgagcactggcctctccaatccaagcagttccagtacaggcctgagcatgatgcaaccaaaatctgattttggatcactgtccatgtctgccaataatgccgcaaatggcccacccagacttgcccctcctccatctacttcagttggaagagggcgtggtagaaatcaaggacaatcagcactctcccgagcatcaaggcctcctcattcgaactcgtcatcaggacaacaacctatcctggatttactttagtaagagaggcttgcctctattcttggcgatgacgattgtcaatgtgtacatcttcaaacctttgtaagaggttaccttctctcatgcgtagggttttgatttgggcattgaggctatcttcatattggtgacagaagaaatgtcgttgtgtatgtttctgtctaaaatcggctgtagcttgtagagttgatgaatatagttgacatgcttatctggactgtgaagttttgaatgtttacataatgtttcatgtgccttatatgtggtccctgcccattttctccccgctccccaacatcatgtaattcattagttaaggctcgtgttgtgtatacttagtctgtcgagtttaaggccaatcggcaattctgcttctatacagttgtttggttgctggtaggatcaccactgttatgttatgataccccacaactgtgtgaagtcgatcttcatgtttggtc

SEQ ID NO: 32962 - DNA, 3243 bp, Zea Mays
ggggcgatggcgctcaacatgaagaccctgacgcaggcgctggcgaaggcgtcggctgtcatcgagaagacggtgtccacgacggtgcaggaggtgacgggcccgcgcccgctgcaggactacgagctgctggaccaggccgggtccggcgggccgggactcgcgtggcggatctacacggcgcgaccgcgggacggcgccccctcggcgccctaccccgtcgtctccgtctgggtgctcgacaagcgcgccctcgccgaggcacgggcgcgggcggggctgtcgaaggcggccgaggacgccttcctcgacctcgtccgcgccgacgcggcgcggctcgtgcgcctgcgccacccgggcgtgctccacgttgtgcaggcgcttgacgagaccaaggccgccatggccatggccactgagcccgtcttcgcctccgtagctaacgcgctcgggtgccttgacaacgtcggcaaggtgcccaaggagctcaagggcatggaaatgggactacttgagattaaacatggactgctacaagttgcagagacgttagattttcttcataacaatgctcatcttgcccatcgagctatatcgcctgagacggtctttataacttctaacggatcttggaagcttggtgggtttggttttgctctttcagttgatcaagccacaggtggtttgacttcatcacagctattccattattcggactatgatgtcgaggatacagctttgcctcttcaaccgtcgttgaactatactgcaccagaattggttcgaagtggagattctaaagttggctctgcttgtgacatgtttagctttggatgtctagcttaccatctggttgctcgtagaccacttctggactgccataacaatgttaaaatgtacatgaatgccttgacatatttaacaagtgaagccttttctaatattccttctgatttggtatcggatttgcaaaggatgatatcgatggatgcagtatcgcgtcctagtgctgtggcctttacaggttcttctttcttccgggatgatacgaggttgcgcgctcttcgtttccttgaccatttgcttgagagagataatatgcagaagacagagtttttgaaggcattatcagatatgtggaaggattttgattcccgagttcttcgatataaagttcttcctcctctttgtgctgagttacgcaacatggttatgcagccaatgattttgcctatggttctaacaatagcagaatctcaggataaaggggattttgaacttgcaacactgcctgcgcttgttccagtgtttacttcagcatcaggtgaaactctacttttgcttgtgaagcatgcagatctcatcattaacaaggccacacaggaacatttgatatcacatattcttccaatgctggttcgggcttatgatgacaatgatccccggttacaggaagaagttctgcgtcgaacagtatcactgtctcgtcaacttgacaccaagctagtcaaacaggctgtgcttcctcgtgtacatggattagctctaaagacgacagttgccgcggtgcgcgtgaatgcgttgcgctgtttaggagatcttgtgccatccctggacaaagaagtgcggtgtggagtttgctgcggaatatgtgattcctctcatcttcccattactcacagcacatcaactgaatgtacaacaatttgccaagtatatgctatttgtcaaggacattacaagcaagatcgaagagaagcgtggtgtgactgttacagataatgggaacacagaggtaaaagcatcaccttcattggcaaacgggatccattctgaacctatgccaggacaaataccagctgcaaagagcagccctccatgggatgaagactggggtccttctaagaaaaccggtgttccatctctctcagttgattctagtgcacagacaaagcaaccctcagtacacccttttgacttcagtactcaaacaaagcaatccacaccactcccctttgatttgagcacccgagcaaagcagccatcattagtttctcatgctacagcagctacaatcccacctgcgcaaccacaaccagtacaatctcttgtgcccagttcaggacctcaaacttctggctcatgtgcccctgttgacattgagtggcctcctcgaagaagctcgtcatccgacttcaatgcatccttgtctattagcaaggagaatgaatctggaaggctatctagcgacggacttgacgatattgatccttttgctgattggcccccaaaacctagcaatgttactagcattacagcaaccgagcatcgtccaagcataaatcaaaatatttctggatttagctcaggtaacatagggtttggtggcagcgggaattctatagggcaagcgaaaagcaaccaaatgagctggtcaaacacgcctaatctgatgggcatgaactcaactggcagctatttgaatcagggcagtgcagctctaggttttggaaatccaattggaggattgagcactggcctctccaatccaagcagttccagtacaggcctgagcatgatgcaaccaaaatctgattttggatcactgtccatgtctgccaataatgccgcaaatggcccacccagacttgcccctcctccatctacttcagttggaagagggcgtggtagaaatcaaggacaatcagcactctcccgagcatcaaggcctcctcattcgaactcgtcatcaggacaacaacctatcctggatttactttagtaagagaggcttgcctctattcttggcgatgacgattgtcaatgtgtacatcttcaaacctttgtaagaggttaccttctctcatgcgtagggttttgatttgggcattgaggctatcttcatattggtgacagaagaaatgtcgttgtgtatgtttctgtctaaaatcggctgtagcttgtagagttgatgaatatagttgacatgcttatctggactgtgaagttttgaatgtttacataatgtttcatgtgccttatatgtggtccctgcccattttctccccgctccccaacatcatgtaattcattagttaaggctcgtgttgtgtatacttagtctgtcgagtttaaggccaatcggcaattctgcttctatacagttgtttggttgctggtaggatcaccactgttatgttatgataccccacaactgtgtgaagtcgatcttcatgtttggtc

SEQ ID NO: 32963 - DNA, 3386 bp, Zea Mays
ggggcgatggcgctcaacatgaagaccctgacgcaggcgctggcgaaggcgtcggctgtcatcgagaagacggtgtccacgacggtgcaggaggtgacgggcccgcgcccgctgcaggactacgagctgctggaccaggccgggtccggcgggccgggactcgcgtggcggatctacacggcgcgaccgcgggacggcgccccctcggcgccctaccccgtcgtctccgtctgggtgctcgacaagcgcgccctcgccgaggcacgggcgcgggcggggctgtcgaaggcggccgaggacgccttcctcgacctcgtccgcgccgacgcggcgcggctcgtgcgcctgcgccacccgggcgtgctccacgttgtgcaggcgcttgacgagaccaaggccgccatggccatggccactgagcccgtcttcgcctccgtagctaacgcgctcgggtgccttgacaacgtcggcaaggtgcccaaggagctcaagggcatggaaatgggactacttgagattaaacatggactgctacaagttgcagagacgttagattttcttcataacaatgctcatcttgcccatcgagctatatcgcctgagacggtctttataacttctaacggatcttggaagcttggtgggtttggttttgctctttcagttgatcaagccacaggtggtttgacttcatcacagctattccattattcggactatgatgtcgaggatacagctttgcctcttcaaccgtcgttgaactatactgcaccagaattggttcgaagtggagattctaaagttggctctgcttgtgacatgtttagctttggatgtctagcttaccatctggttgctcgtagaccacttctggactgccataacaatgttaaaatgtacatgaatgccttgacatatttaacaagtgaagccttttctaatattccttctgatttggtatcggatttgcaaaggatgatatcgatggatgcagtatcgcgtcctagtgctgtggcctttacaggttcttctttcttccgggatgatacgaggttgcgcgctcttcgtttccttgaccatttgcttgagagagataatatgcagaagacagagtttttgaaggcattatcagatatgtggaaggattttgattcccgagttcttcgatataaagttcttcctcctctttgtgctgagttacgcaacatggttatgcagccaatgattttgcctatggttctaacaatagcagaatctcaggataaaggggattttgaacttgcaacactgcctgcgcttgttccagtgtttacttcagcatcaggtgaaactctacttttgcttgtgaagcatgcagatctcatcattaacaaggccacacaggaacatttgatatcacatattcttccaatgctggttcgggcttatgatgacaatgatccccggttacaggaagaagttctgcgtcgaacagtatcactgtctcgtcaacttgacaccaagctagtcaaacaggctgtgcttcctcgtgtacatggattagctctaaagacgacagttgccgcggtgcgcgtgaatgcgttgcgctgtttaggagatcttgtgccatccctggacaaagaaggtatattgggtatcttggagacggttcggcgttgcacagctgttgaccatactgcgccaactcttatgtgcacacttggtgttgctaatgcaatctataaacaatgcggtgtggagtttgctgcggaatatgtgattcctctcatcttcccattactcacagcacatcaactgaatgtacaacaatttgccaagtatatgctatttgtcaaggacattacaagcaagatcgaagagaagcgtggtgtgactgttacagataatgggaacacagaggtaaaagcatcaccttcattggcaaacgggatccattctgaacctatgccaggacaaataccagctgcaaagagcagccctccatgggatgaagactggggtccttctaagaaaaccggtgttccatctctctcagttgattctagtgcacagacaaagcaaccctcagtacacccttttgacttcagtactcaaacaaagcaatccacaccactcccctttgatttgagcacccgagcaaagcagccatcattagtttctcatgctacagcagctacaatcccacctgcgcaaccacaaccagtacaatctcttgtgcccagttcaggacctcaaacttctggctcatgtgcccctgttgacattgagtggcctcctcgaagaagctcgtcatccgacttcaatgcatccttgtctattagcaaggagaatgaatctggaaggctatctagcgacggacttgacgatattgatccttttgctgattggcccccaaaacctagcaatgttactagcattacagcaaccgagcatcgtccaagcataaatcaaaatatttctggatttagctcaggtaacatagggtttggtggcagcgggaattctatagggcaagcgaaaagcaaccaaatgagctggtcaaacacgcctaatctgatgggcatgaactcaactggcagctatttgaatcagggcagtgcagctctaggttttggaaatccaattggaggattgagcactggcctctccaatccaagcagttccagtacaggcctgagcatgatgcaaccaaaatctgattttggatcactgtccatgtctgccaataatgccgcaaatggcccacccagacttgcccctcctccatctacttcagttggaagagggcgtggtagaaatcaaggacaatcagcactctcccgagcatcaaggcctcctcattcgaactcgtcatcaggacaacaacctatcctggatttactttagtaagagaggcttgcctctattcttggcgatgacgattgtcaatgtgtacatcttcaaacctttgtaagtctgaaggagttctacttcggggaatctggaccttgcagaggttaccttctctcatgcgtagggttttgatttgggcattgaggctatcttcatattggtgacagaagaaatgtcgttgtgtatgtttctgtctaaaatcggctgtagcttgtagagttgatgaatatagttgacatgcttatctggactgtgaagttttgaatgtttacataatgtttcatgtgccttatatgtggtccctgcccattttctccccgctccccaacatcatgtaattcattagttaaggctcgtgttgtgtatacttagtctgtcgagtttaaggccaatcggcaattctgcttctatacagttgtttggttgctggtaggatcaccactgttatgttatgataccccacaactgtgtgaagtcgatcttcatgtttggtc

SEQ ID NO: 32964 - DNA, 3313 bp, Zea Mays
ggggcgatggcgctcaacatgaagaccctgacgcaggcgctggcgaaggcgtcggctgtcatcgagaagacggtgtccacgacggtgcaggaggtgacgggcccgcgcccgctgcaggactacgagctgctggaccaggccgggtccggcgggccgggactcgcgtggcggatctacacggcgcgaccgcgggacggcgccccctcggcgccctaccccgtcgtctccgtctgggtgctcgacaagcgcgccctcgccgaggcacgggcgcgggcggggctgtcgaaggcggccgaggacgccttcctcgacctcgtccgcgccgacgcggcgcggctcgtgcgcctgcgccacccgggcgtgctccacgttgtgcaggcgcttgacgagaccaaggccgccatggccatggccactgagcccgtcttcgcctccgtagctaacgcgctcgggtgccttgacaacgtcggcaaggtgcccaaggagctcaagggcatggaaatgggactacttgagattaaacatggactgctacaagttgcagagacgttagattttcttcataacaatgctcatcttgcccatcgagctatatcgcctgagacggtctttataacttctaacggatcttggaagcttggtgggtttggttttgctctttcagttgatcaagccacaggtggtttgacttcatcacagctattccattattcggactatgatgtcgaggatacagctttgcctcttcaaccgtcgttgaactatactgcaccagaattggttcgaagtggagattctaaagttggctctgcttgtgacatgtttagctttggatgtctagcttaccatctggttgctcgtagaccacttctggactgccataacaatgttaaaatgtacatgaatgccttgacatatttaacaagtgaagccttttctaatattccttctgatttggtatcggatttgcaaaggatgatatcgatggatgcagtatcgcgtcctagtgctgtggcctttacaggttcttctttcttccgggatgatacgaggagagagataatatgcagaagacagagtttttgaaggcattatcagatatgtggaaggattttgattcccgagttcttcgatataaagttcttcctcctctttgtgctgagttacgcaacatggttatgcagccaatgattttgcctatggttctaacaatagcagaatctcaggataaaggggattttgaacttgcaacactgcctgcgcttgttccagtgtttacttcagcatcaggtgaaactctacttttgcttgtgaagcatgcagatctcatcattaacaaggccacacaggaacatttgatatcacatattcttccaatgctggttcgggcttatgatgacaatgatccccggttacaggaagaagttctgcgtcgaacagtatcactgtctcgtcaacttgacaccaagctagtcaaacaggctgtgcttcctcgtgtacatggattagctctaaagacgacagttgccgcggtgcgcgtgaatgcgttgcgctgtttaggagatcttgtgccatccctggacaaagaaggtatattgggtatcttggagacggttcggcgttgcacagctgttgaccatactgcgccaactcttatgtgcacacttggtgttgctaatgcaatctataaacaatgcggtgtggagtttgctgcggaatatgtgattcctctcatcttcccattactcacagcacatcaactgaatgtacaacaatttgccaagtatatgctatttgtcaaggacattacaagcaagatcgaagagaagcgtggtgtgactgttacagataatgggaacacagaggtaaaagcatcaccttcattggcaaacgggatccattctgaacctatgccaggacaaataccagctgcaaagagcagccctccatgggatgaagactggggtccttctaagaaaaccggtgttccatctctctcagttgattctagtgcacagacaaagcaaccctcagtacacccttttgacttcagtactcaaacaaagcaatccacaccactcccctttgatttgagcacccgagcaaagcagccatcattagtttctcatgctacagcagctacaatcccacctgcgcaaccacaaccagtacaatctcttgtgcccagttcaggacctcaaacttctggctcatgtgcccctgttgacattgagtggcctcctcgaagaagctcgtcatccgacttcaatgcatccttgtctattagcaaggagaatgaatctggaaggctatctagcgacggacttgacgatattgatccttttgctgattggcccccaaaacctagcaatgttactagcattacagcaaccgagcatcgtccaagcataaatcaaaatatttctggatttagctcaggtaacatagggtttggtggcagcgggaattctatagggcaagcgaaaagcaaccaaatgagctggtcaaacacgcctaatctgatgggcatgaactcaactggcagctatttgaatcagggcagtgcagctctaggttttggaaatccaattggaggattgagcactggcctctccaatccaagcagttccagtacaggcctgagcatgatgcaaccaaaatctgattttggatcactgtccatgtctgccaataatgccgcaaatggcccacccagacttgcccctcctccatctacttcagttggaagagggcgtggtagaaatcaaggacaatcagcactctcccgagcatcaaggcctcctcattcgaactcgtcatcaggacaacaacctatcctggatttactttagtaagagaggcttgcctctattcttggcgatgacgattgtcaatgtgtacatcttcaaacctttgtaagaggttaccttctctcatgcgtagggttttgatttgggcattgaggctatcttcatattggtgacagaagaaatgtcgttgtgtatgtttctgtctaaaatcggctgtagcttgtagagttgatgaatatagttgacatgcttatctggactgtgaagttttgaatgtttacataatgtttcatgtgccttatatgtggtccctgcccattttctccccgctccccaacatcatgtaattcattagttaaggctcgtgttgtgtatacttagtctgtcgagtttaaggccaatcggcaattctgcttctatacagttgtttggttgctggtaggatcaccactgttatgttatgataccccacaactgtgtgaagtcgatcttcatgtttggtc

SEQ ID NO: 32965 - DNA, 3343 bp, Zea Mays
ggggcgatggcgctcaacatgaagaccctgacgcaggcgctggcgaaggcgtcggctgtcatcgagaagacggtgtccacgacggtgcaggaggtgacgggcccgcgcccgctgcaggactacgagctgctggaccaggccgggtccggcgggccgggactcgcgtggcggatctacacggcgcgaccgcgggacggcgccccctcggcgccctaccccgtcgtctccgtctgggtgctcgacaagcgcgccctcgccgaggcacgggcgcgggcggggctgtcgaaggcggccgaggacgccttcctcgacctcgtccgcgccgacgcggcgcggctcgtgcgcctgcgccacccgggcgtgctccacgttgtgcaggcgcttgacgagaccaaggccgccatggccatggccactgagcccgtcttcgcctccgtagctaacgcgctcgggtgccttgacaacgtcggcaaggtgcccaaggagctcaagggcatggaaatgggactacttgagattaaacatggactgctacaagttgcagagacgttagattttcttcataacaatgctcatcttgcccatcgagctatatcgcctgagacggtctttataacttctaacggatcttggaagcttggtgggtttggttttgctctttcagttgatcaagccacaggtggtttgacttcatcacagctattccattattcggactatgatgtcgaggatacagctttgcctcttcaaccgtcgttgaactatactgcaccagaattggttcgaagtggagattctaaagttggctctgcttgtgacatgtttagctttggatgtctagcttaccatctggttgctcgtagaccacttctggactgccataacaatgttaaaatgtacatgaatgccttgacatatttaacaagtgaagccttttctaatattccttctgatttggtatcggatttgcaaaggatgatatcgatggatgcagtatcgcgtcctagtgctgtggcctttacaggttcttctttcttccgggatgatacgaggttgcgcgctcttcgtttccttgaccatttgcttgagagagataatatgcagaagacagagtttttgaaggcattatcagatatgtggaaggattttgattcccgagttcttcgatataaagttcttcctcctctttgtgctgagttacgcaacatggttatgcagccaatgattttgcctatggttctaacaatagcagaatctcaggataaaggggattttgaacttgcaacactgcctgcgcttgttccagtgtttacttcagcatcaggtgaaactctacttttgcttgtgaagcatgcagatctcatcattaacaaggccacacaggaacatttgatatcacatattcttccaatgctggttcgggcttatgatgacaatgatccccggttacaggaagaagttctgcgtcgaacagtatcactgtctcgtcaacttgacaccaagctagtcaaacaggctgtgcttcctcgtgtacatggattagctctaaagacgacagttgccgcggtgcgcgtgaatgcgttgcgctgtttaggagatcttgtgccatccctggacaaagaaggtatattgggtatcttggagacggttcggcgttgcacagctgttgaccatactgcgccaactcttatgtgcacacttggtgttgctaatgcaatctataaacaatgcggtgtggagtttgctgcggaatatgtgattcctctcatcttcccattactcacagcacatcaactgaatgtacaacaatttgccaagtatatgctatttgtcaaggacattacaagatcgaagagaagcgtggtgtgactgttacagataatgggaacacagaggtaaaagcatcaccttcattggcaaacgggatccattctgaacctatgccaggacaaataccagctgcaaagagcagccctccatgggatgaagactggggtccttctaagaaaaccggtgttccatctctctcagttgattctagtgcacagacaaagcaaccctcagtacacccttttgacttcagtactcaaacaaagcaatccacaccactcccctttgatttgagcacccgagcaaagcagccatcattagtttctcatgctacagcagctacaatcccacctgcgcaaccacaaccagtacaatctcttgtgcccagttcaggacctcaaacttctggctcatgtgcccctgttgacattgagtggcctcctcgaagaagctcgtcatccgacttcaatgcatccttgtctattagcaaggagaatgaatctggaaggctatctagcgacggacttgacgatattgatccttttgctgattggcccccaaaacctagcaatgttactagcattacagcaaccgagcatcgtccaagcataaatcaaaatatttctggatttagctcaggtaacatagggtttggtggcagcgggaattctatagggcaagcgaaaagcaaccaaatgagctggtcaaacacgcctaatctgatgggcatgaactcaactggcagctatttgaatcagggcagtgcagctctaggttttggaaatccaattggaggattgagcactggcctctccaatccaagcagttccagtacaggcctgagcatgatgcaaccaaaatctgattttggatcactgtccatgtctgccaataatgccgcaaatggcccacccagacttgcccctcctccatctacttcagttggaagagggcgtggtagaaatcaaggacaatcagcactctcccgagcatcaaggcctcctcattcgaactcgtcatcaggacaacaacctatcctggatttactttagtaagagaggcttgcctctattcttggcgatgacgattgtcaatgtgtacatcttcaaacctttgtaagaggttaccttctctcatgcgtagggttttgatttgggcattgaggctatcttcatattggtgacagaagaaatgtcgttgtgtatgtttctgtctaaaatcggctgtagcttgtagagttgatgaatatagttgacatgcttatctggactgtgaagttttgaatgtttacataatgtttcatgtgccttatatgtggtccctgcccattttctccccgctccccaacatcatgtaattcattagttaaggctcgtgttgtgtatacttagtctgtcgagtttaaggccaatcggcaattctgcttctatacagttgtttggttgctggtaggatcaccactgttatgttatgataccccacaactgtgtgaagtcgatcttcatgtttggtc

SEQ ID NO: 32966 - DNA, 2340 bp, Zea Mays
ctcctcctccctgagggctgaggatatccttcaatacatccacctcacgaggaatccgcactcgcgtttgctccgcaatttattgctcagggttcttgctgggtggtggtggcggcgggtggtgcaagcagtactcgttcacaagagcaagctgtttttgtgtgcgtggttttatgcctgcttgcttggcgaggggaagaggaggcggcggagtactgggagttgaagggtgcaggtaccggcattgctgaggcggcgtggggagatccggcgatgtcggaggccgaccggatacgccaccgcacggcggcactggtgctgcacgacgatgagattggggatgattgacaaggcgcggaggcacttcacccaggcgggtcatcttcagcagtcagaccccaccgactggcagaagctgcaggaggtggaggtgcatctgggaagatgcacagatgcaaggaaaattggggattggaagagcacgctgagggaggctgatgctgccattgctgctggtgctgactcctctcagttgcttcttgccttgaggtcagaagcacttctccaccttcacaagctggaggaggctgagtcgactcttgcgagctttctgaaattggacagtgcattgccctcatcattgacagcagcagaactctcgggcatgcttgctgagtcatacgtacatattgttcgagcgcagattgacatggcattggggaggtttgatgctgctgttgctgcagctgagaaggctagagatcttgatcccgggaatgcagaaatcgggatggttttgaataacgtgagactagttgcaaaagccagagagcaaggaaatgatctcttcaaagctgccaagttttcagatgcatccatggcttatggtgaagggctcaagtatgatccctcaaattcagtgctccactgcaatcgagctgcttgttggtcaaagctagaaaagtgggaaaaggctgttgatgactgcaatgaggcactaagaatacaaccaagctatacaaaagctctcttaaggcgagctgcatcatatgctaagcttgagcgttgggtggattgtgtgcgggactatgaggcgcttcggaaggagcttcccagtgacaaggaggttgctgaggcattgttccatgctcaaatttccttgaaggcgactcgtggtgaggatgtatcaaatatgaagtttggaggagaggtagagatagtttccagtgtagagcaactccgtgctgccataagttcacctggggtatctgttgtctacttcatgtcggcaatgaatcagcagtgcacacaaattacaccttcagtcaacactctatgcactgaatgcccctcggtgaattttctcaaggttaacatcgacagcagcccaatggtggcaaaggcagagaacgtgcggatagtcccgacgttcaagatatacaaaggaggggtgaaggtgaaggagatgatctgcccgagcttgcatgttctgcgctactccgtgcggcactattctgtatccagttcttgagaagctttaggtaccggtaccccaatttcccatttttcactaatgcatagagctccccgtcaaacttgcaaacaccactagcagcctccagaacattttcaccaccagcataactactcccctcccctattgagcatgagcataacgggctaagactgtctggtggaagagccccccctcaattccccacctctcctgtcaatttcgccttttcaccgttcatataccaacccattcaattcaatatctttgttcatgttccgggctctctccacctcaatttgtactttgaatactccatttggattcacctcatcatagtccataggccagtaccctgcttctcaaggaaaagggaaatgtttgtaatgtcgtgtagggtttagcggtagcgtctatccattaggggagggggacggcgggagcctggggggttgtagtttttcgttacatgtacataccttataggaaaaaaacatgagataaatccattggaagatttgttccctggagaaaagagaaatggtggcatcggattgagatgagattttggcggttggggtcaggtaacagagctactagctgttttgagttcctattagtctttatctacctatatctatctttagagggagagagagagagagaggtgttaagttaactgatgatgcagacatggtttggtgtccattgaagacgatgatgtcatgtccttttgctgcttctgttggttttatggcgctgatgataccatatatatgctaccatttccatgaataaaaaaaaaacattgcaacattcgttcgttt

SEQ ID NO: 32967 - DNA, 2444 bp, Zea Mays
cctacctccaccaatgcgctgtaacctgtagtgaattttagaactgatgtgcatcaaggttcctagctcttgcttcgattttgtgcttcatggttgcatctgcatgttgatgttgctttcttggctggctttctctgtgagctagacggatgagaaagcaacatgagtgttgggcctttcactttttcctttccattgagatggtgagatttagttctgcgattgctccatcgtcacactcaatagtcattttattttgcccctcaggatgcaagatattgattttcttttgcaattcaaaatgttttttttttctgatttatctgtatgtgaggaaagctaatattgtcttgctttgattgtgggtaaaatcggcgttaaagcttcccatcacataacgctgaaagaagggttggttgtctgcttagctgtactttattggggatgattgacaaggcgcggaggcacttcacccaggcgggtcatcttcagcagtcagaccccaccgactggcagaagctgcaggaggtggaggtgcatctgggaagatgcacagatgcaaggaaaattggggattggaagagcacgctgagggaggctgatgctgccattgctgctggtgctgactcctctcagttgcttcttgccttgaggtcagaagcacttctccaccttcacaagctggaggaggctgagtcgactcttgcgagctttctgaaattggacagtgcattgccctcatcattgacagcagcagaactctcgggcatgcttgctgagtcatacgtacatattgttcgagcgcagattgacatggcattggggaggtttgatgctgctgttgctgcagctgagaaggctagagatcttgatcccgggaatgcagaaatcgggatggttttgaataacgtgagactagttgcaaaagccagagagcaaggaaatgatctcttcaaagctgccaagttttcagatgcatccatggcttatggtgaagggctcaagtatgatccctcaaattcagtgctccactgcaatcgagctgcttgttggtcaaagctagaaaagtgggaaaaggctgttgatgactgcaatgaggcactaagaatacaaccaagctatacaaaagctctcttaaggcgagctgcatcatatgctaagcttgagcgttgggtggattgtgtgcgggactatgaggcgcttcggaaggagcttcccagtgacaaggaggttgctgaggcattgttccatgctcaaatttccttgaaggcgactcgtggtgaggatgtatcaaatatgaagtttggaggagaggtagagatagtttccagtgtagagcaactccgtgctgccataagttcacctggggtatctgttgtctacttcatgtcggcaatgaatcagcagtgcacacaaattacaccttcagtcaacactctatgcactgaatgcccctcggtgaattttctcaaggttaacatcgacagcagcccaatggtggcaaaggcagagaacgtgcggatagtcccgacgttcaagatatacaaaggaggggtgaaggtgaaggagatgatctgcccgagcttgcatgttctgcgctactccgtgcggcactattctgtatccagttcttgagaagctttaggtaccggtaccccaatttcccatttttcactaatgcatagagctccccgtcaaacttgcaaacaccactagcagcctccagaacattttcaccaccagcataactactcccctcccctattgagcatgagcataacgggctaagactgtctggtggaagagccccccctcaattccccacctctcctgtcaatttcgccttttcaccgttcatataccaacccattcaattcaatatctttgttcatgttccgggctctctccacctcaatttgtactttgaatactccatttggattcacctcatcatagtccataggccagtaccctgcttctcaaggaaaagggaaatgtttgtaatgtcgtgtagggtttagcggtagcgtctatccattaggggagggggacggcgggagcctggggggttgtagtttttcgttacatgtacataccttataggaaaaaaacatgagataaatccattggaagatttgttccctggagaaaagagaaatggtggcatcggattgagatgagattttggcggttggggtcaggtaacagagctactagctgttttgagttcctattagtctttatctacctatatctatctttagagggagagagagagagagaggtgttaagttaactgatgatgcagacatggtttggtgtccattgaagacgatgatgtcatgtccttttgctgcttctgttggttttatggcgctgatgataccatatatatgctaccatttccatgaataaaaaaaaaacattgcaacattcgttcgttt

SEQ ID NO: 32968 - DNA, 750 bp, Zea Mays
atgtccaccaggctccaccaccatcttctccaactgatgtgctcgctgctaatctccgcggaactggtaagcgggaacaccggcgacgacgacatggcggtgctcatccagctcaaggccttcctgcgggtgcacaaccagataaaccgggacgcgtacgacagatggtcggaggcctcgccatcgccgtgcggcagctggcagggagtcgggtgcgacgcggacggccgcgtgagctccctcgacctctccagctccagcatatcggtccctctcttcggcaatgcgaacgcgactcggtcccagatccgcagcaggagttcctccttcctggccgccatctccctccacttgcgcgcgctctccccagcccccgcgtccgctccccctcggcgtgccgtggtgaggaacccgcactccgtgagcctggccgcgagctcctcccccgcgcccggtggcgccggtgcccgcaagcgcaccgcggcggactcagcgaggaggttgaccgccgccatctccaccagcgggtccgccgccaggatggaccgcacccgcgccgcgcagccgccgcacatcatgccgctcacgtcgagcaacgcggtggtggcactggcggccccctccccggccgccgcgtcgagcacggacgatgggtcagtcgtggcgcggggccggtccgcgggtgcgccgcgggtggggagacggaggggagcggtaggcaggcgaaggctagggtttggattggcgtga

SEQ ID NO: 32969 - DNA, 1611 bp, Zea Mays
ggatagatacaaaacaaaattacaacctatatttagagaactattggagaactcacattttttttactacaaaagccatttagcaacttcttaaatctgtgatttagagagctaaaatttacatgactattggagttgctcttaggggacgaaatttagggggcgctgctagacacagccttagtcacaactccaactcgtctcggtctcctcccccgaggcctcgattatccaaaaactaaccaaaatacggaatctttcccgtgtatcccaactctcacccgatctcctcgataggcttttgtctccaaggccgcgctttctaacaagattcctcccctcctctctccgataacgctagcctccgccgccgccggcgacgaatccgccatgtccatgttcaacaggatcttcgggaagcccaaggagcaggccaactccagtgccttggccacactcgacaagttaaatgagactcttgatatgctggagaagaaagagaaggtgctggacaaaaaagcagccgctgagcttgagagagccaaggagttctccaaagctaagaataaaagagcggctatccaatccttgaagaggaaaaaactttatgaacaacaaattgagcaactcggaaattttcagttgagaattcatgatcagatgatcatgttagaagcagctaaagctacaacagagactgttgatgcgttgagaactggagctgcagctatgaaagcaatgcaaaaagcaacaaacattgatgatgtcgacaagaccatggatgaaattaatgaacagactgaaaatatgaaacaaattcaagatgctttgtcaactcctcttggagcttctgctgattttgacgaggatgaactggaagcggaacttgaagaactggaaggagcagagttggaatctcagcttctggagcctgttgcagctcttcctgtgcatccagtgcatgtcccaggcaacaagcaaccagctcgccctgctccacagaaagctacagctgaagatgatgagcttgctgcactgcaagctgaaatggcactgtgatcaggtttccactgaagaggtgaaatgtgtatatgaattgcgttatgctgaaagctgagtcaggctttattgtatttgccatgtgtgtataatcttggtggatatttggcaaccgtcaaccgaagcagcgaaaggccgctacagccggtatttgtttcagtgattgggctctgttttctttccacagacaatttagttaatgtcgcccggttaggtctatgctaactattcaggtcaccaacgtgcattgtttgtcacagtatttttcagttacccatattgtttggagccatgtaagagtgttggaacgtttaaagcctcagggttcatatttgatgtgacggagggagtattacataaagtcagttgttcggatttgcagctgtaatctgtagagacaaaacactgtaagcagtagaagctgatatggattaaagtcaagcgaataggctctaatgcatagagacaaaacgacggttgaacacataggcagtaacgcatttgaaatataatggtgcgtttggttgtaatgacaaaacgggatggaacaag

SEQ ID NO: 32970 - DNA, 1438 bp, Zea Mays
ccttagtcacaactccaactcgtctcggtctcctcccccgaggcctcgattatccaaaaactaaccaaaatacggaatctttcccgtgtatcccaactctcacccgatctcctcgataggcttttgtctccaaggccgcgctttctaacaagattcctcccctcctctctccgataacgctagcctccgccgccgccggcgacgaatccgtgcagccatgtccatgttcaacaggatcttcgggaagcccaaggagcaggccaactccagtgccttggccacactcgacaagttaaatgagactcttgatatgctggagaagaaagagaaggtgctggacaaaaaagcagccgctgagcttgagagagccaaggagttctccaaagctaagaataaaagagcggctatccaatccttgaagaggaaaaaactttatgaacaacaaattgagcaactcggaaattttcagttgagaattcatgatcagatgatcatgttagaagcagctaaagctacaacagagactgttgatgcgttgagaactggagctgcagctatgaaagcaatgcaaaaagcaacaaacattgatgatgtcgacaagaccatggatgaaattaatgaacagactgaaaatatgaaacaaattcaagatgctttgtcaactcctcttggagcttctgctgattttgacgaggatgaactggaagcggaacttgaagaactggaaggagcagagttggaatctcagcttctggagcctgttgcagctcttcctgtgcatccagtgcatgtcccaggcaacaagcaaccagctcgccctgctccacagaaagctacagctgaagatgatgagcttgctgcactgcaagctgaaatggcactgtgatcaggtttccactgaagaggtgaaatgtgtatatgaattgcgttatgctgaaagctgagtcaggctttattgtatttgccatgtgtgtataatcttggtggatatttggcaaccgtcaaccgaagcagcgaaaggccgctacagccggtatttgtttcagtgattgggctctgttttctttccacagacaatttagttaatgtcgcccggttaggtctatgctaactattcaggtcaccaacgtgcattgtttgtcacagtatttttcagttacccatattgtttggagccatgtaagagtgttggaacgtttaaagcctcagggttcatatttgatgtgacggagggagtattacataaagtcagttgttcggatttgcagctgtaatctgtagagacaaaacactgtaagcagtagaagctgatatggattaaagtcaagcgaataggctctaatgcatagagacaaaacgacggttgaacacataggcagtaacgcatttgaaatataatggtgcgtttggttgtaatgacaaaacgggatggaacaag

SEQ ID NO: 32971 - DNA, 1480 bp, Zea Mays
ccttagtcacaactccaactcgtctcggtctcctcccccgaggcctcgattatccaaaaactaaccaaaatacggaatctttcccgtgtatcccaactctcacccgatctcctcgataggcttttgtctccaaggccgcgctttctaacaagattcctcccctcctctctccgataacgctagcctccgccgccgccggcgacgaatccgctgctgttttgtctagcaggcgttttgagtttctgttgccagtgcagccatgtccatgttcaacaggatcttcgggaagcccaaggagcaggccaactccagtgccttggccacactcgacaagttaaatgagactcttgatatgctggagaagaaagagaaggtgctggacaaaaaagcagccgctgagcttgagagagccaaggagttctccaaagctaagaataaaagagcggctatccaatccttgaagaggaaaaaactttatgaacaacaaattgagcaactcggaaattttcagttgagaattcatgatcagatgatcatgttagaagcagctaaagctacaacagagactgttgatgcgttgagaactggagctgcagctatgaaagcaatgcaaaaagcaacaaacattgatgatgtcgacaagaccatggatgaaattaatgaacagactgaaaatatgaaacaaattcaagatgctttgtcaactcctcttggagcttctgctgattttgacgaggatgaactggaagcggaacttgaagaactggaaggagcagagttggaatctcagcttctggagcctgttgcagctcttcctgtgcatccagtgcatgtcccaggcaacaagcaaccagctcgccctgctccacagaaagctacagctgaagatgatgagcttgctgcactgcaagctgaaatggcactgtgatcaggtttccactgaagaggtgaaatgtgtatatgaattgcgttatgctgaaagctgagtcaggctttattgtatttgccatgtgtgtataatcttggtggatatttggcaaccgtcaaccgaagcagcgaaaggccgctacagccggtatttgtttcagtgattgggctctgttttctttccacagacaatttagttaatgtcgcccggttaggtctatgctaactattcaggtcaccaacgtgcattgtttgtcacagtatttttcagttacccatattgtttggagccatgtaagagtgttggaacgtttaaagcctcagggttcatatttgatgtgacggagggagtattacataaagtcagttgttcggatttgcagctgtaatctgtagagacaaaacactgtaagcagtagaagctgatatggattaaagtcaagcgaataggctctaatgcatagagacaaaacgacggttgaacacataggcagtaacgcatttgaaatataatggtgcgtttggttgtaatgacaaaacgggatggaacaag

SEQ ID NO: 32972 - DNA, 1571 bp, Zea Mays
ccttagtcacaactccaactcgtctcggtctcctcccccgaggcctcgattatccaaaaactaaccaaaatacggaatctttcccgtgtatcccaactctcacccgatctcctcgataggcttttgtctccaaggccgcgctttctaacaagattcctcccctcctctctccgataacgctagcctccgccgccgccggcgacgaatccggtcatcgtagttgattagtcggcggtcactgctcggattgggcacccactgcgcataggtgggggctccaccgtggaaaagctatccttttcctcttcagttatttttgggcgttttgagtttctgttgccagtgcagccatgtccatgttcaacaggatcttcgggaagcccaaggagcaggccaactccagtgccttggccacactcgacaagttaaatgagactcttgatatgctggagaagaaagagaaggtgctggacaaaaaagcagccgctgagcttgagagagccaaggagttctccaaagctaagaataaaagagcggctatccaatccttgaagaggaaaaaactttatgaacaacaaattgagcaactcggaaattttcagttgagaattcatgatcagatgatcatgttagaagcagctaaagctacaacagagactgttgatgcgttgagaactggagctgcagctatgaaagcaatgcaaaaagcaacaaacattgatgatgtcgacaagaccatggatgaaattaatgaacagactgaaaatatgaaacaaattcaagatgctttgtcaactcctcttggagcttctgctgattttgacgaggatgaactggaagcggaacttgaagaactggaaggagcagagttggaatctcagcttctggagcctgttgcagctcttcctgtgcatccagtgcatgtcccaggcaacaagcaaccagctcgccctgctccacagaaagctacagctgaagatgatgagcttgctgcactgcaagctgaaatggcactgtgatcaggtttccactgaagaggtgaaatgtgtatatgaattgcgttatgctgaaagctgagtcaggctttattgtatttgccatgtgtgtataatcttggtggatatttggcaaccgtcaaccgaagcagcgaaaggccgctacagccggtatttgtttcagtgattgggctctgttttctttccacagacaatttagttaatgtcgcccggttaggtctatgctaactattcaggtcaccaacgtgcattgtttgtcacagtatttttcagttacccatattgtttggagccatgtaagagtgttggaacgtttaaagcctcagggttcatatttgatgtgacggagggagtattacataaagtcagttgttcggatttgcagctgtaatctgtagagacaaaacactgtaagcagtagaagctgatatggattaaagtcaagcgaataggctctaatgcatagagacaaaacgacggttgaacacataggcagtaacgcatttgaaatataatggtgcgtttggttgtaatgacaaaacgggatggaacaag

SEQ ID NO: 32973 - DNA, 1484 bp, Zea Mays
ccttagtcacaactccaactcgtctcggtctcctcccccgaggcctcgattatccaaaaactaaccaaaatacggaatctttcccgtgtatcccaactctcacccgatctcctcgataggcttttgtctccaaggccgcgctttctaacaagattcctcccctcctctctccgataacgctagcctccgccgccgccggcgacgaatccgccagctgctgttttgtctagcaggcgttttgagtttctgttgccagtgcagccatgtccatgttcaacaggatcttcgggaagcccaaggagcaggccaactccagtgccttggccacactcgacaagttaaatgagactcttgatatgctggagaagaaagagaaggtgctggacaaaaaagcagccgctgagcttgagagagccaaggagttctccaaagctaagaataaaagagcggctatccaatccttgaagaggaaaaaactttatgaacaacaaattgagcaactcggaaattttcagttgagaattcatgatcagatgatcatgttagaagcagctaaagctacaacagagactgttgatgcgttgagaactggagctgcagctatgaaagcaatgcaaaaagcaacaaacattgatgatgtcgacaagaccatggatgaaattaatgaacagactgaaaatatgaaacaaattcaagatgctttgtcaactcctcttggagcttctgctgattttgacgaggatgaactggaagcggaacttgaagaactggaaggagcagagttggaatctcagcttctggagcctgttgcagctcttcctgtgcatccagtgcatgtcccaggcaacaagcaaccagctcgccctgctccacagaaagctacagctgaagatgatgagcttgctgcactgcaagctgaaatggcactgtgatcaggtttccactgaagaggtgaaatgtgtatatgaattgcgttatgctgaaagctgagtcaggctttattgtatttgccatgtgtgtataatcttggtggatatttggcaaccgtcaaccgaagcagcgaaaggccgctacagccggtatttgtttcagtgattgggctctgttttctttccacagacaatttagttaatgtcgcccggttaggtctatgctaactattcaggtcaccaacgtgcattgtttgtcacagtatttttcagttacccatattgtttggagccatgtaagagtgttggaacgtttaaagcctcagggttcatatttgatgtgacggagggagtattacataaagtcagttgttcggatttgcagctgtaatctgtagagacaaaacactgtaagcagtagaagctgatatggattaaagtcaagcgaataggctctaatgcatagagacaaaacgacggttgaacacataggcagtaacgcatttgaaatataatggtgcgtttggttgtaatgacaaaacgggatggaacaag

SEQ ID NO: 32974 - DNA, 1940 bp, Zea Mays
cctggcatcatgtctatatttgtgtctgccatcgtcgtcaagttccttttgtggttgcctcgcctgcgtgtgtgtgggagtgagaatagagctatggttcaagataaaaatgaagttcgaaagcaacgctcgtcagggaccccatcgtcgacaactttggttcttcgtcgccggatccgtgtttcggatagcagcaaccttgctgtcatcgtgttcgctccaactctgcctctacgtgctcgtcttcgatcaccgctgcaattttagaagtttgagtgaagaagtggaactcacagggcgcttgccaggagctcgacagaaggcctgaacaagaatcgtcaacgttggcttggaattctagttgaatcggtacgttaattgactacctgatatggaggaccaaagctgagtcgaccacaagagaatggaaagtgtgagcttctccgagagataatgctgatgaacgaactggaagatggacaaactgaacgagtgccaagccaaaggatggtcgtcaagtgatcgacgtctaacaacactaacttagtgttattcaggcaagccctggtgcatttgccacctccttgctgttttaaaatcttttatcaccttgtttgatgcattaggtgataggagttgtgtgctaaacaattgatgcatttctttcctttgaaaattgattacccttccttgataccctttttgaaaataattttatgatgcttagccttgctttagcaaacaaaaatgttttgttttaaaacaaaagttatgcttcagtgggtgggaatgttttcgaaaagaaaaacttgtgatggtggatccatcagggccttgatgggttcaacatcggaaaagatgtacctctaccaggtaccaaactttgggttgaaaataataaagctgagaccgggcggttgagttgcacgagaagggagtctcggtgtagtgtctccgtctgagtcaattaaggaccgtgtcgatgtaggcttgctgattgaggaccttttaactggtcacatgcctcatcatgggtaagctttgcctcgggcagactaataccagaataggacaacatgcaatgggagtggagagatggcgagagtagcgtgtaccctccgtggcaagaggctggacggtggtgtatctgtgctctcggctgacgtgaacccgatctggtcttaagaacctcggtggcgagttgacatatgcaagggttaagtgctacatatgtcgtgtgattggagatccccagctaggtattaatcgattcggatcgccattacttctcggacatgaagacttggtcactgccctacatgtagcaatccagtgatctaaagggatgataaaaaaacggctagtgtaggccaagtgcttgaactagggtagaaagaactctagatgcaagtaactttacttaacctgacaagtaaaaatggatttttaaggatccattcatagtaatcttttctgcaaaagagtctttgattcttgacaagctataccttgattcccaatagccagcgtatccttgagagtctttttctttagacaggtaagacttgcgaaagtacactttgtactcagggttttcgaacccatgttgttgcaggtactagaattgtgctgctatggatggtgttaagcgccggtgggcacgaccttcttataagtctaagtaactcttctatacttcttattaaggatggtcacttgagctagcatatatttcaaaattataaataatttataacagttcaaagtttatcactttgaatcacctttgtaatcactccgatcatgtacaatgtaaatttgttgtaacttgtttggtaataagatttccgctgcaaaattgttggtgtgtgatttgtgtttacttaatcctgcggtcctggttgtaagtggtttatctgaggtccttggggcactcagac

SEQ ID NO: 32975 - DNA, 3657 bp, Zea Mays
gtctcccccaaaccgccttgcctccgttgccctccccactcccctctcacctcctaaaacccctcttgctctcccttgcccgcgcgcacgagcacgcgcatcgacaccttcagctcgtgtgtccgtgcgagcgggcggtttcctcgccaagaactgtcgcgcgggtcgggggattgaggaagagagtgtcggcggcggcggcggcgacgacgacggatttttctggcccgagattcctggtcaaggcaatatgaagtacgtccttgtcaccggcggggtggtgagcggcctgggcaagggcgtcacggccagcagcatcggcgtcgtcctcaaggcgtgcggcttccgcattacgtccattaagatcgatccttaccttaacaccgatgctgggactatgtctccattcgaacatggtgaagtgtttgtgctggatgatggtggcgaggtggacttggatcttggtaattacgagaggtttctggacattaaacttactcgggacaataacataaccaccggaaagatctatcagtctgtaattgacaaggagaggaaaggggaatacttgggaaagactgtccaggttgtgccacacatcacaaatgccatacaggagtggattgagcgtgttgctatgataccagttgatggcatggagggacctgctgatgtctgtgtgatagaattggggggcactataggtgatattgaatccatgccatttatagaagctttgggtcagttctcttatcgtgttggtcctggcaacttctgcctggtgcacgtcagtctagttccagttttgaatgttgttggtgaacagaaaacaaagccaacccagcatagtgtacgtggtttgaggggactcgggctcactccaaatattttagcttgccgcagtactaaggaattagaggatagtgtgaaggagaaactctcccagttttgccatgtgccggcagcaaatattatcactttgtatgatgtttccaatatctggcgcattcctttgttgctttgtgaccaaaaggctcatgaggctatccttaaagttctgaatctggaaagggtggatagcattgcccgagagccgaagttagacgaatgggttgcaagagctgctatatttgatacccttcatgacactgtgaggattgctatggttgggaagtacactggcttatcagattcatacctctctgtgttgaaagccctcttgcatgcatctgttgattgccgtaggaaacttgttgttgattgggttgcttcgacggatcttgaggattccacagcaattgaggcacccgatgcatataaaacatcatggaatttattgaagggggcagatggaattttggtacctggtggctttggtgacagaggtgttgaagggaaaattttggctgctaagtatgcccgggaaaagaatgtcccatatcttggtatatgtcttgggatgcagattgctgtcgtggagtatgcccgtcatgttatgaatttcactgatgccaacagcactgaatttgatccaaataccaagaccccttgtgttatttttatgcctgagggttccaaaacacatatgggtgcaacaatgcgcttaggatcaaggaggacatttttcaagattgctgattgcaagtcttctaaattgtatggcaatgtcacttatgttgatgaaaggcaccggcacagatatgaggtgaaccctgatatggttccagagttcgaaaaagctgggcttcagtttgttggcaaagatgatactggaaggaggatggagatgattgaaatacccaaccaccgatattttgttggcgcacaattccatcctgagttcaagtcaagaccttcaaaaccttctcccctatttgtgggactaattgcagctgcatctgggcagttggatagggtgctgcaagaccgctgcaatggtcatgttggttcagctaaacatgttctgagcaatggctcatatacatccgcagtacaccaaaatgggaacccaaagaagctcaccaatggtctctcaaacggaacatactatgccaatggcaatggtgtgcatgcttagaccatcagatggatggatcaaggattttgcaactctttacttcaattatgcggttcctaatgcatcagttttgtccgttcgaggaagaaaaagttcttgcgctcgatgcagactgtctgctgggaatagtgctcgttcggtggtttttagttaaagaactaagctggatctctttggaaggcacgagactggtttctgtgttcgtctctaccctattgtgtaagctaaaggagcagatttgggacggaagagtttacaagttgtatatcctcaaagaaaagctgaatatttttattaacttaaattaggtcttcagtgaggtcgagagctgatgcttaaaagtgggcagcagtgcaagtgcaagagagagtatttcgaaatcaggcaactctgtattttgattttggacattttttttgtttcttgtgcgcaaataagttgatgcactgttgcatgatcatatatcagttttgactttagaatccatcttgagcgcttgcttctcataattcctgcgacttgcattgtggcaatctaaaacctatttaaaccgtgataaataagctagtttatttttaactaagctgtgatataaattaaaaagaacgaaaggggagggagtgtctgatacgcaaaatcatcctatatcacaacaatttcgagttttttttgccgagttgatcgaaattccttgcggtgcaaaaatacacgagcataaaactttgccatcaagaatctatctatgaaaaccgaaagctcaatccgtgaccgtgcaacggctcagggttcccactctgagagaagcttgtcaatcagctccaccagcttccctgtctcctccggctggcgcatcgcctgctccagcgcccacgcttcctcgatcctggcgtcctgcagcatcgcgtcccgcaccgcctcccgcagctcccgcgtggcctgcaacccgtccgttgccatctccctgagcgcagccagcgcgcccctggggtcctcaaggcggcagagcccctcgacggcgtcagcgtaggtggcggcgtcgggccggcgcggggagtccgggcggcagagccagcgcagcacggaggaggcgtcgcgcgcgcggcgcagggagaggaggctgccgagcagcggcgacgccagcaggagcggcgagggccgggccgggtgatggcgcagcgcggtgaggagcgcgaaggcagcggagagtgtcggaagcgaggcaaggtgcgcggcgagggaatcgagggggaggccgtcctgggagcccgggaggaggagcgccgcggagaggaggcggccggcggcggggacgtggcccgcgtagaggaggcgcgggaggagcgcggagatcgcgtccaggtcggacggggagaggggttgaggtgggggcttggattgcggcagcgcggtagcgcagatgccgcgaaggacgccggcgagcggcggcgcgaggcggatgggcaagcggggcagcatcgtcttctgggctcggctcactcaggaacgattctgagtcttttttttctttctgcaggagggcgcgccgccgtcaaatggacgagcgatatctcagatcgagc

SEQ ID NO: 32976 - DNA, 552 bp, Zea Mays
cccccaaaccgccttgcctccgttgccctccccactcccctctcacctcctaaaacccctcttgctctcccttgcccgcgcgcacgagcacgcgcatcgacaccttcagctcgtgtgtccgtgcgagcgggcggtttcctcgccaagaactgtcgcgcgggtcgggggattgaggaagagagtgtcggcggcggcggcggcgacgacgacggatttttctggcccgagattcctggtcaaggcaatatgaagtacgtccttgtcaccggcggggtggtgagcggcctgggcaagggcgtcacggccagcagcatcggcgtcgtcctcaaggcgtgcggcttccgcattacgtccattaagatcgatccttaccttaacaccgatgctgggactatgtctccattcgaacatggtgaagtgtttgtgctggatgatggtggcgaggtggacttggatcttggtaattacgagaggtttctggacattaaacttactcgggacaataacataaccaccggaaagatctatcagtcagaagatgaaatagtccac

SEQ ID NO: 32977 - DNA, 3623 bp, Zea Mays
cccccaaaccgccttgcctccgttgccctccccactcccctctcacctcctaaaacccctcttgctctcccttgcccgcgcgcacgagcacgcgcatcgacaccttcagctcgtgtgtccgtgcgagcgggcggtttcctcgccaagaactgtcgcgcgggtcgggggattgaggaagagagtgtcggcggcggcggcggcgacgacgacggatttttctggcccgagattcctggtcaaggcaatatgaagtacgtccttgtcaccggcggggtggtgagcggcctgggcaagggcgtcacggccagcagcatcggcgtcgtcctcaaggcgtgcggcttccgcattacgtccattaagatcgatccttaccttaacaccgatgctgggactatgtctccattcgaacatggtgaagtgtttgtgctggatgatggtggcgaggtggacttggatcttggtaattacgagaggtttctggacattaaacttactcgggacaataacataaccaccggaaagatctatcagtctgtaattgacaaggagaggaaaggggaatacttgggaaagactgtccaggagtggattgagcgtgttgctatgataccagttgatggcatggagggacctgctgatgtctgtgtgatagaattggggggcactataggtgatattgaatccatgccatttatagaagctttgggtcagttctcttatcgtgttggtcctggcaacttctgcctggtgcacgtcagtctagttccagttttgaatgttgttggtgaacagaaaacaaagccaacccagcatagtgtacgtggtttgaggggactcgggctcactccaaatattttagcttgccgcagtactaaggaattagaggatagtgtgaaggagaaactctcccagttttgccatgtgccggcagcaaatattatcactttgtatgatgtttccaatatctggcgcattcctttgttgctttgtgaccaaaaggctcatgaggctatccttaaagttctgaatctggaaagggtggatagcattgcccgagagccgaagttagacgaatgggttgcaagagctgctatatttgatacccttcatgacactgtgaggattgctatggttgggaagtacactggcttatcagattcatacctctctgtgttgaaagccctcttgcatgcatctgttgattgccgtaggaaacttgttgttgattgggttgcttcgacggatcttgaggattccacagcaattgaggcacccgatgcatataaaacatcatggaatttattgaagggggcagatggaattttggtacctggtggctttggtgacagaggtgttgaagggaaaattttggctgctaagtatgcccgggaaaagaatgtcccatatcttggtatatgtcttgggatgcagattgctgtcgtggagtatgcccgtcatgttatgaatttcactgatgccaacagcactgaatttgatccaaataccaagaccccttgtgttatttttatgcctgagggttccaaaacacatatgggtgcaacaatgcgcttaggatcaaggaggacatttttcaagattgctgattgcaagtcttctaaattgtatggcaatgtcacttatgttgatgaaaggcaccggcacagatatgaggtgaaccctgatatggttccagagttcgaaaaagctgggcttcagtttgttggcaaagatgatactggaaggaggatggagatgattgaaatacccaaccaccgatattttgttggcgcacaattccatcctgagttcaagtcaagaccttcaaaaccttctcccctatttgtgggactaattgcagctgcatctgggcagttggatagggtgctgcaagaccgctgcaatggtcatgttggttcagctaaacatgttctgagcaatggctcatatacatccgcagtacaccaaaatgggaacccaaagaagctcaccaatggtctctcaaacggaacatactatgccaatggcaatggtgtgcatgcttagaccatcagatggatggatcaaggattttgcaactctttacttcaattatgcggttcctaatgcatcagttttgtccgttcgaggaagaaaaagttcttgcgctcgatgcagactgtctgctgggaatagtgctcgttcggtggtttttagttaaagaactaagctggatctctttggaaggcacgagactggtttctgtgttcgtctctaccctattgtgtaagctaaaggagcagatttgggacggaagagtttacaagttgtatatcctcaaagaaaagctgaatatttttattaacttaaattaggtcttcagtgaggtcgagagctgatgcttaaaagtgggcagcagtgcaagtgcaagagagagtatttcgaaatcaggcaactctgtattttgattttggacattttttttgtttcttgtgcgcaaataagttgatgcactgttgcatgatcatatatcagttttgactttagaatccatcttgagcgcttgcttctcataattcctgcgacttgcattgtggcaatctaaaacctatttaaaccgtgataaataagctagtttatttttaactaagctgtgatataaattaaaaagaacgaaaggggagggagtgtctgatacgcaaaatcatcctatatcacaacaatttcgagttttttttgccgagttgatcgaaattccttgcggtgcaaaaatacacgagcataaaactttgccatcaagaatctatctatgaaaaccgaaagctcaatccgtgaccgtgcaacggctcagggttcccactctgagagaagcttgtcaatcagctccaccagcttccctgtctcctccggctggcgcatcgcctgctccagcgcccacgcttcctcgatcctggcgtcctgcagcatcgcgtcccgcaccgcctcccgcagctcccgcgtggcctgcaacccgtccgttgccatctccctgagcgcagccagcgcgcccctggggtcctcaaggcggcagagcccctcgacggcgtcagcgtaggtggcggcgtcgggccggcgcggggagtccgggcggcagagccagcgcagcacggaggaggcgtcgcgcgcgcggcgcagggagaggaggctgccgagcagcggcgacgccagcaggagcggcgagggccgggccgggtgatggcgcagcgcggtgaggagcgcgaaggcagcggagagtgtcggaagcgaggcaaggtgcgcggcgagggaatcgagggggaggccgtcctgggagcccgggaggaggagcgccgcggagaggaggcggccggcggcggggacgtggcccgcgtagaggaggcgcgggaggagcgcggagatcgcgtccaggtcggacggggagaggggttgaggtgggggcttggattgcggcagcgcggtagcgcagatgccgcgaaggacgccggcgagcggcggcgcgaggcggatgggcaagcggggcagcatcgtcttctgggctcggctcactcaggaacgattctgagtcttttttttctttctgcaggagggcgcgccgccgtcaaatggacgagcgatatctcagatcgagc

SEQ ID NO: 32978 - DNA, 1364 bp, Zea Mays
tactattgttgcacttgttgctctgattgtggcctttgccttgtaaaatcggtggtggcaagccagctattacttgcattaatgctttagttgcttgtgtttgtctttatgtggttgacatgttctcattcagttacctgaatatgcagatccttaccttaacaccgatgctgggactatgtctccattcgaacatggtgaagtgtttgtgctggatgatggtggcgaggtggacttggatcttggtaattacgagaggtttctggacattaaacttactcgggacaataacataaccaccggaaagatctatcagtctgtaattgacaaggagaggaaaggggaatacttgggaaagactgtccaggttgtgccacacatcacaaatgccatacaggagtggattgagcgtgttgctatgataccagttgatggcatggagggacctgctgatgtctgtgtgatagaattggggggcactataggtgatattgaatccatgccatttatagaagctttgggtcagttctcttatcgtgttggtcctggcaacttctgcctggtgcacgtcagtctagttccagttttgaatgttgttggtgaacagaaaacaaagccaacccagcatagtgtacgtggtttgaggggactcgggctcactccaaatattttagcttgccgcagtactaaggaattagaggatagtgtgaaggagaaactctcccagttttgccatgtgccggcagcaaatattatcactttgtatgatgtttccaatatctggcgcattcctttgttgctttgtgaccaaaaggctcatgaggctatccttaaagttctgaatctggaaagggtggatagcattgcccgagagccgaagttagacgaatgggttgcaagagctgctatatttgatacccttcatgacactgtgaggattgctatggttgggaagtacactggcttatcagattcatacctctctgtgttgaaagccctcttgcatgcatctgttgattgccgtaggaaacttgttgttgattgggttgcttcgacggatcttgaggattccacagcaattgaggcacccgatgcatataaaacatcatggaatttattgaagatggaattttggtacctggtggctttggtgacagaggtgttgaagggaaaattttggctgctaagtatgcccgggaaaagaatgtcccatatcttggtatatgtcttgggatgcagattgctgtcgtggagtatgcccgtcatgttatgaatttcactgatgccaacagcactgaatttgatccaaataccaagaccccttgtgttatttttatgcctgagggttccaaaacacatatggg

SEQ ID NO: 32979 - DNA, 3638 bp, Zea Mays
agggcgtccacagcccctcgtgcccccgcccgtgatgcgcgccgtctcctcccccgcgcgacccctcccgtgatggccgccgccgcctaccccgcgcgacaccagccgccacctaccccgcgcgacaacgcccgtgatgcccgccgccgcctaccccgcgcgacaccaccaatggtgcccttccttccccggcacccgcaacccgccagctccgcgcgagccgccggcgggatacccgcctcccccgcgcccccgccagctccgcgcgaggcgccagctccgcgcgtccgccgcagtgatgccgcgcgatgaaggccgcacgggagagacgctgggaaagccgctccttccggcgttgcagtgggggcgtccacagctgtgccatgcccccgccccgtccgagacgccgaccacgacccaggattctcgcttcccgtccacgtccgtgattttcccagcgaagctgaccacgcctccctgtacgcacctcccgacatcctcgccgacatgctcgcactcctgtccccgtctgagatcctcgcgtcggcgccttcggtggaagtccggaatcgcccggctctcctccaccgcgccgccagcctcactgagaagagttcatctgcctcctcctcaacgcttgaccccaccgccgctggatccaacaccctgccctcgtccttcttctccgacctactcaccagtgacgacgtgggcaccctggccagacgcacgccatggacagcaggtgggcaggaacaccttctacgtggatcctcttctcccgtgctcctcgacgcacgagagcgagctcggactggatcctctcctaccgctccatgcaggtgctcctccgcccgatcccaatgtaaaacctacagttttgttagatgttgctgccactgtttggagaagactcgcgctagaaagcggtactgggtgaaaactgcagagcgatctagagctcgcaagcctgccattgctctctgtagcaatagaaatcccccaacccacccacccacacaagttgcaattgccctcttacatctattttttggtggaacaactaaattgacattgaagaagttttttggagtgtgctcgttctgcaattagaagacttctgtaagatcattcttctctttgtttttttcatttagaacctatgttggttttctgattttcatggaccacataaatagttatgtattctgtttcatagattcatgtctatataacaatttatttgaaaggcatttatctgtgcagggagagttctataattattctggtttgtagtccgtgaatttatagtggattgcttgaggtacaaatttgtatataacttctattaagttgctcctaatttccttctatcgcttgtcattctattagatgatgcaattttttgaggtatagatagcaatttttgtattcaaacaaaacaaagaaacaagttatctttaattgacattctatcattgactatcagtgtttaagctatatatttgtgaagataaattgtttatacactaataactgagtttgatgttgtagatactgggtaacaggaatgcatgtttatgattttcgttttgaccttgcattgcatctacaatgaccagaggatgcagtctatggatccagttaatgtgtatggaaatccaatggaaggtgacatgattacaacagggacacctcttgttgtcccaccacttattgacatgattagcaatgacccaatttttgcccattgctgaagatgggatgcaggaggcctctatcaagtaggtcaattacctcattaacagggacacctcttgttgccccaccacttattgatatgattagcaatgacccaattttttgctcattgctgaagcatgggatgcaggaggcctctatcaagtaggtcaatttcctcactagaatgtttggttagagtggaatgtaaaggtctggacactctatgaattcgatgatctcgagagcatcattgataggacactaaagcgcgattttgacaccgaggaagcactctggttgcttaagataggtcttgtgtgcatcccggatagccctaagatcaagccctccatgtcaatggttgccaagatgctgcaaggtgagtgtgctgtgagtgacaggatcatgaggcctggcctgatcacagacgtcatggacctgaaagtcaggatggtagagccgatttagttcagcttgacatcatgctcgagcactgccgcaccggaccttgttggggatttcctcgattaaaatataagctccttgatatggttctgtaacatagttctgcaatgctcctttatttagttctttactttttttgttaagatatgaggtgtagcgatacaatatgtctactaacagcgtttgtgttcttgatagttcatttaggattgaatgaagttactggtatgaccttgtcgagactgaagtaaggagggatagagctaaaaactctcttggcacaactataaagttcaagctatatgggcgtgtttggatggcagcctcccatgcaactgcctggcaggcaaatgatcctagccacaccacaggcataggaaatcgaacggtcggcattgtttcctgggccagctgataaaatccattgaagtgcaagaggccgataaacttaggcgtatagtgctggatgctccatccactggacatacacttaagcttctgtcagtttctgattggattgaaatgttccttactttgagcattaaggacacatgaggtgtagctattgggcctctaacttggttatcatggttttgggccgtgggtagagcaggcaatgcaagtgcagtctggcacaatcctggtggtttggcattgatgtttcttttcacagtttgcgcttgcgaacatccgaaccccgttttcatcttgaattcaacttatgatgtatatcggacagttccaccacattctggcgccgccttcgtctgatcctggaggcaattggagccgctgcaagtcggatcctggtggatgcagcgcaacacagatcgcaaccctccaaggactgagaagtggaatgttgacatctctgagacagtctgaaagcaaaccgaaggcaggggtgttcatcaactcctgcttcgcgcattgctagagtgagctacaggacacatggttcgcaccaaattctccatccatatataacaagaaaattgcagaggtggtaggtgattggtactttgaaagaggagctgacgtggagattgactgcgcctatccctgtgattcacagtcttgtcgcaaccttataccaattgataaggctgaccatcctagattaaacttcaaagaccggtaccctgagccatacagagattctcatccgactgcccccgttgctgtgcatggatgtcaggtgtcattactgtaatgtagtggtgaaataggtagattaaaacaatgaaatttatatgtggctaggatcataaatgaattgcaaaattttttctcagaacagtataacacatatttgtacataagttgttgtgttattatatgtttccgttgcaacgcacgggcactcacctagtatatatatatatatatatatatatattacacctgggtgcattcaatatagagaatgc

SEQ ID NO: 32980 - DNA, 3685 bp, Zea Mays
tcgtgcccccgcccgtgatgcgcgccgtctcctcccccgcgcgacccctcccgtgatggccgccgccgcctaccccgcgcgacaccagccgccacctaccccgcgcgacaacgcccgtgatgcccgccgccgcctaccccgcgcgacaccaccaatggtgcccttccttccccggcacccgcaacccgccagctccgcgcgagccgccggcgggatacccgcctcccccgcgcccccgccagctccgcgcgaggcgccagctccgcgcgtccgccgcagtgatgccgcgcgatgaaggccgcacgggagagacgctgggaaagccgctccttccggcgttgcagtgggggcgtccacagctgtgccatgcccccgccccgtccgagacgccgaccacgacccaggattctcgcttcccgtccacgtccgtgattttcccagcgaagctgaccacgcctccctgtacgcacctcccgacatcctcgccgacatgctcgcactcctgtccccgtctgagatcctcgcgtcggcgccttcggtggaagtccggaatcgcccggctctcctccaccgcgccgccagcctcactgagaagagttcatctgcctcctcctcaacgcttgaccccaccgccgctggatccaacaccctgccctcgtccttcttctccgacctactcaccagtgacgacgtgggcaccctggccagacgcacgccatggacagcaggtgggcaggaacaccttctacgtggatcctcttctcccgtgctcctcgacgcacgagagcgagctcggactggatcctctcctaccgctccatgcagggagagttctataattattctggtttgtagtccgtgaatttatagtggattgcttgagatactgggtaacaggaatgcatgtttatgattttcgttttgaccttgcattgcatctacaatgaccagaggatgcagtctatggatccagttaatgtgtatggaaatccaatggaaggtgacatgattacaacagggacacctcttgttgtcccaccacttattgacatgattagcaatgacccaatttttgcccattgctgaagatgggatgcaggaggcctctatcaagtaggtcaattacctcattaacagggacacctcttgttgccccaccacttattgatatgattagcaatgacccaattttttgctcattgctgaagcatgggatgcaggaggcctctatcaagtaggtcaatttcctcactagaatgtttggttagagtggaatgtaaaggtctggacactctatgaattcgatgatctcgagagcatcattgataggacactaaagcgcgattttgacaccgaggaagcactctggttgcttaagataggtcttgtgtgcatcccggatagccctaagatcaagccctccatgtcaatggttgccaagatgctgcaaggtgagtgtgctgtgagtgacaggatcatgaggcctggcctgatcacagacgtcatggacctgaaagtcaggatggtagagccgatttagttcagcttgacatcatgctcgagcactgccgcaccggaccttgttggggatttcctcgattaaaatataagctccttgatatggttctgtaacatagttctgcaatgctcctttatttagttctttactttttttgttaagatatgaggtgtagcgatacaatatgtctactaacagcgtttgtgttcttgatagttcatttaggattgaatgaagttactggtatgaccttgtcgagactgaagtaaggagggatagagctaaaaactctcttggcacaactataaagttcaagctatatgggcgtgtttggatggcagcctcccatgcaactgcctggcaggcaaatgatcctagccacaccacaggcataggaaatcgaacggtcggcattgtttcctgggccagctgataaaatccattgaagtgcaagaggccgataaacttaggcgtatagtgctggatgctccatccactgtttgtctcttctcaccacaatatttccaatctgactatgttcttcattttgtccactgacagttatttgactacatgcattttgtatagggacatacacttaagcttctgtcagtttctgattggattgaaatgttccttactttgagcattaaggtgagcgctttaatccatatagtgaactaacctgttttttaagtttttaactctgctaccttcatggatttcatttgcatgaatatatgtttaagcttgatacttttttttcgttatgatattagctgatgtggattatgattataaattattgagatatagtggtgaggacaagtggtatcactaacgtgattagggagtttctacaatcatgtgcttgagatactgtcagtgcaaaaattgttgcatggtttcaatttggagttttggacagtgcacctctttgagaccgtagactgtaacaccaaactgtttgtctaggttcccctgttttgagtccttttgacgttgtgttatggagtttatgtgtttaattgtgcttcattgaatccttttatccgcatgcttgagggcagtaaattctatgcagaatgtgctcatggagtcaaaatcacaacgcacttcaatatagcattttgtagtatactacttctaattctaccatttcttgctttgctgtttctaattgctcgcttgcatgcttgactagctgcattccaaattgtgttatgtttcctgggatagtgaattccaaattgtgttatgtttgctgcatatatgatacaagtattgattttttaacaatgctaggacacatgaggtgtagctattgggcctctaacttggttatcatggttttgggccgtgggtagagcaggcaatgcaagtgcagtctggcacaatcctggtggtttggcattgatgtttcttttcacagtttgcgcttgcgaacatccgaaccccgttttcatcttgaattcaacttatgatgtatatcggacagttccaccacattctggcgccgccttcgtctgatcctggaggcaattggagccgctgcaagtcggatcctggtggatgcagcgcaacacagatcgcaaccctccaaggactgagaagtggaatgttgacatctctgagacagtctgaaagcaaaccgaaggcaggggtgttcatcaactcctgcttcgcgcattgctagagtgagctacaggacacatggttcgcaccaaattctccatccatatataacaagaaaattgcagaggtggtaggtgattggtactttgaaagaggagctgacgtggagattgactgcgcctatccctgtgattcacagtcttgtcgcaaccttataccaattgataaggaactgaggatgtattaggagttcggcagacgattatactcaattatcatcataataaaaaacactcttctaattgttgatgatgttatgttacttgcatcagatagcaaaccaccctattgtacaatctgttggtggaaacatgtttgtgttgtgtgttccaggttgtctgtttcttggtagccttttttggctgaattggtgatatacacaaaatctatttacttgttagactatactttgtattgcacccctgatatccaggccattgcttgtgttttctatgattcgttttaactgaa

SEQ ID NO: 32981 - DNA, 3320 bp, Zea Mays
ccgcccgtgatgcgcgccgtctcctcccccgcgcgacccctcccgtgatggccgccgccgcctaccccgcgcgacaccagccgccacctaccccgcgcgacaacgcccgtgatgcccgccgccgcctaccccgcgcgacaccaccaatggtgcccttccttccccggcacccgcaacccgccagctccgcgcgagccgccggcgggatacccgcctcccccgcgcccccgccagctccgcgcgaggcgccagctccgcgcgtccgccgcagtgatgccgcgcgatgaaggccgcacgggagagacgctgggaaagccgctccttccggcgttgcagtgggggcgtccacagctgtgccatgcccccgccccgtccgagacgccgaccacgacccaggattctcgcttcccgtccacgtccgtgattttcccagcgaagctgaccacgcctccctgtacgcacctcccgacatcctcgccgacatgctcgcactcctgtccccgtctgagatcctcgcgtcggcgccttcggtggaagtccggaatcgcccggctctcctccaccgcgccgccagcctcactgagaagagttcatctgcctcctcctcaacgcttgaccccaccgccgctggatccaacaccctgccctcgtccttcttctccgacctactcaccagtgacgacgtgggcaccctggccagacgcacgccatggacagcaggtgggcaggaacaccttctacgtggatcctcttctcccgtgctcctcgacgcacgagagcgagctcggactggatcctctcctaccgctccatgcaggtgctcctccgcccgatcccaatgtaaaacctacagttttgttagatgttgctgccactgtttggagaagactcgcgctagaaagcggtactgggtgaaaactgcagagcgatctagagctcgcaagcctgccattgctctctgtagcaatagaaatcccccaacccacccacccacacaagttgcaattgccctcttacatctattttttggtggaacaactaaattgacattgaagaagttttttggagtgtgctcgttctgcaattagaagacttctggagagttctataattattctggtttgtagtccgtgaatttatagtggattgcttgaggtacaaatttgtatataacttctattaagttgctcctaatttccttctatcgcttgtcattctattagatgatgcaattttttgaggtatagatagcaatttttgtattcaaacaaaacaaagaaacaagttatctttaattgacattctatcattgactatcagtgtttaagctatatatttgtgaagataaattgtttatacactaataactgagtttgatgttgtagatactgggtaacaggaatgcatgtttatgattttcgttttgaccttgcattgcatctacaatgaccagaggatgcaggtaaaaagttatttttattttctctgtattttgtctttttagacatttcttaaaccaatctttcctttgccagtctatggatccagttaatgtgtatggaaatccaatggaaggtgacatgattacaacagggacacctcttgttgtcccaccacttattgacatgattagcaatgacccaatttttgcccattgctgaagatgggatgcaggaggcctctatcaagtaggtcaattacctcattaacagggacacctcttgttgccccaccacttattgatatgattagcaatgacccaattttttgctcattgctgaagcatgggatgcaggaggcctctatcaagtaggtcaatttcctcactagaatgtttggttagagtggaatgtaaaggtctggacactctatgaattcgatgatctcgagagcatcattgataggacactaaagcgcgattttgacaccgaggaagcactctggttgcttaagataggtcttgtgtgcatcccggatagccctaagatcaagccctccatgtcaatggttgccaagatgctgcaaggtgagtgtgctgtgagtgacaggatcatgaggcctggcctgatcacagacgtcatggacctgaaagtcaggatggtagagccgatttagttcagcttgacatcatgctcgagcactgccgcaccggaccttgttggggatttcctcgattaaaatataagctccttgatatggttctgtaacatagttctgcaatgctcctttatttagttctttactttttttgttaagatatgaggtgtagcgatacaatatgtctactaacagcgtttgtgttcttgatagttcatttaggattgaatgaagttactggtatgaccttgtcgagactgaagtaaggagggatagagctaaaaactctcttggcacaactataaagttcaagctatatgggcgtgtttggatggcagcctcccatgcaactgcctggcaggcaaatgatcctagccacaccacaggcataggaaatcgaacggtcggcattgtttcctgggccagctgataaaatccattgaagtgcaagaggccgataaacttaggcgtatagtgctggatgctccatccactggacatacacttaagcttctgtcagtttctgattggattgaaatgttccttactttgagcattaagacagttccaccacattctggcgccgccttcgtctgatcctggaggcaattggagccgctgcaagtcggatcctggtggatgcagcgcaacacagatcgcaaccctccaaggactgagaagtggaatgttgacatctctgagacagtctgaaagcaaaccgaaggcaggggtgttcatcaactcctgcttcgcgcattgctagagtgagctacaggacacatggttcgcaccaaattctccatccatatataacaagaggtggtaggtgattggtactttgaaagaggagctgacgtggagattgactgcgcctatccctgtgattcacagtcttgtcgcaaccttataccaattgataaggaactgaggatgtattaggagttcggcagacgattatactcaattatcatcataataaaaaacactcttctaattgttgatgatgttatgttacttgcatcagatagcaaaccaccctattgtacaatctgttggtggaaacatgtttgtgttgtgtgttccaggttgtctgtttcttggtagccttttttggctgaattggtgatatacacaaaatctatttacttgttagactatactttgtattgcacccctgatatccaggccattgcttgtgttttctatgattcgttttaactgaa

SEQ ID NO: 32982 - DNA, 2922 bp, Zea Mays
ccgccgccgcctaccccgcgcgacaccagccgccacctaccccgcgcgacaacgcccgtgatgcccgccgccgcctaccccgcgcgacaccaccaatggtgcccttccttccccggcacccgcaacccgccagctccgcgcgagccgccggcgggatacccgcctcccccgcgcccccgccagctccgcgcgaggcgccagctccgcgcgtccgccgcagtgatgccgcgcgatgaaggccgcacgggagagacgctgggaaagccgctccttccggcgttgcagtgggggcgtccacagctgtgccatgcccccgccccgtccgagacgccgaccacgacccaggattctcgcttcccgtccacgtccgtgattttcccagcgaagctgaccacgcctccctgtacgcacctcccgacatcctcgccgacatgctcgcactcctgtccccgtctgagatcctcgcgtcggcgccttcggtggaagtccggaatcgcccggctctcctccaccgcgccgccagcctcactgagaagagttcatctgcctcctcctcaacgcttgaccccaccgccgctggatccaacaccctgccctcgtccttcttctccgacctactcaccagtgacgacgtgggcaccctggccagacgcacgccatggacagcaggtgggcaggaacaccttctacgtggatcctcttctcccgtgctcctcgacgcacgagagcgagctcggactggatcctctcctaccgctccatgcagatactgggtaacaggaatgcatgtttatgattttcgttttgaccttgcattgcatctacaatgaccagaggatgcagtctatggatccagttaatgtgtatggaaatccaatggaaggtgacatgattacaacagggacacctcttgttgtcccaccacttattgacatgattagcaatgacccaatttttgcccattgctgaagatgggatgcaggaggcctctatcaagtaggtcaattacctcattaacagggacacctcttgttgccccaccacttattgatatgattagcaatgacccaattttttgctcattgctgaagcatgggatgcaggaggcctctatcaagtaggtcaatttcctcactagaatgtttggttagagtggaatgtaaaggtctggacactctatgaattcgatgatctcgagagcatcattgataggacactaaagcgcgattttgacaccgaggaagcactctggttgcttaagataggtcttgtgtgcatcccggatagccctaagatcaagccctccatgtcaatggttgccaagatgctgcaaggtgagtgtgctgtgagtgacaggatcatgaggcctggcctgatcacagacgtcatggacctgaaagtcaggatggtagagccgatttagttcagcttgacatcatgctcgagcactgccgcaccggaccttgttggggatttcctcgattaaaatataagctccttgatatggttctgtaacatagttctgcaatgctcctttatttagttctttactttttttgttaagatatgaggtgtagcgatacaatatgtctactaacagcgtttgtgttcttgatagttcatttaggattgaatgaagttactggtatgaccttgtcgagactgaagtaaggagggatagagctaaaaactctcttggcacaactataaagttcaagctatatgggcgtgtttggatggcagcctcccatgcaactgcctggcaggcaaatgatcctagccacaccacaggcataggaaatcgaacggtcggcattgtttcctgggccagctgataaaatccattgaagtgcaagaggccgataaacttaggcgtatagtgctggatgctccatccactggacatacacttaagcttctgtcagtttctgattggattgaaatgttccttactttgagcattaaggacacatgaggtgtagctattgggcctctaacttggttatcatggttttgggccgtgggtagagcaggcaatgcaagtgcagtctggcacaatcctggtggtttggcattgagttatgttttcttttacttgataaaacaatcttgttccatcacttagtcaatagctcaatatgtccaccagttctgatgatccatgtctgcgcagtgtttcttttcacagtttgcgcttgcgaacatccgaaccccgttttcatcttgaattcaacttatgatgtatatcggacagttccaccacattctggcgccgccttcgtctgatcctggaggcaattggagccgctgcaagtcggatcctggtggatgcagcgcaacacagatcgcaaccctccaaggactgagaagtggaatgttgacatctctgagacagtctgaaagcaaaccgaaggcaggggtgttcatcaactcctgcttcgcgcattgctagagtgagctacaggacacatggttcgcaccaaattctccatccatatataacaagaaaattgcagaggtggtaggtgattggtactttgaaagaggagctgacgtggagattgactgcgcctatccctgtgattcacagtcttgtcgcaaccttataccaattgataaggaactgaggatgtattaggagttcggcagacgattatactcaattatcatcataataaaaaacactcttctaattgttgatgatgttatgttacttgcatcagatagcaaaccaccctattgtacaatctgttggtggaaacatgtttgtgttgtgtgttccaggttgtctgtttcttggtagccttttttggctgaattggtgatatacacaaaatctatttacttgttagactatactttgtattgcacccctgatatccaggccattgcttgtgttttctatgattcgttttaactgaa

SEQ ID NO: 32983 - DNA, 2888 bp, Zea Mays
cgcgcgacaccagccgccacctaccccgcgcgacaacgcccgtgatgcccgccgccgcctaccccgcgcgacaccaccaatggtgcccttccttccccggcacccgcaacccgccagctccgcgcgagccgccggcgggatacccgcctcccccgcgcccccgccagctccgcgcgaggcgccagctccgcgcgtccgccgcagtgatgccgcgcgatgaaggccgcacgggagagacgctgggaaagccgctccttccggcgttgcagtgggggcgtccacagctgtgccatgcccccgccccgtccgagacgccgaccacgacccaggattctcgcttcccgtccacgtccgtgattttcccagcgaagctgaccacgcctccctgtacgcacctcccgacatcctcgccgacatgctcgcactcctgtccccgtctgagatcctcgcgtcggcgccttcggtggaagtccggaatcgcccggctctcctccaccgcgccgccagcctcactgagaagagttcatctgcctcctcctcaacgcttgaccccaccgccgctggatccaacaccctgccctcgtccttcttctccgacctactcaccagtgacgacgtgggcaccctggccagacgcacgccatggacagcaggtgggcaggaacaccttctacgtggatcctcttctcccgtgctcctcgacgcacgagagcgagctcggactggatcctctcctaccgctccatgcaggtgctcctccgcccgatcccaatgtaaaacctacagttttgttagatgttgctgccactgtttggagaagactcgcgctagaaagcggtactgggtgaaaactgcagagcgatctagagctcgcaagcctgccattgctctctgtagcaatagaaatcccccaacccacccacccacacaagttgcaattgccctcttacatctattttttggtggaacaactaaattgacattgaagaagttttttggagtgtgctcgttctgcaattagaagacttctggagagttctataattattctggtttgtagtccgtgaatttatagtggattgcttgagatactgggtaacaggaatgcatgtttatgattttcgttttgaccttgcattgcatctacaatgaccagaggatgcagtctatggatccagttaatgtgtatggaaatccaatggaaggtgacatgattacaacagggacacctcttgttgtcccaccacttattgacatgattagcaatgacccaatttttgcccattgctgaagatgggatgcaggaggcctctatcaagtaggtcaattacctcattaacagggacacctcttgttgccccaccacttattgatatgattagcaatgacccaattttttgctcattgctgaagcatgggatgcaggaggcctctatcaagtaggtcaatttcctcactagaatgtttggttagagtggaatgtaaaggtctggacactctatgaattcgatgatctcgagagcatcattgataggacactaaagcgcgattttgacaccgaggaagcactctggttgcttaagataggtcttgtgtgcatcccggatagccctaagatcaagccctccatgtcaatggttgccaagatgctgcaagttcatttaggattgaatgaagttactggtatgaccttgtcgagactgaagtaaggagggatagagctaaaaactctcttggcacaactataaagttcaagctatatgggcgtgtttggatggcagcctcccatgcaactgcctggcaggcaaatgatcctagccacaccacaggcataggaaatcgaacggtcggcattgtttcctgggccagctgataaaatccattgaagtgcaagaggccgataaacttaggcgtatagtgctggatgctccatccactggacatacacttaagcttctgtcagtttctgattggattgaaatgttccttactttgagcattaaggacacatgaggtgtagctattgggcctctaacttggttatcatggttttgggccgtgggtagagcaggcaatgcaagtgcagtctggcacaatcctggtggtttggcattgatgtttcttttcacagtttgcgcttgcgaacatccgaaccccgttttcatcttgaattcaacttatgatgtatatcggacagttccaccacattctggcgccgccttcgtctgatcctggaggcaattggagccgctgcaagtcggatcctggtggatgcagcgcaacacagatcgcaaccctccaaggactgagaagtggaatgttgacatctctgagacagtctgaaagcaaaccgaaggcaggggtgttcatcaactcctgcttcgcgcattgctagagtgagctacaggacacatggttcgcaccaaattctccatccatatataacaagaaaattgcagaggtggtaggtgattggtactttgaaagaggagctgacgtggagattgactgcgcctatccctgtgattcacagtcttgtcgcaaccttataccaattgataaggctgaccatcctagattaaacttcaaagaccggtaccctgagccatacagagattctcatccgactgcccccgttgctgtgcatggatgtcaggtgtcattactgtaatgtagtggtgaaataggtagattaaaacaatgaaatttatatgtggctaggatcataaatgaattgcaaaattttttctcagaacagtataacacatatttgtacataagttgttgtgttattatatgtttccgttgcaacgcacgggcactcacctagtatatatatatatatatatatatatattacacctgggtgcattcaatatagagaatgc

SEQ ID NO: 32984 - DNA, 2783 bp, Zea Mays
ccagccgccacctaccccgcgcgacaacgcccgtgatgcccgccgccgcctaccccgcgcgacaccaccaatggtgcccttccttccccggcacccgcaacccgccagctccgcgcgagccgccggcgggatacccgcctcccccgcgcccccgccagctccgcgcgaggcgccagctccgcgcgtccgccgcagtgatgccgcgcgatgaaggccgcacgggagagacgctgggaaagccgctccttccggcgttgcagtgggggcgtccacagctgtgccatgcccccgccccgtccgagacgccgaccacgacccaggattctcgcttcccgtccacgtccgtgattttcccagcgaagctgaccacgcctccctgtacgcacctcccgacatcctcgccgacatgctcgcactcctgtccccgtctgagatcctcgcgtcggcgccttcggtggaagtccggaatcgcccggctctcctccaccgcgccgccagcctcactgagaagagttcatctgcctcctcctcaacgcttgaccccaccgccgctggatccaacaccctgccctcgtccttcttctccgacctactcaccagtgacgacgtgggcaccctggccagacgcacgccatggacagcaggtgggcaggaacaccttctacgtggatcctcttctcccgtgctcctcgacgcacgagagcgagctcggactggatcctctcctaccgctccatgcaggtgctcctccgcccgatcccaatgtaaaacctacagttttgttagatgttgctgccactgtttggagaagactcgcgctagaaagcggtactgggtgaaaactgcagagcgatctagagctcgcaagcctgccattgctctctgtagcaatagaaatcccccaacccacccacccacacaagttgcaattgccctcttacatctattttttggtggaacaactaaattgacattgaagaagttttttggagtgtgctcgttctgcaattagaagacttctggagagttctataattattctggtttgtagtccgtgaatttatagtggattgcttgagatactgggtaacaggaatgcatgtttatgattttcgttttgaccttgcattgcatctacaatgaccagaggatgcagtctatggatccagttaatgtgtatggaaatccaatggaaggtgacatgattacaacagggacacctcttgttgtcccaccacttattgacatgattagcaatgacccaatttttgcccattgctgaagatgggatgcaggaggcctctatcaagtaggtcaattacctcattaacagggacacctcttgttgccccaccacttattgatatgattagcaatgacccaattttttggtaatatatgaacatgattggttgttaaatatgcagagcagtttgtataataatcaactgcctcagcatattgtaatttcttggttcttgttctcactacttcattgtatttatagctcattgctgaagcatgggatgcaggaggcctctatcaagtaggtcaatttcctcactagaatgtttggttagagtggaatgtaaaggtctggacactctatgaattcgatgatctcgagagcatcattgataggacactaaagcgcgattttgacaccgaggaagcactctggttgcttaagataggtcttgtgtgcatcccggatagccctaagatcaagccctccatgtcaatggttgccaagatgctgcaagttcatttaggattgaatgaagttactggtatgaccttgtcgagactgaagtaaggagggatagagctaaaaactctcttggcacaactataaagttcaagctatatgggcgtgtttggatggcagcctcccatgcaactgcctggcaggcaaatgatcctagccacaccacaggcataggaaatcgaacggtcggcattgtttcctgggccagctgataaaatccattgaagtgcaagaggccgataaacttaggcgtatagtgctggatgctccatccactggacatacacttaagcttctgtcagtttctgattggattgaaatgttccttactttgagcattaagacagttccaccacattctggcgccgccttcgtctgatcctggaggcaattggagccgctgcaagtcggatcctggtggatgcagcgcaacacagatcgcaaccctccaaggactgagaagtggaatgttgacatctctgagacagtctgaaagcaaaccgaaggcaggggtgttcatcaactcctgcttcgcgcattgctagagtgagctacaggacacatggttcgcaccaaattctccatccatatataacaagaaaattgcagaggtggtaggtgattggtactttgaaagaggagctgacgtggagattgactgcgcctatccctgtgattcacagtcttgtcgcaaccttataccaattgataaggaactgaggatgtattaggagttcggcagacgattatactcaattatcatcataataaaaaacactcttctaattgttgatgatgttatgttacttgcatcagatagcaaaccaccctattgtacaatctgttggtggaaacatgtttgtgttgtgtgttccaggttgtctgtttcttggtagccttttttggctgaattggtgatatacacaaaatctatttacttgttagactatactttgtattgcacccctgatatccaggccattgcttgtgttttctatgattcgttttaactgaa

SEQ ID NO: 32985 - DNA, 3140 bp, Zea Mays
ccagccgccacctaccccgcgcgacaacgcccgtgatgcccgccgccgcctaccccgcgcgacaccaccaatggtgcccttccttccccggcacccgcaacccgccagctccgcgcgagccgccggcgggatacccgcctcccccgcgcccccgccagctccgcgcgaggcgccagctccgcgcgtccgccgcagtgatgccgcgcgatgaaggccgcacgggagagacgctgggaaagccgctccttccggcgttgcagtgggggcgtccacagctgtgccatgcccccgccccgtccgagacgccgaccacgacccaggattctcgcttcccgtccacgtccgtgattttcccagcgaagctgaccacgcctccctgtacgcacctcccgacatcctcgccgacatgctcgcactcctgtccccgtctgagatcctcgcgtcggcgccttcggtggaagtccggaatcgcccggctctcctccaccgcgccgccagcctcactgagaagagttcatctgcctcctcctcaacgcttgaccccaccgccgctggatccaacaccctgccctcgtccttcttctccgacctactcaccagtgacgacgtgggcaccctggccagacgcacgccatggacagcaggtgggcaggaacaccttctacgtggatcctcttctcccgtgctcctcgacgcacgagagcgagctcggactggatcctctcctaccgctccatgcaggtgctcctccgcccgatcccaatgtaaaacctacagttttgttagatgttgctgccactgtttggagaagactcgcgctagaaagcggtactgggtgaaaactgcagagcgatctagagctcgcaagcctgccattgctctctgtagcaatagaaatcccccaacccacccacccacacaagttgcaattgccctcttacatctattttttggtggaacaactaaattgacattgaagaagttttttggagtgtgctcgttctgcaattagaagacttctggagagttctataattattctggtttgtagtccgtgaatttatagtggattgcttgagatactgggtaacaggaatgcatgtttatgattttcgttttgaccttgcattgcatctacaatgaccagaggatgcagtctatggatccagttaatgtgtatggaaatccaatggaaggtgacatgattacaacagggacacctcttgttgtcccaccacttattgacatgattagcaatgacccaatttttgcccattgctgaagatgggatgcaggaggcctctatcaagtaggtcaattacctcattaacagggacacctcttgttgccccaccacttattgatatgattagcaatgacccaattttttgctcattgctgaagcatgggatgcaggaggcctctatcaagtaggtcaatttcctcactagaatgtttggttagagtggaatgtaaaggtctggacactctatgaattcgatgatctcgagagcatcattgataggacactaaagcgcgattttgacaccgaggaagcactctggttgcttaagataggtcttgtgtgcatcccggatagccctaagatcaagccctccatgtcaatggttgccaagatgctgcaaggtgagtgtgctgtgagtgacaggatcatgaggcctggcctgatcacagacgtcatggacctgaaagtcaggatggtagagccgatttagttcagcttgacatcatgctcgagcactgccgcaccggaccttgttggggatttcctcgattaaaatataagctccttgatatggttctgtaacatagttctgcaatgctcctttatttagttctttactttttttgttaagatatgaggtgtagcgatacaatatgtctactaacagcgtttgtgttcttgatagttcatttaggattgaatgaagttactggtatgaccttgtcgagactgaagtaaggagggatagagctaaaaactctcttggcacaactataaagttcaagctatatgggcgtgtttggatggcagcctcccatgcaactgcctggcaggcaaatgatcctagccacaccacaggcataggaaatcgaacggtcggcattgtttcctgggccagctgataaaatccattgaagtgcaagaggccgataaacttaggcgtatagtgctggatgctccatccactggacatacacttaagcttctgtcagtttctgattggattgaaatgttccttactttgagcattaaggacacatgaggtgtagctattgggcctctaacttggttatcatggttttgggccgtgggtagagcaggcaatgcaagtgcagtctggcacaatcctggtggtttggcattgatgtttcttttcacagtttgcgcttgcgaacatccgaaccccgttttcatcttgaattcaacttatgatgtatatcggacagttccaccacattctggcgccgccttcgtctgatcctggaggcaattggagccgctgcaagtcggatcctggtggatgcagcgcaacacagatcgcaaccctccaaggactgagaagtggaatgttgacatctctgagacagtctgaaagcaaaccgaaggcaggggtgttcatcaactcctgcttcgcgcattgctagagtgagctacaggacacatggttcgcaccaaattctccatccatatataacaagaaaattgcagaggtggtaggtgattggtactttgaaagaggagctgacgtggagattgactgcgcctatccctgtgattcacagtcttgtcgcaaccttataccaattgataaggaactgaggatgtattaggagttcggcagacgattatactcaattatcatcataataaaaaacactcttctaattgttgatgatgttatgttacttgcatcagatagcaaaccaccctattgtacaatctgttggtggaaacatgtttgtgttgtgtgttccaggttgtctgtttcttggtagccttttttggctgaattggtgatatacacaaaatctatttacttgttagactatactttgtattgcacccctgatatccaggccattgcttgtgttttctatgattcgttttaactgaa

SEQ ID NO: 32986 - DNA, 3066 bp, Zea Mays
ccccgcgcgacaccaccaatggtgcccttccttccccggcacccgcaacccgccagctccgcgcgagccgccggcgggatacccgcctcccccgcgcccccgccagctccgcgcgaggcgccagctccgcgcgtccgccgcagtgatgccgcgcgatgaaggccgcacgggagagacgctgggaaagccgctccttccggcgttgcagtgggggcgtccacagctgtgccatgcccccgccccgtccgagacgccgaccacgacccaggattctcgcttcccgtccacgtccgtgattttcccagcgaagctgaccacgcctccctgtacgcacctcccgacatcctcgccgacatgctcgcactcctgtccccgtctgagatcctcgcgtcggcgccttcggtggaagtccggaatcgcccggctctcctccaccgcgccgccagcctcactgagaagagttcatctgcctcctcctcaacgcttgaccccaccgccgctggatccaacaccctgccctcgtccttcttctccgacctactcaccagtgacgacgtgggcaccctggccagacgcacgccatggacagcaggtgggcaggaacaccttctacgtggatcctcttctcccgtgctcctcgacgcacgagagcgagctcggactggatcctctcctaccgctccatgcaggtgctcctccgcccgatcccaatgtaaaacctacagttttgttagatgttgctgccactgtttggagaagactcgcgctagaaagcggtactgggtgaaaactgcagagcgatctagagctcgcaagcctgccattgctctctgtagcaatagaaatcccccaacccacccacccacacaagttgcaattgccctcttacatctattttttggtggaacaactaaattgacattgaagaagttttttggagtgtgctcgttctgcaattagaagacttctgtaagatcattcttctctttgtttttttcatttagaacctatgttggttttctgattttcatggaccacataaatagttatgtattctgtttcatagattcatgtctatataacaatttatttgaaaggcatttatctgtgcagggagagttctataattattctggtttgtagtccgtgaatttatagtggattgcttgaggtacaaatttgtatataacttctattaagttgctcctaatttccttctatcgcttgtcattctattagatgatgcaattttttgaggtatagatagcaatttttgtattcaaacaaaacaaagaaacaagttatctttaattgacattctatcattgactatcagtgtttaagctatatatttgtgaagataaattgtttatacactaataactgagtttgatgttgtagatactgggtaacaggaatgcatgtttatgattttcgttttgaccttgcattgcatctacaatgaccagaggatgcagtctatggatccagttaatgtgtatggaaatccaatggaaggtgacatgattacaacagggacacctcttgttgtcccaccacttattgacatgattagcaatgacccaatttttgcccattgctgaagatgggatgcaggaggcctctatcaagtaggtcaattacctcattaacagggacacctcttgttgccccaccacttattgatatgattagcaatgacccaattttttgctcattgctgaagcatgggatgcaggaggcctctatcaagtaggtcaatttcctcactagaatgtttggttagagtggaatgtaaaggtctggacactctatgaattcgatgatctcgagagcatcattgataggacactaaagcgcgattttgacaccgaggaagcactctggttgcttaagataggtcttgtgtgcatcccggatagccctaagatcaagccctccatgtcaatggttgccaagatgctgcaagttcatttaggattgaatgaagttactggtatgaccttgtcgagactgaagtaaggagggatagagctaaaaactctcttggcacaactataaagttcaagctatatgggcgtgtttggatggcagcctcccatgcaactgcctggcaggcaaatgatcctagccacaccacaggcataggaaatcgaacggtcggcattgtttcctgggccagctgataaaatccattgaagtgcaagaggccgataaacttaggcgtatagtgctggatgctccatccactggacatacacttaagcttctgtcagtttctgattggattgaaatgttccttactttgagcattaagtgtttcttttcacagtttgcgcttgcgaacatccgaaccccgttttcatcttgaattcaacttatgatgtatatcggacagttccaccacattctggcgccgccttcgtctgatcctggaggcaattggagccgctgcaagtcggatcctggtggatgcagcgcaacacagatcgcaaccctccaaggactgagaagtggaatgttgacatctctgagacagtctgaaagcaaaccgaaggcaggggtgttcatcaactcctgcttcgcgcattgctagagtgagctacaggacacatggttcgcaccaaattctccatccatatataacaagaaaattgcagaggtggtaggtgattggtactttgaaagaggagctgacgtggagattgactgcgcctatccctgtgattcacagtcttgtcgcaaccttataccaattgataaggaactgaggatgtattaggagttcggcagacgattatactcaattatcatcataataaaaaacactcttctaattgttgatgatgttatgttacttgcatcagatagcaaaccaccctattgtacaatctgttggtggaaacatgtttgtgttgtgtgttccaggttgtctgtttcttggtagccttttttggctgaattggtgatatacacaaaatctatttacttgttagactatactttgtattgcacccctgatatccaggccattgcttgtgttttctatgattcgttttaactgaa

SEQ ID NO: 32987 - DNA, 3201 bp, Zea Mays
ccccgcgcgacaccaccaatggtgcccttccttccccggcacccgcaacccgccagctccgcgcgagccgccggcgggatacccgcctcccccgcgcccccgccagctccgcgcgaggcgccagctccgcgcgtccgccgcagtgatgccgcgcgatgaaggccgcacgggagagacgctgggaaagccgctccttccggcgttgcagtgggggcgtccacagctgtgccatgcccccgccccgtccgagacgccgaccacgacccaggattctcgcttcccgtccacgtccgtgattttcccagcgaagctgaccacgcctccctgtacgcacctcccgacatcctcgccgacatgctcgcactcctgtccccgtctgagatcctcgcgtcggcgccttcggtggaagtccggaatcgcccggctctcctccaccgcgccgccagcctcactgagaagagttcatctgcctcctcctcaacgcttgaccccaccgccgctggatccaacaccctgccctcgtccttcttctccgacctactcaccagtgacgacgtgggcaccctggccagacgcacgccatggacagcaggtgggcaggaacaccttctacgtggatcctcttctcccgtgctcctcgacgcacgagagcgagctcggactggatcctctcctaccgctccatgcaggtgctcctccgcccgatcccaatgtaaaacctacagttttgttagatgttgctgccactgtttggagaagactcgcgctagaaagcggtactgggtgaaaactgcagagcgatctagagctcgcaagcctgccattgctctctgtagcaatagaaatcccccaacccacccacccacacaagttgcaattgccctcttacatctattttttggtggaacaactaaattgacattgaagaagttttttggagtgtgctcgttctgcaattagaagacttctgtaagatcattcttctctttgtttttttcatttagaacctatgttggttttctgattttcatggaccacataaatagttatgtattctgtttcatagattcatgtctatataacaatttatttgaaaggcatttatctgtgcagggagagttctataattattctggtttgtagtccgtgaatttatagtggattgcttgaggtacaaatttgtatataacttctattaagttgctcctaatttccttctatcgcttgtcattctattagatgatgcaattttttgaggtatagatagcaatttttgtattcaaacaaaacaaagaaacaagttatctttaattgacattctatcattgactatcagtgtttaagctatatatttgtgaagataaattgtttatacactaataactgagtttgatgttgtagatactgggtaacaggaatgcatgtttatgattttcgttttgaccttgcattgcatctacaatgaccagaggatgcagtctatggatccagttaatgtgtatggaaatccaatggaaggtgacatgattacaacagggacacctcttgttgtcccaccacttattgacatgattagcaatgacccaatttttgcccattgctgaagatgggatgcaggaggcctctatcaagtaggtcaattacctcattaacagggacacctcttgttgccccaccacttattgatatgattagcaatgacccaattttttgctcattgctgaagcatgggatgcaggaggcctctatcaagtaggtcaatttcctcactagaatgtttggttagagtggaatgtaaaggtctggacactctatgaattcgatgatctcgagagcatcattgataggacactaaagcgcgattttgacaccgaggaagcactctggttgcttaagataggtcttgtgtgcatcccggatagccctaagatcaagccctccatgtcaatggttgccaagatgctgcaaggtgagtgtgctgtgagtgacaggatcatgaggcctggcctgatcacagacgtcatggacctgaaagtcaggatggtagagccgatttagttcagcttgacatcatgctcgagcactgccgcaccggaccttgttggggatttcctcgattaaaatataagctccttgatatggttctgtaacatagttctgcaatgctcctttatttagttctttactttttttgttaagatatgaggtgtagcgatacaatatgtctactaacagcgtttgtgttcttgatagttcatttaggattgaatgaagttactggtatgaccttgtcgagactgaagtaaggagggatagagctaaaaactctcttggcacaactataaagttcaagctatatgggcgtgtttggatggcagcctcccatgcaactgcctggcaggcaaatgatcctagccacaccacaggcataggaaatcgaacggtcggcattgtttcctgggccagctgataaaatccattgaagtgcaagaggccgataaacttaggcgtatagtgctggatgctccatccactggacatacacttaagcttctgtcagtttctgattggattgaaatgttccttactttgagcattaaggacacatgaggtgtagctattgggcctctaacttggttatcatggttttgggccgtgggtagagcaggcaatgcaagtgcagtctggcacaatcctggtggtttggcattgatgtttcttttcacagtttgcgcttgcgaacatccgaaccccgttttcatcttgaattcaacttatgatgtatatcggttccaccacattctggcgccgccttcgtctgatcctggaggcaattggagccgctgcaagtcggatcctggtggatgcagcgcaacacagatcgcaaccctccaaggactgagaagtggaatgttgacatctctgagacagtctgaaagcaaaccgaaggcaggggtgttcatcaactcctgcttcgcgcattgctagagtgagctacaggacacatggttcgcaccaaattctccatccatatataacaagaaaattgcagaggtggtaggtgattggtactttgaaagaggagctgacgtggagattgactgcgcctatccctgtgattcacagtcttgtcgcaaccttataccaattgataaggtttgtagaaatcataaacaggagccatgtgtcgaagggaatcag

SEQ ID NO: 32988 - DNA, 3202 bp, Zea Mays
gggatacccgcctcccccgcgcccccgccagctccgcgcgaggcgccagctccgcgcgtccgccgcagtgatgccgcgcgatgaaggccgcacgggagagacgctgggaaagccgctccttccggcgttgcagtgggggcgtccacagctgtgccatgcccccgccccgtccgagacgccgaccacgacccaggattctcgcttcccgtccacgtccgtgattttcccagcgaagctgaccacgcctccctgtacgcacctcccgacatcctcgccgacatgctcgcactcctgtccccgtctgagatcctcgcgtcggcgccttcggtggaagtccggaatcgcccggctctcctccaccgcgccgccagcctcactgagaagagttcatctgcctcctcctcaacgcttgaccccaccgccgctggatccaacaccctgccctcgtccttcttctccgacctactcaccagtgacgacgtgggcaccctggccagacgcacgccatggacagcaggtgggcaggaacaccttctacgtggatcctcttctcccgtgctcctcgacgcacgagagcgagctcggactggatcctctcctaccgctccatgcaggtgctcctccgcccgatcccaatgtaaaacctacagttttgttagatgttgctgccactgtttggagaagactcgcgctagaaagcggtactgggtgaaaactgcagagcgatctagagctcgcaagcctgccattgctctctgtagcaatagaaatcccccaacccacccacccacacaagttgcaattgccctcttacatctattttttggtggaacaactaaattgacattgaagaagttttttggagtgtgctcgttctgcaattagaagacttctgtaagatcattcttctctttgtttttttcatttagaacctatgttggttttctgattttcatggaccacataaatagttatgtattctgtttcatagattcatgtctatataacaatttatttgaaaggcatttatctgtgcagggagagttctataattattctggtttgtagtccgtgaatttatagtggattgcttgagatactgggtaacaggaatgcatgtttatgattttcgttttgaccttgcattgcatctacaatgaccagaggatgcagtctatggatccagttaatgtgtatggaaatccaatggaaggtgacatgattacaacagggacacctcttgttgtcccaccacttattgacatgattagcaatgacccaatttttggtaatatatgaacctaattggctgttaaatatgcatagcagtttgtataataatcgatttcctcaacatattgtagtttcatggttcttgttctcactacttcctccattgtatttatagcccattgctgaagatgggatgcaggaggcctctatcaagtaggtcaattacctcattaacagggacacctcttgttgccccaccacttattgatatgattagcaatgacccaattttttggtaatatatgaacatgattggttgttaaatatgcagagcagtttgtataataatcaactgcctcagcatattgtaatttcttggttcttgttctcactacttcattgtatttatagctcattgctgaagcatgggatgcaggaggcctctatcaagtaggtcaatttcctcactagaatgtttggttagagtggaatgtaaaggtctggacactctatgaattcgatgatctcgagagcatcattgataggacactaaagcgcgattttgacaccgaggaagcactctggttgcttaagataggtcttgtgtgcatcccggatagccctaagatcaagccctccatgtcaatggttgccaagatgctgcaagttcatttaggattgaatgaagttactggtatgaccttgtcgagactgaagtaaggagggatagagctaaaaactctcttggcacaactataaagttcaagctatatgggcgtgtttggatggcagcctcccatgcaactgcctggcaggcaaatgatcctagccacaccacaggcataggaaatcgaacggtcggcattgtttcctgggccagctgataaaatccattgaagtgcaagaggccgataaacttaggcgtatagtgctggatgctccatccactgtttgtctcttctcaccacaatatttccaatctgactatgttcttcattttgtccactgacagttatttgactacatgcattttgtatagggacatacacttaagcttctgtcagtttctgattggattgaaatgttccttactttgagcattaaggcaatgcaagtgcagtctggcacaatcctgtgtttcttttcacagtttgcgcttgcgaacatccgaaccccgttttcatcttgaattcaacttatgatgtatatcgggtaaaatgcgacttgtgatcgatcaatatagttttcggcacctggaccaggtggcaagtaataattctggtttggaaaatttcagacagttccaccacattctggcgccgccttcgtctgatcctggaggcaattggagccgctgcaagtcggatcctggtggatgcagcgcaacacagatcgcaaccctccaaggactgagaagtggaatgttgacatctctgagacagtctgaaagcaaaccgaaggcaggggtgttcatcaactcctgcttcgcgcattgctagagtgagctacaggacacatggttcgcaccaaattctccatccatatataacaagaaaattgcagaggtggtaggtgattggtactttgaaagaggagctgacgtggagattgactgcgcctatccctgtgattcacagtcttgtcgcaaccttataccaattgataaggaactgaggatgtattaggagttcggcagacgattatactcaattatcatcataataaaaaacactcttctaattgttgatgatgttatgttacttgcatcagatagcaaaccaccctattgtacaatctgttggtggaaacatgtttgtgttgtgtgttccaggttgtctgtttcttggtagccttttttggctgaattggtgatatacacaaaatctatttacttgttagactatactttgtattgcacccctgatatccaggccattgcttgtgttttctatgattcgttttaactgaa

SEQ ID NO: 32989 - DNA, 3031 bp, Zea Mays
gggatacccgcctcccccgcgcccccgccagctccgcgcgaggcgccagctccgcgcgtccgccgcagtgatgccgcgcgatgaaggccgcacgggagagacgctgggaaagccgctccttccggcgttgcagtgggggcgtccacagctgtgccatgcccccgccccgtccgagacgccgaccacgacccaggattctcgcttcccgtccacgtccgtgattttcccagcgaagctgaccacgcctccctgtacgcacctcccgacatcctcgccgacatgctcgcactcctgtccccgtctgagatcctcgcgtcggcgccttcggtggaagtccggaatcgcccggctctcctccaccgcgccgccagcctcactgagaagagttcatctgcctcctcctcaacgcttgaccccaccgccgctggatccaacaccctgccctcgtccttcttctccgacctactcaccagtgacgacgtgggcaccctggccagacgcacgccatggacagcaggtgggcaggaacaccttctacgtggatcctcttctcccgtgctcctcgacgcacgagagcgagctcggactggatcctctcctaccgctccatgcaggtgctcctccgcccgatcccaatgtaaaacctacagttttgttagatgttgctgccactgtttggagaagactcgcgctagaaagcggtactgggtgaaaactgcagagcgatctagagctcgcaagcctgccattgctctctgtagcaatagaaatcccccaacccacccacccacacaagttgcaattgccctcttacatctattttttggtggaacaactaaattgacattgaagaagttttttggagtgtgctcgttctgcaattagaagacttctggagagttctataattattctggtttgtagtccgtgaatttatagtggattgcttgagatactgggtaacaggaatgcatgtttatgattttcgttttgaccttgcattgcatctacaatgaccagaggatgcagtctatggatccagttaatgtgtatggaaatccaatggaaggtgacatgattacaacagggacacctcttgttgtcccaccacttattgacatgattagcaatgacccaatttttgcccattgctgaagatgggatgcaggaggcctctatcaagtaggtcaattacctcattaacagggacacctcttgttgccccaccacttattgatatgattagcaatgacccaattttttgctcattgctgaagcatgggatgcaggaggcctctatcaagtaggtcaatttcctcactagaatgtttggttagagtggaatgtaaaggtctggacactctatgaattcgatgatctcgagagcatcattgataggacactaaagcgcgattttgacaccgaggaagcactctggttgcttaagataggtcttgtgtgcatcccggatagccctaagatcaagccctccatgtcaatggttgccaagatgctgcaaggtgagtgtgctgtgagtgacaggatcatgaggcctggcctgatcacagacgtcatggacctgaaagtcaggatggtagagccgatttagttcagcttgacatcatgctcgagcactgccgcaccggaccttgttggggatttcctcgattaaaatataagctccttgatatggttctgtaacatagttctgcaatgctcctttatttagttctttactttttttgttaagatatgaggtgtagcgatacaatatgtctactaacagcgtttgtgttcttgatagttcatttaggattgaatgaagttactggtatgaccttgtcgagactgaagtaaggagggatagagctaaaaactctcttggcacaactataaagttcaagctatatgggcgtgtttggatggcagcctcccatgcaactgcctggcaggcaaatgatcctagccacaccacaggcataggaaatcgaacggtcggcattgtttcctgggccagctgataaaatccattgaagtgcaagaggccgataaacttaggcgtatagtgctggatgctccatccactggacatacacttaagcttctgtcagtttctgattggattgaaatgttccttactttgagcattaaggcaatgcaagtgcagtctggcacaatcctggtggtttggcattgagttatgttttcttttacttgataaaacaatcttgttccatcacttagtcaatagctcaatatgtccaccagttctgatgatccatgtctgcgcagtgtttcttttcacagtttgcgcttgcgaacatccgaaccccgttttcatcttgaattcaacttatgatgtatatcggacagttccaccacattctggcgccgccttcgtctgatcctggaggcaattggagccgctgcaagtcggatcctggtggatgcagcgcaacacagatcgcaaccctccaaggactgagaagtggaatgttgacatctctgagacagtctgaaagcaaaccgaaggcaggggtgttcatcaactcctgcttcgcgcattgctagagtgagctacaggacacatggttcgcaccaaattctccatccatatataacaagaggtggtaggtgattggtactttgaaagaggagctgacgtggagattgactgcgcctatccctgtgattcacagtcttgtcgcaaccttataccaattgataaggaactgaggatgtattaggagttcggcagacgattatactcaattatcatcataataaaaaacactcttctaattgttgatgatgttatgttacttgcatcagatagcaaaccaccctattgtacaatctgttggtggaaacatgtttgtgttgtgtgttccaggttgtctgtttcttggtagccttttttggctgaattggtgatatacacaaaatctatttacttgttagactatactttgtattgcacccctgatatccaggccattgcttgtgttttctatgattcgttttaactgaa

SEQ ID NO: 32990 - DNA, 3041 bp, Zea Mays
gggatacccgcctcccccgcgcccccgccagctccgcgcgaggcgccagctccgcgcgtccgccgcagtgatgccgcgcgatgaaggccgcacgggagagacgctgggaaagccgctccttccggcgttgcagtgggggcgtccacagctgtgccatgcccccgccccgtccgagacgccgaccacgacccaggattctcgcttcccgtccacgtccgtgattttcccagcgaagctgaccacgcctccctgtacgcacctcccgacatcctcgccgacatgctcgcactcctgtccccgtctgagatcctcgcgtcggcgccttcggtggaagtccggaatcgcccggctctcctccaccgcgccgccagcctcactgagaagagttcatctgcctcctcctcaacgcttgaccccaccgccgctggatccaacaccctgccctcgtccttcttctccgacctactcaccagtgacgacgtgggcaccctggccagacgcacgccatggacagcaggtgggcaggaacaccttctacgtggatcctcttctcccgtgctcctcgacgcacgagagcgagctcggactggatcctctcctaccgctccatgcaggtgctcctccgcccgatcccaatgtaaaacctacagttttgttagatgttgctgccactgtttggagaagactcgcgctagaaagcggtactgggtgaaaactgcagagcgatctagagctcgcaagcctgccattgctctctgtagcaatagaaatcccccaacccacccacccacacaagttgcaattgccctcttacatctattttttggtggaacaactaaattgacattgaagaagttttttggagtgtgctcgttctgcaattagaagacttctggagagttctataattattctggtttgtagtccgtgaatttatagtggattgcttgagatactgggtaacaggaatgcatgtttatgattttcgttttgaccttgcattgcatctacaatgaccagaggatgcagtctatggatccagttaatgtgtatggaaatccaatggaaggtgacatgattacaacagggacacctcttgttgtcccaccacttattgacatgattagcaatgacccaatttttgcccattgctgaagatgggatgcaggaggcctctatcaagtaggtcaattacctcattaacagggacacctcttgttgccccaccacttattgatatgattagcaatgacccaattttttgctcattgctgaagcatgggatgcaggaggcctctatcaagtaggtcaatttcctcactagaatgtttggttagagtggaatgtaaaggtctggacactctatgaattcgatgatctcgagagcatcattgataggacactaaagcgcgattttgacaccgaggaagcactctggttgcttaagataggtcttgtgtgcatcccggatagccctaagatcaagccctccatgtcaatggttgccaagatgctgcaaggtgagtgtgctgtgagtgacaggatcatgaggcctggcctgatcacagacgtcatggacctgaaagtcaggatggtagagccgatttagttcagcttgacatcatgctcgagcactgccgcaccggaccttgttggggatttcctcgattaaaatataagctccttgatatggttctgtaacatagttctgcaatgctcctttatttagttctttactttttttgttaagatatgaggtgtagcgatacaatatgtctactaacagcgtttgtgttcttgatagttcatttaggattgaatgaagttactggtatgaccttgtcgagactgaagtaaggagggatagagctaaaaactctcttggcacaactataaagttcaagctatatgggcgtgtttggatggcagcctcccatgcaactgcctggcaggcaaatgatcctagccacaccacaggcataggaaatcgaacggtcggcattgtttcctgggccagctgataaaatccattgaagtgcaagaggccgataaacttaggcgtatagtgctggatgctccatccactggacatacacttaagcttctgtcagtttctgattggattgaaatgttccttactttgagcattaaggcaatgcaagtgcagtctggcacaatcctggtggtttggcattgagttatgttttcttttacttgataaaacaatcttgttccatcacttagtcaatagctcaatatgtccaccagttctgatgatccatgtctgcgcagtgtttcttttcacagtttgcgcttgcgaacatccgaaccccgttttcatcttgaattcaacttatgatgtatatcggacagttccaccacattctggcgccgccttcgtctgatcctggaggcaattggagccgctgcaagtcggatcctggtggatgcagcgcaacacagatcgcaaccctccaaggactgagaagtggaatgttgacatctctgagacagtctgaaagcaaaccgaaggcaggggtgttcatcaactcctgcttcgcgcattgctagagtgagctacaggacacatggttcgcaccaaattctccatccatatataacaagaaaattgcagaggtggtaggtgattggtactttgaaagaggagctgacgtggagattgactgcgcctatccctgtgattcacagtcttgtcgcaaccttataccaattgataaggaactgaggatgtattaggagttcggcagacgattatactcaattatcatcataataaaaaacactcttctaattgttgatgatgttatgttacttgcatcagatagcaaaccaccctattgtacaatctgttggtggaaacatgtttgtgttgtgtgttccaggttgtctgtttcttggtagccttttttggctgaattggtgatatacacaaaatctatttacttgttagactatactttgtattgcacccctgatatccaggccattgcttgtgttttctatgattcgttttaactgaa

SEQ ID NO: 32991 - DNA, 2824 bp, Zea Mays
gggatacccgcctcccccgcgcccccgccagctccgcgcgaggcgccagctccgcgcgtccgccgcagtgatgccgcgcgatgaaggccgcacgggagagacgctgggaaagccgctccttccggcgttgcagtgggggcgtccacagctgtgccatgcccccgccccgtccgagacgccgaccacgacccaggattctcgcttcccgtccacgtccgtgattttcccagcgaagctgaccacgcctccctgtacgcacctcccgacatcctcgccgacatgctcgcactcctgtccccgtctgagatcctcgcgtcggcgccttcggtggaagtccggaatcgcccggctctcctccaccgcgccgccagcctcactgagaagagttcatctgcctcctcctcaacgcttgaccccaccgccgctggatccaacaccctgccctcgtccttcttctccgacctactcaccagtgacgacgtgggcaccctggccagacgcacgccatggacagcaggtgggcaggaacaccttctacgtggatcctcttctcccgtgctcctcgacgcacgagagcgagctcggactggatcctctcctaccgctccatgcaggtgctcctccgcccgatcccaatgtaaaacctacagttttgttagatgttgctgccactgtttggagaagactcgcgctagaaagcggtactgggtgaaaactgcagagcgatctagagctcgcaagcctgccattgctctctgtagcaatagaaatcccccaacccacccacccacacaagttgcaattgccctcttacatctattttttggtggaacaactaaattgacattgaagaagttttttggagtgtgctcgttctgcaattagaagacttctggagagttctataattattctggtttgtagtccgtgaatttatagtggattgcttgagatactgggtaacaggaatgcatgtttatgattttcgttttgaccttgcattgcatctacaatgaccagaggatgcagtctatggatccagttaatgtgtatggaaatccaatggaaggtgacatgattacaacagggacacctcttgttgtcccaccacttattgacatgattagcaatgacccaatttttgcccattgctgaagatgggatgcaggaggcctctatcaagtaggtcaattacctcattaacagggacacctcttgttgccccaccacttattgatatgattagcaatgacccaattttttgctcattgctgaagcatgggatgcaggaggcctctatcaagtaggtcaatttcctcactagaatgtttggttagagtggaatgtaaaggtctggacactctatgaattcgatgatctcgagagcatcattgataggacactaaagcgcgattttgacaccgaggaagcactctggttgcttaagataggtcttgtgtgcatcccggatagccctaagatcaagccctccatgtcaatggttgccaagatgctgcaagttcatttaggattgaatgaagttactggtatgaccttgtcgagactgaagtaaggagggatagagctaaaaactctcttggcacaactataaagttcaagctatatgggcgtgtttggatggcagcctcccatgcaactgcctggcaggcaaatgatcctagccacaccacaggcataggaaatcgaacggtcggcattgtttcctgggccagctgataaaatccattgaagtgcaagaggccgataaacttaggcgtatagtgctggatgctccatccactggacatacacttaagcttctgtcagtttctgattggattgaaatgttccttactttgagcattaaggacacatgaggtgtagctattgggcctctaacttggttatcatggttttgggccgtgggtagagcaggcaatgcaagtgcagtctggcacaatcctggtggtttggcattgagttatgttttcttttacttgataaaacaatcttgttccatcacttagtcaatagctcaatatgtccaccagttctgatgatccatgtctgcgcagtgtttcttttcacagtttgcgcttgcgaacatccgaaccccgttttcatcttgaattcaacttatgatgtatatcggacagttccaccacattctggcgccgccttcgtctgatcctggaggcaattggagccgctgcaagtcggatcctggtggatgcagcgcaacacagatcgcaaccctccaaggactgagaagtggaatgttgacatctctgagacagtctgaaagcaaaccgaaggcaggggtgttcatcaactcctgcttcgcgcattgctagagtgagctacaggacacatggttcgcaccaaattctccatccatatataacaagaaaattgcagaggtggtaggtgattggtactttgaaagaggagctgacgtggagattgactgcgcctatccctgtgattcacagtcttgtcgcaaccttataccaattgataaggaactgaggatgtattaggagttcggcagacgattatactcaattatcatcataataaaaaacactcttctaattgttgatgatgttatgttacttgcatcagatagcaaaccaccctattgtacaatctgttggtggaaacatgtttgtgttgtgtgttccaggttgtctgtttcttggtagccttttttggctgaattggtgatatacacaaaatctatttacttgttagactatactttgtattgcacccctgatatccaggccattgcttgtgttttctatgattcgttttaactgaa

SEQ ID NO: 32992 - DNA, 3281 bp, Zea Mays
gggatacccgcctcccccgcgcccccgccagctccgcgcgaggcgccagctccgcgcgtccgccgcagtgatgccgcgcgatgaaggccgcacgggagagacgctgggaaagccgctccttccggcgttgcagtgggggcgtccacagctgtgccatgcccccgccccgtccgagacgccgaccacgacccaggattctcgcttcccgtccacgtccgtgattttcccagcgaagctgaccacgcctccctgtacgcacctcccgacatcctcgccgacatgctcgcactcctgtccccgtctgagatcctcgcgtcggcgccttcggtggaagtccggaatcgcccggctctcctccaccgcgccgccagcctcactgagaagagttcatctgcctcctcctcaacgcttgaccccaccgccgctggatccaacaccctgccctcgtccttcttctccgacctactcaccagtgacgacgtgggcaccctggccagacgcacgccatggacagcaggtgggcaggaacaccttctacgtggatcctcttctcccgtgctcctcgacgcacgagagcgagctcggactggatcctctcctaccgctccatgcaggtgctcctccgcccgatcccaatgtaaaacctacagttttgttagatgttgctgccactgtttggagaagactcgcgctagaaagcggtactgggtgaaaactgcagagcgatctagagctcgcaagcctgccattgctctctgtagcaatagaaatcccccaacccacccacccacacaagttgcaattgccctcttacatctattttttggtggaacaactaaattgacattgaagaagttttttggagtgtgctcgttctgcaattagaagacttctgtaagatcattcttctctttgtttttttcatttagaacctatgttggttttctgattttcatggaccacataaatagttatgtattctgtttcatagattcatgtctatataacaatttatttgaaaggcatttatctgtgcagggagagttctataattattctggtttgtagtccgtgaatttatagtggattgcttgagatactgggtaacaggaatgcatgtttatgattttcgttttgaccttgcattgcatctacaatgaccagaggatgcagtctatggatccagttaatgtgtatggaaatccaatggaaggtgacatgattacaacagggacacctcttgttgtcccaccacttattgacatgattagcaatgacccaatttttggtaatatatgaacctaattggctgttaaatatgcatagcagtttgtataataatcgatttcctcaacatattgtagtttcatggttcttgttctcactacttcctccattgtatttatagcccattgctgaagatgggatgcaggaggcctctatcaagtaggtcaattacctcattaacagggacacctcttgttgccccaccacttattgatatgattagcaatgacccaattttttggtaatatatgaacatgattggttgttaaatatgcagagcagtttgtataataatcaactgcctcagcatattgtaatttcttggttcttgttctcactacttcattgtatttatagctcattgctgaagcatgggatgcaggaggcctctatcaagtaggtcaatttcctcactagaatgtttggttagagtggaatgtaaaggtctggacactctatgaattcgatgatctcgagagcatcattgataggacactaaagcgcgattttgacaccgaggaagcactctggttgcttaagataggtcttgtgtgcatcccggatagccctaagatcaagccctccatgtcaatggttgccaagatgctgcaaggtgagtgtgctgtgagtgacaggatcatgaggcctggcctgatcacagacgtcatggacctgaaagtcaggatggtagagccgatttagttcagcttgacatcatgctcgagcactgccgcaccggaccttgttggggatttcctcgattaaaatataagctccttgatatggttctgtaacatagttctgcaatgctcctttatttagttctttactttttttgttaagatatgaggtgtagcgatacaatatgtctactaacagcgtttgtgttcttgatagttcatttaggattgaatgaagttactggtatgaccttgtcgagactgaagtaaggagggatagagctaaaaactctcttggcacaactataaagttcaagctatatgggcgtgtttggatggcagcctcccatgcaactgcctggcaggcaaatgatcctagccacaccacaggcataggaaatcgaacggtcggcattgtttcctgggccagctgataaaatccattgaagtgcaagaggccgataaacttaggcgtatagtgctggatgctccatccactggacatacacttaagcttctgtcagtttctgattggattgaaatgttccttactttgagcattaagtgtttcttttcacagtttgcgcttgcgaacatccgaaccccgttttcatcttgaattcaacttatgatgtatatcggacagttccaccacattctggcgccgccttcgtctgatcctggaggcaattggagccgctgcaagtcggatcctggtggatgcagcgcaacacagatcgcaaccctccaaggactgagaagtggaatgttgacatctctgagacagtctgaaagcaaaccgaaggcaggggtgttcatcaactcctgcttcgcgcattgctagagtgagctacaggacacatggttcgcaccaaattctccatccatatataacaagaaaattgcagaggtggtaggtgattggtactttgaaagaggagctgacgtggagattgactgcgcctatccctgtgattcacagtcttgtcgcaaccttataccaattgataaggaactgaggatgtattaggagttcggcagacgattatactcaattatcatcataataaaaaacactcttctaattgttgatgatgttatgttacttgcatcagatagcaaaccaccctattgtacaatctgttggtggaaacatgtttgtgttgtgtgttccaggttgtctgtttcttggtagccttttttggctgaattggtgatatacacaaaatctatttacttgttagactatactttgtattgcacccctgatatccaggccattgcttgtgttttctatgattcgttttaactgaa

SEQ ID NO: 32993 - DNA, 2940 bp, Zea Mays
gggatacccgcctcccccgcgcccccgccagctccgcgcgaggcgccagctccgcgcgtccgccgcagtgatgccgcgcgatgaaggccgcacgggagagacgctgggaaagccgctccttccggcgttgcagtgggggcgtccacagctgtgccatgcccccgccccgtccgagacgccgaccacgacccaggattctcgcttcccgtccacgtccgtgattttcccagcgaagctgaccacgcctccctgtacgcacctcccgacatcctcgccgacatgctcgcactcctgtccccgtctgagatcctcgcgtcggcgccttcggtggaagtccggaatcgcccggctctcctccaccgcgccgccagcctcactgagaagagttcatctgcctcctcctcaacgcttgaccccaccgccgctggatccaacaccctgccctcgtccttcttctccgacctactcaccagtgacgacgtgggcaccctggccagacgcacgccatggacagcaggtgggcaggaacaccttctacgtggatcctcttctcccgtgctcctcgacgcacgagagcgagctcggactggatcctctcctaccgctccatgcaggtgctcctccgcccgatcccaatgtaaaacctacagttttgttagatgttgctgccactgtttggagaagactcgcgctagaaagcggtactgggtgaaaactgcagagcgatctagagctcgcaagcctgccattgctctctgtagcaatagaaatcccccaacccacccacccacacaagttgcaattgccctcttacatctattttttggtggaacaactaaattgacattgaagaagttttttggagtgtgctcgttctgcaattagaagacttctggagagttctataattattctggtttgtagtccgtgaatttatagtggattgcttgagatactgggtaacaggaatgcatgtttatgattttcgttttgaccttgcattgcatctacaatgaccagaggatgcagtctatggatccagttaatgtgtatggaaatccaatggaaggtgacatgattacaacagggacacctcttgttgtcccaccacttattgacatgattagcaatgacccaatttttgcccattgctgaagatgggatgcaggaggcctctatcaagtaggtcaattacctcattaacagggacacctcttgttgccccaccacttattgatatgattagcaatgacccaattttttggtaatatatgaacatgattggttgttaaatatgcagagcagtttgtataataatcaactgcctcagcatattgtaatttcttggttcttgttctcactacttcattgtatttatagctcattgctgaagcatgggatgcaggaggcctctatcaagtaggtcaatttcctcactagaatgtttggttagagtggaatgtaaaggtctggacactctatgaattcgatgatctcgagagcatcattgataggacactaaagcgcgattttgacaccgaggaagcactctggttgcttaagataggtcttgtgtgcatcccggatagccctaagatcaagccctccatgtcaatggttgccaagatgctgcaaggtgagtgtgctgtgagtgacaggatcatgaggcctggcctgatcacagacgtcatggacctgaaagtcaggatggtagagccgatttagttcagcttgacatcatgctcgagcactgccgcaccggaccttgttggggatttcctcgattaaaatataagctccttgatatggttctgtaacatagttctgcaatgctcctttatttagttctttactttttttgttaagatatgaggtgtagcgatacaatatgtctactaacagcgtttgtgttcttgatagttcatttaggattgaatgaagttactggtatgaccttgtcgagactgaagtaaggagggatagagctaaaaactctcttggcacaactataaagttcaagctatatgggcgtgtttggatggcagcctcccatgcaactgcctggcaggcaaatgatcctagccacaccacaggcataggaaatcgaacggtcggcattgtttcctgggccagctgataaaatccattgaagtgcaagaggccgataaacttaggcgtatagtgctggatgctccatccactggacatacacttaagcttctgtcagtttctgattggattgaaatgttccttactttgagcattaagacagttccaccacattctggcgccgccttcgtctgatcctggaggcaattggagccgctgcaagtcggatcctggtggatgcagcgcaacacagatcgcaaccctccaaggactgagaagtggaatgttgacatctctgagacagtctgaaagcaaaccgaaggcaggggtgttcatcaactcctgcttcgcgcattgctagagtgagctacaggacacatggttcgcaccaaattctccatccatatataacaagaaaattgcagaggtggtaggtgattggtactttgaaagaggagctgacgtggagattgactgcgcctatccctgtgattcacagtcttgtcgcaaccttataccaattgataaggaactgaggatgtattaggagttcggcagacgattatactcaattatcatcataataaaaaacactcttctaattgttgatgatgttatgttacttgcatcagatagcaaaccaccctattgtacaatctgttggtggaaacatgtttgtgttgtgtgttccaggttgtctgtttcttggtagccttttttggctgaattggtgatatacacaaaatctatttacttgttagactatactttgtattgcacccctgatatccaggccattgcttgtgttttctatgattcgttttaactgaa

SEQ ID NO: 32994 - DNA, 3181 bp, Zea Mays
gggatacccgcctcccccgcgcccccgccagctccgcgcgaggcgccagctccgcgcgtccgccgcagtgatgccgcgcgatgaaggccgcacgggagagacgctgggaaagccgctccttccggcgttgcagtgggggcgtccacagctgtgccatgcccccgccccgtccgagacgccgaccacgacccaggattctcgcttcccgtccacgtccgtgattttcccagcgaagctgaccacgcctccctgtacgcacctcccgacatcctcgccgacatgctcgcactcctgtccccgtctgagatcctcgcgtcggcgccttcggtggaagtccggaatcgcccggctctcctccaccgcgccgccagcctcactgagaagagttcatctgcctcctcctcaacgcttgaccccaccgccgctggatccaacaccctgccctcgtccttcttctccgacctactcaccagtgacgacgtgggcaccctggccagacgcacgccatggacagcaggtgggcaggaacaccttctacgtggatcctcttctcccgtgctcctcgacgcacgagagcgagctcggactggatcctctcctaccgctccatgcaggtgctcctccgcccgatcccaatgtaaaacctacagttttgttagatgttgctgccactgtttggagaagactcgcgctagaaagcggtactgggtgaaaactgcagagcgatctagagctcgcaagcctgccattgctctctgtagcaatagaaatcccccaacccacccacccacacaagttgcaattgccctcttacatctattttttggtggaacaactaaattgacattgaagaagttttttggagtgtgctcgttctgcaattagaagacttctggagagttctataattattctggtttgtagtccgtgaatttatagtggattgcttgagatactgggtaacaggaatgcatgtttatgattttcgttttgaccttgcattgcatctacaatgaccagaggatgcagtctatggatccagttaatgtgtatggaaatccaatggaaggtgacatgattacaacagggacacctcttgttgtcccaccacttattgacatgattagcaatgacccaatttttgcccattgctgaagatgggatgcaggaggcctctatcaagtaggtcaatttcctcactagaatgtttggttagagtggaatgtaaaggtctggacactctatgaattcgatgatctcgagagcatcattgataggacactaaagcgcgattttgacaccgaggaagcactctggttgcttaagataggtcttgtgtgcatcccggatagccctaagatcaagccctccatgtcaatggttgccaagatgctgcaaggtgagtgtgctgtgagtgacaggatcatgaggcctggcctgatcacagacgtcatggacctgaaagtcaggatggtagagccgatttagttcagcttgacatcatgctcgagcactgccgcaccggaccttgttggggatttcctcgattaaaatataagctccttgatatggttctgtaacatagttctgcaatgctcctttatttagttctttactttttttgttaagatatgaggtgtagcgatacaatatgtctactaacagcgtttgtgttcttgatagttcatttaggattgaatgaagttactggtatgaccttgtcgagactgaagtaaggagggatagagctaaaaactctcttggcacaactataaagttcaagctatatgggcgtgtttggatggcagcctcccatgcaactgcctggcaggcaaatgatcctagccacaccacaggcataggaaatcgaacggtcggcattgtttcctgggccagctgataaaatccattgaagtgcaagaggccgataaacttaggcgtatagtgctggatgctccatccactggacatacacttaagcttctgtcagtttctgattggattgaaatgttccttactttgagcattaaggacacatgaggtgtagctattgggcctctaacttggttatcatggttttgggccgtgggtagagcaggcaatgcaagtgcagtctggcacaatcctggtggtttggcattgagttatgttttcttttacttgataaaacaatcttgttccatcacttagtcaatagctcaatatgtccaccagttctgatgatccatgtctgcgcagtgtttcttttcacagtttgcgcttgcgaacatccgaaccccgttttcatcttgaattcaacttatgatgtatatcgggtaaaatgcgacttgtgatcgatcaatatagttttcggcacctggaccaggtggcaagtaataattctggtttggaaaatttcagacagttccaccacattctggcgccgccttcgtctgatcctggaggcaattggagccgctgcaagtcggatcctggtggatgcagcgcaacacagatcgcaaccctccaaggactgagaagtggaatgttgacatctctgagacagtctgaaagcaaaccgaaggcaggggtgttcatcaactcctgcttcgcgcattgctagagtgagctacaggacacatggttcgcaccaaattctccatccatatataacaagaaaattgcagaggtggtaggtgattggtactttgaaagaggagctgacgtggagattgactgcgcctatccctgtgattcacagtcttgtcgcaaccttataccaattgataaggttagttgcttccgtgaaaagaggttaactgttttggcaaaataattctactggttagtaactcttctgcctaaaatggaactgacaaaaaattcatcatttgacataggaactgaggatgtattaggagttcggcagacgattatactcaattatcatcataataaaaaacactcttctaattgttgatgatgttatgttacttgcatcagatagcaaaccaccctattgtacaatctgttggtggaaacatgtttgtgttgtgtgttccaggttgtctgtttcttggtagccttttttggctgaattggtgatatacacaaaatctatttacttgttagactatactttgtattgcacccctgatatccaggccattgcttgtgttttctatgattcgttttaactgaa

SEQ ID NO: 32995 - DNA, 2803 bp, Zea Mays
gggatacccgcctcccccgcgcccccgccagctccgcgcgaggcgccagctccgcgcgtccgccgcagtgatgccgcgcgatgaaggccgcacgggagagacgctgggaaagccgctccttccggcgttgcagtgggggcgtccacagctgtgccatgcccccgccccgtccgagacgccgaccacgacccaggattctcgcttcccgtccacgtccgtgattttcccagcgaagctgaccacgcctccctgtacgcacctcccgacatcctcgccgacatgctcgcactcctgtccccgtctgagatcctcgcgtcggcgccttcggtggaagtccggaatcgcccggctctcctccaccgcgccgccagcctcactgagaagagttcatctgcctcctcctcaacgcttgaccccaccgccgctggatccaacaccctgccctcgtccttcttctccgacctactcaccagtgacgacgtgggcaccctggccagacgcacgccatggacagcaggtgggcaggaacaccttctacgtggatcctcttctcccgtgctcctcgacgcacgagagcgagctcggactggatcctctcctaccgctccatgcaggtgctcctccgcccgatcccaatgtaaaacctacagttttgttagatgttgctgccactgtttggagaagactcgcgctagaaagcggtactgggtgaaaactgcagagcgatctagagctcgcaagcctgccattgctctctgtagcaatagaaatcccccaacccacccacccacacaagttgcaattgccctcttacatctattttttggtggaacaactaaattgacattgaagaagttttttggagtgtgctcgttctgcaattagaagacttctggagagttctataattattctggtttgtagtccgtgaatttatagtggattgcttgagatactgggtaacaggaatgcatgtttatgattttcgttttgaccttgcattgcatctacaatgaccagaggatgcagtctatggatccagttaatgtgtatggaaatccaatggaaggtgacatgattacaacagggacacctcttgttgtcccaccacttattgacatgattagcaatgacccaatttttgcccattgctgaagatgggatgcaggaggcctctatcaagtaggtcaatttcctcactagaatgtttggttagagtggaatgtaaaggtctggacactctatgaattcgatgatctcgagagcatcattgataggacactaaagcgcgattttgacaccgaggaagcactctggttgcttaagataggtcttgtgtgcatcccggatagccctaagatcaagccctccatgtcaatggttgccaagatgctgcaaggtgagtgtgctgtgagtgacaggatcatgaggcctggcctgatcacagacgtcatggacctgaaagtcaggatggtagagccgatttagttcagcttgacatcatgctcgagcactgccgcaccggaccttgttggggatttcctcgattaaaatataagctccttgatatggttctgtaacatagttctgcaatgctcctttatttagttctttactttttttgttaagatatgaggtgtagcgatacaatatgtctactaacagcgtttgtgttcttgatagttcatttaggattgaatgaagttactggtatgaccttgtcgagactgaagtaaggagggatagagctaaaaactctcttggcacaactataaagttcaagctatatgggcgtgtttggatggcagcctcccatgcaactgcctggcaggcaaatgatcctagccacaccacaggcataggaaatcgaacggtcggcattgtttcctgggccagctgataaaatccattgaagtgcaagaggccgataaacttaggcgtatagtgctggatgctccatccactggacatacacttaagcttctgtcagtttctgattggattgaaatgttccttactttgagcattaagtgtttcttttcacagtttgcgcttgcgaacatccgaaccccgttttcatcttgaattcaacttatgatgtatatcggacagttccaccacattctggcgccgccttcgtctgatcctggaggcaattggagccgctgcaagtcggatcctggtggatgcagcgcaacacagatcgcaaccctccaaggactgagaagtggaatgttgacatctctgagacagtctgaaagcaaaccgaaggcaggggtgttcatcaactcctgcttcgcgcattgctagagtgagctacaggacacatggttcgcaccaaattctccatccatatataacaagaaaattgcagaggtggtaggtgattggtactttgaaagaggagctgacgtggagattgactgcgcctatccctgtgattcacagtcttgtcgcaaccttataccaattgataaggctgaccatcctagattaaacttcaaagaccggtaccctgagccatacagagattctcatccgactgcccccgttgctgtgcatggatgtcaggtgtcattactgtaatgtagtggtgaaataggtagattaaaacaatgaaatttatatgtggctaggatcataaatgaattgcaaaattttttctcagaacagtataacacatatttgtacataagttgttgtgttattatatgtttccgttgcaacgcacgggcactcacctagtatatatatatatatatatatatatattacacctgggtgcattcaatatagagaatgc

SEQ ID NO: 32996 - DNA, 2823 bp, Zea Mays
gggatacccgcctcccccgcgcccccgccagctccgcgcgaggcgccagctccgcgcgtccgccgcagtgatgccgcgcgatgaaggccgcacgggagagacgctgggaaagccgctccttccggcgttgcagtgggggcgtccacagctgtgccatgcccccgccccgtccgagacgccgaccacgacccaggattctcgcttcccgtccacgtccgtgattttcccagcgaagctgaccacgcctccctgtacgcacctcccgacatcctcgccgacatgctcgcactcctgtccccgtctgagatcctcgcgtcggcgccttcggtggaagtccggaatcgcccggctctcctccaccgcgccgccagcctcactgagaagagttcatctgcctcctcctcaacgcttgaccccaccgccgctggatccaacaccctgccctcgtccttcttctccgacctactcaccagtgacgacgtgggcaccctggccagacgcacgccatggacagcaggtgggcaggaacaccttctacgtggatcctcttctcccgtgctcctcgacgcacgagagcgagctcggactggatcctctcctaccgctccatgcaggtgctcctccgcccgatcccaatgtaaaacctacagttttgttagatgttgctgccactgtttggagaagactcgcgctagaaagcggtactgggtgaaaactgcagagcgatctagagctcgcaagcctgccattgctctctgtagcaatagaaatcccccaacccacccacccacacaagttgcaattgccctcttacatctattttttggtggaacaactaaattgacattgaagaagttttttggagtgtgctcgttctgcaattagaagacttctgtaagatcattcttctctttgtttttttcatttagaacctatgttggttttctgattttcatggaccacataaatagttatgtattctgtttcatagattcatgtctatataacaatttatttgaaaggcatttatctgtgcagggagagttctataattattctggtttgtagtccgtgaatttatagtggattgcttgagatactgggtaacaggaatgcatgtttatgattttcgttttgaccttgcattgcatctacaatgaccagaggatgcagtctatggatccagttaatgtgtatggaaatccaatggaaggtgacatgattacaacagggacacctcttgttgtcccaccacttattgacatgattagcaatgacccaatttttgcccattgctgaagatgggatgcaggaggcctctatcaagtaggtcaattacctcattaacagggacacctcttgttgccccaccacttattgatatgattagcaatgacccaattttttggtaatatatgaacatgattggttgttaaatatgcagagcagtttgtataataatcaactgcctcagcatattgtaatttcttggttcttgttctcactacttcattgtatttatagctcattgctgaagcatgggatgcaggaggcctctatcaagtaggtcaatttcctcactagaatgtttggttagagtggaatgtaaaggtctggacactctatgaattcgatgatctcgagagcatcattgataggacactaaagcgcgattttgacaccgaggaagcactctggttgcttaagataggtcttgtgtgcatcccggatagccctaagatcaagccctccatgtcaatggttgccaagatgctgcaagttcatttaggattgaatgaagttactggtatgaccttgtcgagactgaagtaaggagggatagagctaaaaactctcttggcacaactataaagttcaagctatatgggcgtgtttggatggcagcctcccatgcaactgcctggcaggcaaatgatcctagccacaccacaggcataggaaatcgaacggtcggcattgtttcctgggccagctgataaaatccattgaagtgcaagaggccgataaacttaggcgtatagtgctggatgctccatccactggacatacacttaagcttctgtcagtttctgattggattgaaatgttccttactttgagcattaagacagttccaccacattctggcgccgccttcgtctgatcctggaggcaattggagccgctgcaagtcggatcctggtggatgcagcgcaacacagatcgcaaccctccaaggactgagaagtggaatgttgacatctctgagacagtctgaaagcaaaccgaaggcaggggtgttcatcaactcctgcttcgcgcattgctagagtgagctacaggacacatggttcgcaccaaattctccatccatatataacaagaaaattgcagaggtggtaggtgattggtactttgaaagaggagctgacgtggagattgactgcgcctatccctgtgattcacagtcttgtcgcaaccttataccaattgataaggctgaccatcctagattaaacttcaaagaccggtaccctgagccatacagagattctcatccgactgcccccgttgctgtgcatggatgtcaggtgtcattactgtaatgtagtggtgaaataggtagattaaaacaatgaaatttatatgtggctaggatcataaatgaattgcaaaattttttctcagaacagtataacacatatttgtacataagttgttgtgttattatatgtttccgttgcaacgcacgggcactcacctagtatatatatatatatatatatatatattacacctgggtgcattcaatatagagaatgc

SEQ ID NO: 32997 - DNA, 2829 bp, Zea Mays
gggatacccgcctcccccgcgcccccgccagctccgcgcgaggcgccagctccgcgcgtccgccgcagtgatgccgcgcgatgaaggccgcacgggagagacgctgggaaagccgctccttccggcgttgcagtgggggcgtccacagctgtgccatgcccccgccccgtccgagacgccgaccacgacccaggattctcgcttcccgtccacgtccgtgattttcccagcgaagctgaccacgcctccctgtacgcacctcccgacatcctcgccgacatgctcgcactcctgtccccgtctgagatcctcgcgtcggcgccttcggtggaagtccggaatcgcccggctctcctccaccgcgccgccagcctcactgagaagagttcatctgcctcctcctcaacgcttgaccccaccgccgctggatccaacaccctgccctcgtccttcttctccgacctactcaccagtgacgacgtgggcaccctggccagacgcacgccatggacagcaggtgggcaggaacaccttctacgtggatcctcttctcccgtgctcctcgacgcacgagagcgagctcggactggatcctctcctaccgctccatgcaggtgctcctccgcccgatcccaatgtaaaacctacagttttgttagatgttgctgccactgtttggagaagactcgcgctagaaagcggtactgggtgaaaactgcagagcgatctagagctcgcaagcctgccattgctctctgtagcaatagaaatcccccaacccacccacccacacaagttgcaattgccctcttacatctattttttggtggaacaactaaattgacattgaagaagttttttggagtgtgctcgttctgcaattagaagacttctgtaagatcattcttctctttgtttttttcatttagaacctatgttggttttctgattttcatggaccacataaatagttatgtattctgtttcatagattcatgtctatataacaatttatttgaaaggcatttatctgtgcagggagagttctataattattctggtttgtagtccgtgaatttatagtggattgcttgagatactgggtaacaggaatgcatgtttatgattttcgttttgaccttgcattgcatctacaatgaccagaggatgcagtctatggatccagttaatgtgtatggaaatccaatggaaggtgacatgattacaacagggacacctcttgttgtcccaccacttattgacatgattagcaatgacccaatttttgcccattgctgaagatgggatgcaggaggcctctatcaagtaggtcaattacctcattaacagggacacctcttgttgccccaccacttattgatatgattagcaatgacccaattttttgctcattgctgaagcatgggatgcaggaggcctctatcaagtaggtcaatttcctcactagaatgtttggttagagtggaatgtaaaggtctggacactctatgaattcgatgatctcgagagcatcattgataggacactaaagcgcgattttgacaccgaggaagcactctggttgcttaagataggtcttgtgtgcatcccggatagccctaagatcaagccctccatgtcaatggttgccaagatgctgcaagttcatttaggattgaatgaagttactggtatgaccttgtcgagactgaagtaaggagggatagagctaaaaactctcttggcacaactataaagttcaagctatatgggcgtgtttggatggcagcctcccatgcaactgcctggcaggcaaatgatcctagccacaccacaggcataggaaatcgaacggtcggcattgtttcctgggccagctgataaaatccattgaagtgcaagaggccgataaacttaggcgtatagtgctggatgctccatccactggacatacacttaagcttctgtcagtttctgattggattgaaatgttccttactttgagcattaaggcaatgcaagtgcagtctggcacaatcctggtggtttggcattgatgtttcttttcacagtttgcgcttgcgaacatccgaaccccgttttcatcttgaattcaacttatgatgtatatcggacagttccaccacattctggcgccgccttcgtctgatcctggaggcaattggagccgctgcaagtcggatcctggtggatgcagcgcaacacagatcgcaaccctccaaggactgagaagtggaatgttgacatctctgagacagtctgaaagcaaaccgaaggcaggggtgttcatcaactcctgcttcgcgcattgctagagtgagctacaggacacatggttcgcaccaaattctccatccatatataacaagaaaattgcagaggtggtaggtgattggtactttgaaagaggagctgacgtggagattgactgcgcctatccctgtgattcacagtcttgtcgcaaccttataccaattgataaggctgaccatcctagattaaacttcaaagaccggtaccctgagccatacagagattctcatccgactgcccccgttgctgtgcatggatgtcaggtgtcattactgtaatgtagtggtgaaataggtagattaaaacaatgaaatttatatgtggctaggatcataaatgaattgcaaaattttttctcagaacagtataacacatatttgtacataagttgttgtgttattatatgtttccgttgcaacgcacgggcactcacctagtatatatatatatatatatatatatattacacctgggtgcattcaatatagagaatgc

SEQ ID NO: 32998 - DNA, 2697 bp, Zea Mays
gggatacccgcctcccccgcgcccccgccagctccgcgcgaggcgccagctccgcgcgtccgccgcagtgatgccgcgcgatgaaggccgcacgggagagacgctgggaaagccgctccttccggcgttgcagtgggggcgtccacagctgtgccatgcccccgccccgtccgagacgccgaccacgacccaggattctcgcttcccgtccacgtccgtgattttcccagcgaagctgaccacgcctccctgtacgcacctcccgacatcctcgccgacatgctcgcactcctgtccccgtctgagatcctcgcgtcggcgccttcggtggaagtccggaatcgcccggctctcctccaccgcgccgccagcctcactgagaagagttcatctgcctcctcctcaacgcttgaccccaccgccgctggatccaacaccctgccctcgtccttcttctccgacctactcaccagtgacgacgtgggcaccctggccagacgcacgccatggacagcaggtgggcaggaacaccttctacgtggatcctcttctcccgtgctcctcgacgcacgagagcgagctcggactggatcctctcctaccgctccatgcaggtgctcctccgcccgatcccaatgtaaaacctacagttttgttagatgttgctgccactgtttggagaagactcgcgctagaaagcggtactgggtgaaaactgcagagcgatctagagctcgcaagcctgccattgctctctgtagcaatagaaatcccccaacccacccacccacacaagttgcaattgccctcttacatctattttttggtggaacaactaaattgacattgaagaagttttttggagtgtgctcgttctgcaattagaagacttctgtaagatcattcttctctttgtttttttcatttagaacctatgttggttttctgattttcatggaccacataaatagttatgtattctgtttcatagattcatgtctatataacaatttatttgaaaggcatttatctgtgcagggagagttctataattattctggtttgtagtccgtgaatttatagtggattgcttgagatactgggtaacaggaatgcatgtttatgattttcgttttgaccttgcattgcatctacaatgaccagaggatgcagtctatggatccagttaatgtgtatggaaatccaatggaaggtgacatgattacaacagggacacctcttgttgtcccaccacttattgacatgattagcaatgacccaatttttgcccattgctgaagatgggatgcaggaggcctctatcaagtaggtcaattacctcattaacagggacacctcttgttgccccaccacttattgatatgattagcaatgacccaattttttgctcattgctgaagcatgggatgcaggaggcctctatcaagtaggtcaatttcctcactagaatgtttggttagagtggaatgtaaaggtctggacactctatgaattcgatgatctcgagagcatcattgataggacactaaagcgcgattttgacaccgaggaagcactctggttgcttaagataggtcttgtgtgcatcccggatagccctaagatcaagccctccatgtcaatggttgccaagatgctgcaagttcatttaggattgaatgaagttactggtatgaccttgtcgagactgaagtaaggagggatagagctaaaaactctcttggcacaactataaagttcaagctatatgggcgtgtttggatggcagcctcccatgcaactgcctggcaggcaaatgatcctagccacaccacaggcataggaaatcgaacggtcggcattgtttcctgggccagctgataaaatccattgaagtgcaagaggccgataaacttaggcgtatagtgctggatgctccatccactggacatacacttaagcttctgtcagtttctgattggattgaaatgttccttactttgagcattaagacagttccaccacattctggcgccgccttcgtctgatcctggaggcaattggagccgctgcaagtcggatcctggtggatgcagcgcaacacagatcgcaaccctccaaggactgagaagtggaatgttgacatctctgagacagtctgaaagcaaaccgaaggcaggggtgttcatcaactcctgcttcgcgcattgctagagtgagctacaggacacatggttcgcaccaaattctccatccatatataacaagaggtggtaggtgattggtactttgaaagaggagctgacgtggagattgactgcgcctatccctgtgattcacagtcttgtcgcaaccttataccaattgataaggctgaccatcctagattaaacttcaaagaccggtaccctgagccatacagagattctcatccgactgcccccgttgctgtgcatggatgtcaggtgtcattactgtaatgtagtggtgaaataggtagattaaaacaatgaaatttatatgtggctaggatcataaatgaattgcaaaattttttctcagaacagtataacacatatttgtacataagttgttgtgttattatatgtttccgttgcaacgcacgggcactcacctagtatatatatatatatatatatatatattacacctgggtgcattcaatatagagaatgc

SEQ ID NO: 32999 - DNA, 3332 bp, Zea Mays
gcctcccccgcgcccccgccagctccgcgcgaggcgccagctccgcgcgtccgccgcagtgatgccgcgcgatgaaggccgcacgggagagacgctgggaaagccgctccttccggcgttgcagtgggggcgtccacagctgtgccatgcccccgccccgtccgagacgccgaccacgacccaggattctcgcttcccgtccacgtccgtgattttcccagcgaagctgaccacgcctccctgtacgcacctcccgacatcctcgccgacatgctcgcactcctgtccccgtctgagatcctcgcgtcggcgccttcggtggaagtccggaatcgcccggctctcctccaccgcgccgccagcctcactgagaagagttcatctgcctcctcctcaacgcttgaccccaccgccgctggatccaacaccctgccctcgtccttcttctccgacctactcaccagtgacgacgtgggcaccctggccagacgcacgccatggacagcaggtgggcaggaacaccttctacgtggatcctcttctcccgtgctcctcgacgcacgagagcgagctcggactggatcctctcctaccgctccatgcaggtgctcctccgcccgatcccaatgtaaaacctacagttttgttagatgttgctgccactgtttggagaagactcgcgctagaaagcggtactgggtgaaaactgcagagcgatctagagctcgcaagcctgccattgctctctgtagcaatagaaatcccccaacccacccacccacacaagttgcaattgccctcttacatctattttttggtggaacaactaaattgacattgaagaagttttttggagtgtgctcgttctgcaattagaagacttctgtaagatcattcttctctttgtttttttcatttagaacctatgttggttttctgattttcatggaccacataaatagttatgtattctgtttcatagattcatgtctatataacaatttatttgaaaggcatttatctgtgcagggagagttctataattattctggtttgtagtccgtgaatttatagtggattgcttgaggtacaaatttgtatataacttctattaagttgctcctaatttccttctatcgcttgtcattctattagatgatgcaattttttgaggtatagatagcaatttttgtattcaaacaaaacaaagaaacaagttatctttaattgacattctatcattgactatcagtgtttaagctatatatttgtgaagataaattgtttatacactaataactgagtttgatgttgtagatactgggtaacaggaatgcatgtttatgattttcgttttgaccttgcattgcatctacaatgaccagaggatgcagtctatggatccagttaatgtgtatggaaatccaatggaaggtgacatgattacaacagggacacctcttgttgtcccaccacttattgacatgattagcaatgacccaatttttggtaatatatgaacctaattggctgttaaatatgcatagcagtttgtataataatcgatttcctcaacatattgtagtttcatggttcttgttctcactacttcctccattgtatttatagcccattgctgaagatgggatgcaggaggcctctatcaagtaggtcaattacctcattaacagggacacctcttgttgccccaccacttattgatatgattagcaatgacccaattttttgctcattgctgaagcatgggatgcaggaggcctctatcaagtaggtcaatttcctcactagaatgtttggttagagtggaatgtaaaggtctggacactctatgaattcgatgatctcgagagcatcattgataggacactaaagcgcgattttgacaccgaggaagcactctggttgcttaagataggtcttgtgtgcatcccggatagccctaagatcaagccctccatgtcaatggttgccaagatgctgcaaggtgagtgtgctgtgagtgacaggatcatgaggcctggcctgatcacagacgtcatggacctgaaagtcaggatggtagagccgatttagttcagcttgacatcatgctcgagcactgccgcaccggaccttgttggggatttcctcgattaaaatataagctccttgatatggttctgtaacatagttctgcaatgctcctttatttagttctttactttttttgttaagatatgaggtgtagcgatacaatatgtctactaacagcgtttgtgttcttgatagttcatttaggattgaatgaagttactggtatgaccttgtcgagactgaagtaaggagggatagagctaaaaactctcttggcacaactataaagttcaagctatatgggcgtgtttggatggcagcctcccatgcaactgcctggcaggcaaatgatcctagccacaccacaggcataggaaatcgaacggtcggcattgtttcctgggccagctgataaaatccattgaagtgcaagaggccgataaacttaggcgtatagtgctggatgctccatccactggacatacacttaagcttctgtcagtttctgattggattgaaatgttccttactttgagcattaagacagttccaccacattctggcgccgccttcgtctgatcctggaggcaattggagccgctgcaagtcggatcctggtggatgcagcgcaacacagatcgcaaccctccaaggactgagaagtggaatgttgacatctctgagacagtctgaaagcaaaccgaaggcaggggtgttcatcaactcctgcttcgcgcattgctagagtgagctacaggacacatggttcgcaccaaattctccatccatatataacaagaaaattgcagaggtggtaggtgattggtactttgaaagaggagctgacgtggagattgactgcgcctatccctgtgattcacagtcttgtcgcaaccttataccaattgataaggctgaccatcctagattaaacttcaaagaccggtaccctgagccatacagagattctcatccgactgcccccgttgctgtgcatggatgtcaggtgtcattactgtaatgtagtggtgaaataggtagattaaaacaatgaaatttatatgtggctaggatcataaatgaattgcaaaattttttctcagaacagtataacacatatttgtacataagttgttgtgttattatatgtttccgttgcaacgcacgggcactcacctagtatatatatatatatatatatatatattacacctgggtgcattcaatatagagaatgc

SEQ ID NO: 33000 - DNA, 2647 bp, Zea Mays
cctcccccgcgcccccgccagctccgcgcgaggcgccagctccgcgcgtccgccgcagtgatgccgcgcgatgaaggccgcacgggagagacgctgggaaagccgctccttccggcgttgcagtgggggcgtccacagctgtgccatgcccccgccccgtccgagacgccgaccacgacccaggattctcgcttcccgtccacgtccgtgattttcccagcgaagctgaccacgcctccctgtacgcacctcccgacatcctcgccgacatgctcgcactcctgtccccgtctgagatcctcgcgtcggcgccttcggtggaagtccggaatcgcccggctctcctccaccgcgccgccagcctcactgagaagagttcatctgcctcctcctcaacgcttgaccccaccgccgctggatccaacaccctgccctcgtccttcttctccgacctactcaccagtgacgacgtgggcaccctggccagacgcacgccatggacagcaggtgggcaggaacaccttctacgtggatcctcttctcccgtgctcctcgacgcacgagagcgagctcggactggatcctctcctaccgctccatgcagggagagttctataattattctggtttgtagtccgtgaatttatagtggattgcttgagatactgggtaacaggaatgcatgtttatgattttcgttttgaccttgcattgcatctacaatgaccagaggatgcagtctatggatccagttaatgtgtatggaaatccaatggaaggtgacatgattacaacagggacacctcttgttgtcccaccacttattgacatgattagcaatgacccaatttttgcccattgctgaagatgggatgcaggaggcctctatcaagtaggtcaattacctcattaacagggacacctcttgttgccccaccacttattgatatgattagcaatgacccaattttttgctcattgctgaagcatgggatgcaggaggcctctatcaagtaggtcaatttcctcactagaatgtttggttagagtggaatgtaaaggtctggacactctatgaattcgatgatctcgagagcatcattgataggacactaaagcgcgattttgacaccgaggaagcactctggttgcttaagataggtcttgtgtgcatcccggatagccctaagatcaagccctccatgtcaatggttgccaagatgctgcaaggtgagtgtgctgtgagtgacaggatcatgaggcctggcctgatcacagacgtcatggacctgaaagtcaggatggtagagccgatttagttcagcttgacatcatgctcgagcactgccgcaccggaccttgttggggatttcctcgattaaaatataagctccttgatatggttctgtaacatagttctgcaatgctcctttatttagttctttactttttttgttaagatatgaggtgtagcgatacaatatgtctactaacagcgtttgtgttcttgatagttcatttaggattgaatgaagttactggtatgaccttgtcgagactgaagtaaggagggatagagctaaaaactctcttggcacaactataaagttcaagctatatgggcgtgtttggatggcagcctcccatgcaactgcctggcaggcaaatgatcctagccacaccacaggcataggaaatcgaacggtcggcattgtttcctgggccagctgataaaatccattgaagtgcaagaggccgataaacttaggcgtatagtgctggatgctccatccactgtttgtctcttctcaccacaatatttccaatctgactatgttcttcattttgtccactgacagttatttgactacatgcattttgtatagggacatacacttaagcttctgtcagtttctgattggattgaaatgttccttactttgagcattaagacagttccaccacattctggcgccgccttcgtctgatcctggaggcaattggagccgctgcaagtcggatcctggtggatgcagcgcaacacagatcgcaaccctccaaggactgagaagtggaatgttgacatctctgagacagtctgaaagcaaaccgaaggcaggggtgttcatcaactcctgcttcgcgcattgctagagtgagctacaggacacatggttcgcaccaaattctccatccatatataacaagaaaattgcagaggtggtaggtgattggtactttgaaagaggagctgacgtggagattgactgcgcctatccctgtgattcacagtcttgtcgcaaccttataccaattgataaggctgaccatcctagattaaacttcaaagaccggtaccctgagccatacagagattctcatccgactgcccccgttgctgtgcatggatgtcaggtgtcattactgtaatgtagtggtgaaataggtagattaaaacaatgaaatttatatgtggctaggatcataaatgaattgcaaaattttttctcagaacagtataacacatatttgtacataagttgttgtgttattatatgtttccgttgcaacgcacgggcactcacctagtatatatatatatatatatatatatattacacctgggtgcattcaatatagagaatgc

SEQ ID NO: 33001 - DNA, 2354 bp, Zea Mays
ctcccccgcgcccccgccagctccgcgcgaggcgccagctccgcgcgtccgccgcagtgatgccgcgcgatgaaggccgcacgggagagacgctgggaaagccgctccttccggcgttgcagtgggggcgtccacagctgtgccatgcccccgccccgtccgagacgccgaccacgacccaggattctcgcttcccgtccacgtccgtgattttcccagcgaagctgaccacgcctccctgtacgcacctcccgacatcctcgccgacatgctcgcactcctgtccccgtctgagatcctcgcgtcggcgccttcggtggaagtccggaatcgcccggctctcctccaccgcgccgccagcctcactgagaagagttcatctgcctcctcctcaacgcttgaccccaccgccgctggatccaacaccctgccctcgtccttcttctccgacctactcaccagtgacgacgtgggcaccctggccagacgcacgccatggacagcaggtgggcaggaacaccttctacgtggatcctcttctcccgtgctcctcgacgcacgagagcgagctcggactggatcctctcctaccgctccatgcagatactgggtaacaggaatgcatgtttatgattttcgttttgaccttgcattgcatctacaatgaccagaggatgcagtctatggatccagttaatgtgtatggaaatccaatggaaggtgacatgattacaacagggacacctcttgttgtcccaccacttattgacatgattagcaatgacccaatttttgcccattgctgaagatgggatgcaggaggcctctatcaagtaggtcaatttcctcactagaatgtttggttagagtggaatgtaaaggtctggacactctatgaattcgatgatctcgagagcatcattgataggacactaaagcgcgattttgacaccgaggaagcactctggttgcttaagataggtcttgtgtgcatcccggatagccctaagatcaagccctccatgtcaatggttgccaagatgctgcaaggtgagtgtgctgtgagtgacaggatcatgaggcctggcctgatcacagacgtcatggacctgaaagtcaggatggtagagccgatttagttcagcttgacatcatgctcgagcactgccgcaccggaccttgttggggatttcctcgattaaaatataagctccttgatatggttctgtaacatagttctgcaatgctcctttatttagttctttactttttttgttaagatatgaggtgtagcgatacaatatgtctactaacagcgtttgtgttcttgatagttcatttaggattgaatgaagttactggtatgaccttgtcgagactgaagtaaggagggatagagctaaaaactctcttggcacaactataaagttcaagctatatgggcgtgtttggatggcagcctcccatgcaactgcctggcaggcaaatgatcctagccacaccacaggcataggaaatcgaacggtcggcattgtttcctgggccagctgataaaatccattgaagtgcaagaggccgataaacttaggcgtatagtgctggatgctccatccactggacatacacttaagcttctgtcagtttctgattggattgaaatgttccttactttgagcattaagacagttccaccacattctggcgccgccttcgtctgatcctggaggcaattggagccgctgcaagtcggatcctggtggatgcagcgcaacacagatcgcaaccctccaaggactgagaagtggaatgttgacatctctgagacagtctgaaagcaaaccgaaggcaggggtgttcatcaactcctgcttcgcgcattgctagagtgagctacaggacacatggttcgcaccaaattctccatccatatataacaagaaaattgcagaggtggtaggtgattggtactttgaaagaggagctgacgtggagattgactgcgcctatccctgtgattcacagtcttgtcgcaaccttataccaattgataaggaactgaggatgtattaggagttcggcagacgattatactcaattatcatcataataaaaaacactcttctaattgttgatgatgttatgttacttgcatcagatagcaaaccaccctattgtacaatctgttggtggaaacatgtttgtgttgtgtgttccaggttgtctgtttcttggtagccttttttggctgaattggtgatatacacaaaatctatttacttgttagactatactttgtattgcacccctgatatccaggccattgcttgtgttttctatgattcgttttaactgaa

SEQ ID NO: 33002 - DNA, 3205 bp, Zea Mays
ccgcgcccccgccagctccgcgcgaggcgccagctccgcgcgtccgccgcagtgatgccgcgcgatgaaggccgcacgggagagacgctgggaaagccgctccttccggcgttgcagtgggggcgtccacagctgtgccatgcccccgccccgtccgagacgccgaccacgacccaggattctcgcttcccgtccacgtccgtgattttcccagcgaagctgaccacgcctccctgtacgcacctcccgacatcctcgccgacatgctcgcactcctgtccccgtctgagatcctcgcgtcggcgccttcggtggaagtccggaatcgcccggctctcctccaccgcgccgccagcctcactgagaagagttcatctgcctcctcctcaacgcttgaccccaccgccgctggatccaacaccctgccctcgtccttcttctccgacctactcaccagtgacgacgtgggcaccctggccagacgcacgccatggacagcaggtgggcaggaacaccttctacgtggatcctcttctcccgtgctcctcgacgcacgagagcgagctcggactggatcctctcctaccgctccatgcaggtgctcctccgcccgatcccaatgtaaaacctacagttttgttagatgttgctgccactgtttggagaagactcgcgctagaaagcggtactgggtgaaaactgcagagcgatctagagctcgcaagcctgccattgctctctgtagcaatagaaatcccccaacccacccacccacacaagttgcaattgccctcttacatctattttttggtggaacaactaaattgacattgaagaagttttttggagtgtgctcgttctgcaattagaagacttctgtaagatcattcttctctttgtttttttcatttagaacctatgttggttttctgattttcatggaccacataaatagttatgtattctgtttcatagattcatgtctatataacaatttatttgaaaggcatttatctgtgcagggagagttctataattattctggtttgtagtccgtgaatttatagtggattgcttgaggtacaaatttgtatataacttctattaagttgctcctaatttccttctatcgcttgtcattctattagatgatgcaattttttgaggtatagatagcaatttttgtattcaaacaaaacaaagaaacaagttatctttaattgacattctatcattgactatcagtgtttaagctatatatttgtgaagataaattgtttatacactaataactgagtttgatgttgtagatactgggtaacaggaatgcatgtttatgattttcgttttgaccttgcattgcatctacaatgaccagaggatgcagtctatggatccagttaatgtgtatggaaatccaatggaaggtgacatgattacaacagggacacctcttgttgtcccaccacttattgacatgattagcaatgacccaatttttgcccattgctgaagatgggatgcaggaggcctctatcaagtaggtcaattacctcattaacagggacacctcttgttgccccaccacttattgatatgattagcaatgacccaattttttgctcattgctgaagcatgggatgcaggaggcctctatcaagtaggtcaatttcctcactagaatgtttggttagagtggaatgtaaaggtctggacactctatgaattcgatgatctcgagagcatcattgataggacactaaagcgcgattttgacaccgaggaagcactctggttgcttaagataggtcttgtgtgcatcccggatagccctaagatcaagccctccatgtcaatggttgccaagatgctgcaagttcatttaggattgaatgaagttactggtatgaccttgtcgagactgaagtaaggagggatagagctaaaaactctcttggcacaactataaagttcaagctatatgggcgtgtttggatggcagcctcccatgcaactgcctggcaggcaaatgatcctagccacaccacaggcataggaaatcgaacggtcggcattgtttcctgggccagctgataaaatccattgaagtgcaagaggccgataaacttaggcgtatagtgctggatgctccatccactggacatacacttaagcttctgtcagtttctgattggattgaaatgttccttactttgagcattaaggacacatgaggtgtagctattgggcctctaacttggttatcatggttttgggccgtgggtagagcaggcaatgcaagtgcagtctggcacaatcctggtggtttggcattgagttatgttttcttttacttgataaaacaatcttgttccatcacttagtcaatagctcaatatgtccaccagttctgatgatccatgtctgcgcagtgtttcttttcacagtttgcgcttgcgaacatccgaaccccgttttcatcttgaattcaacttatgatgtatatcggacagttccaccacattctggcgccgccttcgtctgatcctggaggcaattggagccgctgcaagtcggatcctggtggatgcagcgcaacacagatcgcaaccctccaaggactgagaagtggaatgttgacatctctgagacagtctgaaagcaaaccgaaggcaggggtgttcatcaactcctgcttcgcgcattgctagagtgagctacaggacacatggttcgcaccaaattctccatccatatataacaagaaaattgcagaggtggtaggtgattggtactttgaaagaggagctgacgtggagattgactgcgcctatccctgtgattcacagtcttgtcgcaaccttataccaattgataaggctgaccatcctagattaaacttcaaagaccggtaccctgagccatacagagattctcatccgactgcccccgttgctgtgcatggatgtcaggtgtcattactgtaatgtagtggtgaaataggtagattaaaacaatgaaatttatatgtggctaggatcataaatgaattgcaaaattttttctcagaacagtataacacatatttgtacataagttgttgtgttattatatgtttccgttgcaacgcacgggcactcacctagtatatatatatatatatatatatatattacacctgggtgcattcaatatagagaatgc

SEQ ID NO: 33003 - DNA, 3035 bp, Zea Mays
ccgccagctccgcgcgaggcgccagctccgcgcgtccgccgcagtgatgccgcgcgatgaaggccgcacgggagagacgctgggaaagccgctccttccggcgttgcagtgggggcgtccacagctgtgccatgcccccgccccgtccgagacgccgaccacgacccaggattctcgcttcccgtccacgtccgtgattttcccagcgaagctgaccacgcctccctgtacgcacctcccgacatcctcgccgacatgctcgcactcctgtccccgtctgagatcctcgcgtcggcgccttcggtggaagtccggaatcgcccggctctcctccaccgcgccgccagcctcactgagaagagttcatctgcctcctcctcaacgcttgaccccaccgccgctggatccaacaccctgccctcgtccttcttctccgacctactcaccagtgacgacgtgggcaccctggccagacgcacgccatggacagcaggtgggcaggaacaccttctacgtggatcctcttctcccgtgctcctcgacgcacgagagcgagctcggactggatcctctcctaccgctccatgcaggtgctcctccgcccgatcccaatgtaaaacctacagttttgttagatgttgctgccactgtttggagaagactcgcgctagaaagcggtactgggtgaaaactgcagagcgatctagagctcgcaagcctgccattgctctctgtagcaatagaaatcccccaacccacccacccacacaagttgcaattgccctcttacatctattttttggtggaacaactaaattgacattgaagaagttttttggagtgtgctcgttctgcaattagaagacttctgtaagatcattcttctctttgtttttttcatttagaacctatgttggttttctgattttcatggaccacataaatagttatgtattctgtttcatagattcatgtctatataacaatttatttgaaaggcatttatctgtgcagggagagttctataattattctggtttgtagtccgtgaatttatagtggattgcttgaggtacaaatttgtatataacttctattaagttgctcctaatttccttctatcgcttgtcattctattagatgatgcaattttttgaggtatagatagcaatttttgtattcaaacaaaacaaagaaacaagttatctttaattgacattctatcattgactatcagtgtttaagctatatatttgtgaagataaattgtttatacactaataactgagtttgatgttgtagatactgggtaacaggaatgcatgtttatgattttcgttttgaccttgcattgcatctacaatgaccagaggatgcagtctatggatccagttaatgtgtatggaaatccaatggaaggtgacatgattacaacagggacacctcttgttgtcccaccacttattgacatgattagcaatgacccaatttttgcccattgctgaagatgggatgcaggaggcctctatcaagtaggtcaattacctcattaacagggacacctcttgttgccccaccacttattgatatgattagcaatgacccaattttttgctcattgctgaagcatgggatgcaggaggcctctatcaagtaggtcaatttcctcactagaatgtttggttagagtggaatgtaaaggtctggacactctatgaattcgatgatctcgagagcatcattgataggacactaaagcgcgattttgacaccgaggaagcactctggttgcttaagataggtcttgtgtgcatcccggatagccctaagatcaagccctccatgtcaatggttgccaagatgctgcaagttcatttaggattgaatgaagttactggtatgaccttgtcgagactgaagtaaggagggatagagctaaaaactctcttggcacaactataaagttcaagctatatgggcgtgtttggatggcagcctcccatgcaactgcctggcaggcaaatgatcctagccacaccacaggcataggaaatcgaacggtcggcattgtttcctgggccagctgataaaatccattgaagtgcaagaggccgataaacttaggcgtatagtgctggatgctccatccactggacatacacttaagcttctgtcagtttctgattggattgaaatgttccttactttgagcattaaggcaatgcaagtgcagtctggcacaatcctggtggtttggcattgatgtttcttttcacagtttgcgcttgcgaacatccgaaccccgttttcatcttgaattcaacttatgatgtatatcggacagttccaccacattctggcgccgccttcgtctgatcctggaggcaattggagccgctgcaagtcggatcctggtggatgcagcgcaacacagatcgcaaccctccaaggactgagaagtggaatgttgacatctctgagacagtctgaaagcaaaccgaaggcaggggtgttcatcaactcctgcttcgcgcattgctagagtgagctacaggacacatggttcgcaccaaattctccatccatatataacaagaaaattgcagaggtggtaggtgattggtactttgaaagaggagctgacgtggagattgactgcgcctatccctgtgattcacagtcttgtcgcaaccttataccaattgataaggctgaccatcctagattaaacttcaaagaccggtaccctgagccatacagagattctcatccgactgcccccgttgctgtgcatggatgtcaggtgtcattactgtaatgtagtggtgaaataggtagattaaaacaatgaaatttatatgtggctaggatcataaatgaattgcaaaattttttctcagaacagtataacacatatttgtacataagttgttgtgttattatatgtttccgttgcaacgcacgggcactcacctagtatatatatatatatatatatatatattacacctgggtgcattcaatatagagaatgc

SEQ ID NO: 33004 - DNA, 2709 bp, Zea Mays
cgccagctccgcgcgaggcgccagctccgcgcgtccgccgcagtgatgccgcgcgatgaaggccgcacgggagagacgctgggaaagccgctccttccggcgttgcagtgggggcgtccacagctgtgccatgcccccgccccgtccgagacgccgaccacgacccaggattctcgcttcccgtccacgtccgtgattttcccagcgaagctgaccacgcctccctgtacgcacctcccgacatcctcgccgacatgctcgcactcctgtccccgtctgagatcctcgcgtcggcgccttcggtggaagtccggaatcgcccggctctcctccaccgcgccgccagcctcactgagaagagttcatctgcctcctcctcaacgcttgaccccaccgccgctggatccaacaccctgccctcgtccttcttctccgacctactcaccagtgacgacgtgggcaccctggccagacgcacgccatggacagcaggtgggcaggaacaccttctacgtggatcctcttctcccgtgctcctcgacgcacgagagcgagctcggactggatcctctcctaccgctccatgcagggagagttctataattattctggtttgtagtccgtgaatttatagtggattgcttgagatactgggtaacaggaatgcatgtttatgattttcgttttgaccttgcattgcatctacaatgaccagaggatgcagtctatggatccagttaatgtgtatggaaatccaatggaaggtgacatgattacaacagggacacctcttgttgtcccaccacttattgacatgattagcaatgacccaatttttgcccattgctgaagatgggatgcaggaggcctctatcaagtaggtcaattacctcattaacagggacacctcttgttgccccaccacttattgatatgattagcaatgacccaattttttgctcattgctgaagcatgggatgcaggaggcctctatcaagtaggtcaatttcctcactagaatgtttggttagagtggaatgtaaaggtctggacactctatgaattcgatgatctcgagagcatcattgataggacactaaagcgcgattttgacaccgaggaagcactctggttgcttaagataggtcttgtgtgcatcccggatagccctaagatcaagccctccatgtcaatggttgccaagatgctgcaaggtgagtgtgctgtgagtgacaggatcatgaggcctggcctgatcacagacgtcatggacctgaaagtcaggatggtagagccgatttagttcagcttgacatcatgctcgagcactgccgcaccggaccttgttggggatttcctcgattaaaatataagctccttgatatggttctgtaacatagttctgcaatgctcctttatttagttctttactttttttgttaagatatgaggtgtagcgatacaatatgtctactaacagcgtttgtgttcttgatagttcatttaggattgaatgaagttactggtatgaccttgtcgagactgaagtaaggagggatagagctaaaaactctcttggcacaactataaagttcaagctatatgggcgtgtttggatggcagcctcccatgcaactgcctggcaggcaaatgatcctagccacaccacaggcataggaaatcgaacggtcggcattgtttcctgggccagctgataaaatccattgaagtgcaagaggccgataaacttaggcgtatagtgctggatgctccatccactgtttgtctcttctcaccacaatatttccaatctgactatgttcttcattttgtccactgacagttatttgactacatgcattttgtatagggacatacacttaagcttctgtcagtttctgattggattgaaatgttccttactttgagcattaagtgtttcttttcacagtttgcgcttgcgaacatccgaaccccgttttcatcttgaattcaacttatgatgtatatcggacagttccaccacattctggcgccgccttcgtctgatcctggaggcaattggagccgctgcaagtcggatcctggtggatgcagcgcaacacagatcgcaaccctccaaggactgagaagtggaatgttgacatctctgagacagtctgaaagcaaaccgaaggcaggggtgttcatcaactcctgcttcgcgcattgctagagtgagctacaggacacatggttcgcaccaaattctccatccatatataacaagaaaattgcagaggtggtaggtgattggtactttgaaagaggagctgacgtggagattgactgcgcctatccctgtgattcacagtcttgtcgcaaccttataccaattgataaggctgaccatcctagattaaacttcaaagaccggtaccctgagccatacagagattctcatccgactgcccccgttgctgtgcatggatgtcaggtgtcattactgtaatgtagtggtgaaataggtagattaaaacaatgaaatttatatgtggctaggatcataaatgaattgcaaaattttttctcagaacagtataacacatatttgtacataagttgttgtgttattatatgtttccgttgcaacgcacgggcactcacctagtatatatatatatatatatatatatattacacctgggtgcattcaatatagagaatgc

SEQ ID NO: 33005 - DNA, 2707 bp, Zea Mays
gccagctccgcgcgaggcgccagctccgcgcgtccgccgcagtgatgccgcgcgatgaaggccgcacgggagagacgctgggaaagccgctccttccggcgttgcagtgggggcgtccacagctgtgccatgcccccgccccgtccgagacgccgaccacgacccaggattctcgcttcccgtccacgtccgtgattttcccagcgaagctgaccacgcctccctgtacgcacctcccgacatcctcgccgacatgctcgcactcctgtccccgtctgagatcctcgcgtcggcgccttcggtggaagtccggaatcgcccggctctcctccaccgcgccgccagcctcactgagaagagttcatctgcctcctcctcaacgcttgaccccaccgccgctggatccaacaccctgccctcgtccttcttctccgacctactcaccagtgacgacgtgggcaccctggccagacgcacgccatggacagcaggtgggcaggaacaccttctacgtggatcctcttctcccgtgctcctcgacgcacgagagcgagctcggactggatcctctcctaccgctccatgcagggagagttctataattattctggtttgtagtccgtgaatttatagtggattgcttgagatactgggtaacaggaatgcatgtttatgattttcgttttgaccttgcattgcatctacaatgaccagaggatgcagtctatggatccagttaatgtgtatggaaatccaatggaaggtgacatgattacaacagggacacctcttgttgtcccaccacttattgacatgattagcaatgacccaatttttgcccattgctgaagatgggatgcaggaggcctctatcaagtaggtcaattacctcattaacagggacacctcttgttgccccaccacttattgatatgattagcaatgacccaattttttgctcattgctgaagcatgggatgcaggaggcctctatcaagtaggtcaatttcctcactagaatgtttggttagagtggaatgtaaaggtctggacactctatgaattcgatgatctcgagagcatcattgataggacactaaagcgcgattttgacaccgaggaagcactctggttgcttaagataggtcttgtgtgcatcccggatagccctaagatcaagccctccatgtcaatggttgccaagatgctgcaaggtgagtgtgctgtgagtgacaggatcatgaggcctggcctgatcacagacgtcatggacctgaaagtcaggatggtagagccgatttagttcagcttgacatcatgctcgagcactgccgcaccggaccttgttggggatttcctcgattaaaatataagctccttgatatggttctgtaacatagttctgcaatgctcctttatttagttctttactttttttgttaagatatgaggtgtagcgatacaatatgtctactaacagcgtttgtgttcttgatagttcatttaggattgaatgaagttactggtatgaccttgtcgagactgaagtaaggagggatagagctaaaaactctcttggcacaactataaagttcaagctatatgggcgtgtttggatggcagcctcccatgcaactgcctggcaggcaaatgatcctagccacaccacaggcataggaaatcgaacggtcggcattgtttcctgggccagctgataaaatccattgaagtgcaagaggccgataaacttaggcgtatagtgctggatgctccatccactggacatacacttaagcttctgtcagtttctgattggattgaaatgttccttactttgagcattaaggacacatgaggtgtagctattgggcctctaacttggttatcatggttttgggccgtgggtagagcaggcaatgcaagtgcagtctggcacaatcctggtggtttggcattgatgtttcttttcacagtttgcgcttgcgaacatccgaaccccgttttcatcttgaattcaacttatgatgtatatcggacagttccaccacattctggcgccgccttcgtctgatcctggaggcaattggagccgctgcaagtcggatcctggtggatgcagcgcaacacagatcgcaaccctccaaggactgagaagtggaatgttgacatctctgagacagtctgaaagcaaaccgaaggcaggggtgttcatcaactcctgcttcgcgcattgctagagtgagctacaggacacatggttcgcaccaaattctccatccatatataacaagaaaattgcagaggtggtaggtgattggtactttgaaagaggagctgacgtggagattgactgcgcctatccctgtgattcacagtcttgtcgcaaccttataccaattgataaggaactgaggatgtattaggagttcggcagacgattatactcaattatcatcataataaaaaacactcttctaattgttgatgatgttatgttacttgcatcagatagcaaaccaccctattgtacaatctgttggtggaaacatgtttgtgttgtgtgttccaggttgtctgtttcttggtagccttttttggctgaattggtgatatacacaaaatctatttacttgttagactatactttgtattgcacccctgatatccaggccattgcttgtgttttctatgattcgttttaactgaa

SEQ ID NO: 33006 - DNA, 3242 bp, Zea Mays
gccagctccgcgcgaggcgccagctccgcgcgtccgccgcagtgatgccgcgcgatgaaggccgcacgggagagacgctgggaaagccgctccttccggcgttgcagtgggggcgtccacagctgtgccatgcccccgccccgtccgagacgccgaccacgacccaggattctcgcttcccgtccacgtccgtgattttcccagcgaagctgaccacgcctccctgtacgcacctcccgacatcctcgccgacatgctcgcactcctgtccccgtctgagatcctcgcgtcggcgccttcggtggaagtccggaatcgcccggctctcctccaccgcgccgccagcctcactgagaagagttcatctgcctcctcctcaacgcttgaccccaccgccgctggatccaacaccctgccctcgtccttcttctccgacctactcaccagtgacgacgtgggcaccctggccagacgcacgccatggacagcaggtgggcaggaacaccttctacgtggatcctcttctcccgtgctcctcgacgcacgagagcgagctcggactggatcctctcctaccgctccatgcaggtgctcctccgcccgatcccaatgtaaaacctacagttttgttagatgttgctgccactgtttggagaagactcgcgctagaaagcggtactgggtgaaaactgcagagcgatctagagctcgcaagcctgccattgctctctgtagcaatagaaatcccccaacccacccacccacacaagttgcaattgccctcttacatctattttttggtggaacaactaaattgacattgaagaagttttttggagtgtgctcgttctgcaattagaagacttctgtaagatcattcttctctttgtttttttcatttagaacctatgttggttttctgattttcatggaccacataaatagttatgtattctgtttcatagattcatgtctatataacaatttatttgaaaggcatttatctgtgcagggagagttctataattattctggtttgtagtccgtgaatttatagtggattgcttgaggtacaaatttgtatataacttctattaagttgctcctaatttccttctatcgcttgtcattctattagatgatgcaattttttgaggtatagatagcaatttttgtattcaaacaaaacaaagaaacaagttatctttaattgacattctatcattgactatcagtgtttaagctatatatttgtgaagataaattgtttatacactaataactgagtttgatgttgtagatactgggtaacaggaatgcatgtttatgattttcgttttgaccttgcattgcatctacaatgaccagaggatgcaggaggcctctatcaagtaggtcaatttcctcactagaatgtttggttagagtggaatgtaaaggtctggacactctatgaattcgatgatctcgagagcatcattgataggacactaaagcgcgattttgacaccgaggaagcactctggttgcttaagataggtcttgtgtgcatcccggatagccctaagatcaagccctccatgtcaatggttgccaagatgctgcaaggtgagtgtgctgtgagtgacaggatcatgaggcctggcctgatcacagacgtcatggacctgaaagtcaggatggtagagccgatttagttcagcttgacatcatgctcgagcactgccgcaccggaccttgttggggatttcctcgattaaaatataagctccttgatatggttctgtaacatagttctgcaatgctcctttatttagttctttactttttttgttaagatatgaggtgtagcgatacaatatgtctactaacagcgtttgtgttcttgatagttcatttaggattgaatgaagttactggtatgaccttgtcgagactgaagtaaggagggatagagctaaaaactctcttggcacaactataaagttcaagctatatgggcgtgtttggatggcagcctcccatgcaactgcctggcaggcaaatgatcctagccacaccacaggcataggaaatcgaacggtcggcattgtttcctgggccagctgataaaatccattgaagtgcaagaggccgataaacttaggcgtatagtgctggatgctccatccactggacatacacttaagcttctgtcagtttctgattggattgaaatgttccttactttgagcattaagagcaggcaatgcaagtgcagtctggcacaatcctggtggtttggcattgagttatgttttcttttacttgataaaacaatcttgttccatcacttagtcaatagctcaatatgtccaccagttctgatgatccatgtctgcgcagtgtttcttttcacagtttgcgcttgcgaacatccgaaccccgttttcatcttgaattcaacttatgatgtatatcgggtaaaatgcgacttgtgatcgatcaatatagttttcggcacctggaccaggtggcaagtaataattctggtttggaaaatttcagacagttccaccacattctggcgccgccttcgtctgatcctggaggcaattggagccgctgcaagtcggatcctggtggatgcagcgcaacacagatcgcaaccctccaaggactgagaagtggaatgttgacatctctgagacagtctgaaagcaaaccgaaggcaggggtgttcatcaactcctgcttcgcgcattgctagagtgagctacaggacacatggttcgcaccaaattctccatccatatataacaagaaaattgcagaggtggtaggtgattggtactttgaaagaggagctgacgtggagattgactgcgcctatccctgtgattcacagtcttgtcgcaaccttataccaattgataaggctgaccatcctagattaaacttcaaagaccggtaccctgagccatacagagattctcatccgactgcccccgttgctgtgcatggatgtcaggtgtcattactgtaatgtagtggtgaaataggtagattaaaacaatgaaatttatatgtggctaggatcataaatgaattgcaaaattttttctcagaacagtataacacatatttgtacataagttgttgtgttattatatgtttccgttgcaacgcacgggcactcacctagtatatatatatatatatatatatatattacacctgggtgcattcaatatagagaatgc

SEQ ID NO: 33007 - DNA, 2730 bp, Zea Mays
gccagctccgcgcgaggcgccagctccgcgcgtccgccgcagtgatgccgcgcgatgaaggccgcacgggagagacgctgggaaagccgctccttccggcgttgcagtgggggcgtccacagctgtgccatgcccccgccccgtccgagacgccgaccacgacccaggattctcgcttcccgtccacgtccgtgattttcccagcgaagctgaccacgcctccctgtacgcacctcccgacatcctcgccgacatgctcgcactcctgtccccgtctgagatcctcgcgtcggcgccttcggtggaagtccggaatcgcccggctctcctccaccgcgccgccagcctcactgagaagagttcatctgcctcctcctcaacgcttgaccccaccgccgctggatccaacaccctgccctcgtccttcttctccgacctactcaccagtgacgacgtgggcaccctggccagacgcacgccatggacagcaggtgggcaggaacaccttctacgtggatcctcttctcccgtgctcctcgacgcacgagagcgagctcggactggatcctctcctaccgctccatgcagggagagttctataattattctggtttgtagtccgtgaatttatagtggattgcttgagatactgggtaacaggaatgcatgtttatgattttcgttttgaccttgcattgcatctacaatgaccagaggatgcagtctatggatccagttaatgtgtatggaaatccaatggaaggtgacatgattacaacagggacacctcttgttgtcccaccacttattgacatgattagcaatgacccaatttttgcccattgctgaagatgggatgcaggaggcctctatcaagtaggtcaattacctcattaacagggacacctcttgttgccccaccacttattgatatgattagcaatgacccaattttttgctcattgctgaagcatgggatgcaggaggcctctatcaagtaggtcaatttcctcactagaatgtttggttagagtggaatgtaaaggtctggacactctatgaattcgatgatctcgagagcatcattgataggacactaaagcgcgattttgacaccgaggaagcactctggttgcttaagataggtcttgtgtgcatcccggatagccctaagatcaagccctccatgtcaatggttgccaagatgctgcaaggtgagtgtgctgtgagtgacaggatcatgaggcctggcctgatcacagacgtcatggacctgaaagtcaggatggtagagccgatttagttcagcttgacatcatgctcgagcactgccgcaccggaccttgttggggatttcctcgattaaaatataagctccttgatatggttctgtaacatagttctgcaatgctcctttatttagttctttactttttttgttaagatatgaggtgtagcgatacaatatgtctactaacagcgtttgtgttcttgatagttcatttaggattgaatgaagttactggtatgaccttgtcgagactgaagtaaggagggatagagctaaaaactctcttggcacaactataaagttcaagctatatgggcgtgtttggatggcagcctcccatgcaactgcctggcaggcaaatgatcctagccacaccacaggcataggaaatcgaacggtcggcattgtttcctgggccagctgataaaatccattgaagtgcaagaggccgataaacttaggcgtatagtgctggatgctccatccactggacatacacttaagcttctgtcagtttctgattggattgaaatgttccttactttgagcattaaggacacatgaggtgtagctattgggcctctaacttggttatcatggttttgggccgtgggtagagcaggcaatgcaagtgcagtctggcacaatcctggtggtttggcattgatgtttcttttcacagtttgcgcttgcgaacatccgaaccccgttttcatcttgaattcaacttatgatgtatatcggacagttccaccacattctggcgccgccttcgtctgatcctggaggcaattggagccgctgcaagtcggatcctggtggatgcagcgcaacacagatcgcaaccctccaaggactgagaagtggaatgttgacatctctgagacagtctgaaagcaaaccgaaggcaggggtgttcatcaactcctgcttcgcgcattgctagagtgagctacaggacacatggttcgcaccaaattctccatccatatataacaagaaaattgcagaggtggtaggtgattggtactttgaaagaggagctgacgtggagattgactgcgcctatccctgtgattcacagtcttgtcgcaaccttataccaattgataaggctgaccatcctagattaaacttcaaagaccggtaccctgagccatacagagattctcatccgactgcccccgttgctgtgcatggatgtcaggtgtcattactgtaatgtagtggtgaaataggtagattaaaacaatgaaatttatatgtggctaggatcataaatgaattgcaaaattttttctcagaacagtataacacatatttgtacataagttgttgtgttattatatgtttccgttgcaacgcacgggcactcacctagtatatatatatatatatatatatatattacacctgggtgcattcaatatagagaatgc

SEQ ID NO: 33008 - DNA, 2633 bp, Zea Mays
ccagctccgcgcgaggcgccagctccgcgcgtccgccgcagtgatgccgcgcgatgaaggccgcacgggagagacgctgggaaagccgctccttccggcgttgcagtgggggcgtccacagctgtgccatgcccccgccccgtccgagacgccgaccacgacccaggattctcgcttcccgtccacgtccgtgattttcccagcgaagctgaccacgcctccctgtacgcacctcccgacatcctcgccgacatgctcgcactcctgtccccgtctgagatcctcgcgtcggcgccttcggtggaagtccggaatcgcccggctctcctccaccgcgccgccagcctcactgagaagagttcatctgcctcctcctcaacgcttgaccccaccgccgctggatccaacaccctgccctcgtccttcttctccgacctactcaccagtgacgacgtgggcaccctggccagacgcacgccatggacagcaggtgggcaggaacaccttctacgtggatcctcttctcccgtgctcctcgacgcacgagagcgagctcggactggatcctctcctaccgctccatgcagggagagttctataattattctggtttgtagtccgtgaatttatagtggattgcttgagatactgggtaacaggaatgcatgtttatgattttcgttttgaccttgcattgcatctacaatgaccagaggatgcagtctatggatccagttaatgtgtatggaaatccaatggaaggtgacatgattacaacagggacacctcttgttgtcccaccacttattgacatgattagcaatgacccaatttttgcccattgctgaagatgggatgcaggaggcctctatcaagtaggtcaattacctcattaacagggacacctcttgttgccccaccacttattgatatgattagcaatgacccaattttttggtaatatatgaacatgattggttgttaaatatgcagagcagtttgtataataatcaactgcctcagcatattgtaatttcttggttcttgttctcactacttcattgtatttatagctcattgctgaagcatgggatgcaggaggcctctatcaagtaggtcaatttcctcactagaatgtttggttagagtggaatgtaaaggtctggacactctatgaattcgatgatctcgagagcatcattgataggacactaaagcgcgattttgacaccgaggaagcactctggttgcttaagataggtcttgtgtgcatcccggatagccctaagatcaagccctccatgtcaatggttgccaagatgctgcaagttcatttaggattgaatgaagttactggtatgaccttgtcgagactgaagtaaggagggatagagctaaaaactctcttggcacaactataaagttcaagctatatgggcgtgtttggatggcagcctcccatgcaactgcctggcaggcaaatgatcctagccacaccacaggcataggaaatcgaacggtcggcattgtttcctgggccagctgataaaatccattgaagtgcaagaggccgataaacttaggcgtatagtgctggatgctccatccactggacatacacttaagcttctgtcagtttctgattggattgaaatgttccttactttgagcattaaggacacatgaggtgtagctattgggcctctaacttggttatcatggttttgggccgtgggtagagcaggcaatgcaagtgcagtctggcacaatcctggtggtttggcattgagttatgttttcttttacttgataaaacaatcttgttccatcacttagtcaatagctcaatatgtccaccagttctgatgatccatgtctgcgcagtgtttcttttcacagtttgcgcttgcgaacatccgaaccccgttttcatcttgaattcaacttatgatgtatatcggacagttccaccacattctggcgccgccttcgtctgatcctggaggcaattggagccgctgcaagtcggatcctggtggatgcagcgcaacacagatcgcaaccctccaaggactgagaagtggaatgttgacatctctgagacagtctgaaagcaaaccgaaggcaggggtgttcatcaactcctgcttcgcgcattgctagagtgagctacaggacacatggttcgcaccaaattctccatccatatataacaagaaaattgcagaggtggtaggtgattggtactttgaaagaggagctgacgtggagattgactgcgcctatccctgtgattcacagtcttgtcgcaaccttataccaattgataaggaactgaggatgtattaggagttcggcagacgattatactcaattatcatcataataaaaaacactcttctaattgttgatgatgttatgttacttgcatcagatagcaaaccaccctattgtacaatctgttggtggaaacatgtttgtgttgtgtgttccaggttgtctgtttcttggtagccttttttggctgaattggtgatatacacaaaatctatttacttgttagactatactttgtattgcacccctgatatccaggccattgcttgtgttttctatgattcgttttaactgaa

SEQ ID NO: 33009 - DNA, 2513 bp, Zea Mays
ctccgcgcgaggcgccagctccgcgcgtccgccgcagtgatgccgcgcgatgaaggccgcacgggagagacgctgggaaagccgctccttccggcgttgcagtgggggcgtccacagctgtgccatgcccccgccccgtccgagacgccgaccacgacccaggattctcgcttcccgtccacgtccgtgattttcccagcgaagctgaccacgcctccctgtacgcacctcccgacatcctcgccgacatgctcgcactcctgtccccgtctgagatcctcgcgtcggcgccttcggtggaagtccggaatcgcccggctctcctccaccgcgccgccagcctcactgagaagagttcatctgcctcctcctcaacgcttgaccccaccgccgctggatccaacaccctgccctcgtccttcttctccgacctactcaccagtgacgacgtgggcaccctggccagacgcacgccatggacagcaggtgggcaggaacaccttctacgtggatcctcttctcccgtgctcctcgacgcacgagagcgagctcggactggatcctctcctaccgctccatgcagggagagttctataattattctggtttgtagtccgtgaatttatagtggattgcttgagatactgggtaacaggaatgcatgtttatgattttcgttttgaccttgcattgcatctacaatgaccagaggatgcagtctatggatccagttaatgtgtatggaaatccaatggaaggtgacatgattacaacagggacacctcttgttgtcccaccacttattgacatgattagcaatgacccaatttttgcccattgctgaagatgggatgcaggaggcctctatcaagtaggtcaattacctcattaacagggacacctcttgttgccccaccacttattgatatgattagcaatgacccaattttttgctcattgctgaagcatgggatgcaggaggcctctatcaagtaggtcaatttcctcactagaatgtttggttagagtggaatgtaaaggtctggacactctatgaattcgatgatctcgagagcatcattgataggacactaaagcgcgattttgacaccgaggaagcactctggttgcttaagataggtcttgtgtgcatcccggatagccctaagatcaagccctccatgtcaatggttgccaagatgctgcaaggtgagtgtgctgtgagtgacaggatcatgaggcctggcctgatcacagacgtcatggacctgaaagtcaggatggtagagccgatttagttcagcttgacatcatgctcgagcactgccgcaccggaccttgttggggatttcctcgattaaaatataagctccttgatatggttctgtaacatagttctgcaatgctcctttatttagttctttactttttttgttaagatatgaggtgtagcgatacaatatgtctactaacagcgtttgtgttcttgatagttcatttaggattgaatgaagttactggtatgaccttgtcgagactgaagtaaggagggatagagctaaaaactctcttggcacaactataaagttcaagctatatgggcgtgtttggatggcagcctcccatgcaactgcctggcaggcaaatgatcctagccacaccacaggcataggaaatcgaacggtcggcattgtttcctgggccagctgataaaatccattgaagtgcaagaggccgataaacttaggcgtatagtgctggatgctccatccactggacatacacttaagcttctgtcagtttctgattggattgaaatgttccttactttgagcattaagacagttccaccacattctggcgccgccttcgtctgatcctggaggcaattggagccgctgcaagtcggatcctggtggatgcagcgcaacacagatcgcaaccctccaaggactgagaagtggaatgttgacatctctgagacagtctgaaagcaaaccgaaggcaggggtgttcatcaactcctgcttcgcgcattgctagagtgagctacaggacacatggttcgcaccaaattctccatccatatataacaagaaaattgcagaggtggtaggtgattggtactttgaaagaggagctgacgtggagattgactgcgcctatccctgtgattcacagtcttgtcgcaaccttataccaattgataaggaactgaggatgtattaggagttcggcagacgattatactcaattatcatcataataaaaaacactcttctaattgttgatgatgttatgttacttgcatcagatagcaaaccaccctattgtacaatctgttggtggaaacatgtttgtgttgtgtgttccaggttgtctgtttcttggtagccttttttggctgaattggtgatatacacaaaatctatttacttgttagactatactttgtattgcacccctgatatccaggccattgcttgtgttttctatgattcgttttaactgaa

SEQ ID NO: 33010 - DNA, 3692 bp, Zea Mays
gcgcgaggcgccagctccgcgcgtccgccgcagtgatgccgcgcgatgaaggccgcacgggagagacgctgggaaagccgctccttccggcgttgcagtgggggcgtccacagctgtgccatgcccccgccccgtccgagacgccgaccacgacccaggattctcgcttcccgtccacgtccgtgattttcccagcgaagctgaccacgcctccctgtacgcacctcccgacatcctcgccgacatgctcgcactcctgtccccgtctgagatcctcgcgtcggcgccttcggtggaagtccggaatcgcccggctctcctccaccgcgccgccagcctcactgagaagagttcatctgcctcctcctcaacgcttgaccccaccgccgctggatccaacaccctgccctcgtccttcttctccgacctactcaccagtgacgacgtgggcaccctggccagacgcacgccatggacagcaggtgggcaggaacaccttctacgtggatcctcttctcccgtgctcctcgacgcacgagagcgagctcggactggatcctctcctaccgctccatgcagatactgggtaacaggaatgcatgtttatgattttcgttttgaccttgcattgcatctacaatgaccagaggatgcaggtaaaaagttatttttattttctctgtattttgtctttttagacatttcttaaaccaatctttcctttgccagtctatggatccagttaatgtgtatggaaatccaatggaaggtgacatgattacaacagggacacctcttgttgtcccaccacttattgacatgattagcaatgacccaatttttggtaatatatgaacctaattggctgttaaatatgcatagcagtttgtataataatcgatttcctcaacatattgtagtttcatggttcttgttctcactacttcctccattgtatttatagcccattgctgaagatgggatgcaggaggcctctatcaagtaggtcaattacctcattaacagggacacctcttgttgccccaccacttattgatatgattagcaatgacccaattttttgctcattgctgaagcatgggatgcaggaggcctctatcaagtaggtcaatttcctcactagaatgtttggttagagtggaatgtaaaggtctggacactctatgaattcgatgatctcgagagcatcattgataggacactaaagcgcgattttgacaccgaggaagcactctggttgcttaagataggtcttgtgtgcatcccggatagccctaagatcaagccctccatgtcaatggttgccaagatgctgcaaggtgagtgtgctgtgagtgacaggatcatgaggcctggcctgatcacagacgtcatggacctgaaagtcaggatggtagagccgatttagttcagcttgacatcatgctcgagcactgccgcaccggaccttgttggggatttcctcgattaaaatataagctccttgatatggttctgtaacatagttctgcaatgctcctttatttagttctttactttttttgttaagatatgaggtgtagcgatacaatatgtctactaacagcgtttgtgttcttgatagttcatttaggattgaatgaagttactggtatgaccttgtcgagactgaagtaaggagggatagagctaaaaactctcttggcacaactataaagttcaagctatatgggcgtgtttggatggcagcctcccatgcaactgcctggcaggcaaatgatcctagccacaccacaggcataggaaatcgaacggtcggcattgtttcctgggccagctgataaaatccattgaagtgcaagaggccgataaacttaggcgtatagtgctggatgctccatccactgtttgtctcttctcaccacaatatttccaatctgactatgttcttcattttgtccactgacagttatttgactacatgcattttgtatagggacatacacttaagcttctgtcagtttctgattggattgaaatgttccttactttgagcattaaggtgagcgctttaatccatatagtgaactaacctgttttttaagtttttaactctgctaccttcatggatttcatttgcatgaatatatgtttaagcttgatacttttttttcgttatgatattagctgatgtggattatgattataaattattgagatatagtggtgaggacaagtggtatcactaacgtgattagggagtttctacaatcatgtgcttgagatactgtcagtgcaaaaattgttgcatggtttcaatttggagttttggacagtgcacctctttgagaccgtagactgtaacaccaaactgtttgtctaggttcccctgttttgagtccttttgacgttgtgttatggagtttatgtgtttaattgtgcttcattgaatccttttatccgcatgcttgagggcagtaaattctatgcagaatgtgctcatggagtcaaaatcacaacgcacttcaatatagcattttgtagtatactacttctaattctaccatttcttgctttgctgtttctaattgctcgcttgcatgcttgactagctgcattccaaattgtgttatgtttcctgggatagtgaattccaaattgtgttatgtttgctgcatatatgatacaagtattgattttttaacaatgctaggacacatgaggtgtagctattgggcctctaacttggttatcatggttttgggccgtgggtagagcaggcaatgcaagtgcagtctggcacaatcctggtggtttggcattgagttatgttttcttttacttgataaaacaatcttgttccatcacttagtcaatagctcaatatgtccaccagttctgatgatccatgtctgcgcagtgtttcttttcacagtttgcgcttgcgaacatccgaaccccgttttcatcttgaattcaacttatgatgtatatcggacagttccaccacattctggcgccgccttcgtctgatcctggaggcaattggagccgctgcaagtcggatcctggtggatgcagcgcaacacagatcgcaaccctccaaggactgagaagtggaatgttgacatctctgagacagtctgaaagcaaaccgaaggcaggggtgttcatcaactcctgcttcgcgcattgctagagtgagctacaggacacatggttcgcaccaaattctccatccatatataacaagaaaattgcagaggtggtaggtgattggtactttgaaagaggagctgacgtggagattgactgcgcctatccctgtgattcacagtcttgtcgcaaccttataccaattgataaggctgaccatcctagattaaacttcaaagaccggtaccctgagccatacagagattctcatccgactgcccccgttgctgtgcatggatgtcaggtgtcattactgtaatgtagtggtgaaataggtagattaaaacaatgaaatttatatgtggctaggatcataaatgaattgcaaaattttttctcagaacagtataacacatatttgtacataagttgttgtgttattatatgtttccgttgcaacgcacgggcactcacctagtatatatatatatatatatatatatattacacctgggtgcattcaatatagagaatgc

SEQ ID NO: 33011 - DNA, 3399 bp, Zea Mays
gaggcgccagctccgcgcgtccgccgcagtgatgccgcgcgatgaaggccgcacgggagagacgctgggaaagccgctccttccggcgttgcagtgggggcgtccacagctgtgccatgcccccgccccgtccgagacgccgaccacgacccaggattctcgcttcccgtccacgtccgtgattttcccagcgaagctgaccacgcctccctgtacgcacctcccgacatcctcgccgacatgctcgcactcctgtccccgtctgagatcctcgcgtcggcgccttcggtggaagtccggaatcgcccggctctcctccaccgcgccgccagcctcactgagaagagttcatctgcctcctcctcaacgcttgaccccaccgccgctggatccaacaccctgccctcgtccttcttctccgacctactcaccagtgacgacgtgggcaccctggccagacgcacgccatggacagcaggtgggcaggaacaccttctacgtggatcctcttctcccgtgctcctcgacgcacgagagcgagctcggactggatcctctcctaccgctccatgcaggtgctcctccgcccgatcccaatgtaaaacctacagttttgttagatgttgctgccactgtttggagaagactcgcgctagaaagcggtactgggtgaaaactgcagagcgatctagagctcgcaagcctgccattgctctctgtagcaatagaaatcccccaacccacccacccacacaagttgcaattgccctcttacatctattttttggtggaacaactaaattgacattgaagaagttttttggagtgtgctcgttctgcaattagaagacttctgtaagatcattcttctctttgtttttttcatttagaacctatgttggttttctgattttcatggaccacataaatagttatgtattctgtttcatagattcatgtctatataacaatttatttgaaaggcatttatctgtgcagggagagttctataattattctggtttgtagtccgtgaatttatagtggattgcttgaggtacaaatttgtatataacttctattaagttgctcctaatttccttctatcgcttgtcattctattagatgatgcaattttttgaggtatagatagcaatttttgtattcaaacaaaacaaagaaacaagttatctttaattgacattctatcattgactatcagtgtttaagctatatatttgtgaagataaattgtttatacactaataactgagtttgatgttgtagatactgggtaacaggaatgcatgtttatgattttcgttttgaccttgcattgcatctacaatgaccagaggatgcaggtaaaaagttatttttattttctctgtattttgtctttttagacatttcttaaaccaatctttcctttgccagtctatggatccagttaatgtgtatggaaatccaatggaaggtgacatgattacaacagggacacctcttgttgtcccaccacttattgacatgattagcaatgacccaatttttgcccattgctgaagatgggatgcaggaggcctctatcaagtaggtcaattacctcattaacagggacacctcttgttgccccaccacttattgatatgattagcaatgacccaattttttgctcattgctgaagcatgggatgcaggaggcctctatcaagtaggtcaatttcctcactagaatgtttggttagagtggaatgtaaaggtctggacactctatgaattcgatgatctcgagagcatcattgataggacactaaagcgcgattttgacaccgaggaagcactctggttgcttaagataggtcttgtgtgcatcccggatagccctaagatcaagccctccatgtcaatggttgccaagatgctgcaaggtgagtgtgctgtgagtgacaggatcatgaggcctggcctgatcacagacgtcatggacctgaaagtcaggatggtagagccgatttagttcagcttgacatcatgctcgagcactgccgcaccggaccttgttggggatttcctcgattaaaatataagctccttgatatggttctgtaacatagttctgcaatgctcctttatttagttctttactttttttgttaagatatgaggtgtagcgatacaatatgtctactaacagcgtttgtgttcttgatagttcatttaggattgaatgaagttactggtatgaccttgtcgagactgaagtaaggagggatagagctaaaaactctcttggcacaactataaagttcaagctatatgggcgtgtttggatggcagcctcccatgcaactgcctggcaggcaaatgatcctagccacaccacaggcataggaaatcgaacggtcggcattgtttcctgggccagctgataaaatccattgaagtgcaagaggccgataaacttaggcgtatagtgctggatgctccatccactgtttgtctcttctcaccacaatatttccaatctgactatgttcttcattttgtccactgacagttatttgactacatgcattttgtatagggacatacacttaagcttctgtcagtttctgattggattgaaatgttccttactttgagcattaagtgtttcttttcacagtttgcgcttgcgaacatccgaaccccgttttcatcttgaattcaacttatgatgtatatcggacagttccaccacattctggcgccgccttcgtctgatcctggaggcaattggagccgctgcaagtcggatcctggtggatgcagcgcaacacagatcgcaaccctccaaggactgagaagtggaatgttgacatctctgagacagtctgaaagcaaaccgaaggcaggggtgttcatcaactcctgcttcgcgcattgctagagtgagctacaggacacatggttcgcaccaaattctccatccatatataacaagaaaattgcagaggtggtaggtgattggtactttgaaagaggagctgacgtggagattgactgcgcctatccctgtgattcacagtcttgtcgcaaccttataccaattgataaggaactgaggatgtattaggagttcggcagacgattatactcaattatcatcataataaaaaacactcttctaattgttgatgatgttatgttacttgcatcagatagcaaaccaccctattgtacaatctgttggtggaaacatgtttgtgttgtgtgttccaggttgtctgtttcttggtagccttttttggctgaattggtgatatacacaaaatctatttacttgttagactatactttgtattgcacccctgatatccaggccattgcttgtgttttctatgattcgttttaactgaa

SEQ ID NO: 33012 - DNA, 3399 bp, Zea Mays
gaggcgccagctccgcgcgtccgccgcagtgatgccgcgcgatgaaggccgcacgggagagacgctgggaaagccgctccttccggcgttgcagtgggggcgtccacagctgtgccatgcccccgccccgtccgagacgccgaccacgacccaggattctcgcttcccgtccacgtccgtgattttcccagcgaagctgaccacgcctccctgtacgcacctcccgacatcctcgccgacatgctcgcactcctgtccccgtctgagatcctcgcgtcggcgccttcggtggaagtccggaatcgcccggctctcctccaccgcgccgccagcctcactgagaagagttcatctgcctcctcctcaacgcttgaccccaccgccgctggatccaacaccctgccctcgtccttcttctccgacctactcaccagtgacgacgtgggcaccctggccagacgcacgccatggacagcaggtgggcaggaacaccttctacgtggatcctcttctcccgtgctcctcgacgcacgagagcgagctcggactggatcctctcctaccgctccatgcaggtgctcctccgcccgatcccaatgtaaaacctacagttttgttagatgttgctgccactgtttggagaagactcgcgctagaaagcggtactgggtgaaaactgcagagcgatctagagctcgcaagcctgccattgctctctgtagcaatagaaatcccccaacccacccacccacacaagttgcaattgccctcttacatctattttttggtggaacaactaaattgacattgaagaagttttttggagtgtgctcgttctgcaattagaagacttctgtaagatcattcttctctttgtttttttcatttagaacctatgttggttttctgattttcatggaccacataaatagttatgtattctgtttcatagattcatgtctatataacaatttatttgaaaggcatttatctgtgcagggagagttctataattattctggtttgtagtccgtgaatttatagtggattgcttgaggtacaaatttgtatataacttctattaagttgctcctaatttccttctatcgcttgtcattctattagatgatgcaattttttgaggtatagatagcaatttttgtattcaaacaaaacaaagaaacaagttatctttaattgacattctatcattgactatcagtgtttaagctatatatttgtgaagataaattgtttatacactaataactgagtttgatgttgtagatactgggtaacaggaatgcatgtttatgattttcgttttgaccttgcattgcatctacaatgaccagaggatgcagtctatggatccagttaatgtgtatggaaatccaatggaaggtgacatgattacaacagggacacctcttgttgtcccaccacttattgacatgattagcaatgacccaatttttgcccattgctgaagatgggatgcaggaggcctctatcaagtaggtcaattacctcattaacagggacacctcttgttgccccaccacttattgatatgattagcaatgacccaattttttgctcattgctgaagcatgggatgcaggaggcctctatcaagtaggtcaatttcctcactagaatgtttggttagagtggaatgtaaaggtctggacactctatgaattcgatgatctcgagagcatcattgataggacactaaagcgcgattttgacaccgaggaagcactctggttgcttaagataggtcttgtgtgcatcccggatagccctaagatcaagccctccatgtcaatggttgccaagatgctgcaaggtgagtgtgctgtgagtgacaggatcatgaggcctggcctgatcacagacgtcatggacctgaaagtcaggatggtagagccgatttagttcagcttgacatcatgctcgagcactgccgcaccggaccttgttggggatttcctcgattaaaatataagctccttgatatggttctgtaacatagttctgcaatgctcctttatttagttctttactttttttgttaagatatgaggtgtagcgatacaatatgtctactaacagcgtttgtgttcttgatagttcatttaggattgaatgaagttactggtatgaccttgtcgagactgaagtaaggagggatagagctaaaaactctcttggcacaactataaagttcaagctatatgggcgtgtttggatggcagcctcccatgcaactgcctggcaggcaaatgatcctagccacaccacaggcataggaaatcgaacggtcggcattgtttcctgggccagctgataaaatccattgaagtgcaagaggccgataaacttaggcgtatagtgctggatgctccatccactgtttgtctcttctcaccacaatatttccaatctgactatgttcttcattttgtccactgacagttatttgactacatgcattttgtatagggacatacacttaagcttctgtcagtttctgattggattgaaatgttccttactttgagcattaagagcaggcaatgcaagtgcagtctggcacaatcctggtggtttggcattgatgtttcttttcacagtttgcgcttgcgaacatccgaaccccgttttcatcttgaattcaacttatgatgtatatcggacagttccaccacattctggcgccgccttcgtctgatcctggaggcaattggagccgctgcaagtcggatcctggtggatgcagcgcaacacagatcgcaaccctccaaggactgagaagtggaatgttgacatctctgagacagtctgaaagcaaaccgaaggcaggggtgttcatcaactcctgcttcgcgcattgctagagtgagctacaggacacatggttcgcaccaaattctccatccatatataacaagaaaattgcagaggtggtaggtgattggtactttgaaagaggagctgacgtggagattgactgcgcctatccctgtgattcacagtcttgtcgcaaccttataccaattgataaggctgaccatcctagattaaacttcaaagaccggtaccctgagccatacagagattctcatccgactgcccccgttgctgtgcatggatgtcaggtgtcattactgtaatgtagtggtgaaataggtagattaaaacaatgaaatttatatgtggctaggatcataaatgaattgcaaaattttttctcagaacagtataacacatatttgtacataagttgttgtgttattatatgtttccgttgcaacgcacgggcactcacctagtatatatatatatatatatatatatattacacctgggtgcattcaatatagagaatgc

SEQ ID NO: 33013 - DNA, 2323 bp, Zea Mays
cgccagctccgcgcgtccgccgcagtgatgccgcgcgatgaaggccgcacgggagagacgctgggaaagccgctccttccggcgttgcagtgggggcgtccacagctgtgccatgcccccgccccgtccgagacgccgaccacgacccaggattctcgcttcccgtccacgtccgtgattttcccagcgaagctgaccacgcctccctgtacgcacctcccgacatcctcgccgacatgctcgcactcctgtccccgtctgagatcctcgcgtcggcgccttcggtggaagtccggaatcgcccggctctcctccaccgcgccgccagcctcactgagaagagttcatctgcctcctcctcaacgcttgaccccaccgccgctggatccaacaccctgccctcgtccttcttctccgacctactcaccagtgacgacgtgggcaccctggccagacgcacgccatggacagcaggtgggcaggaacaccttctacgtggatcctcttctcccgtgctcctcgacgcacgagagcgagctcggactggatcctctcctaccgctccatgcagggagagttctataattattctggtttgtagtccgtgaatttatagtggattgcttgagatactgggtaacaggaatgcatgtttatgattttcgttttgaccttgcattgcatctacaatgaccagaggatgcagtctatggatccagttaatgtgtatggaaatccaatggaaggtgacatgattacaacagggacacctcttgttgtcccaccacttattgacatgattagcaatgacccaatttttgcccattgctgaagatgggatgcaggaggcctctatcaagtaggtcaattacctcattaacagggacacctcttgttgccccaccacttattgatatgattagcaatgacccaattttttggtaatatatgaacatgattggttgttaaatatgcagagcagtttgtataataatcaactgcctcagcatattgtaatttcttggttcttgttctcactacttcattgtatttatagctcattgctgaagcatgggatgcaggaggcctctatcaagtaggtcaatttcctcactagaatgtttggttagagtggaatgtaaaggtctggacactctatgaattcgatgatctcgagagcatcattgataggacactaaagcgcgattttgacaccgaggaagcactctggttgcttaagataggtcttgtgtgcatcccggatagccctaagatcaagccctccatgtcaatggttgccaagatgctgcaagttcatttaggattgaatgaagttactggtatgaccttgtcgagactgaagtaaggagggatagagctaaaaactctcttggcacaactataaagttcaagctatatgggcgtgtttggatggcagcctcccatgcaactgcctggcaggcaaatgatcctagccacaccacaggcataggaaatcgaacggtcggcattgtttcctgggccagctgataaaatccattgaagtgcaagaggccgataaacttaggcgtatagtgctggatgctccatccactggacatacacttaagcttctgtcagtttctgattggattgaaatgttccttactttgagcattaagacagttccaccacattctggcgccgccttcgtctgatcctggaggcaattggagccgctgcaagtcggatcctggtggatgcagcgcaacacagatcgcaaccctccaaggactgagaagtggaatgttgacatctctgagacagtctgaaagcaaaccgaaggcaggggtgttcatcaactcctgcttcgcgcattgctagagtgagctacaggacacatggttcgcaccaaattctccatccatatataacaagaggtggtaggtgattggtactttgaaagaggagctgacgtggagattgactgcgcctatccctgtgattcacagtcttgtcgcaaccttataccaattgataaggaactgaggatgtattaggagttcggcagacgattatactcaattatcatcataataaaaaacactcttctaattgttgatgatgttatgttacttgcatcagatagcaaaccaccctattgtacaatctgttggtggaaacatgtttgtgttgtgtgttccaggttgtctgtttcttggtagccttttttggctgaattggtgatatacacaaaatctatttacttgttagactatactttgtattgcacccctgatatccaggccattgcttgtgttttctatgattcgttttaactgaa

SEQ ID NO: 33014 - DNA, 2659 bp, Zea Mays
cgccagctccgcgcgtccgccgcagtgatgccgcgcgatgaaggccgcacgggagagacgctgggaaagccgctccttccggcgttgcagtgggggcgtccacagctgtgccatgcccccgccccgtccgagacgccgaccacgacccaggattctcgcttcccgtccacgtccgtgattttcccagcgaagctgaccacgcctccctgtacgcacctcccgacatcctcgccgacatgctcgcactcctgtccccgtctgagatcctcgcgtcggcgccttcggtggaagtccggaatcgcccggctctcctccaccgcgccgccagcctcactgagaagagttcatctgcctcctcctcaacgcttgaccccaccgccgctggatccaacaccctgccctcgtccttcttctccgacctactcaccagtgacgacgtgggcaccctggccagacgcacgccatggacagcaggtgggcaggaacaccttctacgtggatcctcttctcccgtgctcctcgacgcacgagagcgagctcggactggatcctctcctaccgctccatgcagggagagttctataattattctggtttgtagtccgtgaatttatagtggattgcttgagatactgggtaacaggaatgcatgtttatgattttcgttttgaccttgcattgcatctacaatgaccagaggatgcagtctatggatccagttaatgtgtatggaaatccaatggaaggtgacatgattacaacagggacacctcttgttgtcccaccacttattgacatgattagcaatgacccaatttttgcccattgctgaagatgggatgcaggaggcctctatcaagtaggtcaattacctcattaacagggacacctcttgttgccccaccacttattgatatgattagcaatgacccaattttttggtaatatatgaacatgattggttgttaaatatgcagagcagtttgtataataatcaactgcctcagcatattgtaatttcttggttcttgttctcactacttcattgtatttatagctcattgctgaagcatgggatgcaggaggcctctatcaagtaggtcaatttcctcactagaatgtttggttagagtggaatgtaaaggtctggacactctatgaattcgatgatctcgagagcatcattgataggacactaaagcgcgattttgacaccgaggaagcactctggttgcttaagataggtcttgtgtgcatcccggatagccctaagatcaagccctccatgtcaatggttgccaagatgctgcaagttcatttaggattgaatgaagttactggtatgaccttgtcgagactgaagtaaggagggatagagctaaaaactctcttggcacaactataaagttcaagctatatgggcgtgtttggatggcagcctcccatgcaactgcctggcaggcaaatgatcctagccacaccacaggcataggaaatcgaacggtcggcattgtttcctgggccagctgataaaatccattgaagtgcaagaggccgataaacttaggcgtatagtgctggatgctccatccactggacatacacttaagcttctgtcagtttctgattggattgaaatgttccttactttgagcattaaggcaatgcaagtgcagtctggcacaatcctggtggtttggcattgagttatgttttcttttacttgataaaacaatcttgttccatcacttagtcaatagctcaatatgtccaccagttctgatgatccatgtctgcgcagtgtttcttttcacagtttgcgcttgcgaacatccgaaccccgttttcatcttgaattcaacttatgatgtatatcggacagttccaccacattctggcgccgccttcgtctgatcctggaggcaattggagccgctgcaagtcggatcctggtggatgcagcgcaacacagatcgcaaccctccaaggactgagaagtggaatgttgacatctctgagacagtctgaaagcaaaccgaaggcaggggtgttcatcaactcctgcttcgcgcattgctagagtgagctacaggacacatggttcgcaccaaattctccatccatatataacaagaaaattgcagaggtggtaggtgattggtactttgaaagaggagctgacgtggagattgactgcgcctatccctgtgattcacagtcttgtcgcaaccttataccaattgataaggttagttgcttccgtgaaaagaggttaactgttttggcaaaataattctactggttagtaactcttctgcctaaaatggaactgacaaaaaattcatcatttgacataggaactgaggatgtattaggagttcggcagacgattatactcaattatcatcataataaaaaacactcttctaattgttgatgatgttatgttacttgcatcagatagcaaaccaccctattgtacaatctgttggtggaaacatgtttgtgttgtgtgttccaggttgtctgtttcttggtagccttttttggctgaattggtgatatacacaaaatctatttacttgttagactatactttgtattgcacccctgatatccaggccattgcttgtgttttctatgattcgttttaactgaa

SEQ ID NO: 33015 - DNA, 2940 bp, Zea Mays
cgccagctccgcgcgtccgccgcagtgatgccgcgcgatgaaggccgcacgggagagacgctgggaaagccgctccttccggcgttgcagtgggggcgtccacagctgtgccatgcccccgccccgtccgagacgccgaccacgacccaggattctcgcttcccgtccacgtccgtgattttcccagcgaagctgaccacgcctccctgtacgcacctcccgacatcctcgccgacatgctcgcactcctgtccccgtctgagatcctcgcgtcggcgccttcggtggaagtccggaatcgcccggctctcctccaccgcgccgccagcctcactgagaagagttcatctgcctcctcctcaacgcttgaccccaccgccgctggatccaacaccctgccctcgtccttcttctccgacctactcaccagtgacgacgtgggcaccctggccagacgcacgccatggacagcaggtgggcaggaacaccttctacgtggatcctcttctcccgtgctcctcgacgcacgagagcgagctcggactggatcctctcctaccgctccatgcaggtgctcctccgcccgatcccaatgtaaaacctacagttttgttagatgttgctgccactgtttggagaagactcgcgctagaaagcggtactgggtgaaaactgcagagcgatctagagctcgcaagcctgccattgctctctgtagcaatagaaatcccccaacccacccacccacacaagttgcaattgccctcttacatctattttttggtggaacaactaaattgacattgaagaagttttttggagtgtgctcgttctgcaattagaagacttctatactgggtaacaggaatgcatgtttatgattttcgttttgaccttgcattgcatctacaatgaccagaggatgcagtctatggatccagttaatgtgtatggaaatccaatggaaggtgacatgattacaacagggacacctcttgttgtcccaccacttattgacatgattagcaatgacccaatttttgcccattgctgaagatgggatgcaggaggcctctatcaagtaggtcaattacctcattaacagggacacctcttgttgccccaccacttattgatatgattagcaatgacccaattttttgctcattgctgaagcatgggatgcaggaggcctctatcaagtaggtcaatttcctcactagaatgtttggttagagtggaatgtaaaggtctggacactctatgaattcgatgatctcgagagcatcattgataggacactaaagcgcgattttgacaccgaggaagcactctggttgcttaagataggtcttgtgtgcatcccggatagccctaagatcaagccctccatgtcaatggttgccaagatgctgcaaggtgagtgtgctgtgagtgacaggatcatgaggcctggcctgatcacagacgtcatggacctgaaagtcaggatggtagagccgatttagttcagcttgacatcatgctcgagcactgccgcaccggaccttgttggggatttcctcgattaaaatataagctccttgatatggttctgtaacatagttctgcaatgctcctttatttagttctttactttttttgttaagatatgaggtgtagcgatacaatatgtctactaacagcgtttgtgttcttgatagttcatttaggattgaatgaagttactggtatgaccttgtcgagactgaagtaaggagggatagagctaaaaactctcttggcacaactataaagttcaagctatatgggcgtgtttggatggcagcctcccatgcaactgcctggcaggcaaatgatcctagccacaccacaggcataggaaatcgaacggtcggcattgtttcctgggccagctgataaaatccattgaagtgcaagaggccgataaacttaggcgtatagtgctggatgctccatccactggacatacacttaagcttctgtcagtttctgattggattgaaatgttccttactttgagcattaaggcaatgcaagtgcagtctggcacaatcctggtggtttggcattgagttatgttttcttttacttgataaaacaatcttgttccatcacttagtcaatagctcaatatgtccaccagttctgatgatccatgtctgcgcagtgtttcttttcacagtttgcgcttgcgaacatccgaaccccgttttcatcttgaattcaacttatgatgtatatcggacagttccaccacattctggcgccgccttcgtctgatcctggaggcaattggagccgctgcaagtcggatcctggtggatgcagcgcaacacagatcgcaaccctccaaggactgagaagtggaatgttgacatctctgagacagtctgaaagcaaaccgaaggcaggggtgttcatcaactcctgcttcgcgcattgctagagtgagctacaggacacatggttcgcaccaaattctccatccatatataacaagaaaattgcagaggtggtaggtgattggtactttgaaagaggagctgacgtggagattgactgcgcctatccctgtgattcacagtcttgtcgcaaccttataccaattgataaggaactgaggatgtattaggagttcggcagacgattatactcaattatcatcataataaaaaacactcttctaattgttgatgatgttatgttacttgcatcagatagcaaaccaccctattgtacaatctgttggtggaaacatgtttgtgttgtgtgttccaggttgtctgtttcttggtagccttttttggctgaattggtgatatacacaaaatctatttacttgttagactatactttgtattgcacccctgatatccaggccattgcttgtgttttctatgattcgttttaactgaa

SEQ ID NO: 33016 - DNA, 2215 bp, Zea Mays
cgccagctccgcgcgtccgccgcagtgatgccgcgcgatgaaggccgcacgggagagacgctgggaaagccgctccttccggcgttgcagtgggggcgtccacagctgtgccatgcccccgccccgtccgagacgccgaccacgacccaggattctcgcttcccgtccacgtccgtgattttcccagcgaagctgaccacgcctccctgtacgcacctcccgacatcctcgccgacatgctcgcactcctgtccccgtctgagatcctcgcgtcggcgccttcggtggaagtccggaatcgcccggctctcctccaccgcgccgccagcctcactgagaagagttcatctgcctcctcctcaacgcttgaccccaccgccgctggatccaacaccctgccctcgtccttcttctccgacctactcaccagtgacgacgtgggcaccctggccagacgcacgccatggacagcaggtgggcaggaacaccttctacgtggatcctcttctcccgtgctcctcgacgcacgagagcgagctcggactggatcctctcctaccgctccatgcagggagagttctataattattctggtttgtagtccgtgaatttatagtggattgcttgagatactgggtaacaggaatgcatgtttatgattttcgttttgaccttgcattgcatctacaatgaccagaggatgcagtctatggatccagttaatgtgtatggaaatccaatggaaggtgacatgattacaacagggacacctcttgttgtcccaccacttattgacatgattagcaatgacccaatttttgcccattgctgaagatgggatgcaggaggcctctatcaagtaggtcaattacctcattaacagggacacctcttgttgccccaccacttattgatatgattagcaatgacccaattttttggaggcctctatcaagtaggtcaatttcctcactagaatgtttggttagagtggaatgtaaaggtctggacactctatgaattcgatgatctcgagagcatcattgataggacactaaagcgcgattttgacaccgaggaagcactctggttgcttaagataggtcttgtgtgcatcccggatagccctaagatcaagccctccatgtcaatggttgccaagatgctgcaagttcatttaggattgaatgaagttactggtatgaccttgtcgagactgaagtaaggagggatagagctaaaaactctcttggcacaactataaagttcaagctatatgggcgtgtttggatggcagcctcccatgcaactgcctggcaggcaaatgatcctagccacaccacaggcataggaaatcgaacggtcggcattgtttcctgggccagctgataaaatccattgaagtgcaagaggccgataaacttaggcgtatagtgctggatgctccatccactggacatacacttaagcttctgtcagtttctgattggattgaaatgttccttactttgagcattaagacagttccaccacattctggcgccgccttcgtctgatcctggaggcaattggagccgctgcaagtcggatcctggtggatgcagcgcaacacagatcgcaaccctccaaggactgagaagtggaatgttgacatctctgagacagtctgaaagcaaaccgaaggcaggggtgttcatcaactcctgcttcgcgcattgctagagtgagctacaggacacatggttcgcaccaaattctccatccatatataacaagaaaattgcagaggtggtaggtgattggtactttgaaagaggagctgacgtggagattgactgcgcctatccctgtgattcacagtcttgtcgcaaccttataccaattgataaggctgaccatcctagattaaacttcaaagaccggtaccctgagccatacagagattctcatccgactgcccccgttgctgtgcatggatgtcaggtgtcattactgtaatgtagtggtgaaataggtagattaaaacaatgaaatttatatgtggctaggatcataaatgaattgcaaaattttttctcagaacagtataacacatatttgtacataagttgttgtgttattatatgtttccgttgcaacgcacgggcactcacctagtatatatatatatatatatatatatattacacctgggtgcattcaatatagagaatgc

SEQ ID NO: 33017 - DNA, 2618 bp, Zea Mays
cgccagctccgcgcgtccgccgcagtgatgccgcgcgatgaaggccgcacgggagagacgctgggaaagccgctccttccggcgttgcagtgggggcgtccacagctgtgccatgcccccgccccgtccgagacgccgaccacgacccaggattctcgcttcccgtccacgtccgtgattttcccagcgaagctgaccacgcctccctgtacgcacctcccgacatcctcgccgacatgctcgcactcctgtccccgtctgagatcctcgcgtcggcgccttcggtggaagtccggaatcgcccggctctcctccaccgcgccgccagcctcactgagaagagttcatctgcctcctcctcaacgcttgaccccaccgccgctggatccaacaccctgccctcgtccttcttctccgacctactcaccagtgacgacgtgggcaccctggccagacgcacgccatggacagcaggtgggcaggaacaccttctacgtggatcctcttctcccgtgctcctcgacgcacgagagcgagctcggactggatcctctcctaccgctccatgcagggagagttctataattattctggtttgtagtccgtgaatttatagtggattgcttgagatactgggtaacaggaatgcatgtttatgattttcgttttgaccttgcattgcatctacaatgaccagaggatgcagtctatggatccagttaatgtgtatggaaatccaatggaaggtgacatgattacaacagggacacctcttgttgtcccaccacttattgacatgattagcaatgacccaatttttgcccattgctgaagatgggatgcaggaggcctctatcaacatgggatgcaggaggcctctatcaagtaggtcaatttcctcactagaatgtttggttagagtggaatgtaaaggtctggacactctatgaattcgatgatctcgagagcatcattgataggacactaaagcgcgattttgacaccgaggaagcactctggttgcttaagataggtcttgtgtgcatcccggatagccctaagatcaagccctccatgtcaatggttgccaagatgctgcaaggtgagtgtgctgtgagtgacaggatcatgaggcctggcctgatcacagacgtcatggacctgaaagtcaggatggtagagccgatttagttcagcttgacatcatgctcgagcactgccgcaccggaccttgttggggatttcctcgattaaaatataagctccttgatatggttctgtaacatagttctgcaatgctcctttatttagttctttactttttttgttaagatatgaggtgtagcgatacaatatgtctactaacagcgtttgtgttcttgatagttcatttaggattgaatgaagttactggtatgaccttgtcgagactgaagtaaggagggatagagctaaaaactctcttggcacaactataaagttcaagctatatgggcgtgtttggatggcagcctcccatgcaactgcctggcaggcaaatgatcctagccacaccacaggcataggaaatcgaacggtcggcattgtttcctgggccagctgataaaatccattgaagtgcaagaggccgataaacttaggcgtatagtgctggatgctccatccactggacatacacttaagcttctgtcagtttctgattggattgaaatgttccttactttgagcattaaggacacatgaggtgtagctattgggcctctaacttggttatcatggttttgggccgtgggtagagcaggcaatgcaagtgcagtctggcacaatcctggtggtttggcattgatgtttcttttcacagtttgcgcttgcgaacatccgaaccccgttttcatcttgaattcaacttatgatgtatatcggacagttccaccacattctggcgccgccttcgtctgatcctggaggcaattggagccgctgcaagtcggatcctggtggatgcagcgcaacacagatcgcaaccctccaaggactgagaagtggaatgttgacatctctgagacagtctgaaagcaaaccgaaggcaggggtgttcatcaactcctgcttcgcgcattgctagagtgagctacaggacacatggttcgcaccaaattctccatccatatataacaagaaaattgcagaggtggtaggtgattggtactttgaaagaggagctgacgtggagattgactgcgcctatccctgtgattcacagtcttgtcgcaaccttataccaattgataaggctgaccatcctagattaaacttcaaagaccggtaccctgagccatacagagattctcatccgactgcccccgttgctgtgcatggatgtcaggtgtcattactgtaatgtagtggtgaaataggtagattaaaacaatgaaatttatatgtggctaggatcataaatgaattgcaaaattttttctcagaacagtataacacatatttgtacataagttgttgtgttattatatgtttccgttgcaacgcacgggcactcacctagtatatatatatatatatatatatatattacacctgggtgcattcaatatagagaatgc

SEQ ID NO: 33018 - DNA, 2572 bp, Zea Mays
cgccagctccgcgcgtccgccgcagtgatgccgcgcgatgaaggccgcacgggagagacgctgggaaagccgctccttccggcgttgcagtgggggcgtccacagctgtgccatgcccccgccccgtccgagacgccgaccacgacccaggattctcgcttcccgtccacgtccgtgattttcccagcgaagctgaccacgcctccctgtacgcacctcccgacatcctcgccgacatgctcgcactcctgtccccgtctgagatcctcgcgtcggcgccttcggtggaagtccggaatcgcccggctctcctccaccgcgccgccagcctcactgagaagagttcatctgcctcctcctcaacgcttgaccccaccgccgctggatccaacaccctgccctcgtccttcttctccgacctactcaccagtgacgacgtgggcaccctggccagacgcacgccatggacagcaggtgggcaggaacaccttctacgtggatcctcttctcccgtgctcctcgacgcacgagagcgagctcggactggatcctctcctaccgctccatgcagatactgggtaacaggaatgcatgtttatgattttcgttttgaccttgcattgcatctacaatgaccagaggatgcagtctatggatccagttaatgtgtatggaaatccaatggaaggtgacatgattacaacagggacacctcttgttgtcccaccacttattgacatgattagcaatgacccaatttttgcccattgctgaagatgggatgcaggaggcctctatcaagtaggtcaattacctcattaacagggacacctcttgttgccccaccacttattgatatgattagcaatgacccaattttttggtaatatatgaacatgattggttgttaaatatgcagagcagtttgtataataatcaactgcctcagcatattgtaatttcttggttcttgttctcactacttcattgtatttatagctcattgctgaagcatgggatgcaggaggcctctatcaagtaggtcaatttcctcactagaatgtttggttagagtggaatgtaaaggtctggacactctatgaattcgatgatctcgagagcatcattgataggacactaaagcgcgattttgacaccgaggaagcactctggttgcttaagataggtcttgtgtgcatcccggatagccctaagatcaagccctccatgtcaatggttgccaagatgctgcaaggtgagtgtgctgtgagtgacaggatcatgaggcctggcctgatcacagacgtcatggacctgaaagtcaggatggtagagccgatttagttcagcttgacatcatgctcgagcactgccgcaccggaccttgttggggatttcctcgattaaaatataagctccttgatatggttctgtaacatagttctgcaatgctcctttatttagttctttactttttttgttaagatatgaggtgtagcgatacaatatgtctactaacagcgtttgtgttcttgatagttcatttaggattgaatgaagttactggtatgaccttgtcgagactgaagtaaggagggatagagctaaaaactctcttggcacaactataaagttcaagctatatgggcgtgtttggatggcagcctcccatgcaactgcctggcaggcaaatgatcctagccacaccacaggcataggaaatcgaacggtcggcattgtttcctgggccagctgataaaatccattgaagtgcaagaggccgataaacttaggcgtatagtgctggatgctccatccactggacatacacttaagcttctgtcagtttctgattggattgaaatgttccttactttgagcattaagacagttccaccacattctggcgccgccttcgtctgatcctggaggcaattggagccgctgcaagtcggatcctggtggatgcagcgcaacacagatcgcaaccctccaaggactgagaagtggaatgttgacatctctgagacagtctgaaagcaaaccgaaggcaggggtgttcatcaactcctgcttcgcgcattgctagagtgagctacaggacacatggttcgcaccaaattctccatccatatataacaagaggtggtaggtgattggtactttgaaagaggagctgacgtggagattgactgcgcctatccctgtgattcacagtcttgtcgcaaccttataccaattgataaggctgaccatcctagattaaacttcaaagaccggtaccctgagccatacagagattctcatccgactgcccccgttgctgtgcatggatgtcaggtgtcattactgtaatgtagtggtgaaataggtagattaaaacaatgaaatttatatgtggctaggatcataaatgaattgcaaaattttttctcagaacagtataacacatatttgtacataagttgttgtgttattatatgtttccgttgcaacgcacgggcactcacctagtatatatatatatatatatatatatattacacctgggtgcattcaatatagagaatgc

SEQ ID NO: 33019 - DNA, 2630 bp, Zea Mays
cgccagctccgcgcgtccgccgcagtgatgccgcgcgatgaaggccgcacgggagagacgctgggaaagccgctccttccggcgttgcagtgggggcgtccacagctgtgccatgcccccgccccgtccgagacgccgaccacgacccaggattctcgcttcccgtccacgtccgtgattttcccagcgaagctgaccacgcctccctgtacgcacctcccgacatcctcgccgacatgctcgcactcctgtccccgtctgagatcctcgcgtcggcgccttcggtggaagtccggaatcgcccggctctcctccaccgcgccgccagcctcactgagaagagttcatctgcctcctcctcaacgcttgaccccaccgccgctggatccaacaccctgccctcgtccttcttctccgacctactcaccagtgacgacgtgggcaccctggccagacgcacgccatggacagcaggtgggcaggaacaccttctacgtggatcctcttctcccgtgctcctcgacgcacgagagcgagctcggactggatcctctcctaccgctccatgcagatactgggtaacaggaatgcatgtttatgattttcgttttgaccttgcattgcatctacaatgaccagaggatgcagtctatggatccagttaatgtgtatggaaatccaatggaaggtgacatgattacaacagggacacctcttgttgtcccaccacttattgacatgattagcaatgacccaatttttgctcattgctgaagcatgggatgcaggaggcctctatcaagtaggtcaatttcctcactagaatgtttggttagagtggaatgtaaaggtctggacactctatgaattcgatgatctcgagagcatcattgataggacactaaagcgcgattttgacaccgaggaagcactctggttgcttaagataggtcttgtgtgcatcccggatagccctaagatcaagccctccatgtcaatggttgccaagatgctgcaaggtgagtgtgctgtgagtgacaggatcatgaggcctggcctgatcacagacgtcatggacctgaaagtcaggatggtagagccgatttagttcagcttgacatcatgctcgagcactgccgcaccggaccttgttggggatttcctcgattaaaatataagctccttgatatggttctgtaacatagttctgcaatgctcctttatttagttctttactttttttgttaagatatgaggtgtagcgatacaatatgtctactaacagcgtttgtgttcttgatagttcatttaggattgaatgaagttactggtatgaccttgtcgagactgaagtaaggagggatagagctaaaaactctcttggcacaactataaagttcaagctatatgggcgtgtttggatggcagcctcccatgcaactgcctggcaggcaaatgatcctagccacaccacaggcataggaaatcgaacggtcggcattgtttcctgggccagctgataaaatccattgaagtgcaagaggccgataaacttaggcgtatagtgctggatgctccatccactggacatacacttaagcttctgtcagtttctgattggattgaaatgttccttactttgagcattaaggacacatgaggtgtagctattgggcctctaacttggttatcatggttttgggccgtgggtagagcaggcaatgcaagtgcagtctggcacaatcctggtggtttggcattgagttatgttttcttttacttgataaaacaatcttgttccatcacttagtcaatagctcaatatgtccaccagttctgatgatccatgtctgcgcagtgtttcttttcacagtttgcgcttgcgaacatccgaaccccgttttcatcttgaattcaacttatgatgtatatcggacagttccaccacattctggcgccgccttcgtctgatcctggaggcaattggagccgctgcaagtcggatcctggtggatgcagcgcaacacagatcgcaaccctccaaggactgagaagtggaatgttgacatctctgagacagtctgaaagcaaaccgaaggcaggggtgttcatcaactcctgcttcgcgcattgctagagtgagctacaggacacatggttcgcaccaaattctccatccatatataacaagaaaattgcagaggtggtaggtgattggtactttgaaagaggagctgacgtggagattgactgcgcctatccctgtgattcacagtcttgtcgcaaccttataccaattgataaggctgaccatcctagattaaacttcaaagaccggtaccctgagccatacagagattctcatccgactgcccccgttgctgtgcatggatgtcaggtgtcattactgtaatgtagtggtgaaataggtagattaaaacaatgaaatttatatgtggctaggatcataaatgaattgcaaaattttttctcagaacagtataacacatatttgtacataagttgttgtgttattatatgtttccgttgcaacgcacgggcactcacctagtatatatatatatatatatatatatattacacctgggtgcattcaatatagagaatgc

SEQ ID NO: 33020 - DNA, 1240 bp, Zea Mays
ttacaaactcaaataactccgccgtgcgcccgcctatctacaatcttttaccgtgctgccgcagaggtatcgtcctcaccatccccgtaggaagccgaagtacagccagaagcgtcgtcacaactcacaagcactgatcatggccggagcaagagatggaggtggaggcgctgcaggccatcctcatggacgacatcaaggagatcgacccaagtgagagtgggatcgctaccaccgcccggtgcttccagatcctactctctcctcaggatgatgattttgacgagtcagcttatgtcccagttcaactggccctgatttttgcgcacactgagaagtaccctgatgaacctccggtactgaatgtcaaaagtgtacgagggattaaaccacatgatcttgcatccctaaaggaaaagcttcagcgagaggcaacagagaatcttggcatggctatggtctacactcttgtttcatcagccaaagagtggctaagtgagaaatatggtcagaatggtggtgatgaggaacctgaagaatctgaagcggaaaaagaggaggttattataccgcatggtgaagctgttactgtggagagctttctggcttggagagaacgctttgaagctgagttggccttacagcgtgctaagtaaaatttgtattttgtttacatattaagtttttttatgatcagatggaatctcttgtttacttgtgatatcttccatctaatggtgtttgattcccatattatataagtacccaaatctgtgtttagatgatcttttgcattttctgggcacacagacttatgccagattcagctcttacagccacaaaggaaaagaaactcacgggacggcagtattttgaaagtggaaggcatgcagtgaaaggagcaagcacagttgctgatgaagatgaagaagaggaggaagacattgatttcgatgatgattttgaagacgacgaagaggacatgcttgagcattatttagctgaacaatcagggaagtcaacagcttaaccttcttggccaaagaaactctatcaagggggctgtggttctcattaatatatatatgctgaaggagttagaagaccaagctgtaatttactgtattttttatcggctactacatgtgtgttttgcctttgccatgtggagcatgttgcatggctgggacaaaacaacgacgataataacaaagtccaaaaattctggggtgtgttaaag

SEQ ID NO: 33021 - DNA, 3294 bp, Zea Mays
gcagggaggatctgggggatggggatcggtggagcgggcggggggaacagtggtttgtgcgtgcacggagggggccgagcgagggcatggctgagcgagcgaggatcgggtgctggcgcgtgctcgttggcggagggggaggcaaatccgccatgcgcgggcatgcgactggctgtgcgcggagggggccaagcgggatggaggcaaaatccgctgcacccgccatccatggcagcatttgcgggggcaggggcctgcggattgtggagatcgcgcccttccatcgacgatggaggctggcgggcgatgtgggagagggggtggggtcatggtgtagcccctggtggacgcctggggaggcacgatttctccgtaaaccatggatggtagtcttctaggagagcgtggagaaggatggaggttggtgcttcgccaatgatggaaaccttgcccgaagccttgattgaaggttaggccgcatggattgcgcgagcgaggccgatatggtggggagcgggaattgcgcatggattgcgccgttgaaggaaggtcgggggatgcggggcggggtgcggccgcgagcgggatgcggggcggggtgtgccagcggtagaacgtgcaccatccgaggagtgtggacgcctgtattatacacataagtagtagtagagataggagagagaaaaagagattgagcgaaacaaccttgcatcaccgttttgaggaaatgacacaggcctttttcctttttcagtctagtcgcgaacgagcgtgccgcgccgcgtgcactctcacacacacacagagagagagagagagagagagagagagagagagagagagagagagagagagagagagagagagagagagagagagagagagagagagagagagagcgcaacgcgaaaagccgaaaacccaaatcgagtttcctgccggcctgtccaatttctgtctaactcccagtcccagacccagacccagagaagatcagaagaagggggaagacagctcgtgcttcgacaggcgtcagccctagcgcagcttcccggcgacggcgatgagcctgggagctgaggtgatcgagctctccagcgacgaagacgaggagcctgtgcccagcactaccgctctcatccaccacgccccctcctcccctcccgacgtcaagccgcacctgctcgccgacgtcgatgtgaagccgctgcttcttctcccgccgccgctccaccccccgggctacggcgcgctcgtgcccgtgaagaccgaggagcccgtgcccgtggccaccgtctcgtcaccgcccagggcgctcccgccgccgcgcctctgccgccagttctggaagtccggcgactacgtcgtcgcgcgccgcaaccccgatgtggccggccccggtgggcggaaccggttgcggataaaccccaagtttctgcactccaatgcgacttcccacaagtgggcttttggcgccattgccgagctccttgacaatgcaatcgatgaggtgaacaatggggcaacatttgtccgtgttaataaatttaaaaacccacgagatgggaacccctcattgttggttcaagatgatggaggggggatggatcctgaggcactgagacgttgcatgagcttcggattttcagataaacagtctgatgctttcattgggcaatatggcaatggtttcaagactagtacgatgcggcttggagcagatgtgattgtttttacacaaaaccaaaataactgggtgccaactagaagtatcggccttctttcttacacatttttgatggaaacaggttgcgatgatgtgctggtgccaacggtagactatcagtatgatctaacaacaacttcatatgttcagatgttgcgtcatgatcagaagctcttctcttctaatttggcaatccttctcaaatggtcccctttttctactgaagctgagttgcttaaacaatttgatgatatgggagatcatggaacaaagataattgtattcaacctctggttcaatgatgatggggatatggagcttgatttcaactctgacaaaaaggatatcctcattactggggcccacaagaaggtgaaaacaaacagtttggacaagattgctgcacagaactacgtctcaactcggcttcgctattctcttagagcatatgcatctatcttgtatcttcatgtacctgatactttcagaattatcctgcggggatgtgatgtggaaccacataatgtagttaatgatttgatgtatcgggagtgcgtgttgtataaaccacaaattgctggacttacagagtcatcggtaatcacaaccattgggtttgttaaaggtgcaccagatatagatgtacaagggtttaatgtatatcacaaaaaccgtctaatattgcccttctggaaagttgcaaacaactcatacgggaaaggacgaggagttgttggcattctggaggccaactttatcaaacctacccatgacaagcaggattttgagaagtcagtcctttatcaaagacttgagttccgcttgaaagaaatgacttacgaatactggagaactgtgcatcattatattaaggagaataagaatggtctaaggtagaccaaagtacaagctgccctagaaggcaggaagaggggggacacaaggaaacaccaaaactaaatagaagagagagacggggggcaccagttccaacaacattcaaattaaggccacagctgcctaagatcctttgcacccgccattctccaaagcttaacatcatcttgaattgttcttgttatgaggaatgcattaatgccataaacgaattcattcctgaactaattctttttgcagggaccttcattgccatcgtgttggatatgacaacaaaaaattacctaaagcaacccgtgctattaatcgtgccaatcatatgaacggtggcagttccccaacaagtgctccacctcggttgcttgcagttgatattccaacaagcagctctagtatacctagattatcagcctctgcagcaagagaaaagatcagtagtctcgattctcttcccaagagcatgattggattgaagaggaagtttaatcctttcggtgctgtggcggccagtgctgatcaggatggactacatcatatggataaaatagtgtagcaccccgtccactcccggaccggcggtacttctggcagctctttaggatcatatattgtccccacagatcaacacgagtcttttgtgcgcattttgccctcactcacgcgcacctgag

SEQ ID NO: 33022 - DNA, 3531 bp, Zea Mays
gcagggaggatctgggggatggggatcggtggagcgggcggggggaacagtggtttgtgcgtgcacggagggggccgagcgagggcatggctgagcgagcgaggatcgggtgctggcgcgtgctcgttggcggagggggaggcaaatccgccatgcgcgggcatgcgactggctgtgcgcggagggggccaagcgggatggaggcaaaatccgctgcacccgccatccatggcagcatttgcgggggcaggggcctgcggattgtggagatcgcgcccttccatcgacgatggaggctggcgggcgatgtgggagagggggtggggtcatggtgtagcccctggtggacgcctggggaggcacgatttctccgtaaaccatggatggtagtcttctaggagagcgtggagaaggatggaggttggtgcttcgccaatgatggaaaccttgcccgaagccttgattgaaggttaggccgcatggattgcgcgagcgaggccgatatggtggggagcgggaattgcgcatggattgcgccgttgaaggaaggtcgggggatgcggggcggggtgcggccgcgagcgggatgcggggcggggtgtgccagcggtagaacgtgcaccatccgaggagtgtggacgcctgtattatacacataagtagtagtagagataggagagagaaaaagagattgagcgaaacaaccttgcatcaccgttttgaggaaatgacacaggcctttttcctttttcagtctagtcgcgaacgagcgtgccgcgccgcgtgcactctcacacacacacagagagagagagagagagagagagagagagagagagagagagagagagagagagagagagagagagagagagagagagagagagagagagagagagcgcaacgcgaaaagccgaaaacccaaatcgagtttcctgccggcctgtccaatttctgtctaactcccagtcccagacccagacccagagaagatcagaagaagggggaagacagctcgtgcttcgacaggcgtcagccctagcgcagcttcccggcgacggcgatgagcctgggagctgaggtgatcgagctctccagcgacgaagacgaggagcctgtgcccagcactaccgctctcatccaccacgccccctcctcccctcccgacgtcaagccgcacctgctcgccgacgtcgatgtgaagccgctgcttcttctcccgccgccgctccaccccccgggctacggcgcgctcgtgcccgtgaagaccgaggagcccgtgcccgtggccaccgtctcgtcaccgcccagggcgctcccgccgccgcgcctctgccgccagttctggaagtccggcgactacgtcgtcgcgcgccgcaaccccgatgtggccggccccggtgggcggaaccggttgcggataaaccccaagtttctgcactccaatgcgacttcccacaagtgggcttttggcgccattgccgagctccttgacaatgcaatcgatgaggtgaacaatggggcaacatttgtccgtgttaataaatttaaaaacccacgagatgggaacccctcattgttggttcaagatgatggaggggggatggatcctgaggcactgagacgttgcatgagcttcggattttcagataaacagtctgatgctttcattgggcaatatggcaatggtttcaagactagtacgatgcggcttggagcagatgtgattgtttttacacaaaaccaaaataactgggtgccaactagaagtatcggccttctttcttacacatttttgatggaaacaggttgcgatgatgtgctggtgccaacggtagactatcagtatgatctaacaacaacttcatatgttcagatgttgcgtcatgatcagaagctcttctcttctaatttggcaatccttctcaaatggtcccctttttctactgaagctgagttgcttaaacaatttgatgatatgggagatcatggaacaaagataattgtattcaacctctggttcaatgatgatggggatatggagcttgatttcaactctgacaaaaaggatatcctcattactggggcccacaagaaggtgaaaacaaacagtttggacaagattgctgcacagaactacgtctcaactcggcttcgctattctcttagagcatatgcatctatcttgtatcttcatgtacctgatactttcagaattatcctgcggggatgtgatgtggaaccacataatgtagttaatgatttgatgtatcgggagtgcgtgttgtataaaccacaaattgctggacttacagagtcatcggtaatcacaaccattgggtttgttaaaggtgcaccagatatagatgtacaagggtttaatgtatatcacaaaaaccgtctaatattgcccttctggaaagttgcaaacaactcatacgggaaaggacgaggagttgttggcattctggaggccaactttatcaaacctacccatgacaagcaggattttgagaagtcagtcctttatcaaagacttgagttccgcttgaaagaaatgacttacgaatactggagaactgtgcatcattatattaaggagaataagaatggtctaaggtagaccaaagtacaagctgccctagaaggcaggaagaggggggacacaaggaaacaccaaaactaaatagaagagagagacggggggcaccagttccaacaacattcaaattaaggccacagctgcctaagatcctttgcacccgccattctccaaagcttaacatcatcttgaattgttcttgttatgaggaatgcattaatgccataaacgaattcattcctgaactaattctttttgcagggaccttcattgccatcgtgttggatatgacaacaaaaaattacctaaagcaacccgtgctattaatcgtgccaatcatatgaacggtggcagttccccaacaagtgctccacctcggttgcttgcagttgatattccaacaagcagctctagtatacctagattatcagcctctgcagcaagagaaaagatcagtagtctcgattctcttcccaagagcatgattggattgaagaggaagtttaatcctttcggtgctgtggcggccagtgctgatcaggatggactacatcatatggataaaatagaatagacttgcctccctccacggctttgaccatgtccataattaactttggctactttggtgacaaaaagtggtatcatcagcatgagctacttgtcggtttctacttcagtcgcagcatccgcatcacggcgccactacgactgggaaatggaaatgatgtttctcaacgaagacggtttaatgaatacaaaactttgaccctggagaatgacaagttgcgaaatgaatgcttacaatacgagggatcagagaaacaacttgtcctgaagccgtggcttgttgaaagattgaaatggcttgcttgtaagatagtctgtagttttggatcttgttggttgattttagaccctgattggcg

SEQ ID NO: 33023 - DNA, 3373 bp, Zea Mays
gcagggaggatctgggggatggggatcggtggagcgggcggggggaacagtggtttgtgcgtgcacggagggggccgagcgagggcatggctgagcgagcgaggatcgggtgctggcgcgtgctcgttggcggagggggaggcaaatccgccatgcgcgggcatgcgactggctgtgcgcggagggggccaagcgggatggaggcaaaatccgctgcacccgccatccatggcagcatttgcgggggcaggggcctgcggattgtggagatcgcgcccttccatcgacgatggaggctggcgggcgatgtgggagagggggtggggtcatggtgtagcccctggtggacgcctggggaggcacgatttctccgtaaaccatggatggtagtcttctaggagagcgtggagaaggatggaggttggtgcttcgccaatgatggaaaccttgcccgaagccttgattgaaggttaggccgcatggattgcgcgagcgaggccgatatggtggggagcgggaattgcgcatggattgcgccgttgaaggaaggtcgggggatgcggggcggggtgcggccgcgagcgggatgcggggcggggtgtgccagcggtagaacgtgcaccatccgaggagtgtggacgcctgtattatacacataagtagtagtagagataggagagagaaaaagagattgagcgaaacaaccttgcatcaccgttttgaggaaatgacacaggcctttttcctttttcagtctagtcgcgaacgagcgtgccgcgccgcgtgcactctcacacacacacagagagagagagagagagagagagagagagagagagagagagagagagagagagagagagagagagagagagagagagagagagagagagagagagcgcaacgcgaaaagccgaaaacccaaatcgagtttcctgccggcctgtccaatttctgtctaactcccagtcccagacccagacccagagaagatcagaagaagggggaagacagctcgtgcttcgacaggcgtcagccctagcgcagcttcccggcgacggcgatgagcctgggagctgaggtgatcgagctctccagcgacgaagacgaggagcctgtgcccagcactaccgctctcatccaccacgccccctcctcccctcccgacgtcaagccgcacctgctcgccgacgtcgatgtgaagccgctgcttcttctcccgccgccgctccaccccccgggctacggcgcgctcgtgcccgtgaagaccgaggagcccgtgcccgtggccaccgtctcgtcaccgcccagggcgctcccgccgccgcgcctctgccgccagttctggaagtccggcgactacgtcgtcgcgcgccgcaaccccgatgtggccggccccggtgggcggaaccggttgcggataaaccccaagtttctgcactccaatgcgacttcccacaagtgggcttttggcgccattgccgagctccttgacaatgcaatcgatgaggtgaacaatggggcaacatttgtccgtgttaataaatttaaaaacccacgagatgggaacccctcattgttggttcaagatgatggaggggggatggatcctgaggcactgagacgttgcatgagcttcggattttcagataaacagtctgatgctttcattgggcaatatggcaatggtttcaagactagtacgatgcggcttggagcagatgtgattgtttttacacaaaaccaaaataactgggtgccaactagaagtatcggccttctttcttacacatttttgatggaaacaggttgcgatgatgtgctggtgccaacggtagactatcagtatgatctaacaacaacttcatatgttcagatgttgcgtcatgatcagaagctcttctcttctaatttggcaatccttctcaaatggtcccctttttctactgaagctgagttgcttaaacaatttgatgatatgggagatcatggaacaaagataattgtattcaacctctggttcaatgatgatggggatatggagcttgatttcaactctgacaaaaaggatatcctcattactggggcccacaagaaggtgaaaacaaacagtttggacaagattgctgcacagaactacgtctcaactcggcttcgctattctcttagagcatatgcatctatcttgtatcttcatgtacctgatactttcagaattatcctgcggggatgtgatgtggaaccacataatgtagttaatgatttgatgtatcgggagtgcgtgttgtataaaccacaaattgctggacttacagagtcatcggtaatcacaaccattgggtttgttaaaggtgcaccagatatagatgtacaagggtttaatgtatatcacaaaaaccgtctaatattgcccttctggaaagttgcaaacaactcatacgggaaaggacgaggagttgttggcattctggaggccaactttatcaaacctacccatgacaagcaggattttgagaagtcagtcctttatcaaagacttgagttccgcttgaaagaaatgacttacgaatactggagaactgtgcatcattatattaaggagaataagaatggtctaaggtagaccaaagtacaagctgccctagaaggcaggaagaggggggacacaaggaaacaccaaaactaaatagaagagagagacggggggcaccagttccaacaacattcaaattaaggccacagctgcctaagatcctttgcacccgccattctccaaagcttaacatcatcttgaattgttcttgttatgaggaatgcattaatgccataaacgaattcattcctgaactaattctttttgcagggaccttcattgccatcgtgttggatatgacaacaaaaaattacctaaagcaacccgtgctattaatcgtgccaatcatatgaacggtggcagttccccaacaagtgctccacctcggttgcttgcagttgatattccaacaagcagctctagtatacctagattatcagcctctgcagcaagagaaaagatcagtagtctcgattctcttcccaagagcatgattggattgaagaggaagtttaatcctttcggtgctgtggcggccagtgctgatcaggatggactacatcatatggataaaatagatgtttctcaacgaagacggtttaatgaatacaaaactttgaccctggagaatgacaagttgcgaaatgaatgcttacaatacgagggatcagagaaacaacttgtcctgaagccgtggcttgttgaaagattgaaatggcttgcttgtaagatagtctgtagttttggatcttgttggttgattttagaccctgattggcg

SEQ ID NO: 33024 - DNA, 3376 bp, Zea Mays
gcagggaggatctgggggatggggatcggtggagcgggcggggggaacagtggtttgtgcgtgcacggagggggccgagcgagggcatggctgagcgagcgaggatcgggtgctggcgcgtgctcgttggcggagggggaggcaaatccgccatgcgcgggcatgcgactggctgtgcgcggagggggccaagcgggatggaggcaaaatccgctgcacccgccatccatggcagcatttgcgggggcaggggcctgcggattgtggagatcgcgcccttccatcgacgatggaggctggcgggcgatgtgggagagggggtggggtcatggtgtagcccctggtggacgcctggggaggcacgatttctccgtaaaccatggatggtagtcttctaggagagcgtggagaaggatggaggttggtgcttcgccaatgatggaaaccttgcccgaagccttgattgaaggttaggccgcatggattgcgcgagcgaggccgatatggtggggagcgggaattgcgcatggattgcgccgttgaaggaaggtcgggggatgcggggcggggtgcggccgcgagcgggatgcggggcggggtgtgccagcggtagaacgtgcaccatccgaggagtgtggacgcctgtattatacacataagtagtagtagagataggagagagaaaaagagattgagcgaaacaaccttgcatcaccgttttgaggaaatgacacaggcctttttcctttttcagtctagtcgcgaacgagcgtgccgcgccgcgtgcactctcacacacacacagagagagagagagagagagagagagagagagagagagagagagagagagagagagagagagagagagagagagagagagagagagagagagagagcgcaacgcgaaaagccgaaaacccaaatcgagtttcctgccggcctgtccaatttctgtctaactcccagtcccagacccagacccagagaagatcagaagaagggggaagacagctcgtgcttcgacaggcgtcagccctagcgcagcttcccggcgacggcgatgagcctgggagctgaggtgatcgagctctccagcgacgaagacgaggagcctgtgcccagcactaccgctctcatccaccacgccccctcctcccctcccgacgtcaagccgcacctgctcgccgacgtcgatgtgaagccgctgcttcttctcccgccgccgctccaccccccgggctacggcgcgctcgtgcccgtgaagaccgaggagcccgtgcccgtggccaccgtctcgtcaccgcccagggcgctcccgccgccgcgcctctgccgccagttctggaagtccggcgactacgtcgtcgcgcgccgcaaccccgatgtggccggccccggtgggcggaaccggttgcggataaaccccaagtttctgcactccaatgcgacttcccacaagtgggcttttggcgccattgccgagctccttgacaatgcaatcgatgaggtgaacaatggggcaacatttgtccgtgttaataaatttaaaaacccacgagatgggaacccctcattgttggttcaagatgatggaggggggatggatcctgaggcactgagacgttgcatgagcttcggattttcagataaacagtctgatgctttcattgggcaatatggcaatggtttcaagactagtacgatgcggcttggagcagatgtgattgtttttacacaaaaccaaaataactgggtgccaactagaagtatcggccttctttcttacacatttttgatggaaacaggttgcgatgatgtgctggtgccaacggtagactatcagtatgatctaacaacaacttcatatgttcagatgttgcgtcatgatcagaagctcttctcttctaatttggcaatccttctcaaatggtcccctttttctactgaagctgagttgcttaaacaatttgatgatatgggagatcatggaacaaagataattgtattcaacctctggttcaatgatgatggggatatggagcttgatttcaactctgacaaaaaggatatcctcattactggggcccacaagaaggtgaaaacaaacagtttggacaagattgctgcacagaactacgtctcaactcggcttcgctattctcttagagcatatgcatctatcttgtatcttcatgtacctgatactttcagaattatcctgcggggatgtgatgtggaaccacataatgtagttaatgatttgatgtatcgggagtgcgtgttgtataaaccacaaattgctggacttacagagtcatcggtaatcacaaccattgggtttgttaaaggtgcaccagatatagatgtacaagggtttaatgtatatcacaaaaaccgtctaatattgcccttctggaaagttgcaaacaactcatacgggaaaggacgaggagttgttggcattctggaggccaactttatcaaacctacccatgacaagcaggattttgagaagtcagtcctttatcaaagacttgagttccgcttgaaagaaatgacttacgaatactggagaactgtgcatcattatattaaggagaataagaatggtctaaggtagaccaaagtacaagctgccctagaaggcaggaagaggggggacacaaggaaacaccaaaactaaatagaagagagagacggggggcaccagttccaacaacattcaaattaaggccacagctgcctaagatcctttgcacccgccattctccaaagcttaacatcatcttgaattgttcttgttatgaggaatgcattaatgccataaacgaattcattcctgaactaattctttttgcagggaccttcattgccatcgtgttggatatgacaacaaaaaattacctaaagcaacccgtgctattaatcgtgccaatcatatgaacggtggcagttccccaacaagtgctccacctcggttgcttgcagttgatattccaacaagcagctctagtatacctagattatcagcctctgcagcaagagaaaagatcagtagtctcgattctcttcccaagagcacagtgattggattgaagaggaagtttaatcctttcggtgctgtggcggccagtgctgatcaggatggactacatcatatggataaaatagatgtttctcaacgaagacggtttaatgaatacaaaactttgaccctggagaatgacaagttgcgaaatgaatgcttacaatacgagggatcagagaaacaacttgtcctgaagccgtggcttgttgaaagattgaaatggcttgcttgtaagatagtctgtagttttggatcttgttggttgattttagaccctgattggcg

SEQ ID NO: 33025 - DNA, 3914 bp, Zea Mays
gcagggaggatctgggggatggggatcggtggagcgggcggggggaacagtggtttgtgcgtgcacggagggggccgagcgagggcatggctgagcgagcgaggatcgggtgctggcgcgtgctcgttggcggagggggaggcaaatccgccatgcgcgggcatgcgactggctgtgcgcggagggggccaagcgggatggaggcaaaatccgctgcacccgccatccatggcagcatttgcgggggcaggggcctgcggattgtggagatcgcgcccttccatcgacgatggaggctggcgggcgatgtgggagagggggtggggtcatggtgtagcccctggtggacgcctggggaggcacgatttctccgtaaaccatggatggtagtcttctaggagagcgtggagaaggatggaggttggtgcttcgccaatgatggaaaccttgcccgaagccttgattgaaggttaggccgcatggattgcgcgagcgaggccgatatggtggggagcgggaattgcgcatggattgcgccgttgaaggaaggtcgggggatgcggggcggggtgcggccgcgagcgggatgcggggcggggtgtgccagcggtagaacgtgcaccatccgaggagtgtggacgcctgtattatacacataagtagtagtagagataggagagagaaaaagagattgagcgaaacaaccttgcatcaccgttttgaggaaatgacacaggcctttttcctttttcagtctagtcgcgaacgagcgtgccgcgccgcgtgcactctcacacacacacagagagagagagagagagagagagagagagagagagagagagagagagagagagagagagagagagagagagagagagagagagagagagagagagcgcaacgcgaaaagccgaaaacccaaatcgagtttcctgccggcctgtccaatttctgtctaactcccagtcccagacccagacccagagaagatcagaagaagggggaagacagctcgtgcttcgacaggcgtcagccctagcgcagcttcccggcgacggcgatgagcctgggagctgaggtgatcgagctctccagcgacgaagacgaggagcctgtgcccagcactaccgctctcatccaccacgccccctcctcccctcccgacgtcaagccgcacctgctcgccgacgtcgatgtgaagccgctgcttcttctcccgccgccgctccaccccccgggctacggcgcgctcgtgcccgtgaagaccgaggagcccgtgcccgtggccaccgtctcgtcaccgcccagggcgctcccgccgccgcgcctctgccgccagttctggaagtccggcgactacgtcgtcgcgcgccgcaaccccgatgtggccggccccggtgggcggaaccggttgcggataaaccccaagtttctgcactccaatgcgacttcccacaagtgggcttttggcgccattgccgagctccttgacaatgcaatcgatgaggtgaacaatggggcaacatttgtccgtgttaataaatttaaaaacccacgagatgggaacccctcattgttggttcaagatgatggaggggggatggatcctgaggcactgagacgttgcatgagcttcggattttcagataaacagtctgatgctttcattgggcaatatggcaatggtttcaagactagtacgatgcggcttggagcagatgtgattgtttttacacaaaaccaaaataactggttgcgatgatgtgctggtgccaacggtagactatcagtatgatctaacaacaacttcatatgttcagatgttgcgtcatgatcagaagctcttctcttctaatttggcaatccttctcaaatggtcccctttttctactgaagctgagttgcttaaacaatttgatgatatgggagatcatggaacaaagataattgtattcaacctctggttcaatgatgatggggatatggagcttgatttcaactctgacaaaaaggatatcctcattactggggcccacaagaaggtgaaaacaaacagtttggacaagattgctgcacagaactacgtctcaactcggcttcgctattctcttagagcatatgcatctatcttgtatcttcatgtacctgatactttcagaattatcctgcggggatgtgatgtggaaccacataatgtagttaatgatttgatgtatcgggagtgcgtgttgtataaaccacaaattgctggacttacagagtcatcggtaatcacaaccattgggtttgttaaaggtgcaccagatatagatgtacaagggtttaatgtatatcacaaaaaccgtctaatattgcccttctggaaagttgcaaacaactcatacgggaaaggacgaggagttgttggcattctggaggccaactttatcaaacctacccatgacaagcaggattttgagaagtcagtcctttatcaaagacttgagttccgcttgaaagaaatgacttacgaatactggagaactgtgcatcattatattaaggagaataagaatggtctaaggtagaccaaagtacaagctgccctagaaggcaggaagaggggggacacaaggaaacaccaaaactaaatagaagagagagacggggggcaccagttccaacaacattcaaattaaggccacagctgcctaagatcctttgcacccgccattctccaaagcttaacatcatcttgaattgttcttgttatgaggaatgcattaatgccataaacgaattcattcctgaactaattctttttgcagggaccttcattgccatcgtgttggatatgacaacaaaaaattacctaaagcaacccgtgctattaatcgtgccaatcatatgaacggtggcagttccccaacaagtgctccacctcggttgcttgcagttgatattccaacaagcagctctagtatacctagattatcagcctctgcagcaagagaaaagatcagtagtctcgattctcttcccaagagcatgattggattgaagaggaagtttaatcctttcggtgctgtggcggccagtgctgatcaggatggactacatcatatggataaaatagatgtttctcaacgaagacggtttaatgaatacaaaactttgaccctggagaatgacaagttgcgaaatgaatgcttacaatacgagggatcagagaaacaacttgtcctgaaggaacaaaagctccgatctgaaattgctgaggtggaaaagaagtatcaggaattgttgggagagctcagatcattggatgtgaagaaagagaaacaatgaactctccacttcagcgcctgttgtacaattaattgctcttttttctttcctgacctgtgaagatgatgactggattacttcccgagacgtgcagggaactggtcccttggacaaatgttatctaccgattaccattcgcttggtagtttcgttggatagctgtagaggtgtaatttcgtttcactaatcttcctagggtcctgtgatggtggaagaaagtgagcatgtagtctgttgtaaaattatgcaacttgtatctgaatgtacagcagcggtttcaatgttaatggccctctgtttccagcagcacatctcggtcccgtgtcaaaagaggtggattttgatccggcactctggagtctggactctggagtggatacttagaattagacttcatatgttgtgcagtatgtaaaattacttttcgtactcgtgacagtcttaaactggtggttgtgttgtatttgagacgaggggggttagtcaagcctttgttcactccaacagtacattgtaactgtacatgagtgatggtgggtatcagctgtttggttgctgcattaatttattttccaaacctctta

SEQ ID NO: 33026 - DNA, 3917 bp, Zea Mays
gcagggaggatctgggggatggggatcggtggagcgggcggggggaacagtggtttgtgcgtgcacggagggggccgagcgagggcatggctgagcgagcgaggatcgggtgctggcgcgtgctcgttggcggagggggaggcaaatccgccatgcgcgggcatgcgactggctgtgcgcggagggggccaagcgggatggaggcaaaatccgctgcacccgccatccatggcagcatttgcgggggcaggggcctgcggattgtggagatcgcgcccttccatcgacgatggaggctggcgggcgatgtgggagagggggtggggtcatggtgtagcccctggtggacgcctggggaggcacgatttctccgtaaaccatggatggtagtcttctaggagagcgtggagaaggatggaggttggtgcttcgccaatgatggaaaccttgcccgaagccttgattgaaggttaggccgcatggattgcgcgagcgaggccgatatggtggggagcgggaattgcgcatggattgcgccgttgaaggaaggtcgggggatgcggggcggggtgcggccgcgagcgggatgcggggcggggtgtgccagcggtagaacgtgcaccatccgaggagtgtggacgcctgtattatacacataagtagtagtagagataggagagagaaaaagagattgagcgaaacaaccttgcatcaccgttttgaggaaatgacacaggcctttttcctttttcagtctagtcgcgaacgagcgtgccgcgccgcgtgcactctcacacacacacagagagagagagagagagagagagagagagagagagagagagagagagagagagagagagagagagagagagagagagagagagagagagagagagcgcaacgcgaaaagccgaaaacccaaatcgagtttcctgccggcctgtccaatttctgtctaactcccagtcccagacccagacccagagaagatcagaagaagggggaagacagctcgtgcttcgacaggcgtcagccctagcgcagcttcccggcgacggcgatgagcctgggagctgaggtgatcgagctctccagcgacgaagacgaggagcctgtgcccagcactaccgctctcatccaccacgccccctcctcccctcccgacgtcaagccgcacctgctcgccgacgtcgatgtgaagccgctgcttcttctcccgccgccgctccaccccccgggctacggcgcgctcgtgcccgtgaagaccgaggagcccgtgcccgtggccaccgtctcgtcaccgcccagggcgctcccgccgccgcgcctctgccgccagttctggaagtccggcgactacgtcgtcgcgcgccgcaaccccgatgtggccggccccggtgggcggaaccggttgcggataaaccccaagtttctgcactccaatgcgacttcccacaagtgggcttttggcgccattgccgagctccttgacaatgcaatcgatgaggtgaacaatggggcaacatttgtccgtgttaataaatttaaaaacccacgagatgggaacccctcattgttggttcaagatgatggaggggggatggatcctgaggcactgagacgttgcatgagcttcggattttcagataaacagtctgatgctttcattgggcaatatggcaatggtttcaagactagtacgatgcggcttggagcagatgtgattgtttttacacaaaaccaaaataactggttgcgatgatgtgctggtgccaacggtagactatcagtatgatctaacaacaacttcatatgttcagatgttgcgtcatgatcagaagctcttctcttctaatttggcaatccttctcaaatggtcccctttttctactgaagctgagttgcttaaacaatttgatgatatgggagatcatggaacaaagataattgtattcaacctctggttcaatgatgatggggatatggagcttgatttcaactctgacaaaaaggatatcctcattactggggcccacaagaaggtgaaaacaaacagtttggacaagattgctgcacagaactacgtctcaactcggcttcgctattctcttagagcatatgcatctatcttgtatcttcatgtacctgatactttcagaattatcctgcggggatgtgatgtggaaccacataatgtagttaatgatttgatgtatcgggagtgcgtgttgtataaaccacaaattgctggacttacagagtcatcggtaatcacaaccattgggtttgttaaaggtgcaccagatatagatgtacaagggtttaatgtatatcacaaaaaccgtctaatattgcccttctggaaagttgcaaacaactcatacgggaaaggacgaggagttgttggcattctggaggccaactttatcaaacctacccatgacaagcaggattttgagaagtcagtcctttatcaaagacttgagttccgcttgaaagaaatgacttacgaatactggagaactgtgcatcattatattaaggagaataagaatggtctaaggtagaccaaagtacaagctgccctagaaggcaggaagaggggggacacaaggaaacaccaaaactaaatagaagagagagacggggggcaccagttccaacaacattcaaattaaggccacagctgcctaagatcctttgcacccgccattctccaaagcttaacatcatcttgaattgttcttgttatgaggaatgcattaatgccataaacgaattcattcctgaactaattctttttgcagggaccttcattgccatcgtgttggatatgacaacaaaaaattacctaaagcaacccgtgctattaatcgtgccaatcatatgaacggtggcagttccccaacaagtgctccacctcggttgcttgcagttgatattccaacaagcagctctagtatacctagattatcagcctctgcagcaagagaaaagatcagtagtctcgattctcttcccaagagcacagtgattggattgaagaggaagtttaatcctttcggtgctgtggcggccagtgctgatcaggatggactacatcatatggataaaatagatgtttctcaacgaagacggtttaatgaatacaaaactttgaccctggagaatgacaagttgcgaaatgaatgcttacaatacgagggatcagagaaacaacttgtcctgaaggaacaaaagctccgatctgaaattgctgaggtggaaaagaagtatcaggaattgttgggagagctcagatcattggatgtgaagaaagagaaacaatgaactctccacttcagcgcctgttgtacaattaattgctcttttttctttcctgacctgtgaagatgatgactggattacttcccgagacgtgcagggaactggtcccttggacaaatgttatctaccgattaccattcgcttggtagtttcgttggatagctgtagaggtgtaatttcgtttcactaatcttcctagggtcctgtgatggtggaagaaagtgagcatgtagtctgttgtaaaattatgcaacttgtatctgaatgtacagcagcggtttcaatgttaatggccctctgtttccagcagcacatctcggtcccgtgtcaaaagaggtggattttgatccggcactctggagtctggactctggagtggatacttagaattagacttcatatgttgtgcagtatgtaaaattacttttcgtactcgtgacagtcttaaactggtggttgtgttgtatttgagacgaggggggttagtcaagcctttgttcactccaacagtacattgtaactgtacatgagtgatggtgggtatcagctgtttggttgctgcattaatttattttccaaacctctta

SEQ ID NO: 33027 - DNA, 3967 bp, Zea Mays
gcagggaggatctgggggatggggatcggtggagcgggcggggggaacagtggtttgtgcgtgcacggagggggccgagcgagggcatggctgagcgagcgaggatcgggtgctggcgcgtgctcgttggcggagggggaggcaaatccgccatgcgcgggcatgcgactggctgtgcgcggagggggccaagcgggatggaggcaaaatccgctgcacccgccatccatggcagcatttgcgggggcaggggcctgcggattgtggagatcgcgcccttccatcgacgatggaggctggcgggcgatgtgggagagggggtggggtcatggtgtagcccctggtggacgcctggggaggcacgatttctccgtaaaccatggatggtagtcttctaggagagcgtggagaaggatggaggttggtgcttcgccaatgatggaaaccttgcccgaagccttgattgaaggttaggccgcatggattgcgcgagcgaggccgatatggtggggagcgggaattgcgcatggattgcgccgttgaaggaaggtcgggggatgcggggcggggtgcggccgcgagcgggatgcggggcggggtgtgccagcggtagaacgtgcaccatccgaggagtgtggacgcctgtattatacacataagtagtagtagagataggagagagaaaaagagattgagcgaaacaaccttgcatcaccgttttgaggaaatgacacaggcctttttcctttttcagtctagtcgcgaacgagcgtgccgcgccgcgtgcactctcacacacacacagagagagagagagagagagagagagagagagagagagagagagagagagagagagagagagagagagagagagagagagagagagagagagagagcgcaacgcgaaaagccgaaaacccaaatcgagtttcctgccggcctgtccaatttctgtctaactcccagtcccagacccagacccagagaagatcagaagaagggggaagacagctcgtgcttcgacaggcgtcagccctagcgcagcttcccggcgacggcgatgagcctgggagctgaggtgatcgagctctccagcgacgaagacgaggagcctgtgcccagcactaccgctctcatccaccacgccccctcctcccctcccgacgtcaagccgcacctgctcgccgacgtcgatgtgaagccgctgcttcttctcccgccgccgctccaccccccgggctacggcgcgctcgtgcccgtgaagaccgaggagcccgtgcccgtggccaccgtctcgtcaccgcccagggcgctcccgccgccgcgcctctgccgccagttctggaagtccggcgactacgtcgtcgcgcgccgcaaccccgatgtggccggccccggtgggcggaaccggttgcggataaaccccaagtttctgcactccaatgcgacttcccacaagtgggcttttggcgccattgccgagctccttgacaatgcaatcgatgaggtgaacaatggggcaacatttgtccgtgttaataaatttaaaaacccacgagatgggaacccctcattgttggttcaagatgatggaggggggatggatcctgaggcactgagacgttgcatgagcttcggattttcagataaacagtctgatgctttcattgggcaatatggcaatggtttcaagactagtacgatgcggcttggagcagatgtgattgtttttacacaaaaccaaaataactgggtgccaactagaagtatcggccttctttcttacacatttttgatggaaacaggttgcgatgatgtgctggtgccaacggtagactatcagtatgatctaacaacaacttcatatgttcagatgttgcgtcatgatcagaagctcttctcttctaatttggcaatccttctcaaatggtcccctttttctactgaagctgagttgcttaaacaatttgatgatatgggagatcatggaacaaagataattgtattcaacctctggttcaatgatgatggggatatggagcttgatttcaactctgacaaaaaggatatcctcattactggggcccacaagaaggtgaaaacaaacagtttggacaagattgctgcacagaactacgtctcaactcggcttcgctattctcttagagcatatgcatctatcttgtatcttcatgtacctgatactttcagaattatcctgcggggatgtgatgtggaaccacataatgtagttaatgatttgatgtatcgggagtgcgtgttgtataaaccacaaattgctggacttacagagtcatcggtaatcacaaccattgggtttgttaaaggtgcaccagatatagatgtacaagggtttaatgtatatcacaaaaaccgtctaatattgcccttctggaaagttgcaaacaactcatacgggaaaggacgaggagttgttggcattctggaggccaactttatcaaacctacccatgacaagcaggattttgagaagtcagtcctttatcaaagacttgagttccgcttgaaagaaatgacttacgaatactggagaactgtgcatcattatattaaggagaataagaatggtctaaggtagaccaaagtacaagctgccctagaaggcaggaagaggggggacacaaggaaacaccaaaactaaatagaagagagagacggggggcaccagttccaacaacattcaaattaaggccacagctgcctaagatcctttgcacccgccattctccaaagcttaacatcatcttgaattgttcttgttatgaggaatgcattaatgccataaacgaattcattcctgaactaattctttttgcagggaccttcattgccatcgtgttggatatgacaacaaaaaattacctaaagcaacccgtgctattaatcgtgccaatcatatgaacggtggcagttccccaacaagtgctccacctcggttgcttgcagttgatattccaacaagcagctctagtatacctagattatcagcctctgcagcaagagaaaagatcagtagtctcgattctcttcccaagagcatgattggattgaagaggaagtttaatcctttcggtgctgtggcggccagtgctgatcaggatggactacatcatatggataaaatagatgtttctcaacgaagacggtttaatgaatacaaaactttgaccctggagaatgacaagttgcgaaatgaatgcttacaatacgagggatcagagaaacaacttgtcctgaaggaacaaaagctccgatctgaaattgctgaggtggaaaagaagtatcaggaattgttgggagagctcagatcattggatgtgaagaaagagaaacaatgaactctccacttcagcgcctgttgtacaattaattgctcttttttctttcctgacctgtgaagatgatgactggattacttcccgagacgtgcagggaactggtcccttggacaaatgttatctaccgattaccattcgcttggtagtttcgttggatagctgtagaggtgtaatttcgtttcactaatcttcctagggtcctgtgatggtggaagaaagtgagcatgtagtctgttgtaaaattatgcaacttgtatctgaatgtacagcagcggtttcaatgttaatggccctctgtttccagcagcacatctcggtcccgtgtcaaaagaggtggattttgatccggcactctggagtctggactctggagtggatacttagaattagacttcatatgttgtgcagtatgtaaaattacttttcgtactcgtgacagtcttaaactggtggttgtgttgtatttgagacgaggggggttagtcaagcctttgttcactccaacagtacattgtaactgtacatgagtgatggtgggtatcagctgtttggttgctgcattaatttattttccaaacctctta

SEQ ID NO: 33028 - DNA, 3911 bp, Zea Mays
gcagggaggatctgggggatggggatcggtggagcgggcggggggaacagtggtttgtgcgtgcacggagggggccgagcgagggcatggctgagcgagcgaggatcgggtgctggcgcgtgctcgttggcggagggggaggcaaatccgccatgcgcgggcatgcgactggctgtgcgcggagggggccaagcgggatggaggcaaaatccgctgcacccgccatccatggcagcatttgcgggggcaggggcctgcggattgtggagatcgcgcccttccatcgacgatggaggctggcgggcgatgtgggagagggggtggggtcatggtgtagcccctggtggacgcctggggaggcacgatttctccgtaaaccatggatggtagtcttctaggagagcgtggagaaggatggaggttggtgcttcgccaatgatggaaaccttgcccgaagccttgattgaaggttaggccgcatggattgcgcgagcgaggccgatatggtggggagcgggaattgcgcatggattgcgccgttgaaggaaggtcgggggatgcggggcggggtgcggccgcgagcgggatgcggggcggggtgtgccagcggtagaacgtgcaccatccgaggagtgtggacgcctgtattatacacataagtagtagtagagataggagagagaaaaagagattgagcgaaacaaccttgcatcaccgttttgaggaaatgacacaggcctttttcctttttcagtctagtcgcgaacgagcgtgccgcgccgcgtgcactctcacacacacacagagagagagagagagagagagagagagagagagagagagagagagagagagagagagagagagagagagagagagagagagagagagagagagagcgcaacgcgaaaagccgaaaacccaaatcgagtttcctgccggcctgtccaatttctgtctaactcccagtcccagacccagacccagagaagatcagaagaagggggaagacagctcgtgcttcgacaggcgtcagccctagcgcagcttcccggcgacggcgatgagcctgggagctgaggtgatcgagctctccagcgacgaagacgaggagcctgtgcccagcactaccgctctcatccaccacgccccctcctcccctcccgacgtcaagccgcacctgctcgccgacgtcgatgtgaagccgctgcttcttctcccgccgccgctccaccccccgggctacggcgcgctcgtgcccgtgaagaccgaggagcccgtgcccgtggccaccgtctcgtcaccgcccagggcgctcccgccgccgcgcctctgccgccagttctggaagtccggcgactacgtcgtcgcgcgccgcaaccccgatgtggccggccccggtgggcggaaccggttgcggataaaccccaagtttctgcactccaatgcgacttcccacaagtgggcttttggcgccattgccgagctccttgacaatgcaatcgatgaggtgaacaatggggcaacatttgtccgtgttaataaatttaaaaacccacgagatgggaacccctcattgttggttcaagatgatggaggggggatggatcctgaggcactgagacgttgcatgagcttcggattttcagataaacagtctgatgctttcattgggcaatatggcaatggtttcaagactagtacgatgcggcttggagcagatgtgattgtttttacacaaaaccaaaataactggttgcgatgatgtgctggtgccaacggtagactatcagtatgatctaacaacaacttcatatgttcagatgttgcgtcatgatcagaagctcttctcttctaatttggcaatccttctcaaatggtcccctttttctactgaagctgagttgcttaaacaatttgatgatatgggagatcatggaacaaagataattgtattcaacctctggttcaatgatgatggggatatggagcttgatttcaactctgacaaaaaggatatcctcattactggggcccacaagaaggtgaaaacaaacagtttggacaagattgctgcacagaactacgtctcaactcggcttcgctattctcttagagcatatgcatctatcttgtatcttcatgtacctgatactttcagaattatcctgcggggatgtgatgtggaaccacataatgtagttaatgatttgatgtatcgggagtgcgtgttgtataaaccacaaattgctggacttacagagtcatcggtaatcacaaccattgggtttgttaaaggtgcaccagatatagatgtacaagggtttaatgtatatcacaaaaaccgtctaatattgcccttctggaaagttgcaaacaactcatacgggaaaggacgaggagttgttggcattctggaggccaactttatcaaacctacccatgacaagcaggattttgagaagtcagtcctttatcaaagacttgagttccgcttgaaagaaatgacttacgaatactgaactgtgcatcattatattaaggagaataagaatggtctaaggtagaccaaagtacaagctgccctagaaggcaggaagaggggggacacaaggaaacaccaaaactaaatagaagagagagacggggggcaccagttccaacaacattcaaattaaggccacagctgcctaagatcctttgcacccgccattctccaaagcttaacatcatcttgaattgttcttgttatgaggaatgcattaatgccataaacgaattcattcctgaactaattctttttgcagggaccttcattgccatcgtgttggatatgacaacaaaaaattacctaaagcaacccgtgctattaatcgtgccaatcatatgaacggtggcagttccccaacaagtgctccacctcggttgcttgcagttgatattccaacaagcagctctagtatacctagattatcagcctctgcagcaagagaaaagatcagtagtctcgattctcttcccaagagcatgattggattgaagaggaagtttaatcctttcggtgctgtggcggccagtgctgatcaggatggactacatcatatggataaaatagatgtttctcaacgaagacggtttaatgaatacaaaactttgaccctggagaatgacaagttgcgaaatgaatgcttacaatacgagggatcagagaaacaacttgtcctgaaggaacaaaagctccgatctgaaattgctgaggtggaaaagaagtatcaggaattgttgggagagctcagatcattggatgtgaagaaagagaaacaatgaactctccacttcagcgcctgttgtacaattaattgctcttttttctttcctgacctgtgaagatgatgactggattacttcccgagacgtgcagggaactggtcccttggacaaatgttatctaccgattaccattcgcttggtagtttcgttggatagctgtagaggtgtaatttcgtttcactaatcttcctagggtcctgtgatggtggaagaaagtgagcatgtagtctgttgtaaaattatgcaacttgtatctgaatgtacagcagcggtttcaatgttaatggccctctgtttccagcagcacatctcggtcccgtgtcaaaagaggtggattttgatccggcactctggagtctggactctggagtggatacttagaattagacttcatatgttgtgcagtatgtaaaattacttttcgtactcgtgacagtcttaaactggtggttgtgttgtatttgagacgaggggggttagtcaagcctttgttcactccaacagtacattgtaactgtacatgagtgatggtgggtatcagctgtttggttgctgcattaatttattttccaaacctctta

SEQ ID NO: 33029 - DNA, 2408 bp, Zea Mays
cgctggtcggcatcggcacgccgccgccgggagacttctgtccgctcctcccgcaggacgcaatccttctcaaaaatcaacctttccaaactagacaaatcagctcgaccgctctccccacgtgtgcaactctccacgctcctcagcccagttcccgactccccgcgtccggcaccaccgcgcaactccgttcccgtttcgtgccacacaccatggtgccgctgccgctccaaccccgcctcgtcctcgcgctcaccatcctcctcgcgctctgctccgcgacgtccgccgacccgcgcacgtccgtggcggggcagacgtgcgcgccgggcacggccgtctccggctccgcgctggccgacaacttcgtgccggccatggacgagctcaacaccaacgtcagcgcgcacggcttcggcacctccgccgtgggctcgggccccaacacggtgttcggcctcggccagtgcttccgcgacctctcctccgttgactgcaagctctgcttcgccgaggtgcggtcgctgctacccaagtgctacccgcgcgtcgggggccgcctctacctcgacggctgcttcggccggtacggcaactactccttcttcggggaggccctggacgccgccagcgacgcccgcgtctgcgggacggccgccgaggggaactacactggcgccgacccgcgggcgttcggggacgccgtgcgcgccgtgctggccaacgtcaccgcggcggcggaggctccggggagccaggggttcggggcggggtccgcggcggtcgggggcgccacggcgttcgcgatcgcgcagtgctgggagaccctcaacggcaccgcgtgcgctcagtgcctccgcgcggcgtcggccgcagtggcgccgtgcgcgccggccgcggaggggcgcgcgctttttgccggctgttacctccgctactccaccagacaattctggaatgtcaacgccacggcgggatcgagctcgtcaggaaacagtggcattctgtggatatggctgggttcatttcttggtgctcttgcaattgttctcgtcattgcttttttggcatggaagaaaagaattcttagcagggataaagggtgcaactccttcatagatatgtatggagatggactctccatcagaattgcacagtccagtttgaattttaaatatgaagagttaagaaaagcaacaaattattttgatccatcaaacaaacttggtcaaggaagttatggggctgtatacaaggctgttcttatggatggaaaagaagtagctgtcaagagactattcctaaatacaaggcagtgggctgatcagtttttcaatgaagtcgacctaataagtcaagttcgtcataagaatctagttaagttacttggctgcagcatgaatggtccagagagtttgcttgtttatgaatactacttcaacaagagccttgatctcttcttgtttggtacaagtcatagaggaaatttaacctgggatctcagggtcgatatcattcaaggcattgccgaggggctctcttatctccacgaggagtcagaaatacggattattcaccgagatatcaaagccagtaatattctattggatgataaattgaaacctaaaataaccgactttggccttgcaagagcttttggagaagacgttactcatcttaccactggtgttgctggaacattaggctacatggctcctgaatacatagtgcatgggcatttgacagagaaagccgatgtcttcagctatggtgttcttgttctcgagattgtaacggggaaaagatgtagcaactcaaatggttcacacggaggacaggttttgttaacaaaggtatggaaacagtacaaggacaacagagtcgagatgattgttgatcgaagcatctatgaagactctatcagggatgagatcatgcatatactgcagattggactgctatgtacacaagcaaatcctgatgacaggcctacaatggggaaggtggtggagctgctgagaaaccacaggaatgctttggagattgtcttgagtgaccctccatttctgaacgtcgatgctgttgaggacatcaaagaaggggaacattcacggttactgtcctcaaattctgctccgtcactgtcaggctcgtcccgatcttacttaagtgggagataatcttggttatttttccctagttctcaagagaaatatatttaagagtttgtacagttatgtgtgatgtaaaatgatcgtgttagactggagggcaccaccacaattgtacataaatattttgtcccaccataattgtacataaatacaagtgagttcatgtgacttttgccatataaatttatatgatcctcttaatgaatcaagctaataacccattgatgaattttg

SEQ ID NO: 33030 - DNA, 3307 bp, Zea Mays
aaataaactaaactttagtcataataaccaaacaaccctgaatgatattgttggagatgtgtgagcttgagttggaaattagttgcaacattccaaatcgaccacgattccgctagcacctagaagcgcaataaaacgagagcacggctgaatattattagtggggcaaaaagacacaaatccgaaaccctcgcatcggcctgtacctagccgccgtcgccacagagccctcatctcgtccgtcctcggcggcctccgcggagcagccgtcgctggagcctggagaccaaagatccggccagatctgatgtcaggagggactggctcatccgggcgcgcggccccgcggtacgccccggatgacccgacgctgcccaagccgtggcgcggcctcgtcgacggcaccaccggctacctctactactggaacccggagacgaacgtcacgcagtacgagcggcctgtgccccccgagagccagctcctcccgcctccgcctccgttgccacccccgcctccacggagccgcgaccgccgcgacaggtccagatcccgatcccgcaccccaccccggcgcgaccacagggaccgcgaccgtgaccgtgacaggcgccacgacgagcacgcgtcctccaagacggcgtcttcccaccaccatccggctccggtagccgtcgccgacgatccttccaccgaggcataccgccgccgccatgagatcaccgtcacgggggataatgtgccgactccaataacttcatttgaggctggtggcttcccgtcagaaattctgaaggagatgcgatatctgctctgaggtggagctaatgtcgtatgctgcctcacgtgccctcggccaatctataagtgggactggctgagggcaggtcttgttgatggagctgccaaggtgggtgagttcctgaggctgctcgctccttcctcgaggggctgccctttgcgcgaaggggcacccactcgtgacacccacggtggccgatttgttgctctgcgtccggttcttggaaggctccccccatggatgatggggcctcttctggggcttgacccgtggaggtctggcccaggctgtcaacgtccatccatatataggatcgggtggcagctgctgcaaggggcctcgtggatcaactatccatgcctgagcgcctccacggattctgttagagccttttctacttcgccttgtgtccgcaagtctacacattgtggacacattttattcatacaacgtgctggattcgcaagcccaacacctatccaagcccagtcatggccaattgctatgcaaaatcaagatgtagtagctattgcaaagactggatcaggcaaaactcttgggtatctacttcctgggtttatgcatatcaagcgcctgcagaacagcactaggaatggcccaacagtgctagttttggccccaacaagggaacttgcaacacagattctggatgaagctgtgaaatttggaagatcttcaagaatttcttgcacgtgcttatatggtggtgctcctaaaggtcctcagttgagagatttagatagaggggttgatgttgttgttgcaacacctggaaggttaaatgacatcttggagatgcgaaaggtaagtcttaagcaagtgtcatatcttgttctggatgaggctgatcgcatgctggacatgggctttgagccacaaatacggaagatagtgaaagagatacctcaccgtcggcaaacccttatgtacaccgctacatggcccaaggaagtccgaaggattgcagatgatcttcttgttcatcctgtacaggtgacaattggaagtgttgattcacttgttgctaatagttctattactcagcatgtagagatcataacaccctcagaaaaacaacggcgcctggagcagatattacgatcccaggattcaggttcaaagatattaatattttgtaccaccaagaggatgtgtgaccaacttgcaaggacactcaccaggcagtttggagcttcggccattcatggtgacaagtcccaaagtgaaagggagaaggttctgaatcagtttcgatctgggcggtctcccattttagtggcaactgatgttgctgcgcgaggtttggacatcaaagatatcagggtagtgatcaactatgacttccccactggtgttgaagactacgttcacaggattggcaggacaggaagggctggtgccactggtgttgcatatacatttttttgtgatcaggattcaaaatatgctgctgacctaatcaaaattctggaaggggcaaaccaacgagtgccccgtgatttagaggatatggcttctcgtggcggtggacgaggtaggaagaggaaccattgggcatcccgccctgacaggggtggttcacgttctgaactggattcaaggtacagcagcagagatggactagcatcttctgggaaatcagagagtggtcgcggcagtcgtggaagggatgataatggtagccgtggcaggtacgaccctggtgaaaccgatgggcgatctcgtaggtctactagaggccgcagtagaagccgtagcaaaagtgacagtagaagccgtagcccaagtcccaagaagtcacgtcgtcatgaaggtagacgtagcaggactaagagcaggagcaggagcaggagccgtagaaatcatggcgctagccacagcaagagtcgcagccctgtcgctagccgtaggtatgaaaagactgcttcaggatctgctcggcctaactcggggcatgcagagcacaaaagccctccaagatctcactctagggatgaccatgtgaaccactctgaccacaaggatgatccgcgtgcaaatgcagctgtgcagaatggtaataactgacggagagtggcctgcatcttctgtgacaaccaagacttatctgttatgcaaaatgcagtcattcccatctgcaagtcctgaatacggaaatgcatttgtgtgccattaaatatctcgtagaacatgtgatactgatgcctctgccatcgatgaaccaaaactgttgatgcatgtcatgtcatgttgttaaacttaatgacattgttgtgttctggtgttttacagccagttctgtaagtgatttatgataaaatatattgtcaggtctggaagtggtagtttatgataactagcaaagttatgttgctacggtttctatttataaagtatagaatataaaatacaaagacatgtgttctgttggttaggtgaatgcgaatatgggtttatagcaaaaaaaccatggtttgaatcttt

SEQ ID NO: 33031 - DNA, 3360 bp, Zea Mays
aatattattagtggggcaaaaagacacaaatccgaaaccctcgcatcggcctgtacctagccgccgtcgccacagagccctcatctcgtccgtcctcggcggcctccgcggagcagccgtcgctggagcctggagaccaaagatccggccagatctgatgtcaggagggactggctcatccgggcgcgcggccccgcggtacgccccggatgacccgacgctgcccaagccgtggcgcggcctcgtcgacggcaccaccggctacctctactactggaacccggagacgaacgtcacgcagtacgagcggcctgtgccccccgagagccagctcctcccgcctccgcctccgttgccacccccgcctccacggagccgcgaccgccgcgacaggtccagatcccgatcccgcaccccaccccggcgcgaccacagggaccgcgaccgtgaccgtgacaggcgccacgacgagcacgcgtcctccaagacggcgtcttcccaccaccatccggctccggtagccgtcgccgacgatccttccaccgaggcataccgccgccgccatgagatcaccgtcacgggggataatgtgccgactccaataacttcatttgaggctggtggcttcccgtcagaaattctgaaggaggtatgattcagtgggtgaacccacctaactcatgatctaactctaaccctaacagagtcgcatgcgaggaataaaggtcttcaaatatggcgagctaaatggatcgtggacacgtgctccagttgcctgcttgtctctttatttgcttcattgtgctaaatcagggctcgtgtaccaactgcttatctccatatctgtggcagatgcgatatctgctctgaggtggagctaatgtcgtatgctgcctcacgtgccctcggccaatctataagtgggactggctgagggcaggtcttgttgatggagctgccaaggtgggtgagttcctgaggctgctcgctccttcctcgaggggctgccctttgcgcgaaggggcacccactcgtgacacccacggtggccgatttgttgctctgcgtccggttcttggaaggctccccccatggatgatggggcctcttctggggcttgacccgtggaggtctggcccaggctgtcaacgtccatccatatataggatcgggtggcagctgctgcaaggggcctcgtggatcaactatccatgcctgagcgcctccacggattctgttagagccttttctacttcgccttgtgtccgcaagtctacacattgtggacacattttattcatacaacgtgctggattcgcaagcccaacacctatccaagcccagtcatggccaattgctatgcaaaatcaagatgtagtagctattgcaaagactggatcaggcaaaactcttgggtatctacttcctgggtttatgcatatcaagcgcctgcagaacagcactaggaatggcccaacagtgctagttttggccccaacaagggaacttgcaacacagattctggatgaagctgtgaaatttggaagatcttcaagaatttcttgcacgtgcttatatggtggtgctcctaaaggtcctcagttgagagatttagatagaggggttgatgttgttgttgcaacacctggaaggttaaatgacatcttggagatgcgaaaggtaagtcttaagcaagtgtcatatcttgttctggatgaggctgatcgcatgctggacatgggctttgagccacaaatacggaagatagtgaaagagatacctcaccgtcggcaaacccttatgtacaccgctacatggcccaaggaagtccgaaggattgcagatgatcttcttgttcatcctgtacaggtgacaattggaagtgttgattcacttgttgctaatagttctattactcagcatgtagagatcataacaccctcagaaaaacaacggcgcctggagcagatattacgatcccaggattcaggttcaaagatattaatattttgtaccaccaagaggatgtgtgaccaacttgcaaggacactcaccaggcagtttggagcttcggccattcatggtgacaagtcccaaagtgaaagggagaaggttctgaatcagtttcgatctgggcggtctcccattttagtggcaactgatgttgctgcgcgaggtttggacatcaaagatatcagggtagtgatcaactatgacttccccactggtgttgaagactacgttcacaggattggcaggacaggaagggctggtgccactggtgttgcatatacatttttttgtgatcaggattcaaaatatgctgctgacctaatcaaaattctggaaggggcaaaccaacgagtgccccgtgatttagaggatatggcttctcgtggcggtggacgaggtaggaagaggaaccattgggcatcccgccctgacaggggtggttcacgttctgaactggattcaaggtacagcagcagagatggactagcatcttctgggaaatcagagagtggtcgcggcagtcgtggaagggatgataatggtagccgtggcaggtacgaccctggtgaaaccgatgggcgatctcgtaggtctactagaggccgcagtagaagccgtagcaaaagtgacagtagaagccgtagcccaagtcccaagaagtcacgtcgtcatgaaggtagacgtagcaggactaagagcaggagcaggagcaggagccgtagaaatcatggcgctagccacagcaagagtcgcagccctgtcgctagccgtaggtatgaaaagactgcttcaggatctgctcggcctaactcggggcatgcagagcacaaaagccctccaagatctcactctagggatgaccatgtgaaccactctgaccacaaggatgatccgcgtgcaaatgcagctgtgcagaatggtaataactgacggagagtggcctgcatcttctgtgacaaccaagacttatctgttatgcaaaatgcagtcattcccatctgcaagtcctgaatacggaaatgcatttgtgtgccattaaatatctcgtagaacatgtgatactgatgcctctgccatcgatgaaccaaaactgttgatgcatgtcatgtcatgttgttaaacttaatgacattgttgtgttctggtgttttacagccagttctgtaagtgatttatgataaaatatattgtcaggtctggaagtggtagtttatgataactagcaaagttatgttgctacggtttctatttataaagtatagaatataaaatacaaagacatgtgttctgttggttaggtgaatgcgaatatgggtttatagcaaaaaaaccatggtttgaatcttt

SEQ ID NO: 33032 - DNA, 3241 bp, Zea Mays
aatattattagtggggcaaaaagacacaaatccgaaaccctcgcatcggcctgtacctagccgccgtcgccacagagccctcatctcgtccgtcctcggcggcctccgcggagcagccgtcgctggagcctggagaccaaagatccggccagatctgatgtcaggagggactggctcatccgggcgcgcggccccgcggtacgccccggatgacccgacgctgcccaagccgtggcgcggcctcgtcgacggcaccaccggctacctctactactggaacccggagacgaacgtcacgcagtacgagcggcctgtgccccccgagagccagctcctcccgcctccgcctccgttgccacccccgcctccacggagccgcgaccgccgcgacaggtccagatcccgatcccgcaccccaccccggcgcgaccacagggaccgcgaccgtgaccgtgacaggcgccacgacgagcacgcgtcctccaagacggcgtcttcccaccaccatccggctccggtagccgtcgccgacgatccttccaccgaggcataccgccgccgccatgagatcaccgtcacgggggataatgtgccgactccaataacttcatttgaggctggtggcttcccgtcagaaattctgaaggagatgcgatatctgctctgaggtggagctaatgtcgtatgctgcctcacgtgccctcggccaatctataagtgggactggctgagggcaggtcttgttgatggagctgccaaggtgggtgagttcctgaggctgctcgctccttcctcgaggggctgccctttgcgcgaaggggcacccactcgtgacacccacggtggccgatttgttgctctgcgtccggttcttggaaggctccccccatggatgatggggcctcttctggggcttgacccgtggaggtctggcccaggctgtcaacgtccatccatatataggatcgggtggcagctgctgcaaggggcctcgtggatcaactatccatgcctgagcgcctccacggattctgttagagccttttctacttcgccttgtgtccgcaagtctacacattgtggacacattttattcatacaacgtgctggattcgcaagcccaacacctatccaagcccagtcatggccaattgctatgcaaaatcaagatgtagtagctattgcaaagactggatcaggcaaaactcttgggtatctacttcctgggtttatgcatatcaagcgcctgcagaacagcactaggaatggcccaacagtgctagttttggccccaacaagggaacttgcaacacagattctggatgaagctgtgaaatttggaagatcttcaagaatttcttgcacgtgcttatatggtggtgctcctaaaggtcctcagttgagagatttagatagaggggttgatgttgttgttgcaacacctggaaggttaaatgacatcttggagatgcgaaaggtgacaattggaagtgttgattcacttgttgctaatagttctattactcagcatgtagagatcataacaccctcagaaaaacaacggcgcctggagcagatattacgatcccaggattcaggttcaaagatattaatattttgtaccaccaagaggatgtgtgaccaacttgcaaggacactcaccaggcagtttggagcttcggccattcatggtgacaagtcccaaagtgaaagggagaaggttctgaatcagtttcgatctgggcggtctcccattttagtggcaactgatgttgctgcgcgaggtttggacatcaaagatatcagggtagtgatcaactatgacttccccactggtgttgaagactacgttcacaggattggcaggacaggaagggctggtgccactggtgttgcatatacatttttttgtgatcaggattcaaaatatgctgctgacctaatcaaaattctggaaggggcaaaccaacgagtgccccgtgatttagaggatatggcttctcgtggcggtggacgaggtaggaagaggaaccattgggcatcccgccctgacaggggtggttcacgttctgaactggattcaaggtacagcagcagagatggactagcatcttctgggaaatcagagagtggtcgcggcagtcgtggaagggatgataatggtagccgtggcaggtacgaccctggtgaaaccgatgggcgatctcgtaggtctactagaggccgcagtagaagccgtagcaaaagtgacagtagaagccgtagcccaagtcccaagaagtcacgtcgtcatgaaggtagacgtagcaggactaagagcaggagcaggagcaggagccgtagaaatcatggcgctagccacagcaagagtcgcagccctgtcgctagccgtaggtatgaaaagactgcttcaggatctgctcggcctaactcggggcatgcagagcacaaaagccctccaagatctcactctagggatgaccatgtgaaccactctgaccacaaggatgaccacaaggatgaccacatggaagatgggaagatggaaagggttgatcttgatcgctcgcccagcccacacgatgacaagtctgctccatatagtcctgtgtacaatggcaaagccagtggctcaatgagccccaacggtcagccagaggcaggtgccaaatttgttgaaccttctgggaaacctgagcctgcatctccagtgcgctgcagcaaaggcagagatgatgatgaggaaggtatcatagacgaggatggagagattggtgaggatgatccgcgtgcaaatgcagctgtgcagaatggtaataactgacggagagtggcctgcatcttctgtgacaaccaagacttatctgttatgcaaaatgcagtcattcccatctgcaagtcctgaatacggaaatgcatttgtgtgccattaaatatctcgtagaacatgtgatactgatgcctctgccatcgatgaaccaaaactgttgatgcatgtcatgtcatgttgttaaacttaatgacattgttgtgttctggtgttttacagccagttctgtaagtgatttatgataaaatatattgtcaggtctggaagtggtagtttatgataactagcaaagttatgttgctacggtttctatttataaagtatagaatataaaatacaaagacatgtgttctgttggttaggtgaatgcgaatatgggtttatagcaaaaaaaccatggtttgaatcttt

SEQ ID NO: 33033 - DNA, 2521 bp, Zea Mays
aatattattagtggggcaaaaagacacaaatccgaaaccctcgcatcggcctgtacctagccgccgtcgccacagagccctcatctcgtccgtcctcggcggcctccgcggagcagccgtcgctggagcctggagaccaaagatccggccagatctgatgtcaggagggactggctcatccgggcgcgcggccccgcggtacgccccggatgacccgacgctgcccaagccgtggcgcggcctcgtcgacggcaccaccggctacctctactactggaacccggagacgaacgtcacgcagtacgagcggcctgtgccccccgagagccagctcctcccgcctccgcctccgttgccacccccgcctccacggagccgcgaccgccgcgacaggtccagatcccgatcccgcaccccaccccggcgcgaccacagggaccgcgaccgtgaccgtgacaggcgccacgacgagcacgcgtcctccaagacggcgtcttcccaccaccatccggctccggtagccgtcgccgacgatccttccaccgaggcataccgccgccgccatgagatcaccgtcacgggggataatgtgccgactccaataacttcatttgaggctggtggcttcccgtcagaaattctgaaggagatacaacgtgctggattcgcaagcccaacacctatccaagcccagtcatggccaattgctatgcaaaatcaagatgtagtagctattgcaaagactggatcaggcaaaactcttgggtatctacttcctgggtttatgcatatcaagcgcctgcagaacagcactaggaatggcccaacagtgctagttttggccccaacaagggaacttgcaacacagattctggatgaagctgtgaaatttggaagatcttcaagaatttcttgcacgtgcttatatggtggtgctcctaaaggtcctcagttgagagatttagatagaggggttgatgttgttgttgcaacacctggaaggttaaatgacatcttggagatgcgaaaggtgacaattggaagtgttgattcacttgttgctaatagttctattactcagcatgtagagatcataacaccctcagaaaaacaacggcgcctggagcagatattacgatcccaggattcaggttcaaagatattaatattttgtaccaccaagaggatgtgtgaccaacttgcaaggacactcaccaggcagtttggagcttcggccattcatggtgacaagtcccaaagtgaaagggagaaggttctgaatcagtttcgatctgggcggtctcccattttagtggcaactgatgttgctgcgcgaggtttggacatcaaagatatcagggtagtgatcaactatgacttccccactggtgttgaagactacgttcacaggattggcaggacaggaagggctggtgccactggtgttgcatatacatttttttgtgatcaggattcaaaatatgctgctgacctaatcaaaattctggaaggggcaaaccaacgagtgccccgtgatttagaggatatggcttctcgtggcggtggacgaggtaggaagaggaaccattgggcatcccgccctgacaggggtggttcacgttctgaactggattcaaggtacagcagcagagatggactagcatcttctgggaaatcagagagtggtcgcggcagtcgtggaagggatgataatggtagccgtggcaggtacgaccctggtgaaaccgatgggcgatctcgtaggtctactagaggccgcagtagaagccgtagcaaaagtgacagtagaagccgtagcccaagtcccaagaagtcacgtcgtcatgaaggtagacgtagcaggactaagagcaggagcaggagcaggagccgtagaaatcatggcgctagccacagcaagagtcgcagccctgtcgctagccgtaggtatgaaaagactgcttcaggatctgctcggcctaactcggggcatgcagagcacaaaagccctccaagatctcactctagggatgaccatgtgaaccactctgaccacaaggatgatccgcgtgcaaatgcagctgtgcagaatggtaataactgacggagagtggcctgcatcttctgtgacaaccaagacttatctgttatgcaaaatgcagtcattcccatctgcaagtcctgaatacggaaatgcatttgtgtgccattaaatatctcgtagaacatgtgatactgatgcctctgccatcgatgaaccaaaactgttgatgcatgtcatgtcatgttgttaaacttaatgacattgttgtgttctggtgttttacagccagttctgtaagtgatttatgataaaatatattgtcaggtctggaagtggtagtttatgataactagcaaagttatgttgctacggtttctatttataaagtatagaatataaaatacaaagacatgtgttctgttggttaggtgaatgcgaatatgggtttatagcaaaaaaaccatggtttgaatcttt

SEQ ID NO: 33034 - DNA, 2916 bp, Zea Mays
aatattattagtggggcaaaaagacacaaatccgaaaccctcgcatcggcctgtacctagccgccgtcgccacagagccctcatctcgtccgtcctcggcggcctccgcggagcagccgtcgctggagcctggagaccaaagatccggccagatctgatgtcaggagggactggctcatccgggcgcgcggccccgcggtacgccccggatgacccgacgctgcccaagccgtggcgcggcctcgtcgacggcaccaccggctacctctactactggaacccggagacgaacgtcacgcagtacgagcggcctgtgccccccgagagccagctcctcccgcctccgcctccgttgccacccccgcctccacggagccgcgaccgccgcgacaggtccagatcccgatcccgcaccccaccccggcgcgaccacagggaccgcgaccgtgaccgtgacaggcgccacgacgagcacgcgtcctccaagacggcgtcttcccaccaccatccggctccggtagccgtcgccgacgatccttccaccgaggcataccgccgccgccatgagatcaccgtcacgggggataatgtgccgactccaataacttcatttgaggctggtggcttcccgtcagaaattctgaaggagatacaacgtgctggattcgcaagcccaacacctatccaagcccagtcatggccaattgctatgcaaaatcaagatgtagtagctattgcaaagactggatcaggcaaaactcttgggtatctacttcctgggtttatgcatatcaagcgcctgcagaacagcactaggaatggcccaacagtgctagttttggccccaacaagggaacttgcaacacagattctggatgaagctgtgaaatttggaagatcttcaagaatttcttgcacgtgcttatatggtggtgctcctaaaggtcctcagttgagagatttagatagaggggttgatgttgttgttgcaacacctggaaggttaaatgacatcttggagatgcgaaaggtaagtcttaagcaagtgtcatatcttgttctggatgaggctgatcgcatgctggacatgggctttgagccacaaatacggaagatagtgaaagagatacctcaccgtcggcaaacccttatgtacaccgctacatggcccaaggaagtccgaaggattgcagatgatcttcttgttcatcctgtacaggtgacaattggaagtgttgattcacttgttgctaatagttctattactcagcatgtagagatcataacaccctcagaaaaacaacggcgcctggagcagatattacgatcccaggattcaggcagtttggagcttcggccattcatggtgacaagtcccaaagtgaaagggagaaggttctgaatcagtttcgatctgggcggtctcccattttagtggcaactgatgttgctgcgcgaggtttggacatcaaagatatcagggtagtgatcaactatgacttccccactggtgttgaagactacgttcacaggattggcaggacaggaagggctggtgccactggtgttgcatatacatttttttgtgatcaggattcaaaatatgctgctgacctaatcaaaattctggaaggggcaaaccaacgagtgccccgtgatttagaggatatggcttctcgtggcggtggacgaggtaggaagaggaaccattgggcatcccgccctgacaggggtggttcacgttctgaactggattcaaggtacagcagcagagatggactagcatcttctgggaaatcagagagtggtcgcggcagtcgtggaagggatgataatggtagccgtggcaggtacgaccctggtgaaaccgatgggcgatctcgtaggtctactagaggccgcagtagaagccgtagcaaaagtgacagtagaagccgtagcccaagtcccaagaagtcacgtcgtcatgaaggtagacgtagcaggactaagagcaggagcaggagcaggagccgtagaaatcatggcgctagccacagcaagagtcgcagccctgtcgctagccgtaggtatgaaaagactgcttcaggatctgctcggcctaactcggggcatgcagagcacaaaagccctccaagatctcactctagggatgaccatgtgaaccactctgaccacaaggatgaccacaaggatgaccacatggaagatgggaagatggaaagggttgatcttgatcgctcgcccagcccacacgatgacaagtctgctccatatagtcctgtgtacaatggcaaagccagtggctcaatgagccccaacggtcagccagaggcaggtgccaaatttgttgaaccttctgggaaacctgagcctgcatctccagtgcgctgcagcaaaggcagagatgatgatgaggaaggtatcatagacgaggatggagagattggtgaggatgatccgcgtgcaaatgcagctgtgcagaatggtaataactgacggagagtggcctgcatcttctgtgacaaccaagacttatctgttatgcaaaatgcagtcattcccatctgcaagtcctgaatacggaaatgcatttgtgtgccattaaatatctcgtagaacatgtgatactgatgcctctgccatcgatgaaccaaaactgttgatgcatgtcatgtcatgttgttaaacttaatgacattgttgtgttctggtgttttacagccagttctgtaagtgatttatgataaaatatattgtcaggtctggaagtggtagtttatgataactagcaaagttatgttgctacggtttctatttataaagtatagaatataaaatacaaagacatgtgttctgttggttaggtgaatgcgaatatgggtttatagcaaaaaaaccatggtttgaatcttt

SEQ ID NO: 33035 - DNA, 2329 bp, Zea Mays
atttgttgctctgcgtccggttcttggaaggctccccccatggatgatggggcctcttctggggcttgacccgtggaggtctggcccaggctgtcaacgtccatccatatataggatcgggtggcagctgctgcaaggggcctcgtggatcaactatccatgcctgagcgcctccacggattctatacaacgtgctggattcgcaagcccaacacctatccaagcccagtcatggccaattgctatgcaaaatcaagatgtagtagctattgcaaagactggatcaggcaaaactcttgggtatctacttcctgggtttatgcatatcaagcgcctgcagaacagcactaggaatggcccaacagtgctagttttggccccaacaagggaacttgcaacacagattctggatgaagctgtgaaatttggaagatcttcaagaatttcttgcacgtgcttatatggtggtgctcctaaaggtcctcagttgagagatttagatagaggggttgatgttgttgttgcaacacctggaaggttaaatgacatcttggagatgcgaaaggtgacaattggaagtgttgattcacttgttgctaatagttctattactcagcatgtagagatcataacaccctcagaaaaacaacggcgcctggagcagatattacgatcccaggattcaggttcaaagatattaatattttgtaccaccaagaggatgtgtgaccaacttgcaaggacactcaccaggcagtttggagcttcggccattcatggtgacaagtcccaaagtgaaagggagaaggttctgaatcagtttcgatctgggcggtctcccattttagtggcaactgatgttgctgcgcgaggtttggacatcaaagatatcagggtagtgatcaactatgacttccccactggtgttgaagactacgttcacaggattggcaggacaggaagggctggtgccactggtgttgcatatacatttttttgtgatcaggattcaaaatatgctgctgacctaatcaaaattctggaaggggcaaaccaacgagtgccccgtgatttagaggatatggcttctcgtggcggtggacgaggtaggaagaggaaccattgggcatcccgccctgacaggggtggttcacgttctgaactggattcaaggtacagcagcagagatggactagcatcttctgggaaatcagagagtggtcgcggcagtcgtggaagggatgataatggtagccgtggcaggtacgaccctggtgaaaccgatgggcgatctcgtaggtctactagaggccgcagtagaagccgtagcaaaagtgacagtagaagccgtagcccaagtcccaagaagtcacgtcgtcatgaaggtagacgtagcaggactaagagcaggagcaggagcaggagccgtagaaatcatggcgctagccacagcaagagtcgcagccctgtcgctagccgtaggtatgaaaagactgcttcaggatctgctcggcctaactcggggcatgcagagcacaaaagccctccaagatctcactctagggatgaccatgtgaaccactctgaccacaaggatgaccacaaggatgaccacatggaagatgggaagatggaaagggttgatcttgatcgctcgcccagcccacacgatgacaagtctgctccatatagtcctgtgtacaatggcaaagccagtggctcaatgagccccaacggtcagccagaggcaggtgccaaatttgttgaaccttctgggaaacctgagcctgcatctccagtgcgctgcagcaaaggcagagatgatgatgaggaaggtatcatagacgaggatggagagattggtgaggatgatccgcgtgcaaatgcagctgtgcagaatggtaataactgacggagagtggcctgcatcttctgtgacaaccaagacttatctgttatgcaaaatgcagtcattcccatctgcaagtcctgaatacggaaatgcatttgtgtgccattaaatatctcgtagaacatgtgatactgatgcctctgccatcgatgaaccaaaactgttgatgcatgtcatgtcatgttgttaaacttaatgacattgttgtgttctggtgttttacagccagttctgtaagtgatttatgataaaatatattgtcaggtctggaagtggtagtttatgataactagcaaagttatgttgctacggtttctatttataaagtatagaatataaaatacaaagacatgtgttctgttggttaggtgaatgcgaatatgggtttatagcaaaaaaaccatggtttgaatcttt

SEQ ID NO: 33036 - DNA, 2183 bp, Zea Mays
ggcttgacccgtggaggtctggcccaggctgtcaacgtccatccatatataggatcgggtggcagctgctgcaaggggcctcgtggatcaactatccatgcctgagcgcctccacggattctatacaacgtgctggattcgcaagcccaacacctatccaagcccagtcatggccaattgctatgcaaaatcaagatgtagtagctattgcaaagactggatcaggcaaaactcttgggtatctacttcctgggtttatgcatatcaagcgcctgcagaacagcactaggaatggcccaacagtgctagttttggccccaacaagggaacttgcaacacagattctggatgaagctgtgaaatttggaagatcttcaagaatttcttgcacgtgcttatatggtggtgctcctaaaggtcctcagttgagagatttagatagaggggttgatgttgttgttgcaacacctggaaggttaaatgacatcttggagatgcgaaaggtaagtcttaagcaagtgtcatatcttgttctggatgaggctgatcgcatgctggacatgggctttgagccacaaatacggaagatagtgaaagagatacctcaccgtcggcaaacccttatgtacaccgctacatggcccaaggaagtccgaaggattgcagatgatcttcttgttcatcctgtacaggtgacaattggaagtgttgattcacttgttgctaatagttctattactcagcatgtagagatcataacaccctcagaaaaacaacggcgcctggagcagatattacgatcccaggattcaggttcaaagatattaatattttgtaccaccaagaggatgtgtgaccaacttgcaaggacactcaccaggcagtttggagcttcggccattcatggtgacaagtcccaaagtgaaagggagaaggttctgaatcagtttcgatctgggcggtctcccattttagtggcaactgatgttgctgcgcgaggtttggacatcaaagatatcagggtagtgatcaactatgacttccccactggtgttgaagactacgttcacaggattggcaggacaggaagggctggtgccactggtgttgcatatacatttttttgtgatcaggattcaaaatatgctgctgacctaatcaaaattctggaaggggcaaaccaacgagtgccccgtgatttagaggatatggcttctcgtggcggtggacgaggtaggaagaggaaccattgggcatcccgccctgacaggggtggttcacgttctgaactggattcaaggtacagcagcagagatggactagcatcttctgggaaatcagagagtggtcgcggcagtcgtggaagggatgataatggtagccgtggcaggtacgaccctggtgaaaccgatgggcgatctcgtaggtctactagaggccgcagtagaagccgtagcaaaagtgacagtagaagccgtagcccaagtcccaagaagtcacgtcgtcatgaaggtagacgtagcaggactaagagcaggagcaggagcaggagccgtagaaatcatggcgctagccacagcaagagtcgcagccctgtcgctagccgtaggtatgaaaagactgcttcaggatctgctcggcctaactcggggcatgcagagcacaaaagccctccaagatctcactctagggatgaccatgtgaaccactctgaccacaaggatgatccgcgtgcaaatgcagctgtgcagaatggtaataactgacggagagtggcctgcatcttctgtgacaaccaagacttatctgttatgcaaaatgcagtcattcccatctgcaagtcctgaatacggaaatgcatttgtgtgccattaaatatctcgtagaacatgtgatactgatgcctctgccatcgatgaaccaaaactgttgatgcatgtcatgtcatgttgttaaacttaatgacattgttgtgttctggtgttttacagccagttctgtaagtgatttatgataaaatatattgtcaggtctggaagtggtagtttatgataactagcaaagttatgttgctacggtttctatttataaagtatagaatataaaatacaaagacatgtgttctgttggttaggtgaatgcgaatatgggtttatagcaaaaaaaccatggtttgaatcttt

SEQ ID NO: 33037 - DNA, 2087 bp, Zea Mays
tctacacattgtggacacattttattcatacaacgtgctggattcgcaagcccaacacctatccaagcccagtcatggccaattgctatgcaaaatcaagatgtagtagctattgcaaagactggatcaggcaaaactcttgggtatctacttcctgggtttatgcatatcaagcgcctgcagaacagcactaggaatggcccaacagtgctagttttggccccaacaagggaacttgcaacacagattctggatgaagctgtgaaatttggaagatcttcaagaatttcttgcacggcttatatggtggtgctcctaaaggtcctcagttgagagatttagatagaggggttgatgttgttgttgcaacacctggaaggttaaatgacatcttggagatgcgaaaggtaagtcttaagcaagtgtcatatcttgttctggatgaggctgatcgcatgctggacatgggctttgagccacaaatacggaagatagtgaaagagatacctcaccgtcggcaaacccttatgtacaccgctacatggcccaaggaagtccgaaggattgcagatgatcttcttgttcatcctgtacaggtgacaattggaagtgttgattcacttgttgctaatagttctattactcagcatgtagagatcataacaccctcagaaaaacaacggcgcctggagcagatattacgatcccaggattcaggttcaaagatattaatattttgtaccaccaagaggatgtgtgaccaacttgcaaggacactcaccaggcagtttggagcttcggccattcatggtgacaagtcccaaagtgaaagggagaaggttctgaatcagtttcgatctgggcggtctcccattttagtggcaactgatgttgctgcgcgaggtttggacatcaaagatatcagggtagtgatcaactatgacttccccactggtgttgaagactacgttcacaggattggcaggacaggaagggctggtgccactggtgttgcatatacatttttttgtgatcaggattcaaaatatgctgctgacctaatcaaaattctggaaggggcaaaccaacgagtgccccgtgatttagaggatatggcttctcgtggcggtggacgaggtaggaagaggaaccattgggcatcccgccctgacaggggtggttcacgttctgaactggattcaaggtacagcagcagagatggactagcatcttctgggaaatcagagagtggtcgcggcagtcgtggaagggatgataatggtagccgtggcaggtacgaccctggtgaaaccgatgggcgatctcgtaggtctactagaggccgcagtagaagccgtagcaaaagtgacagtagaagccgtagcccaagtcccaagaagtcacgtcgtcatgaaggtagacgtagcaggactaagagcaggagcaggagcaggagccgtagaaatcatggcgctagccacagcaagagtcgcagccctgtcgctagccgtaggtatgaaaagactgcttcaggatctgctcggcctaactcggggcatgcagagcacaaaagccctccaagatctcactctagggatgaccatgtgaaccactctgaccacaaggatgatccgcgtgcaaatgcagctgtgcagaatggtaataactgacggagagtggcctgcatcttctgtgacaaccaagacttatctgttatgcaaaatgcagtcattcccatctgcaagtcctgaatacggaaatgcatttgtgtgccattaaatatctcgtagaacatgtgatactgatgcctctgccatcgatgaaccaaaactgttgatgcatgtcatgtcatgttgttaaacttaatgacattgttgtgttctggtgttttacagccagttctgtaagtgatttatgataaaatatattgtcaggtctggaagtggtagtttatgataactagcaaagttatgttgctacggtttctatttataaagtatagaatataaaatacaaagacatgtgttctgttggttaggtgaatgcgaatatgggtttatagcaaaaaaaccatggtttgaatcttt

SEQ ID NO: 33038 - DNA, 2676 bp, Zea Mays
atcctatcttcagtctcctcaccgcgcgctctctaccgcttgtccgtttcttcctcttccgaggtagcaacgtggtgagtgaggcagccgctgctgtgctgcactgctgctgcggaggcccaagccgaccggcggagagcacccgtccttgggcggcggagggtggaaggtggatgctctaagcccccgcctctctctgccgccttatacccccgcgttttatccttcttctagcttcttcattcacctgttccagaataaggccgggcttgcggatgccggggtgcggagtagcggggagaggtgatgtgggggtatcgtcggccgcgcgccgcactccgccacaagggaagagccgcccctgcctctggatgactatcgctcgcggttacgggaggcaacatgagctcaaatattgcacatcgccacaaagcaaatctctgttactagaagcaagatttggtcgacatgttactaggagcactgcttatctgctccaaaattcccggagcactgcaatgacaagactacagaagtctgggaagtttctgcaacctgtcttggactcctcaagaaattatttgactagtacattctacaatgcaagcttgaagaggagagttctgtcgagggttgagtgctttgtgtcttcagatccaataaacaatggttggttgaaaccaaggaggtcagagaacttcactagtttggagagcgcatgtgttcagccagaatacaaactaccagtcaggacacgtgctgactgtaaagcagagcagtatgaaataacaggctcacctttgagcccttctgatgttcctgctgatgccgttatgattggagatacaaacgagatttctccctggtggcaggagtttccaaagcgctggacggtcgttctcctctgcttctttgcgtttcttctttgcaatatggaccgtgtcaatatgagcattgcaatccttccaatgtcgtcagagttcagctggaatccagcaaccgttggtctaatccaatcatctttcttttggggttaccttctcacacagattcttggaggtatttgggctgacaggtttggtggtaaggtagtactaggatttggggttgtatggtggtcatttgctacagttcttacaccccttgctgccaagattggtcttccatgcttactcaccatgcgtgccttcatggggataggcgagggtgttgccatgcctgctatgaacaacatcctttccaaatggatcccagtctcagagagaagcagatctcttgccttggtgtacagtggaatgtaccttggatcagtcaccggcctgtctttgtcacctctgttgattagcagatttggctggccttctgtcttttatgcatttggatctcttggaaccgtttggtttgcactgtggcaaagcaaagcacacagctctccagatgatgatccggagctaagtaaagctgaaaagaggcatatactgggtggcagtgccttaaaggagcctgtcacttccataccatggaggctaattctatcaaaggctccagtgtgggctctcataatatcacatttttgccataactggggaacattcattcttctaacatggatgcccacatactacaatcaggttttgaagttcaatctaactgagtcggggcttctctgtgtcttgccatggctgacaatggctgtttttgcgaatattggtggatggattgctgatactctagttcagagaggggtctctgtaacaaacgttcgtaagatcatgcaatcgattggtttccttggaccagccttgttcttgacactgctgagcaaagttcggactccagccatggctgtgttatgtatggcatgcagtcagggtagcgatgctttttcacagtctggcctgtattcaaatcaccaagacataggaccacgttatgcgggggtacttctcggactgtcaaacactgctggcgttctggcaggagtttttggtactgctgccactggctacattcttcagaaaggaacggtggtttggaatgtcttttcaactggagagaaaattctcgaataagctgtggacattcctatatgccactatacggaactgtgtgattttgatgatgtcattttggcaaacaaaataaattttagaagagatacatctggaagaaaactccattttatgcaagaggtgtacctgaatctgatgtttgggctatcggaagaaccagatcaaattagggtactgtgtgaggtcaagaaggtacacttggaacttgggaaaattcttgtacacaaagcaaccgcaccaagggcacgtcagatttttgcagttgtttcttgagaagtccaggcttctgtcaagatcaccaatccacatctttttgttttaaaatgattgacagttaaatcgtgtatcaccttgcctttgcttaaggcgctacaggtactgccaaactaatgtatgtgcttttcttatcgaaaaacctaaatgtatgtgcttcagatatcttgaacatctctgctgtttgcgtcattgctactattgtttcgtgtaagctgcataatgatactaaatgatgatggtgtcatttttgttttacttctattgacagacaaaaatatcctcacatgaaaattagattgcatcattggtcacaaaaacaaaaagaata

SEQ ID NO: 33039 - DNA, 2543 bp, Zea Mays
atcctatcttcagtctcctcaccgcgcgctctctaccgcttgtccgtttcttcctcttccgaggtagcaacgtggtgagtgaggcagccgctgctgtgctgcactgctgctgcggaggcccaagccgaccggcggagagcacccgtccttgggcggcggagggtggaagaataaggccgggcttgcggatgccggggtgcggagtagcggggagaggtgatgtgggggtatcgtcggccgcgcgccgcactccgccacaagggaagagccgcccctgcctctggatgactatcgctcgcggttacgggaggcaacatgagctcaaatattgcacatcgccacaaagcaaatctctgttactagaagcaagatttggtcgacatgttactaggagcactgcttatctgctccaaaattcccggagcactgcaatgacaagactacagaagtctgggaagtttctgcaacctgtcttggactcctcaagaaattatttgactagtacattctacaatgcaagcttgaagaggagagttctgtcgagggttgagtgctttgtgtcttcagatccaataaacaatggttggttgaaaccaaggaggtcagagaacttcactagtttggagagcgcatgtgttcagccagaatacaaactaccagtcaggacacgtgctgactgtaaagcagagcagagtttccaaagcgctggacggtcgttctcctctgcttctttgcgtttcttctttgcaatatggaccgtgtcaatatgagcattgcaatccttccaatgtcgtcagagttcagctggaatccagcaaccgttggtctaatccaatcatctttcttttggggttaccttctcacacagattcttggaggtatttgggctgacaggtttggtggtaaggtagtactaggatttggggttgtatggtggtcatttgctacagttcttacaccccttgctgccaagattggtcttccatgcttactcaccatgcgtgccttcatggggataggcgagggtgttgccatgcctgctatgaacaacatcctttccaaatggatcccagtctcagagagaagcagatctcttgccttggtgtacagtggaatgtaccttggatcagtcaccggcctgtctttgtcacctctgttgattagcagatttggctggccttctgtcttttatgcatttggatctcttggaaccgtttggtttgcactgtggcaaagcaaagcacacagctctccagatgatgatccggagctaagtaaagctgaaaagaggcatatactgggtggcagtgccttaaaggagcctgtcacttccataccatggaggctaattctatcaaaggctccagtgtgggctctcataatatcacatttttgccataactggggaacattcattcttctaacatggatgcccacatactacaatcaggttttgaagttcaatctaactgagtcggggcttctctgtgtcttgccatggctgacaatggctgtttttgcgaatattggtggatggattgctgatactctagttcagagaggggtctctgtaacaaacgttcgtaagatcatgcaatcgattggtttccttggaccagccttgttcttgacactgctgagcaaagttcggactccagccatggctgtgttatgtatggcatgcagtcagggtagcgatgctttttcacagtctggcctgtattcaaatcaccaagacataggaccacgttatgcgggggtacttctcggactgtcaaacactgctggcgttctggcaggagtttttggtactgctgccactggctacattcttcagaaaggttcttgggatagtgtgtttaaggtgtctgttgtgttgtacatagtaggaacggtggtttggaatgtcttttcaactggagagaaaattctcgaataagctgtggacattcctatatgccactatacggaactgtgtgattttgatgatgtcattttggcaaacaaaataaattttagaagagatacatctggaagaaaactccattttatgcaagaggtgtacctgaatctgatgtttgggctatcggaagaaccagatcaaattagggtactgtgtgaggtcaagaaggtacacttggaacttgggaaaattcttgtacacaaagcaaccgcaccaagggcacgtcagatttttgcagttgtttcttgagaagtccaggcttctgtcaagatcaccaatccacatctttttgttttaaaatgattgacagttaaatcgtgtatcaccttgcctttgcttaaggcgctacaggtactgccaaactaatgtatgtgcttttcttatcgaaaaacctaaatgtatgtgcttcagatatcttgaacatctctgctgtttgcgtcattgctactattgtttcgtgtaagctgcataatgatactaaatgatgatggtgtcatttttgttttacttctattgacagacaaaaatatcctcacatgaaaattagattgcatcattggtcacaaaaacaaaaagaata

SEQ ID NO: 33040 - DNA, 2568 bp, Zea Mays
atcctatcttcagtctcctcaccgcgcgctctctaccgcttgtccgtttcttcctcttccgaggtagcaacgtggtgagtgaggcagccgctgctgtgctgcactgctgctgcggaggcccaagccgaccggcggagagcacccgtccttgggcggcggagggtggaaggtggatgctctaagcccccgcctctctctgccgccttatacccccgcgttttatccttcttctagcttcttcattcacctgttccagaataaggccgggcttgcggatgccggggtgcggagtagcggggagaggtgatgtgggggtatcgtcggccgcgcgccgcactccgccacaagggaagagccgcccctgcctctggatgactatcgctcgcggttacgggaggcaacatgagctcaaatattgcacatcgccacaaagcaaatctctgttactagaagcaagatttggtcgacatgttactaggagcactgcttatctgctccaaaattcccggagcactgcaatgacaagactacagaagtctgggaagtttctgcaacctgtcttggactcctcaagaaattatttgactagtacattctacaatgcaagcttgaagaggagagttctgtcgagggttgagtgctttgtgtcttcagatccaataaacaatggttggttgaaaccaaggaggtcagagaacttcactagtttggagagcgcatgtgttcagccagaatacaaactaccagtcaggacacgtgctgactgtaaagcagagcagtatgaaataacaggctcacctttgagcccttctgatgttcctgctgatgccgttatgattggagatacaaacgagatttctccctggtggcaggagtttccaaagcgctggacggtcgttctcctctgcttctttgcgtttcttctttgcaatatggaccgtgtcaatatgagcattgcaatccttccaatgtcgtcagagttcagctggaatccagcaaccgttggtctaatccaatcatctttcttttggggttaccttctcacacagggtgttgccatgcctgctatgaacaacatcctttccaaatggatcccagtctcagagagaagcagatctcttgccttggtgtacagtggaatgtaccttggatcagtcaccggcctgtctttgtcacctctgttgattagcagatttggctggccttctgtcttttatgcatttggatctcttggaaccgtttggtttgcactgtggcaaagcaaagcacacagctctccagatgatgatccggagctaagtaaagctgaaaagaggcatatactgggtggcagtgccttaaaggagcctgtcacttccataccatggaggctaattctatcaaaggctccagtgtgggctctcataatatcacatttttgccataactggggaacattcattcttctaacatggatgcccacatactacaatcaggttttgaagttcaatctaactgagtcggggcttctctgtgtcttgccatggctgacaatggctgtttttgcgaatattggtggatggattgctgatactctagttcagagaggggtctctgtaacaaacgttcgtaagatcatgcaatcgattggtttccttggaccagccttgttcttgacactgctgagcaaagttcggactccagccatggctgtgttatgtatggcatgcagtcagggtagcgatgctttttcacagtctggcctgtattcaaatcaccaagacataggaccacgttatgcgggggtacttctcggactgtcaaacactgctggcgttctggcaggagtttttggtactgctgccactggctacattcttcagaaaggttcttgggatagtgtgtttaaggtgtctgttgtgttgtacatagtaggaacggtggtttggaatgtcttttcaactggagagaaaattctcgaataagctgtggacattcctatatgccactatacggaactgtgtgattttgatgatgtcattttggcaaacaaaataaattttagaagagatacatctggaagaaaactccattttatgcaagaggtgtacctgaatctgatgtttgggctatcggaagaaccagatcaaattagggtactgtgtgaggtcaagaaggtacacttggaacttgggaaaattcttgtacacaaagcaaccgcaccaagggcacgtcagatttttgcagttgtttcttgagaagtccaggcttctgtcaagatcaccaatccacatctttttgttttaaaatgattgacagttaaatcgtgtatcaccttgcctttgcttaaggcgctacaggtactgccaaactaatgtatgtgcttttcttatcgaaaaacctaaatgtatgtgcttcagatatcttgaacatctctgctgtttgcgtcattgctactattgtttcgtgtaagctgcataatgatactaaatgatgatggtgtcatttttgttttacttctattgacagacaaaaatatcctcacatgaaaattagattgcatcattggtcacaaaaacaaaaagaata

SEQ ID NO: 33041 - DNA, 1734 bp, Zea Mays
acccattctctgttcgtcttcgtcgatccgaaacgaaaaccagtaaccaccctccaccaccgcgtgctccgtgctcattccccatctgccatctcggctcctcccaacccaaacgacaaaaccctagcctcctcttccgtgtgatgggatgccgtctaaaccctacccccactccctgacctcctctacttcctccgccgccgtggcccccgcgacctggatgtccgcatctgcatggacggcgcccgagtcctgatcgccgctagtgccaccgccgtctgctgcctcgcctgcgctgtctggatcttccgctcctcttcctcctcgttccccgcatcctcaaataagcaccaaccccctcccgccaacttctgcggctgcgcttcctgcggctgccgtgacgccaagtccgccaacggcgagatggccgtgggcggggagaacaagaagaaggcgccggagcctgctccgccggaggcgccctccatgatggagcagctcgtgcccgagatcaccacccacgcgctcagctacctcgactacaccagcctctgccgtctctccatgaccaactccgccatgcgccgcgcagccgacgacgatggcgcctggaaggcactgtatcacaaggattttacggtggagcagggtactataaatcctcctaatggatggaaggcatactatgcggctacaaaagccattattaaccttaatgcagagttctacaatattatcagggaagggtccttaccagcaatgagccgtttttggcttaatgcggactatgtcaagtgtattcatgcgactggggagttctgcactgggggagtgcatttagtggtgcttgatctattgcttcgttagcatagatgttaggtctccttgctctgagtctaagggtggcctgggattgcgaaatggatggagtatgctataagagatactgataggaagccctgctgagcctggttgtgggaaattttgagcattgcactggtggagaagcagagaaattttgagtcaacacttgaattatttgatacaacgcagtgatggagagttggggcatgctgttgaactggggccaagacggaggaggggggcagggcattgccttgcagataagggacgtccgtgtgcgtgtgctcggtgaggtggcatgggtgaacatgaaggcgaacgtgctgttccatgtgaccaacgtctacgagctctgtaacggcaggtggtatatggtccatcaccacagctcgctcatggctgaccctcctccgcacaatatgtttgcttgatgtgctattcttgagcggagattagattatcggacgaagatttcctacctcctccccacaacccttttattcgttgtggatctgctgtttgttggtattgctctggatctccgttccgcagttttgtacagatgtgttttaggtggtaaggcttattataaattggtggcgccctggttgccgcggctgacttgatttatctggcctgcttccagacggtgcgagttgatgagtaaaatcctcatcttctagaacggtcgaagctcaatggtgtttgttctactgactggactgagtcatggtctggtagctgatgatgattccgaatctatggcattcatactatactctagttgaggtgctaattgtaattgtcgctagggaaacgcgtcttctggtgcttgaacagactagatcgagtccgtttcttacgtttgag

SEQ ID NO: 33042 - DNA, 1736 bp, Zea Mays
acccattctctgttcgtcttcgtcgatccgaaacgaaaaccagtaaccaccctccaccaccgcgtgctccgtgctcattccccatctgccatctcggctcctcccaacccaaacgacaaaaccctagcctcctcttccgtgtgatgggatgccgtctaaaccctacccccactccctgacctcctctacttcctccgccgccgtggcccccgcgacctggatgtccgcatctgcatggacggcgcccgagtcctgatcgccgctagtgccaccgccgtctgctgcctcgcctgcgctgtctggatcttccgctcctcttcctcctcgttccccgcatcctcaaataagcaccaaccccctcccgccaacttctgcggctgcgcttcctgcggctgccgtgacgccaagtccgccaacggcgagatggccgtgggcggggagaacaagaagaaggcgccggagcctgctccgccggaggcgccctccatgatggagcagctcgtgcccgagatcaccacccacgcgctcagctacctcgactacaccagcctctgccgtctctccatgaccaactccgccatgcgccgcgcagccgacgacgatggcgcctggaaggcactgtatcacaaggattttacggtggagcagggtactataaatcctcctaatggatggaaggcatactatgcggctacaaaagccattattaaccttaatgcagagttctacaatattatcagggaagggtccttaccagcaatgagccgtttttggcttaatgcggactatgtcaagtgtattcatgcgactggggagttctgcactgggggagtgcatttagtggtgcttgatctattgcttcgttagcatagatgttaggtctccttgctctgagtctaagggtggcctgggattgcgaaatggatggagtatgctataagagagatactgataggaagccctgctgagcctggttgtgggaaattttgagcattgcactggtggagaagcagagaaattttgagtcaacacttgaattatttgatacaacgcagtgatggagagttggggcatgctgttgaactggggccaagacggaggaggggggcagggcattgccttgcagataagggacgtccgtgtgcgtgtgctcggtgaggtggcatgggtgaacatgaaggcgaacgtgctgttccatgtgaccaacgtctacgagctctgtaacggcaggtggtatatggtccatcaccacagctcgctcatggctgaccctcctccgcacaatatgtttgcttgatgtgctattcttgagcggagattagattatcggacgaagatttcctacctcctccccacaacccttttattcgttgtggatctgctgtttgttggtattgctctggatctccgttccgcagttttgtacagatgtgttttaggtggtaaggcttattataaattggtggcgccctggttgccgcggctgacttgatttatctggcctgcttccagacggtgcgagttgatgagtaaaatcctcatcttctagaacggtcgaagctcaatggtgtttgttctactgactggactgagtcatggtctggtagctgatgatgattccgaatctatggcattcatactatactctagttgaggtgctaattgtaattgtcgctagggaaacgcgtcttctggtgcttgaacagactagatcgagtccgtttcttacgtttgag

SEQ ID NO: 33043 - DNA, 1691 bp, Zea Mays
acccattctctgttcgtcttcgtcgatccgaaacgaaaaccagtaaccaccctccaccaccgcgtgctccgtgctcattccccatctgccatctcggctcctcccaacccaaacgacaaaaccctagcctcctcttccgtgtgatgggatgccgtctaaaccctacccccactccctgacctcctctacttcctccgccgccgtggcccccgcgacctggatgtccgcatctgcatggacggcgcccgagtcctgatcgccgctagtgccaccgccgtctgctgcctcgcctgcgctgtctggatcttccgctcctcttcctcctcgttccccgcatcctcaaataagcaccaaccccctcccgccaacttctgcggctgcgcttcctgcggctgccgtgacgccaagtccgccaacggcgagatggccgtgggcggggagaacaagaagaaggcgccggagcctgctccgccggaggcgccctccatgatggagcagctcgtgcccgagatcaccacccacgcgctcagctacctcgactacaccagcctctgccgtctctccatgaccaactccgccatgcgccgcgcagccgacgacgatggcgcctggaaggcactgtatcacaaggattttacggtggagcagggtactataaatcctcctaatggatggaaggcatactatgcggctacaaaagccattattaaccttaatgcagagttctacaatattatcagggaagggtccttaccagcaatgagccgtttttggcttaatgcggactatgtcaagtgtattcatgcgactggggagttctgcactggatgttaggtctccttgctctgagtctaagggtggcctgggattgcgaaatggatggagtatgctataagagagatactgataggaagccctgctgagcctggttgtgggaaattttgagcattgcactggtggagaagcagagaaattttgagtcaacacttgaattatttgatacaacgcagtgatggagagttggggcatgctgttgaactggggccaagacggaggaggggggcagggcattgccttgcagataagggacgtccgtgtgcgtgtgctcggtgaggtggcatgggtgaacatgaaggcgaacgtgctgttccatgtgaccaacgtctacgagctctgtaacggcaggtggtatatggtccatcaccacagctcgctcatggctgaccctcctccgcacaatatgtttgcttgatgtgctattcttgagcggagattagattatcggacgaagatttcctacctcctccccacaacccttttattcgttgtggatctgctgtttgttggtattgctctggatctccgttccgcagttttgtacagatgtgttttaggtggtaaggcttattataaattggtggcgccctggttgccgcggctgacttgatttatctggcctgcttccagacggtgcgagttgatgagtaaaatcctcatcttctagaacggtcgaagctcaatggtgtttgttctactgactggactgagtcatggtctggtagctgatgatgattccgaatctatggcattcatactatactctagttgaggtgctaattgtaattgtcgctagggaaacgcgtcttctggtgcttgaacagactagatcgagtccgtttcttacgtttgag

SEQ ID NO: 33044 - DNA, 967 bp, Zea Mays
ctggtgttttcataatcttcccatgttgataggcatgtgcttgcctatgacaagcaagaaagcttgtgttatgcacatgattttacggtggagcagggtactataaatcctcctaatggatggaaggcatactatgcggctacaaaagccattattaaccttaatgcagagttctacaatattatcagggaagggtccttaccagcaatgagccgtttttggcttaatgcggactatgtcaagtgtattcatgcgactggggagttctgcactggatacaacgcagtgatggagagttggggcatgctgttgaactggggccaagacggaggaggggggcagggcattgccttgcagataagggacgtccgtgtgcgtgtgctcggtgaggtggcatgggtgaacatgaaggcgaacgtgctgttccatgtgaccaacgtctacgagctctgtaacggcaggtggtatatggtccatcaccacagctcgctcatggctgaccctcctccgcacaatatgtttgcttgatgtgctattcttgagcggagattagattatcggacgaagatttcctacctcctccccacaacccttttattcgttgtggatctgctgtttgttggtattgctctggatctccgttccgcagttttgtacagatgtgttttaggtggtaaggcttattataaattggtggcgccctggttgccgcggctgacttgatttatctggcctgcttccagacggtgcgagttgatgagtaaaatcctcatcttctagaacggtcgaagctcaatggtgtttgttctactgactggactgagtcatggtctggtagctgatgatgattccgaatctatggcattcatactatactctagttgaggtgctaattgtaattgtcgctagggaaacgcgtcttctggtgcttgaacagactagatcgagtccgtttcttacgtttgag

SEQ ID NO: 33045 - DNA, 1471 bp, Zea Mays
cataatcttcccatgttgataggcatgtgcttgcctatgacaagcaagaaagcttgtgttatgcacatgattttacggtggagcagggtactataaatcctcctaatggatggaaggcatactatgcggctacaaaagccattattaaccttaatgcagagttctacaatattatcagggaagggtccttaccagcaatgagccgtttttggcttaatgcggactatgtcaagtgtattcatgcgactggggagttctgcactgggtatgtcttgacttcactgcgatcaattcaaagttccaatttttctctggtttctaatccttctgttttgcaatatggtctatgatttatttacaagcctgtacactaaatgattcctatgttgttgacttttaatgcaagatgtttatttggaaaggaataactaatgcatgtacgcacttatttcttgactcgtattttccaaggggagtgcatttagtggtgcttgatctattgcttcgttagcatagatgttaggtctccttgctctgagtctaagggtggcctgggattgcgaaatggatggagtatgctataaggttattatctaattaattttaactcattccatatgttagatcgatgtgaagtaaatttgtttgataattgatacactatcatacttgctagagagatactgataggaagccctgctgagcctggttgtgggaaattttgagcattgcactggtggagaagcagagaaattttgagtcaacacttgaattatttgatacaacgcagtgatggagagttggggcatgctgttgaactggggccaagacggaggaggggggcagggcattgccttgcagataagggacgtccgtgtgcgtgtgctcggtgaggtggcatgggtgaacatgaaggcgaacgtgctgttccatgtgaccaacgtctacgagctctgtaacggcaggtggtatatggtccatcaccacagctcgctcatggctgaccctcctccgcacaatatgtttgcttgatgtgctattcttgagcggagattagattatcggacgaagatttcctacctcctccccacaacccttttattcgttgtggatctgctgtttgttggtattgctctggatctccgttccgcagttttgtacagatgtgttttaggtggtaaggcttattataaattggtggcgccctggttgccgcggctgacttgatttatctggcctgcttccagacggtgcgagttgatgagtaaaatcctcatcttctagaacggtcgaagctcaatggtgtttgttctactgactggactgagtcatggtctggtagctgatgatgattccgaatctatggcattcatactatactctagttgaggtgctaattgtaattgtcgctagggaaacgcgtcttctggtgcttgaacagactagatcgagtccgtttcttacgtttgag

SEQ ID NO: 33046 - DNA, 3186 bp, Zea Mays
ccgagctcccccacattgaccgcctccgtaccagcgacagcctttccttcaatcatccactgccaactcaattttcttgtggaggccgggcccccatcacccgattcatccctgccactttgcatttcaggtttcagctcacctctcgcgttccttctttctccctcccgctcaccgccagcgccaccatgcccaccgagccacccattgctctcgccgcactaaactctccgccgtagccatcgcccttttggcagaaccatgtgtaattacaactgaagacgctagtatgagccaagaactacaggggaggtcggcggacccgatggcggccgatcacgcgctgccattggcgtcatcagcgccgtcctggccggtctcgacgcacccctccgccgcttccgccgccgccgccgcggtctactacttcggcctttctttcgctctagcgcaggggagagcttccggcgggttcgatcttggtggcgcgaggcggcgggggtgccggtggtcgcgggccatggagctggcgctgcaggagaaggtagccgcgcttgagcgccaggtcgcggagctccgctgtcggcgggccgaggacgccagggccaacgagaaggtggcgggaattttcgcgtcccacgaacagcggtggttcgccgagcgcaagtccctgcgccggcaggtgcacgccgtcgtcgccgctgcgcgcgcgcgcgaggccaagcgcgaggaggagaccgcggagctcaggcgccagctggaggagcagcgggacacagtggcgctcaaggacagggccctggagcaggaggtgcagaggcggcaaggcgcggaggagcgactacgagccgcggagaaggcggaggaggagctgcgggagcgcgccggcaaggaggcgatggagcacgccgcggaggtgcggaagcacaaggcggcgttcgtggagctcgtgtccgcgcagcggcagctggaggcggacctggcccgcgccgcgcgcctcgcggacacggcggaggccgagctccgggccgcgctggagcgccgcgacgaggcggcctccacggccgccgacctctccgccgaggccgcacgcctgcggcgggacgccgaccacaaggacaagatcctctcggcgatgctgcgcaagtccaagatcgacatggaggacagggagatgctggtgcgggaggtcaagatgtgcaaggccagacggaagcaggcggagctggaggccgaccggtggcgcaagatgtgggagtcccgtggccaccgccggggctcctccagatcgtcggcgcggggcgtggccgacctgccggccgggagctcagacaagctgctggccaccgacgccgccgtggcgtgcgccaccaatgaaactaagatattgttcgtggaccacgcggagggcgacgccaagaaggaccaccggaagacgccggcgaaggaactgaacgccattgaatgcgtcgaccgctatgctagccatgtcgtcgacgacaagcccgctgtggaggaataccaaggcctgcaggagtggttccagatggagacggagaagtacacggctctgatacaacaccggcacacggcggagatcgaggcgttcacggagcagctccggctcaaggacgagaagttggaggcgttccggtggcgcgcggtgagcatggacgtcgaggcggcgcgtctccggagccggatccacgagctggagggccgtctagcgcggcacgagaagcacagcgccgcgctggaggccctgctccaggacagggaaagcgagaacagagcactcgaggagcagctggagacgctccaagcgcaggcgcttggtgtggagatctgcacgccggcccgtggcagtggccaagacgacgggctcgacgaccagtgcatcgcgtgttcgcccgtggatgccgtccagagaacaatgtcatccggaagctcgcggcaccaagagggcgccgaggtcagcaagtatgagacgaagctggacgagctagtcaccctctccccagaagatcacaaggaggatgcaacagaggcgcttgtagtctcggtcggggatctcgcgtgcgccgtcgccgcggcagcaacgtccgtggaacacgagcgaagacatgatgccccggcgagccggcagtctttcaggtctgagatcgaggaggaggaggaggtgtacaccgagccgggcaatgcacacacgacaggtagctcccaagaggcgacgtctgagctcgcgctcgtggtcgtgccgcctgggcacaagagctctgcttggaagacggacatccacgccctagccgtgtcgtacaagatcaagaggctgaagcagcagctgcttgtgctggagaggctggccaacgaatgcaaggatgaggaagccgcggcgacgaagccgtcagggagtgaagccagctgcagcggcggcggcggcagcaggcagcagccgaggtcgaggtaccacacgatgatgtcgttcctcagcaagcacgtcaggcggtaccagtccctcgacgacaagatcgacgacctctgcgctagaatggaggagagcaagaggagcgcggggcggggcgcgggagaggagagccagagccagagcgcggcgctgggccagttcctggaggagacgttccagctgcagcgattcatggtggccacggggcagaagctgctggagacgcagtccaggatcgcggctggcctcgcgcgcgatcgctgctgctgtggcgacggagaagacggcgtggatatgaagaggctcatggaggtggctggggcgctgctgagggacgtgcagcgagggctggaggtgcggatcgcgcggatcatcggcgacctcgagggcacgctcaccttccacggcatcctccgaagcacgcgctgatatatatacacacacgcacaggcacacacacccgacgctgtcctccagacacagtaaggccccctttgggagggctcctggacggctccggctctagctctttgctggagccctcccaaacgcagcgtccaaaaacagctccggaggaggagctggagccaggaaacgggcaggagccggagccggaaattttggctctgcacggctccgttcgacacttcgcgtagtctgttcatctaccaagtttctttagtgtagttagcaagtagtttgaatgcagtttgaactccgta

SEQ ID NO: 33047 - DNA, 4917 bp, Zea Mays
cgccgcaggagcatcaccacaactgctcctactagtactagttaaaacatctgtcgtcgtgctcacgacatgcgcgcctcctcctccgcaccttcttcttccccttcttcccagtacatcgttgagctcttccaccgtactccaccattgttttgtttctccccatccccatcttcgtcgtcagcaccacccaagcattctccgcgcttgctctgctccaggtggcgctgcggggatgagcggcgcgacggtggaggaggtgcagatccaggaggctctcctcttctctgaaaccatcaagggtctcaagacactgaggtcgcagctgtactccgcggcagagtacttcgagcttgcctacacgcagcaagacgaaaagcaggcggtgacgaacaacctcaaggagtatgccgtgaaggccctcgtcaacaccgtcgaccacctgggctccatatctttcaaggtgtccagcctaatcgatcagaggttcagtgaggccaccgatgccgatctccggatctcctgcatccaccagagaactcaggccagccaagcctgtgtcgacagagagggcatttcgcagcagtccttggtgatcactgccccaaagtatcacaagagatacatcttgccagctcaaggccagtcaatgcccagtgccatgcccaacttcagggagatgaacaaggtggtcgtcacaggcagggcgtctcagatgcatcaagtattcagcgctgaaacaagagctaaagagaagaagcagccttcactcagaaagttgcaatccatcgctcgcctaccttcgcagcgtgcacgttcagcgtcgccagcacagcgtgcgcatcccatggcaccagctaagaacgctacacccaccaacagagataagcgatcggaatcaccagttccttcgacagctccagctccactgacaaggtccgcgtcgctctcaaagaaggcatccttgctcaagacatcaagcgtcagggctcagcccaagaaactggcaccaatgaggacgcaggtcgacaggagcgacgattccaaggacggtgagcgtacccctaagaagagcaagaagttcctcaagtccatcctcagcaggcgcaagtccagaaaagatgagccgctgccgagttactttgacgactactgagccacaggatttttttttcttctccctccgttggacggcaccgcgcgcggtctctgcgtactcctacttcagtttgtttcactttcatccaagtgttatgttctcaatataaatatcgtcttcgtatagaaaatagcttaaagtttacatgaatgcagtgggaagtttcagcaagatgtcatcaccccacttgcctgtttctataagagatgctcagatcaagagtaaacctgtaacagtcgatgggaatacacaagtaacacagaaacatcgggtgtaaaagaggcaattacctctcactctcacgcattgcaacagagagtagaaagtacaagattttctcgaaatattacagctacacaacaatacacaactgatatggatatggcaacgttaacgccagtgctccactccacaaaccccatatatatactccccataccaaatacaatctttgtttggtactttggtccagtggcaaagctagagtgaacttcaagagagtgcaattgccttatgatgtataggtattatctgacaggggtaaatataagtttaaaatttatctactataaccagttttgtattattttagggggtgcatctgcaccacctaaactgactatagctttgcccctggtttggtccattttccgtacattaactctaaacccaacacttgtgtattaagtgacgaaaaaagcatcgtagtttggtatctccctagtccctacttctagcttacaacattacaccctccatcattaacatcctagccaacaaaccaagataacttactacaaaattccaaaaaataatggtccacttggccatacgaaacacatttagattaatttttagtttctgacagaaagagtagctaaaggacttttagaggtcaaaattatatctacaaatataggtgtacattgggtcgtgtcgggttggcccgtggctcaaaaggaccatgctcatgcctcacatccaggctcgacctgacatgtttaacatatcgggtcgtgtcgggttggcccgtggcccaaaaggaccatgctcatgcctcacatccaggctcgacccgacacgtttaacatatcgggtcgtgtcgtgccagccttcgagcttaacgctcggcctatagcacaacacataaaacgttcgatgggttgtgtctgctcgtttagcatggcagcccaggagccagttatgactgcttggctgttaaaagtccgaatgcaaaaccttatgactgcgtggcgagaaaggagacgacaacattgattcggaggagcagggtgacaacatgtatagatatccaaacgtgccgctcggctcggccctggcccgttgtgggcacggcacaaatggactggattgggcacgacacggtcagtgttgcgtgccgagccgggccagcacgtcgtgccacccgttattccgtgtcgatcgggccgaccactgtgtgccgaccatggagcccaaacactagcccgatgtccggggtgccgtgccggttttgtatcaggctaaaatagtgtcgggctttgtgccaaacgggtggcccggcctatatggacatctataacaacatgtgcgcgagagtggaggagcaggccacattgaacgagagacacaaagagatgttcacggcataccctgctaggtcacttcatctagcttaggggtgtttgaatgcctaatatttagaaagtgtttgaatgcactagagctagtagttagtgtctaaaattagttggagaaatctaaacaccctagctaataattcaactattatttatttttagtaaactagttaatagttagctatctatttgttagctagctaattatactagcatcttttagccaactaactattagctctagtaaattcaaatatctaaataactattagatggtctgataaaagtagttaatagctgaaagtagcctagagggggggtgaataggctacacctgaaatttttcactaaaaacttcgagataggtcaaattaaagttgcactggtgcaaaccggttcagttgcttttgtttacaactgaacaagtttgaacctgctcaacttagattaaataatcagttaaacaaatatgacgaagtagtgaaagattttgctaatgacttgccctacagaaaatccactcaaatagatgaatatgaaccaaccaacaatttaaggcacttaacaagaacgcacaagaacacgcgatttaacccgaggttcggcaaccaccacaaaggtgtcctactcctcattgaggagcccacaaagggccgggtcttttccaaccctaatcctctacaaaccgaccaccaaggtcaaggcaatcttttctcaaatttgctcaaagagcgggtaatacaaacttcttggggtcatccacaaatttggagactcccaagcaacctctaaccgtcaaggaacacaaggctccaagagtaacaaatccgcacaaggttaagtttgcaatgagctcaagaacaaagagaatgggagaatcaagatgaaattgacagcgtgttagatcgacttcacctcacaccaaggatccttcaagcgattgaaggagatgcgattttgggtgtgagatgtgaaatgaatgcccttgtttggagtttggtctgctgaggaatcgtggagagagcagaagtgattaagagagagagtgtgggggtatttaaaggatcccccaaaagctggcagccgttgggagaaaagggccaaaaaccggttgaaccggtttccaccagggagaacccggttcactaatctactcagttggagactcgaccggactcaaaaccggttgagccggggaaaatccggttgaaccggttttcaaaaaaaaatctgcacatgacttttctgacagctctgactgtcagactggtcagagcagaggtggcagagaaacagtccagaaaccgattgaaccgatttcaggtccggttgaactggtttcagaggctgaagagcaagttttgaacattttgaagtgaacaaaggtggaactcttgtgggaagtgaaagtggttactcaaggggcattcatgatctagaaaagtgttctcttagatgattttgaaggaatttaaacttagctcattgcacaacttacttaaccattgcggatccagtcacacctgggtttcggggcaccaagacccgggcgcgaacataatcaccaggtgtgctgggaccaagtctcacacatatgatgattcatggcacaggatcgaatgtcacaactgtggcagaacctccaagttatcgggcccacatgcacctgtccttgtctcaaagacctcagacggccatgcatgtgcaccagataacttaacaggatccgtccgattgccccaaggacaccggataaaccacttacaaccagaaccgcgggattaagtaacacaaatcacacacaccaatatttttgcagcggaaatcttattaccaaattttacaagttacaaaaattttatattattttatcggagtgattacaaaagtataagtttgaaatatatgctagctcaaatgaccatcctcagtaagaagataaagacgggttatacttatataagaaggccgagcccaccggcacttaacaccatcaaaagcagcacaaagttagaacctgaaaaacaacagggaataaaaccctgagtatggaattactcagcaagacttacccgactaaagaaaagactctcaagggtatgctggatttgggaatca

SEQ ID NO: 33048 - DNA, 1594 bp, Zea Mays
acggaacagcctcggcctcaggacgcagaaattcgtgtgcggtgccgctttgcctcttatccctcccaactccagcgccgctaggggtcaaatcgaaaaatggcgttgctgagcccgcgcgtgccgcggctgccgccctccaccttcacctccgctgccggtgcccggtgctttggccccgccgcgaggtgccaggcgacggcggcgggcggcgtggcggccgcggggcccccgtcgtcggagctggaggccatccggtggggcagcgccaagctgcagggcgctcgcgacgagatggaggatgaggtcttgctccgcccgggctccctcctcgatggcttctccttcgccgccgtcttggatggacacgccggcttctccgccgtccagttcctcagggatgagctgtacaaggagtgcgcagctgcgttggacggcggcgcggtgctcagcactaagaatctcgacgctatcacggcctccatccagcgtgccttcgccgctgtcgacgccaagctctccacctggctcgagcaaacggacaaggacgactctggtgctacggccactgtcatgtttctcaggagcgatgtgcttgttgtctcgcacattggggactcttgcttggtgatatcacgtggtggaagatctgaagctttgactggctctcatcgaccatatgggaacaacaaaacgtcccttgaagaggtcaagaggatcagagcagcagattgttgatgggcgcatatgtggagacatatctgtatctcgtgcttttggggacataagatttaagacacaaaagaatgaaatgctggtgaaaggagttaaacaaggaaggtggactgataagttcatctcacgaatacaatttaaagatgatatagtaatctcgtcacctgatgtatctctggtagagcttggaccagacgtggaatttgttctgttggcaactgatggtctttgggactacataaaaagctctgaagctgtagcttttgtcagagatcaactccgtcagcatggtgatgtccagttggcctgcgaggcacttggtcagaaagctctggatcaacggtcccaagacaatattagcatagtcatagctgacttggggaggacaaactggaaggcgttgcccgatgaaaggccgaacttgttcttggaactaagtcaagcagtcgcgactgtaggggttgtctcaataggaatttgggtctcgtcgttccttgggttacagtagaactagctactccgtccggatgtgtatattacctactgagtttacatctttctgctagcagtagcagctgcaaaatatatgtatattcgtatatagtgtgtgaattgatagggtaatctgtttgggtaatactgagtgaacgtgtgaagtactgatgaagatcgtgtagttgagctcctggtgagtcatgagtcatgacagctgagtggcttttgagtaatcctcatgtcaaaaaaaaccaagcaaaagaagaagaagaaaaagatcttctcatcagttgctaattgctacaaagccataaacaaatgaaggagtattgaataatggaatcgaataagtgcatggaacaat

SEQ ID NO: 33049 - DNA, 1605 bp, Zea Mays
acggaacagcctcggcctcaggacgcagaaattcgtgtgcggtgccgctttgcctcttatccctcccaactccagcgccgctaggggtcaaatcgaaaaatggcgttgctgagcccgcgcgtgccgcggctgccgccctccaccttcacctccgctgccggtgcccggtgctttggccccgccgcgaggtgccaggcgacggcggcgggcggcgtggcggccgcggggcccccgtcgtcggagctggaggccatccggtggggcagcgccaagctgcagggcgctcgcgacgagatggaggatgaggtcttgctccgcccgggctccctcctcgatggcttctccttcgccgccgtcttggatggacacgccggcttctccgccgtccagttcctcagggatgagctgtacaaggagtgcgcagctgcgttggacggcggcgcggtgctcagcactaagaatctcgacgctatcacggcctccatccagcgtgccttcgccgctgtcgacgccaagctctccacctggctcgagcaaacggacaaggacgactctggtgctacggccactgtcatgtttctcaggagcgatgtgcttgttgtctcgcacattggggactcttgcttgcaggtgatatcacgtggtggaagatctgaagctttgactggctctcatcgaccatatgggaacaacaaaacgtcccttgaagaggtcaagaggatcagagcagcaggtggatggattgttgatgggcgcatatgtggagacatatctgtatctcgtgcttttggggacataagatttaagacacaaaagaatgaaatgctggtgaaaggagttaaacaaggaaggtggactgataagttcatctcacgaatacaatttaaagatgatatagtaatctcgtcacctgatgtatctctggtagagcttggaccagacgtggaatttgttctgttggcaactgatggtctttgggactacataaaaagctctgaagctgtagcttttgtcagagatcaactccgtcagcatggtgatgtccagttggcctgcgaggcacttggtcagaaagctctggatcaacggtcccaagacaatattagcatagtcatagctgacttggggaggacaaactggaaggcgttgcccgatgaaaggccgaacttgttcttggaactaagtcaagcagtcgcgactgtaggggttgtctcaataggaatttgggtctcgtcgttccttgggttacagtagaactagctactccgtccggatgtgtatattacctactgagtttacatctttctgctagcagtagcagctgcaaaatatatgtatattcgtatatagtgtgtgaattgatagggtaatctgtttgggtaatactgagtgaacgtgtgaagtactgatgaagatcgtgtagttgagctcctggtgagtcatgagtcatgacagctgagtggcttttgagtaatcctcatgtcaaaaaaaaccaagcaaaagaagaagaagaaaaagatcttctcatcagttgctaattgctacaaagccataaacaaatgaaggagtattgaataatggaatcgaataagtgcatggaacaat

SEQ ID NO: 33050 - DNA, 1667 bp, Zea Mays
acggaacagcctcggcctcaggacgcagaaattcgtgtgcggtgccgctttgcctcttatccctcccaactccagcgccgctaggggtcaaatcgaaaaatggcgttgctgagcccgcgcgtgccgcggctgccgccctccaccttcacctccgctgccggtgcccggtgctttggccccgccgcgaggtgccaggcgacggcggcgggcggcgtggcggccgcggggcccccgtcgtcggagctggaggccatccggtggggcagcgccaagctgcagggcgctcgcgacgagatggaggatgaggtcttgctccgcccgggctccctcctcgatggcttctccttcgccgccgtcttggatggacacgccggcttctccgccgtccagttcctcagggatgagctgtacaaggagtgcgcagctgcgttggacggcggcgcggtgctcagcactaagaatctcgacgctatcacggcctccatccagcgtgccttcgccgctgtcgacgccaagctctccacctggctcgagcaaacggacaaggacgactctggtgctacggccactgtcatgtttctcaggagcgatgtgcttgttgtctcgcacattggggactcttgcttggtgatatcacgtggtggaagatctgaagctttgactggctctcatcgaccatatgggaacaacaaaacgtcccttgaagaggtcaagaggatcagagcagcaggtggatggattgttgatgggcgcatatgtggagacatatctgtatctcgtgcttttggggacataagatttaagacacaaaagaatgaaatgctggtgaaaggagttaaacaaggaaggtggactgataagttcatctcacgtttttggggtggtggccacaatgtgaaagttgatgggaaaaaaaaactccaattgcatagcttaaaacttttacacaatgaggcgtgcttgcacttgccaaaagttgatcttattaagagcttggaccagacgtggaatttgttctgttggcaactgatggtctttgggactacataaaaagctctgaagctgtagcttttgtcagagatcaactccgtcagcatggtgatgtccagttggcctgcgaggcacttggtcagaaagctctggatcaacggtcccaagacaatattagcatagtcatagctgacttggggaggacaaactggaaggcgttgcccgatgaaaggccgaacttgttcttggaactaagtcaagcagtcgcgactgtaggggttgtctcaataggaatttgggtctcgtcgttccttgggttacagtagaactagctactccgtccggatgtgtatattacctactgagtttacatctttctgctagcagtagcagctgcaaaatatatgtatattcgtatatagtgtgtgaattgatagggtaatctgtttgggtaatactgagtgaacgtgtgaagtactgatgaagatcgtgtagttgagctcctggtgagtcatgagtcatgacagctgagtggcttttgagtaatcctcatgtcaaaaaaaaccaagcaaaagaagaagaagaaaaagatcttctcatcagttgctaattgctacaaagccataaacaaatgaaggagtattgaataatggaatcgaataagtgcatggaacaat

SEQ ID NO: 33051 - DNA, 933 bp, Zea Mays
gacaaagtctggcaagaagctgtggcaataacgggtgtgccacatgctaacaaacaagataggccagagattgttgatgggcgcatatgtggagacatatctgtatctcgtgcttttggggacataagatttaagacacaaaagaatgaaatgctggtgaaaggagttaaacaaggaaggtggactgataagttcatctcacgaatacaatttaaagatgatatagtaatctcgtcacctgatgtatctctggtagagcttggaccagacgtggaatttgttctgttggcaactgatggtctttgggactacataaaaagctctgaagctgtagcttttgtcagagatcaactccgtcagcatggtgatgtccagttggcctgcgaggcacttggtcagaaagctctggatcaacggtcccaagacaatattagcatagtcatagctgacttggggaggacaaactggaaggcgttgcccgatgaaaggccgaacttgttcttggaactaagtcaagcagtcgcgactgtaggggttgtctcaataggaatttgggtctcgtcgttccttgggttacagtagaactagctactccgtccggatgtgtatattacctactgagtttacatctttctgctagcagtagcagctgcaaaatatatgtatattcgtatatagtgtgtgaattgatagggtaatctgtttgggtaatactgagtgaacgtgtgaagtactgatgaagatcgtgtagttgagctcctggtgagtcatgagtcatgacagctgagtggcttttgagtaatcctcatgtcaaaaaaaaccaagcaaaagaagaagaagaaaaagatcttctcatcagttgctaattgctacaaagccataaacaaatgaaggagtattgaataatggaatcgaataagtgcatggaacaat

SEQ ID NO: 33052 - DNA, 661 bp, Zea Mays
ctcctcaaaccaacgaagaagaacaagccttccactcagctagcatccagagcaagcgatcgagcgagctctctcggcttgctagctagctccattatatataacatcgatcgcttgatagtttttggcagctagaggaagaagagagagcagctagtacactagtacagctagcagagcaaaaccagcaaaggcgcgcgatcaggccagaagagaataatggagaagatgaacgtggttgcgagcaggaagcagggcggcgactggatctgccggtcgtgccagtacgtgaacttctgcaagcgcgacgcgtgccagcgctgcggcgaggcgaggctgggcgtggagcggacggactacggcgcgctgggcggcgactgggacgtgaagcccggcgactggtactgctaccgctgcggcgtgaacaactacgcctcccgcgccggctgcttcaagtgcggcgccgccaagaacgagtctccgccggccgccgtcgcccagggctggggctacaccgccgccggccaggccggaatgaagcccggcgactggatctgcccaagactgggctgcaacgtgcagaactacgccaaccgaaccgagtgcttccggtgcagcatgcccaaatcatactacgcaaacttctcttttttcctttttc

SEQ ID NO: 33053 - DNA, 2022 bp, Zea Mays
atcggctctcgagtcgtcggtcgtcgccgtgtcggtgtcgctcgccatatccccttttccccctcccttcgtctcccgactcctgcgatccgccccacctgaaccctactccacgtcgcctcgcctcgccggtaatcgacttccttctcttggcccttatgcaatcggttcgtactccatgctcggattctccatctgatccctatataccaactgcgccgattgtattgtcttaggttgggttgtggctgagccgatctgacccgatcgggtgggtccttgcgccgccgctgcgtgggctcatctcggtcccccgcctgctcggctcgatcggccggggacggcggcggcggcggctagatctgcgatggagggcaacaaggacgacgcggccaagtgcctgcgcatcggcaagggcgcgctcgaagccggggaccgcgcgcgcgccatcaaatttatgtccaaggcaaagcgcctcgacccctcgctgcccatcgatgacctgctcacctcccttctcaacgcgcaagacgactccccggcttcctcatcatcatcgccgcctccaccaccgcaaactgccgcagcaggggcatcggaggcagctgagactgatgggctgagagagaggaagcacaagggcaagaagagggaggaggaggaggaggcgactcctgctgccagggagtacaccgcggagcagctcgaggttgtgcgccaggtcaagaagcacaccagggactactaccagatcctcggcctggaaaaggactgcagtgtcgaggacgtgcgcaaggcctaccggaagctctcgctcaaggtgcaccccgacaagaacaaggcccctggcgcagaggacgccttcaaggccgtctccaaggccttccagtgcctgagtgatgcggagagccgcaagcgctacgaccttgttggctcggatgagccagtaacacaccacaggagggcctccactgcccgtgcatacaatgggttctatgaggatgactttgacccagatgagatattcagaaacttcttctttggcggtatggcgcctgcaaccaccaggcagtttggacagtttggaactttccattttaggactggtgggatgcatgcccatgcccatgcccaacaaaactctggtggctcaactgtcaggatgcttattcagctgttgcctgtcctactgctgctgttgctcaacttccttccatcctctgagcctgtctactcgctgtcccgttcatacccttatgagcataagttccaaaccccacgtggagttgcatactatgtcaagatgtctaatttcgaggaacagtatccataccaaagcactgagcgagcgacgctggagcggcatgttgagagggattattactccataatcacacagaattgcagggttgagctgcagcgtcgccaatgggggctgtcataccagacaccacattgtgatatgcttaaaaattttgaggctgcagcaaagtaataactcatccaattctgtaaggagactatcacaggctggctctcagcactgtatccaggtctgaggaaaaaccagaaaaggctaagtcattccagccgccaaacccactgtgtttgtgtgcggagagagactgctggccactcatgtaaaggcgctgccttagccgccagcttcaagtttgaggggacattttagtttggcttagtagtaaattttgtggaataagtgcctttgataactatacaccactgtccagatgctccctcttagtagtggcaaggagtgcgttaagtagttacttcaaaaagatatgcaagcttcataggggttgatcacatgcaaaccagtgtatgtatatgaagtatatctatctcattcttttaacttttttgaagtgaagactgtagttaaaacagaaatgcaactataacacaaatgtgatattcattttatattagctcgtgtgctgagatgtccaaagatgctaaaatacgatcatcggacatcattccgttggtattggatct

SEQ ID NO: 33054 - DNA, 2142 bp, Zea Mays
agcaagctcatcagcattcgactgctccagctagctgcagtgcagagccataccaaagcctgcttgtgttgtgttgtgttctcttctgctcctcgctcgcacgaataatcagttcaaaccaatggagagggcggcatggggagccagcgacggcggcggcaacctggtgcaggacgccgtcgactacaggggctgtcgggcggacaagtcgagcacgggcggctgggtggcggcggcgctcgccctggggatcgagctgtgcgagcgcctcgccaccatgggcatcgccgtcaacctggtcacgtacctcacggataccatgcacctgcccagcgccgcagctgccaacgtggtcaccgacttcatgggcacctccttcctcctctgcctcctcggtgggttcctcgccgactccttcctcggacggtacctcaccatcgccatcttcgccctcatccaagccatcggcacggggctcctggcagtgtccacggaggtgcggcagctgcggccgccgccgtgcggacccggcgcggctgggccgtgcgagcaggccacggggttccagatgggcgtgctgtacgtgtgcctctacctcatcgcgctgggcaccggcggactcaagtccagcgtctcgggcttcggcaccgaccagttcgacgagcgcgacgcgcgcgagcgcgccgccatgggcctcttcttcaaccgcttcttcttcttcatcagcgtcggcacgctcctcgccgtcaccgtcctcgtctacgtccaggaccacgtcggccggagctgggcctacggcatctgcgccgccgccatgctcgccgccatcgccgtcttcctgtctggcaccaggcggtaccgctacaggcgcagctccgggagccccatcgtgcacatcctccaggtcctcgtcgctgccgcccggaagcggaacatcgccaagcacccgctcgccgtctccgcgctctacgaggaccgccccgagcacgcgcgcatcccccacaccgcccagttcccgtgcctcgacagggcggcggtgatggcaggggacgacgacaacgaggtggggcacgacgggcggccgacgccgaacccgtggaagctgtgctccgtgtcccgcgtcgaggaggttaagatggtggcccgcctgatgccggtgtgggcgacgaccatcctgttctggaccatctacgcgcagatgatcaccttctccgtggagcaggccaccaccatggaccgccgcatgggcggcttcgagatcccagccgcctcgctcaccgtcttcttcgtcggcgctatcatgctcaccctcgccttctacgaccgcgtcttcgtcccgctctgccggagcctcatgaccggccggcaggggctcacgaacctggagaagatcggcatcggcctggtcctctccatcgtcggcatggccgccgcggccatatccgagaagaagcgcctcgccgtcgccgccacaagtggcgtagcagggcatgggtcgctgcccatcagcgtgttcatgctgacgccgcagttcctgctggtgggcgcaggcgaggcgttcatctacacggggcagctggacttcttcatcacgaggtcgcccaagagcatgaagaccatgagcacgggcctcttcctcaccacgctctcgctcggcttcttcctcagcagcgcgctcgtctcgctcgtcaagagctgcacccggtggctcggcgacacaatcaaccacagccgcctcgactacttctactggctgctggccgtgctcagcgttgtcaacctcgtcgcctaccttgtctgcgccatgtgggccacggcaccgaccagcagccaggcggagcagccgcagcccgcgatggtcgccgacgagaaatgctagcaagatatatcagccaccgaacgatcgacctctgttgcaccgatcacttgttaattatgaagggcacaaaatatatattacttgatacgcctaccagtttagaggattttatagttctgatgagtggatgcagtgtcgatgtcatttttcctacatgtcaaaaccaagttcacctctatttattgaaaaataagaaaaatgtttaaatgtaagaggccggtctagcactctagatagtgtggtgtctgagactgagggcttgt

SEQ ID NO: 33055 - DNA, 2468 bp, Zea Mays
gcgcggcagcactccattgcatagcatgggcagcacttccacaccacaccacacctcggctgggcctgggacgggggttgggcagggagcccccctccttccctttttttccccctccctcaaaaaagcacacccacacactcttcttcgttccttgaccgagtaaatcctctctcctcctcccgactctcaattgcttcaaggcttcatgcttcatgctttgtcggccccggcccgcccccctatggctcagccaactgctggagtggtagtggttgcttcctctctcttctcacgtcaccatgatcgataagcctagctagaatataggtggctggcagtggcagtggcagcgctatcctatatagtgccccccggccggtgtgatcgcctcgggagctagccttggaagaagaagcagagagcagagacgccgttgcgtagagggaggaggagtgcttcttcgttcgtcgttgcccaaagcagcagcagtcacttggaattggaccagagcggcgccgagcgctgccggccggccggccgacctctgtttgtagcggcggcagcaccagctctcaactgctcaagcaaaccaattaaagcagccagcagtctgtcacactcacacacacaggcggaaccgaaccggccaatgtattcttcgtcgccggcctgggagaagcgcgtgagcagccaagagcaggagccactcttttgcaattgcagctgcggcaggaggtttcacaggccggcggtcatctgcaggacgccgcactgatggcgacggcggtctcctgtccctactcctcgtctcgcgccggcgcccctgcactgctgctcgtcgcgcttcttcttgccgccgccagctggacgaccaccgccgcggcgaagaacgacacgcagaggttccggcccggcgacgagctccggcggtaccggagggtgcaggcgctgctcaagaggctcaacaagccggcgctgcggagcatccaggcacagccccgacggcgacctcatcgactgcgtgccggcgcacctgcagccggccttcgaccacccgaggctgcgaggccagaggccactggtggcgggcccgccgccggcgaggcccaaggggaatcgcctccgcgacccgataaggaatgacaccgcggaggccgccggcgtccagcagctgtgggcggcgtccggggagtcgtgcccggaggggtccgtgcccatcaggcgtgtcacggagtcggacgtgctccgcgccagctccgtcaggcggttcgggagggcgcccgcgggcagggtgcggcgcgactccgtctccggcggccacgagcacgcggtggggtacgtggccggcgacgagtactacggcgcgaaggcgagcatcaacgtgtgggcgccgcaggtgagcacggcgtcggagttcagcctgtcgcagatctgggtcatcgccggctccttcggcaacgacctcaacaccatcgaggccggctggcaggtcagcccggagctgtacggggacaacgcgccgaggttcttcacctactggacgacggacgcttaccagaccaccggatgctacaacctcctctgctccggcttcatccagaccaacagccgcatcgccatgggcgccgccatctcgcccacctccgcctacaacgccggccagttcgacatcagcctgctcgtctggaaggacccgaaccacggcaactggtggctggagttcggctccggcgagctggtggggtactggccgtcgctgctgttcagccacctggcgtcgcacgcgagcatggtgcagttcggcggcgaggtggtgaacacgcgcgcgtcggggtcgcacacggccacgcagatgggcagcggacacttcgccggggaaggcttcggccgggcctcctacttccggaacctggaggtggtggactgggacaacagcctggtgccgctcgccgccggcttccacgtcaccgccgaccaccccagctgctacgacatccagggcggcgtcaacgccgtctgggggaactacttctactacggcgggccgggcaggaacgtcaggtgcacctagctagtagcagctatagctcttcgtcatctcgtctcggcccgttaacctgatgtgatgatgccgctagctaggattttctcttcttccatatattgcccacaaaaaggttaattaatttctcaaatgcgagagtcacggatcatgtagttttcttttctttttgatttcctattttcttggtggtctctgaacgaaacaaaagggtgaagggttaagctcagttcaaacgtagtccagttcatcaggtcgtagcgacgatgatggtcgtcgagttgtaacgtacgtaaaagccccctgaacaatatgtagccacaaggcacaatctagcagtatatacacgcattgttttactcctttccaaaaaaacaaacaaaaaagaagaagaagaagagaa

SEQ ID NO: 33056 - DNA, 1885 bp, Zea Mays
ggacattctactttttcataaagtagacggacgccatagttatctagctcacataaatcctgagcctcacaatgtgccagctgctttcactggatccctttctctgcatcagagatcagaatcgacggagagtatcgaatccattgttcgcagatatggtcgtcgtttcgtacctatcaagcgggactaatgtatgctgacgcaaaaggaggccgcgcagcgcattatataaaaacccatgtcccaggagttaggagtagccccaacagacgaccactgtatgcttgtggaaatgggcagcagagcagctttcgtggtcgcgtttctcctgagggctatatatgcaggcacgcagatactcaccaaggctgccttcgatgaaggcatgaacacgtcggtctttgttttctacaggcatctgactggtatcctcttcttggtgcctattgcttttgtgcttgagaggaaaactgcccctccactgtcattcagagtctctctgaaattgtttttccatgcactatacgggatctctggagcaataaacatatacggcctcggtctcagctattcttcagcaacatcatcgtctgcgatatttaacctcctgccagctgtggctttctttctggctgttcttttggggatggagacactgaacttgaagcggttccacgggatcgcaaaggctgcaggcgtgttgttcagcactgctggcgtgactgtgctggcgttctaccaaggccccgcattcagatcgttcatccaccacaccgctttctcccatcacaacgtccacgctggggtcgttaccgccgctcatcctaaaagcgtctggatactggggattttcctgacgaccttgtcgactgcatcgtgggctctctggacggttcttcaggggccaatgctggaagcgtacccatccaagctgctcaacacgaccctccagatgatcttcgcgacggtccagtgcttcttcatcgccctagcggccgagagggacttgtcgaggtggaagctggcgctggacatacgcctttacgctgtgatctactctggaatacttgtctcgggagtcgcttactacatgcaagtatgggtgatcgagaagagcgggcctgtcttcttggccatgacgatgccgataaccttgcttgtcaccatcattctgtccctgtttctcggagagccggttaccctgggaagcatcttgggtggactgatcatggtcggtggtctgtacagtgtgctctgggccaagaggtctgagcaggtgcatgccagcaagcagcaaatggcggcgcctactcctcctccagcagaggcgacacaagtgtaggccgagcttagcttgtttgtggttgcacacccccgttgttgatgctggtagtttgcacgtattttgcagacacaagtttgtacgtattttgcagtgactgagatcgagagaactgtgaagttctgattttagataatggaaacctgaatgagcacatgcatcaggcccctaaggactcccctaacagctgctaaaccacgcctagcacttgtcttttgattacagctgacattctcctcctaatcctaagacttgtgcagttgtgcttcatgttgacgacgccaattcggtcacaaagttctctgaacttctcacgcctaagtgacttcgtcgtcaggatgtcagcgaattgttagaaatctgctcccttcgtccacacactcactcacgtgtgtggaatttttgcctgttcgtttggctttaatctgtaccggtttctactgtttctataatattttgtctctataggttacagttgtatctatatgcacttttggatgaacttttggaagtggtggcgatggaagtctttgcaaaccatgg

SEQ ID NO: 33057 - DNA, 1959 bp, Zea Mays
gtcatttgttcggcctactcagcccattacacgtgagtgactactttccccatccgacctgcacataagctgccgccaccgtgtctctcctcttcatccacctcgcgcggagttccgcagcggcgcagctcaaaattcctgccctctcgccatcaaatcatgcgaaggatttgctaaacaggccatccatgttttcgtcatctgtcagtgtcaggtacttgcaaattttctagaaaccttctttagagatccgactaatccattccgtcgatcgagtcccgtccgctccatatggaagaaggcggccgccatgaccatgacgcgggcgaccgcatcagcagcctacccgacgacctcctcttctcaatcctcctccgcatcggatccattcgcgccgccgcgcgcaccagcgtgctctcccgccgctggcgccacgtctgggcccgcctgcccgagctccgcctcggcacatgcgacgagcagccgggggcgacgttcctggacttcgtcgacgccgtcctcgacgcctgctccgccccggccgtccaccgccttgaggtggccatgtactgccatggccttcgagtccatgcgtgccgcctcgtcccgtggctacgcttcgcctcgcagcgccgggtgggggatatccatatccaagtgccatcccagaagaaattcttcttgtctaagcccatcaaagaggagctcgagcttcccgtgtgcgatggagcgacgagaatcaccctctcgctcgagcgacgatggagcctccgcctctgtccggcgggctcgttcatgtcgctgaccgacctgcacataagctgcgccaccatggcaggcagcgagcttggcaaccttgtgtccgagcagtgcccgctcctgaggaatctgtaccttttcgtcaggctggctgctgcttccaacgtgtccatacactccaactcgcttcagtccctctcattcaacgtccaaaacacccagaagctagaagtcatggcccctaagcttgaagtgctggccgtatgtgatgccactaaggcacatatctctgccccaaagctctccgtggtaagttgggacaatgacactggctacaaccctctgtgccaccactttgccaatgctgcccgtcacctccgcctgctacacttgggctcaaagtgtgtatccgcttccctgatgcgtcaattcgatgaagttgatgtgctgaagctgaagctgaacctcctcaatattaagggaacagaggcatacacaaatttattgaatgaaacggctgcactacccaagtgtgaggaattaaagttacgagtgtcattaagggcttcccaacacaactttgcatcaatcatgtttcatatcttaaggagctgcaacaatacaaggaggatttcgataaagatcgattctagcatgattttcaaggctgatggcattattctcgagtcccttgaagaggtgaaaattacttttattagacattgctatggacaagtgcagttcgtggaggagtttgccaggtgccatgcaccaagcctgaaaaagttagtcgtcaactcaccaaccaaagggctacaagagatggtcggcggattgtttgatccggatgtcactgtcaaatgcaatgttatctagcgccagaggggtgtgtctttgaaaaagataaatctatatttgaaatttaccataaaccagctccaccagggaattcaggatctactagtgaactatttagatacacaatagctttaaatccataaaatataataggttttggttggaatgccttgttttgctattgaggtgaatatttgtcaccggctagttcatttttgaactacacgtcgacaaataaaaatgacaaagggagtgtatctttttttttccacatactacacgtgtgtcctgttgatatttattcgcaaaaatgtcttcttttaaaacaaatacaatattttt

SEQ ID NO: 33058 - DNA, 1901 bp, Zea Mays
atccgacctgcacataagctgccgccaccgtgtctctcctcttcatccacctcgcgcggagttccgcagcggcgcagctcaaaattcctgccctctcgccatcaaatcatgcgaaggatttgctaaacaggccatccatgttttcgtcatctgtcagtgtcaggtacttgcaaattttctagaaaccttctttagagatccgactaatccattccgtcgatcgagtcccgtccgctccatatggaagaaggcggccgccatgaccatgacgcgggcgaccgcatcagcagcctacccgacgacctcctcttctcaatcctcctccgcatcggatccattcgcgccgccgcgcgcaccagcgtgctctcccgccgctggcgccacgtctgggcccgcctgcccgagctccgcctcggcacatgcgacgagcagccgggggcgacgttcctggacttcgtcgacgccgtcctcgacgcctgctccgccccggccgtccaccgccttgaggtggccatgtactgccatggccttcgagtccatgcgtgccgcctcgtcccgtggctacgcttcgcctcgcagcgccgggtgggggatatccatatccaagtgccatcccagaagaaattcttcttgtctaagcccatcaaagaggagctcgagcttcccgtgtgcgatggagcgacgagaatcaccctctcgctcgagcgacgatggagcctccgcctctgtccggcgggctcgttcatgtcgctgaccgacctgcacataagctgcgccaccatggcaggcagcgagcttggcaaccttgtgtccgagcagtgcccgctcctgaggaatctgtaccttttcgtcaggctggctgctgcttccaacgtgtccatacactccaactcgcttcagtccctctcattcaacgtccaaaacacccagaagctagaagtcatggcccctaagcttgaagtgctggccgtatgtgatgccactaaggcacatatctctgccccaaagctctccgtggtaagttgggacaatgacactggctacaaccctctgtgccaccactttgccaatgctgcccgtcacctccgcctgctacacttgggctcaaagtgtgtatccgcttccctgatgcgtcaattcgatgaagttgatgtgctgaagctgaagctgaacctcctcaatattaagaggcatacacaaatttattgaatgaaacggctgcactacccaagtgtgaggaattaaagttacgagtgtcattaagggcttcccaacacaactttgcatcaatcatgtttcatatcttaaggagctgcaacaatacaaggaggatttcgataaagatcgattctagcatgattttcaaggctgatggcattattctcgagtcccttgaagaggtgaaaattacttttattagacattgctatggacaagtgcagttcgtggaggagtttgccaggtgccatgcaccaagcctgaaaaagttagtcgtcaactcaccaaccaaagggctacaagagatggtcggcggattgtttgatccggatgtcactgtcaaatgcaatgttatctagcgccagaggggtgtgtctttgaaaaagataaatctatatttgaaatttaccataaaccagctccaccagggaattcaggatctactagtgaactatttagatacacaatagctttaaatccataaaatataataggttttggttggaatgccttgttttgctattgaggtgaatatttgtcaccggctagttcatttttgaactacacgtcgacaaataaaaatgacaaagggagtgtatctttttttttccacatactacacgtgtgtcctgttgatatttattcgcaaaaatgtcttcttttaaaacaaatacaatattttt

SEQ ID NO: 33059 - DNA, 2268 bp, Zea Mays
ctgcacataagctgccgccaccgtgtctctcctcttcatccacctcgcgcggagttccgcagcggcgcagctcaaaattcctgccctctcgccatcaaatcatgcgaaggatttgctaaacaggccatccatgttttcgtcatctgtcagtgtcaggtacttgcaaattttctagaaaccttctttagagatccgactaatccattccgtcgatcgagtcccgtccgctccatatggaagaaggcggccgccatgaccatgacgcgggcgaccgcatcagcagcctacccgacgacctcctcttctcaatcctcctccgcatcggatccattcgcgccgccgcgcgcaccagcgtgctctcccgccgctggcgccacgtctgggcccgcctgcccgagctccgcctcggcacatgcgacgagcagccgggggcgacgttcctggacttcgtcgacgccgtcctcgacgcctgctccgccccggccgtccaccgccttgaggtggccatgtactgccatggccttcgagtccatgcgtgccgcctcgtcccgtggctacgcttcgcctcgcagcgccgggtgggggatatccatatccaagtgccatcccagaagaaattcttcttgtctaagcccatcaaagaggagctcgagcttcccgtgtgcgatggagcgacgagaatcaccctctcgctcgagcgacgatggagcctccgcctctgtccggcgggctcgttcatgtcgctgaccgacctgcacataagctgcgccaccatggcaggcagcgagcttggcaaccttgtgtccgagcagtgcccgctcctgaggaatctgtaccttttcgtcaggctggctgctgcttccaacgtgtccatacactccaactcgcttcagtccctctcattcaacgtccaaaacacccagaagctagaagtcatggcccctaagcttgaagtgctggccgtatgtgatgccactaaggcacatatctctgccccaaagctctccgtggtaagttgggacaatgacactggctacaaccctctgtgccaccactttgccaatgctgcccgtcacctccgcctgctacacttgggctcaaagtgtgtatccgcttccctgatgcgtcaattcgatgaagttgatgtgctgaagctgaagctgaacctcctcaatattaagggaacagaggcatacacaaatttattgaatgaaacggctgcactacccaagtgtgaggacttaatggttactaaaaaataactaatcatatgacataggcaactttcgacgtaactaagtaatgctagtctcaaccacataggtctatatgctggtaatatccataggtctatatctactaccacattgtgccacaacggatacccgttacctgctcgtctgcccactacaatttcagcatcagtatcaaacaaaaattttatcgcaattcaacaattccagtaccaaacaacaatatataatttaaggtatggataaccacatgtttgatacccatatgaatattacatatccatacccgcgatttttcctgcggatgccttattatatccatacctatacacgtagataacaaattacgcagtatccatactcgatggataattatctccaattatttgtccatactcgtacactaccatccctaatctgatggacagtctcgaggcgtgttcgtggtttctccagtgtatatcgtggggagctcctttaggactctgaagccaggttgttactccatctcccacgaatggtccaagccccagtggcagctagccacacaaatacaatatcatgcccttactccttgtcctggatctacggccgggggcccacaaccccagtttagggcaccattgctaggggcgggaccatcaaaccccgagttaccctttggcaccatcttctgttaggtcgaatggccctaaaactttcgtcttcaccttcttgagaaatacaaccggaccatcaaccctatcaaatttctccaaatctatgctactgttatccttgccgccaacagtgatgaggaggtaatgacaaattactttcaggtagccttgatcggctcgacttggtcatggctcatgaatctcctagaagtcttgttcggctctttgaaggaactctgctgccaatttgtgtctaactttgaaagcacctactcacgacccgatgtggagttagatctccacgatatctagcagcagcatgggagaccctgcacatgtttgtgcataggtttgag

SEQ ID NO: 33060 - DNA, 1092 bp, Zea Mays
cctctcgccatcaaatcatgcgaaggatttgctaaacaggccatccatgttttcgtcatctgtcagtgtcagaagctagaagtcatggcccctaagcttgaagtgctggccgtatgtgatgccactaaggcacatatctctgccccaaagctctccgtggtaagttgggacaatgacactggctacaaccctctgtgccaccactttgccaatgctgcccgtcacctccgcctgctacacttgggctcaaagtgtgtatccgcttccctgatgcgtcaattcgatgaagttgatgtgctgaagctgaagctgaacctcctcaatattaagggaacagaggcatacacaaatttattgaatgaaacggctgcactacccaagtgtgaggaattaaagttacgagtgtcattaagggcttcccaacacaactttgcatcaatcatgtttcatatcttaaggagctgcaacaatacaaggaggatttcgataaagatcgattctagcatggtgtatctttgcccatcctcttgcttttgtctcgggccgcagattttcaaggctgatggcattattctcgagtcccttgaagaggtgaaaattacttttattagacattgctatggacaagtgcagttcgtggaggagtttgccaggtgccatgcaccaagcctgaaaaagttagtcgtcaactcaccaaccaaagggctacaagagatggtcggcggattgtttgatccggatgtcactgtcaaatgcaatgttatctagcgccagaggggtgtgtctttgaaaaagataaatctatatttgaaatttaccataaaccagctccaccagggaattcaggatctactagtgaactatttagatacacaatagctttaaatccataaaatataataggttttggttggaatgccttgttttgctattgaggtgaatatttgtcaccggctagttcatttttgaactacacgtcgacaaataaaaatgacaaagggagtgtatctttttttttccacatactacacgtgtgtcctgttgatatttattcgcaaaaatgtcttcttttaaaacaaatacaatattttt

SEQ ID NO: 33061 - DNA, 3505 bp, Zea Mays
gatttgacaaatagggaatccatatttaccacataatactttgcttttgccgtccatgtcacgctattatatataaagtgacacaccatgacaccaccacaaaactaaaccctactttggcctgctttccaatgtgcccaaccaataacaacacgacccgaccgggagtagagtagacaaagcagcagacacacagctagcaggcatagctatagcacgatggacactagctagtagtagttgtagatggtggcgtccaccagcggcaactgctggtactggtacatggcgtcgcctgcttgcatgcactggatgaggtcgacgagggactggaggcgcgcgctgagctccacggtccgggcgtgcagcatcgcgttctcggcctgcacggcgacgcaccggcgcgcggcgtcgcgggcggccgcgtccatggcgccgttgcgggcgcgcagcgcggccacctgcgccgtgaggtcgtccagctgccgctgcttgcgcgcgcgggaccgctgcgcggacagccggttcgactccttgcgcttgcgcttcctctcggcggccagctgcgggtcgggccccagctcggacccgccggtcgacgacggcgacgtggtcacggtcgtagacaccgtgctgggagtgggaggagaggccatcatatgcacacactgttcttttttcttttcccttctttttatgcgtctcgacgacgattaattacctggttaacgatcgatcgagatggagcagctagtttgttgctgtgttttactactaagccggactatagctatagctacaagctaagttgccgacagggattcagaacttggatctggaagagcgcgcgagcagtcgatggacacgggggtgtggtttaattaattatgagaagacgtagaaccagtagaggaagacgacggagaaggactggacgagcacagtggatgttatcataaacacgacagcagcggcaccatcaaataaagcctagaggctgttgcttggttgcacaaaacgcatgcaaagcaaatcacggaagcaacgctgtgtgtgccgcgaaagaaagaacaaaaatccagcagagttttcccttgaacaggcaaggtgaaatcttttgacagggtgccgcgcgccctggacgtacaagcaggttttggagcgccggaaatttcggcagagtgacgccctagacagcagtgtttctggcgaaaaatttcggcagagtgacggcctgaaaagctagctaggttcttcttgtaaaaaaatccggcagagccttgccctgatcagcaaagctaagctggtttgtgacggcaaaagggttttagtttggctggacaacaggcagttgctaataactccgacgagaagagaaggtcgatcgaccggggacagaacagaacctcccagggcacagggaacaaaaggcacaggcggtctgcaggcaaaagggccggggatcacggcagtgtgtggtaggtgaggtgagggcggcggcggtggtggtcgttggcaactgctgctagtcgctagcttgcagtgcagcgggacagcatgcggctgcaaggaaacctagagaggcgagtcgagagaaggggaaaagggaattggggcttggaagcgcggctgaatttatagccggccgggggaggaggaagaggaggaggagccttggcgagcttggcttgcttaggcgttaagtggggtgggggaaaaacaaagcgaaaggccggtgtgtgcggtggtggtggtggtggaggaggagaaagcgaccacggccggggaaagcaggcagggaaagcgagagggaggaagagggcctttggaatctcaggttaggtgtcgctcgaggattccattaggttttgccttgggttgggtaccttgctttgagtggtgctgcacctggcacctgcactgcatggagaactggagttagttaggcctaactagggttaaggaatctcaggttagataggtcagtcaagttttttttttataaagtcaaggttgggggctggttgtcacactgacacctgtaccttgcaacccgatttttttattttacctcttttgctaaaaaaatttccatgtttagactcctggacgacttaatctcgtttggacctcttgttcggtgtcataggtcgtgagtcgtgacgccgaggtaacactgctcgccgtcacatcctatggcgccaagttacctgcctcactggcgacggaggcctgacgcggcaccgacgtggcacctaaatcgatgttgcatatcttggttccgagctatgaagtgttataaatcgctccttcccttgccgagagctacgcccaaccatttatctcccttgcttttctctttatccataccgtcgagaggtgctctaatctttgtattcgagttggaaaactttgatttgatccgtatatatagcttgaagaccagggtatggtgtttcactgattcgtttgttacgtatattgcgtagtatggttccgatttattagttttgattggtgcacatattgctattagttatggtttctaagatatatggttgatatgatgactacaattcgttagatagttactgaaccatgggtttataaaatctttagggtttttgaaactatgagtaccatgttatttataagtttaaatcttcgtatttgagttttaaaacttcgattcggtccatatagcttgaagatcaaggtatgatgtctcaataattcattttcacctatattgcatagtatggtttatttagggttttgattaattagttttgatcggtgaacttattgctattagttatggttgttgatatgatgattacgatttgctatatagtttgtgaatcgcgggtttaaaaaatctttagggttttgaaaccatgagtaccatgttatttaaaagtttaaatcatttttgctatttctatagtcatattaatataaaatcgtttcgtaaatggagacatgtatcgagagatgttgtggcagaagagaggtagtactcgagagttatatcataatgcatcatcttgagcttcatgtgtctaattgtgactatggcaggccgacttgggtattttaatctaacatccagatacggttgctcgttgtttttacacatgtggtcgttttaatttatgtggtcttttacttgtatgttgttactattaaatagatgtgtactaatgcttcatttcatttcttgtaggatcatgagagctgttcttttccagtggatcgacggtcttgataagtttgactctcgatatctccttttcgataattggttgtgcgagaggaatacacatgagcgttttaagcattgggtgcctcctccccgacccgccaccaatgacagatgaggagaagaacatagccacacaaagacggctggagtctctgtctcggtgcgattgcggagatcgtcctgtgacatgtgaggacactgcgaagtacttcgtatgtcccaacaataattatgtaagtg

SEQ ID NO: 33062 - DNA, 1227 bp, Zea Mays
gtctcgcctccggtcagatcagattagcctccatggccgccgatcgccgcttcaagatctttgcagccgccgatggcttcggccagccactcaaggacgccgtcgtcgcttatctccgcgcccaccccgccgtcgccgaggtcgttgacctcggcgtcgacaagtactacgccgccgccgcagccgtcgcccgacacgtctcctctcccgactcggagcctgacgcccccgaggtccgcggcgtcgtagtctgcggcaccggcgccggcgtctgcatcttcgccaacaagtacccgcgcgtctacgccacccactgtgcttcccccgccgacgccgtcaacacacgctccatcaacgcctgcaacgtcctcgctctctccggaatcgccacgcagcccgacgccgcggccgccatagccgattcctggctcgccacgcccttccgcgccccttgccccgcctccggcgacgcgccctggccggaggacatccaggggttcttcgacaccgcgccagacgagatggccgccatcccggaggcggaggatgccccggactcggtctgcgccatctgctgcctcaggaacgggatggagttcgagccggtggggattatgcccggcggcgagatgcggatcgtgcgggagagccccacctcggcgtacgtccgcttcaaggctggcagtgtggagccagcgcaccatcacacctttggccacgacctggtggtcatcaagggcaagaagaagggtcaagtactttgaggacacagagttcttcatccgttgggatggccactgggacatctttctcgacgaggatctcgacactgcacgcagtgccattgacgcggagcttgcagctgccagcaagtgagatcatgccatctatgtgcagtgatggcaacgcttctgaaggtgctatgctcacatatcctcatttgggattgtgattgatggtcttgcttccataatgtttgttattcgaactctgtgtatgatcctcatcgtcctgtcttgttattttgtggaattatggttattgacaacgatgatggtacaatttggttactgaatcaagttgcatatacatggaggttgttggtctttgttcttggaactaatttcatgtttatggtacctccattttacacctgtttagttgagttacccttgatacataaactagctgcgttagctctgctgttttgtgactttcaacatccaa

SEQ ID NO: 33063 - DNA, 1708 bp, Zea Mays
ccgagccatgactcctagggtctggaaacaaaccacggagctgtgaccgctccgtgtccgaggagagcggcggcggcgcaaggagtcttcctctccgacgccggcaacgtcgacaccgctggcaaacttctctccgattgtccctgctccagtaagagtaggcgaggacgagcctcccccatcttgggtgttggtgcctgacccattttctcaagttttgctatggatatgagcaatagagatcaccttaggaggagggaggatgatgatgatgacctcttccttttgattctcccttccctacatctcttgggctatcttggacgtagtaaaaagaaattgaggcatacatcaacgctgaccggggaggaaaaggttcgagagctgcttgaaggccatatcaagaactgcagggtatcatttagaatggaaccttacattttcaaatccttggcgaactatcttagaatggaaggattggttaaagatacaagaatcaaagttgaggaaaaacttggcttcttcctatacatgattagccacaatgcgacatttgaagatctccaagtcttttttggtcatagcaatgatacatttcaccgtgttatcaaacatttcttcgacattgttatccctggccttagcatgcggttcctaaagcctccttccaatcaagttcatcctaaaattcatggattgttgctgatccaccaatatgggaaaacatcataaaagtaagtttttgactccagctttataattgtgaacttatcataaagtagtttaggaacttactttttgacaatgttttatcagtcatttcctagggccaagaaatttcaaaagaagtctttccctctctttgatgctcttggggaactatatgatgggcacattgctcaagggacctggaacataacatctacacaactaccacaagaatggaacacaatttcaaatgaagaagaacaagtgaacaccacaagaatggatgaggaaggcattattcaacaacaaccacaagaagaggattcaagattggaacaagatgaagatcctataattgaaaggactgaacagaggtctactgcaatgagaaggtctactgcatcaacaatcaatcaagataaggaagcaaagaggatgaagaaggattctttggaaggacttgttgggagatatctagatctgaaatcaaaacaagttgaggatgaggttacacaaatggtgaaaggaaaagaatctgctcaaggtaatgacttctccatcatgagatgcatttctgttcttagatctatgaatgtgacagcagatgagaagataaaagcagctgaggtgttcgacataccaaacaacagagagacatttatcagttttagtgttgatgaaccagaaactgccctcctatggttaagacggaagattgataagctctaaggaaatattggtcatatggagacagttctgcacagcgttttgagtgccagtatgagctatatatatgttgcatttctccatgtttgggctcagcatgtaatagaaccgaaggaaggttgttgcgagacttgtatggcatgcttaaatttctggataaaatctagcatatactaagtctattacatgcttaaatttttgaaaaaatatgtatcgagaattggatggaatgcttaaatttctagataaatgacatgttctatgtttaaatttc

SEQ ID NO: 33064 - DNA, 482 bp, Zea Mays
atgactcctagggtctggaaacaaaccacggagctgtgaccgctccgtgtccgaggagagcggcggcggcgcaaggagtcttcctctccgacgccggcaacgtcgacaccgctggcaaacttctctccgattgtccctgctccagtaagagtaggcgaggacgagcctcccccatcttgggtgttggtgcctgacccattttctcaagacaggaaatattggtcatatggagacagttctgcacagcgttttgagtgccagtatgagctatatatatgttgcatttctccatgtttgggctcagcatgtaatagaaccgaaggaaggttgttgcgagacttgtatggcatgcttaaatttctggataaaatctagcatatactaagtctattacatgcttaaatttttgaaaaaatatgtatcgagaattggatggaatgcttaaatttctagataaatgacatgttctatgtttaaatttc

SEQ ID NO: 33065 - DNA, 2098 bp, Zea Mays
aaagccgctcggttcgctcacctgcctgtgttgcctagttgccttgcgacttgcgagtgggcggcggagtgcccgagtcggtgcggccgtgcaggagcgtttgctgtctccgtttccgtcccgttccctttcgtggactgttttggaaggcgttgcgatgagacgctgctgcggcggcggcgaggagtgcatccctcggcgatgagcagaatcaccacgggatcttaatctcccttgcctcgtttgcggagagcctgcgctgtcggcggcggcgcacccccctccccttcccccggtgcttccgtctgctggctggactcagttcttccaactcggcccttaacaagagaacgacgaccatgccgatgcgtggcgtcgatttcaagtggtatgatgggttcttcctctccatgctcgccactagcgtaattatcgtttccattaattggaagaggtatcgcctgtgtgcccacccgctccacatttggatagtggtggactacaccactgtcttcatcttccgcctcctaatgtttgttgataatggtctcgctgcaggaatgggattgtaagtcattttaagccccaccccccatcttgctttttttttcctaattcagcaaagtatcgcaatacaaactaattgcactgcaatttagcattttgtatttacatatgcaaacacgtctttgctgacccttgctgcaattgagcatcatattcatgctctcactgctttatcagccaccaaaaaagctaaatagaaaagcaagttgtcagcagacatgctaacagcgcgatggtttagcacccaggtgtggcgctccgcacctgggtcaagccctggcgctgcgtgggtcgtgtgcccacctctctggtttgtaacagaacagatggttccgtgaccgccaaagaagcaagcacgtgtgaggttcctgcctgctttctagagttcagtgggcccctactttaagagatctcggatggcaacagagatatgctcgtttttgtggaagaataattgtcctctcagttcttgtgctacttctctacccctttctctgggtttggactgtgattggaacattgtggtttagcactgcaagaggctgcttgccagaggaaggacaaaagtggggcttcttgatatggctgcttttcagttactgtgggctcgcctgtattgcttgtgtagctattgggaagtggttacaccgaagacacgcacttcaacagagagcacaacaaggaattccagtctctgaacatggggttttagttgatatgatccgtgttcctgactgggcatttgaggctgttggcctggaaatgagagtgggtcaagatactgcatatcatcctggtctttatttaactgatgctcagagagaagcagttgaggcactgattcaagagcttccaaaattcaggctgaaagctgttccaacggactgcagtgaatgccccatctgccttgaagaatttcatgttggcaatgaggtccgtgggctcccatgcgcgcacaatttccatgtggagtgcatcgaccagtggcttcggctgaatgtcaagtgcccacggtgccggtgctccgtcttccccaacctggacctgagtgcgttgaacaatcttcggtcgaccagcgagccggaccatccatccgccagcgccagcaatgtaacgacggcaactgcagcgacgagatacgtgaggtcgcagccggcaggtcaaagctatttggtgcggttgcaggggctgctgctccgccctgtccggcacgatagcgtggagagtgacggtgagccggcggtgggcaacagtcgcttggttggcaccgaagagctgcctagcatacttgtagacgatggccatcagctgccagatcgctgactgatttgatgacctgatggatccagcatacttgtcagcataatttaggatacttgtcagcttttcttttacagttttcttttgcaaatgaaatgcgagttttgttgaaagaattttttttaactgaacactgaaataagcaaataaaattatttagctcaaaggaaataaaattacattacttaaagaaatcacacaatacatacaa

SEQ ID NO: 33066 - DNA, 1586 bp, Zea Mays
aaagccgctcggttcgctcacctgcctgtgttgcctagttgccttgcgacttgcgagtgggcggcggagtgcccgagtcggtgcggccgtgcaggagcgtttgctgtctccgtttccgtcccgttccctttcgtggactgttttggaaggcgttgcgatgagacgctgctgcggcggcggcgaggagtgcatccctcggcgatgagcagaatcaccacgggatcttaatctcccttgcctcgtttgcggagagcctgcgctgtcggcggcggcgcacccccctccccttcccccggtgcttccgtctgctggctggactcagttcttccaactcggcccttaacaagagaacgacgaccatgccgatgcgtggcgtcgatttcaagtggtggactacaccactgtcttcatcttccgcctcctaatgtttgttgataatggtctcgctgcaggaatgggattagatctcggatggcaacagagatatgctcgtttttgtggaagaataattgtcctctcagttcttgtgctacttctctacccctttctctgggtttggactgtgattggaacattgtggtttagcactgcaagaggctgcttgccagaggaaggacaaaagtggggcttcttgatatggctgcttttcagttactgtgggctcgcctgtattgcttgtgtagctattgggaagtggttacaccgaagacacgcacttcaacagagagcacaacaaggaattccagtctctgaacatggggttttagttgatatgatccgtgttcctgactgggcatttgaggctgttggcctggaaatgagagtgggtcaagatactgcatatcatcctggtctttatttaactgatgctcagagagaagcagttgaggcactgattcaagagcttccaaaattcaggctgaaagctgttccaacggactgcagtgaatgccccatctgccttgaagaatttcatgttggcaatgaggtccgtgggctcccatgcgcgcacaatttccatgtggagtgcatcgaccagtggcttcggctgaatgtcaagtgcccacggtgccggtgctccgtcttccccaacctggacctgagtgcgttgaacaatcttcggtcgaccagcgagccggaccatccatccgccagcgccagcaatgtaacgacggcaactgcagcgacgagatacgtgaggtcgcagccggcaggtcaaagctatttggtgcggttgcaggggctgctgctccgccctgtccggcacgatagcgtggagagtgacggtgagccggcggtgggcaacagtcgcttggttggcaccgaagagctgcctagcatacttgtagacgatggccatcagctgccagatcgctgactgatttgatgacctgatggatccagcatacttgtcagcataatttaggatacttgtcagcttttcttttacagttttcttttgcaaatgaaatgcgagttttgttgaaagaattttttttaactgaacactgaaataagcaaataaaattatttagctcaaaggaaataaaattacattacttaaagaaatcacacaatacatacaa

SEQ ID NO: 33067 - DNA, 2765 bp, Zea Mays
aaagccgctcggttcgctcacctgcctgtgttgcctagttgccttgcgacttgcgagtgggcggcggagtgcccgagtcggtgcggccgtgcaggagcgtttgctgtctccgtttccgtcccgttccctttcgtggactgttttggaaggcgttgcgatgagacgctgctgcggcggcggcgaggagtgcatccctcggcgatgagcagaatcaccacgggatcttaatctcccttgcctcgtttgcggagagcctgcgctgtcggcggcggcgcacccccctccccttcccccggtgcttccgtctgctggctggactcagttcttccaactcggcccttaacaagagaacgacgaccatgccgatgcgtggcgtcgatttcaagtggtatgatgggttcttcctctccatgctcgccactagcgtaattatcgtttccattaattggaagaggtatcgcctgtgtgcccacccgctccacatttggatagtggtggactacaccactgtcttcatcttccgcctcctaatgtttgttgataatggtctcgctgcaggaatgggattgtaagtcattttaagccccaccccccatcttgctttttttttcctaattcagcaaagtatcgcaatacaaactaattgcactgcaatttagcattttgtatttacatatgcaaacacgtctttgctgacccttgctgcaattgagcatcatattcatgctctcactgctttatcagccaccaaaaaagctaaatagaaaagcaagttgtcagcagacatgctaacagcgcgatggtttagcacccaggtgtggcgctccgcacctgggtcaagccctggcgctgcgtgggtcgtgtgcccacctctctggtttgtaacagaacagatggttccgtgaccgccaaagaagcaagcacgtgtgaggttcctgcctgctttctagagttcagtgggcccctactttaaggtgaagtcaaggcgatgtccctccccttgattgagtctagattctagaaaacaagttgcgttctgaatgagtaaaatgacctcaccaacatgaattacaagcagccacctgattgcaacctggtcctatttgtgttaaactaatcaaattgttagttctatgacaactcttaatgaaaacaagattatcgagatgcatatgctagatggatacctatggctgtgtgatttaccacctgatgagttcatttaagaaaatggtgagtcaataaaaaatattgggtttgtagtctcgatttttctttgtccaaagtactccatttttaatcagctaatgaaaccgtctaattaggagatctcagtttttttatatatatatggaaagcatgattctaagatttgaatttcaatgtgactgactgactgtatccttatgatcaaaataatgatagctgtgccatttatgatttatcttggtgcatgggagtttcttgacacctgttttcctaccataatttttgctaccttatggttgtcgttcttatactgatgttttaggtttctaagctttgtcttgtttgtttgctccactaccaatgactaactgaactttgcaaaagtatggctgtcagtttattctattatgtatcttcttttttgaaaaaaaaatatagagatctcggatggcaacagagatatgctcgtttttgtggaagaataattgtcctctcagttcttgtgctacttctctacccctttctctgggtttggactgtgattggaacattgtggtttagcactgcaagaggctgcgaggaaggacaaaagtggggcttcttgatatggctgcttttcagttactgtgggctcgcctgtattgcttgtgtagctattgggaagtggttacaccgaagacacgcacttcaacagagagcacaacaaggaattccagtctctgaacatggggttttagttgatatgatccgtgttcctgactgggcatttgaggctgttggcctggaaatgagagtgggtcaagatactgcatatcatcctggtctttatttaactgatgctcagagagaagcagttgaggcactgattcaagagcttccaaaattcaggctgaaagctgttccaacggactgcagtgaatgccccatctgccttgaagaatttcatgttggcaatgaggtccgtgggctcccatgcgcgcacaatttccatgtggagtgcatcgaccagtggcttcggctgaatgtcaagtgcccacggtgccggtgctccgtcttccccaacctggacctgagtgcgttgaacaatcttcggtcgaccagcgagccggaccatccatccgccagcgccagcaatgtaacgacggcaactgcagcgacgagatacgtgaggtcgcagccggcaggtcaaagctatttggtgcggttgcaggggctgctgctccgccctgtccggcacgatagcgtggagagtgacggtgagccggcggtgggcaacagtcgcttggttggcaccgaagagctgcctagcatacttgtagacgatggccatcagctgccagatcgctgactgatttgatgacctgatggatccagcatacttgtcagcataatttaggatacttgtcagcttttcttttacagttttcttttgcaaatgaaatgcgagttttgttgaaagaattttttttaactgaacactgaaataagcaaataaaattatttagctcaaaggaaataaaattacattacttaaagaaatcacacaatacatacaa

SEQ ID NO: 33068 - DNA, 2764 bp, Zea Mays
aaagccgctcggttcgctcacctgcctgtgttgcctagttgccttgcgacttgcgagtgggcggcggagtgcccgagtcggtgcggccgtgcaggagcgtttgctgtctccgtttccgtcccgttccctttcgtggactgttttggaaggcgttgcgatgagacgctgctgcggcggcggcgaggagtgcatccctcggcgatgagcagaatcaccacgggatcttaatctcccttgcctcgtttgcggagagcctgcgctgtcggcggcggcgcacccccctccccttcccccggtgcttccgtctgctggctggactcagttcttccaactcggcccttaacaagagaacgacgaccatgccgatgcgtggcgtcgatttcaagtggtatgatgggttcttcctctccatgctcgccactagcgtaattatcgtttccattaattggaagaggtatcgcctgtgtgcccacccgctccacatttggatagtggtggactacaccactgtcttcatcttccgcctcctaatgtttgttgataatggtctcgctgcaggaatgggattgtaagtcattttaagccccaccccccatcttgctttttttttcctaattcagcaaagtatcgcaatacaaactaattgcactgcaatttagcattttgtatttacatatgcaaacacgtctttgctgacccttgctgcaattgagcatcatattcatgctctcactgctttatcagccaccaaaaaagctaaatagaaaagcaagttgtcagcagacatgctaacagcgcgatggtttagcacccaggtgtggcgctccgcacctgggtcaagccctggcgctgcgtgggtcgtgtgcccacctctctggtttgtaacagaacagatggttccgtgaccgccaaagaagcaagcacgtgtgaggttcctgcctgctttctagagttcagtgggcccctactttaaggtgaagtcaaggcgatgtccctccccttgattgagtctagattctagaaaacaagttgcgttctgaatgagtaaaatgacctcaccaacatgaattacaagcagccacctgattgcaacctggtcctatttgtgttaaactaatcaaattgttagttctatgacaactcttaatgaaaacaagattatcgagatgcatatgctagatggatacctatggctgtgtgatttaccacctgatgagttcatttaagaaaatggtgagtcaataaaaaatattgggtttgtagtctcgatttttctttgtccaaagtactccatttttaatcagctaatgaaaccgtctaattaggagatctcagtttttttatatatatatggaaagcatgattctaagatttgaatttcaatgtgactgactgactgtatccttatgatcaaaataatgatagctgtgccatttatgatttatcttggtgcatgggagtttcttgacacctgttttcctaccataatttttgctaccttatggttgtcgttcttatactgatgttttaggtttctaagctttgtcttgtttgtttgctccactaccaatgactaactgaactttgcaaaagtatggctgtcagtttattctattatgtatcttcttttttgaaaaaaaaatatagagatctcggatggcaacagagatatgctcgtttttgtggaagaataattgtcctctcagttcttgtgctacttctctacccctttctctgggtttggactgtgattggaacattgtggtttagcactgcaagaggctgcaggaaggacaaaagtggggcttcttgatatggctgcttttcagttactgtgggctcgcctgtattgcttgtgtagctattgggaagtggttacaccgaagacacgcacttcaacagagagcacaacaaggaattccagtctctgaacatggggttttagttgatatgatccgtgttcctgactgggcatttgaggctgttggcctggaaatgagagtgggtcaagatactgcatatcatcctggtctttatttaactgatgctcagagagaagcagttgaggcactgattcaagagcttccaaaattcaggctgaaagctgttccaacggactgcagtgaatgccccatctgccttgaagaatttcatgttggcaatgaggtccgtgggctcccatgcgcgcacaatttccatgtggagtgcatcgaccagtggcttcggctgaatgtcaagtgcccacggtgccggtgctccgtcttccccaacctggacctgagtgcgttgaacaatcttcggtcgaccagcgagccggaccatccatccgccagcgccagcaatgtaacgacggcaactgcagcgacgagatacgtgaggtcgcagccggcaggtcaaagctatttggtgcggttgcaggggctgctgctccgccctgtccggcacgatagcgtggagagtgacggtgagccggcggtgggcaacagtcgcttggttggcaccgaagagctgcctagcatacttgtagacgatggccatcagctgccagatcgctgactgatttgatgacctgatggatccagcatacttgtcagcataatttaggatacttgtcagcttttcttttacagttttcttttgcaaatgaaatgcgagttttgttgaaagaattttttttaactgaacactgaaataagcaaataaaattatttagctcaaaggaaataaaattacattacttaaagaaatcacacaatacatacaa

SEQ ID NO: 33069 - DNA, 1685 bp, Zea Mays
aaagccgctcggttcgctcacctgcctgtgttgcctagttgccttgcgacttgcgagtgggcggcggagtgcccgagtcggtgcggccgtgcaggagcgtttgctgtctccgtttccgtcccgttccctttcgtggactgttttggaaggcgttgcgatgagacgctgctgcggcggcggcgaggagtgcatccctcggcgatgagcagaatcaccacgggatcttaatctcccttgcctcgtttgcggagagcctgcgctgtcggcggcggcgcacccccctccccttcccccggtgcttccgtctgctggctggactcagttcttccaactcggcccttaacaagagaacgacgaccatgccgatgcgtggcgtcgatttcaagtggtatgatgggttcttcctctccatgctcgccactagcgtaattatcgtttccattaattggaagaggtatcgcctgtgtgcccacccgctccacatttggatagtggtggactacaccactgtcttcatcttccgcctcctaatgtttgttgataatggtctcgctgcaggaatgggattagatctcggatggcaacagagatatgctcgtttttgtggaagaataattgtcctctcagttcttgtgctacttctctacccctttctctgggtttggactgtgattggaacattgtggtttagcactgcaagaggctgcaggaaggacaaaagtggggcttcttgatatggctgcttttcagttactgtgggctcgcctgtattgcttgtgtagctattgggaagtggttacaccgaagacacgcacttcaacagagagcacaacaaggaattccagtctctgaacatggggttttagttgatatgatccgtgttcctgactgggcatttgaggctgttggcctggaaatgagagtgggtcaagatactgcatatcatcctggtctttatttaactgatgctcagagagaagcagttgaggcactgattcaagagcttccaaaattcaggctgaaagctgttccaacggactgcagtgaatgccccatctgccttgaagaatttcatgttggcaatgaggtccgtgggctcccatgcgcgcacaatttccatgtggagtgcatcgaccagtggcttcggctgaatgtcaagtgcccacggtgccggtgctccgtcttccccaacctggacctgagtgcgttgaacaatcttcggtcgaccagcgagccggaccatccatccgccagcgccagcaatgtaacgacggcaactgcagcgacgagatacgtgaggtcgcagccggcaggtcaaagctatttggtgcggttgcaggggctgctgctccgccctgtccggcacgatagcgtggagagtgacggtgagccggcggtgggcaacagtcgcttggttggcaccgaagagctgcctagcatacttgtagacgatggccatcagctgccagatcgctgactgatttgatgacctgatggatccagcatacttgtcagcataatttaggatacttgtcagcttttcttttacagttttcttttgcaaatgaaatgcgagttttgttgaaagaattttttttaactgaacactgaaataagcaaataaaattatttagctcaaaggaaataaaattacattacttaaagaaatcacacaatacatacaa

SEQ ID NO: 33070 - DNA, 1722 bp, Zea Mays
aaagccgctcggttcgctcacctgcctgtgttgcctagttgccttgcgacttgcgagtgggcggcggagtgcccgagtcggtgcggccgtgcaggagcgtttgctgtctccgtttccgtcccgttccctttcgtggactgttttggaaggcgttgcgatgagacgctgctgcggcggcggcgaggagtgcatccctcggcgatgagcagaatcaccacgggatcttaatctcccttgcctcgtttgcggagagcctgcgctgtcggcggcggcgcacccccctccccttcccccggtgcttccgtctgctggctggactcagttcttccaactcggcccttaacaagagaacgacgaccatgccgatgcgtggcgtcgatttcaagtggtatgatgggttcttcctctccatgctcgccactagcgtaattatcgtttccattaattggaagaggtatcgcctgtgtgcccacccgctccacatttggatagtggtggactacaccactgtcttcatcttccgcctcctaatgtttgttgataatggtctcgctgcaggaatgggattagatctcggatggcaacagagatatgctcgtttttgtggaagaataattgtcctctcagttcttgtgctacttctctacccctttctctgggtttggactgtgattggaacattgtggtttagcactgcaagaggctgcttgccagaggaaggacaaaagtggggcttcttgatatggctgcttttcagttactgtgggctcgcctgtattgcttgtgtagctattgggaagtggttacaccgaagacacgcacttcaacagagagcacaacaaggaattccagtctctgaacatgggtggtatatattttggtgttcatctgtgcaggttttagttgatatgatccgtgttcctgactgggcatttgaggctgttggcctggaaatgagagtgggtcaagatactgcatatcatcctggtctttatttaactgatgctcagagagaagcagttgaggcactgattcaagagcttccaaaattcaggctgaaagctgttccaacggactgcagtgaatgccccatctgccttgaagaatttcatgttggcaatgaggtccgtgggctcccatgcgcgcacaatttccatgtggagtgcatcgaccagtggcttcggctgaatgtcaagtgcccacggtgccggtgctccgtcttccccaacctggacctgagtgcgttgaacaatcttcggtcgaccagcgagccggaccatccatccgccagcgccagcaatgtaacgacggcaactgcagcgacgagatacgtgaggtcgcagccggcaggtcaaagctatttggtgcggttgcaggggctgctgctccgccctgtccggcacgatagcgtggagagtgacggtgagccggcggtgggcaacagtcgcttggttggcaccgaagagctgcctagcatacttgtagacgatggccatcagctgccagatcgctgactgatttgatgacctgatggatccagcatacttgtcagcataatttaggatacttgtcagcttttcttttacagttttcttttgcaaatgaaatgcgagttttgttgaaagaattttttttaactgaacactgaaataagcaaataaaattatttagctcaaaggaaataaaattacattacttaaagaaatcacacaatacatacaa

SEQ ID NO: 33071 - DNA, 1685 bp, Zea Mays
aaagccgctcggttcgctcacctgcctgtgttgcctagttgccttgcgacttgcgagtgggcggcggagtgcccgagtcggtgcggccgtgcaggagcgtttgctgtctccgtttccgtcccgttccctttcgtggactgttttggaaggcgttgcgatgagacgctgctgcggcggcggcgaggagtgcatccctcggcgatgagcagaatcaccacgggatcttaatctcccttgcctcgtttgcggagagcctgcgctgtcggcggcggcgcacccccctccccttcccccggtgcttccgtctgctggctggactcagttcttccaactcggcccttaacaagagaacgacgaccatgccgatgcgtggcgtcgatttcaagtggtatgatgggttcttcctctccatgctcgccactagcgtaattatcgtttccattaattggaagaggtatcgcctgtgtgcccacccgctccacatttggatagtggtggactacaccactgtcttcatcttccgcctcctaatgtttgttgataatggtctcgctgcaggaatgggattagatctcggatggcaacagagatatgctcgtttttgtggaagaataattgtcctctcagttcttgtgctacttctctacccctttctctgggtttggactgtgattggaacattgtggtttagcactgcaagaggctgcttgccagaggaaggacaaaagtggggcttcttgatatggctgcttttcagttactgtgggctcgcctgtattgcttgtgtagctattgggaagtggttacaccgaagacacgcacttcaacagagagcacaacaaggaattccagtctctgaacatgggttgatatgatccgtgttcctgactgggcatttgaggctgttggcctggaaatgagagtgggtcaagatactgcatatcatcctggtctttatttaactgatgctcagagagaagcagttgaggcactgattcaagagcttccaaaattcaggctgaaagctgttccaacggactgcagtgaatgccccatctgccttgaagaatttcatgttggcaatgaggtccgtgggctcccatgcgcgcacaatttccatgtggagtgcatcgaccagtggcttcggctgaatgtcaagtgcccacggtgccggtgctccgtcttccccaacctggacctgagtgcgttgaacaatcttcggtcgaccagcgagccggaccatccatccgccagcgccagcaatgtaacgacggcaactgcagcgacgagatacgtgaggtcgcagccggcaggtcaaagctatttggtgcggttgcaggggctgctgctccgccctgtccggcacgatagcgtggagagtgacggtgagccggcggtgggcaacagtcgcttggttggcaccgaagagctgcctagcatacttgtagacgatggccatcagctgccagatcgctgactgatttgatgacctgatggatccagcatacttgtcagcataatttaggatacttgtcagcttttcttttacagttttcttttgcaaatgaaatgcgagttttgttgaaagaattttttttaactgaacactgaaataagcaaataaaattatttagctcaaaggaaataaaattacattacttaaagaaatcacacaatacatacaa

SEQ ID NO: 33072 - DNA, 1261 bp, Zea Mays
aaatttgcacgttatcctgtgaaaacatcatctttggatgactggagggagcaagtttctagggtggactacaccactgtcttcatcttccgcctcctaatgtttgttgataatggtctcgctgcaggaatgggattagatctcggatggcaacagagatatgctcgtttttgtggaagaataattgtcctctcagttcttgtgctacttctctacccctttctctgggtttggactgtgattggaacattgtggtttagcactgcaagaggctgcttgccagaggaaggacaaaagtggggcttcttgatatggctgcttttcagttactgtgggctcgcctgtattgcttgtgtagctattgggaagtggttacaccgaagacacgcacttcaacagagagcacaacaaggaattccagtctctgaacatggggttttagttgatatgatccgtgttcctgactgggcatttgaggctgttggcctggaaatgagagtgggtcaagatactgcatatcatcctggtctttatttaactgatgctcagagagaagcagttgaggcactgattcaagagcttccaaaattcaggctgaaagctgttccaacggactgcagtgaatgccccatctgccttgaagaatttcatgttggcaatgaggtccgtgggctcccatgcgcgcacaatttccatgtggagtgcatcgaccagtggcttcggctgaatgtcaagtgcccacggtgccggtgctccgtcttccccaacctggacctgagtgcgttgaacaatcttcggtcgaccagcgagccggaccatccatccgccagcgccagcaatgtaacgacggcaactgcagcgacgagatacgtgaggtcgcagccggcaggtcaaagctatttggtgcggttgcaggggctgctgctccgccctgtccggcacgatagcgtggagagtgacggtgagccggcggtgggcaacagtcgcttggttggcaccgaagagctgcctagcatacttgtagacgatggccatcagctgccagatcgctgactgatttgatgacctgatggatccagcatacttgtcagcataatttaggatacttgtcagcttttcttttacagttttcttttgcaaatgaaatgcgagttttgttgaaagaattttttttaactgaacactgaaataagcaaataaaattatttagctcaaaggaaataaaattacattacttaaagaaatcacacaatacatacaa

SEQ ID NO: 33073 - DNA, 1951 bp, Zea Mays
catctgtctacaggtgccgatagctgatcctccctgccgcgcacgcgcgtcaatggcgccgccagtcgccggcgtcgtgcgtcttgccgcggcctcccgcgtattagttctgtccctctacctgctcgcccgcctcctcttgcgcccctacgacacctccgctactctccacccaccctgcctctcctctttctcctcttccccggatcccaacacgcccgtctccgccgctatctcgtcgctggccgtgtgggacggtgtccacttcgcccgccccgctgagtgcggctacgagtacgagcagtccttcgccttcctcccactcctccccgcctccctcgtgctcctcgcacgattgttgttcgcgccgctagtaccgatactagggtacagggccgtgctcgtgctctccggctatgtcctcaacaacgtcgcattcgttgctgctgcggcctacttctacagattgtctgtgctgattttgaaggaccagaaagctgcttaccgagcatctgttctgttttgtttcaaccctgcttctgtgttctactcatcattgtattcagaaagtctttatgcacttttttctcttgggggcatcttctacgtgttttccggtgctaatactgttgcagtgataatgctcgctctgtctggttcagctaggtcaaatggagcacttaatgctggctatttctgttttcaggccttgctacaagcatatgatgctactgtacaaaagaaaaggcccttgttggcaattcatgcccttgtggctggagctttgcgctccattttcatatttctacctttctttgctttccaagcatatggatatttgaacatatgtgtacatgggagctcagacgaattgaggccatggtgcaaagcaaaagttcccttattgtatggcttcatccaaagccactactggggagttggtttcttgaggtacttccaagtgaagcagctgccgaactttctcttggcttcaccagtgctttctctcgcggtttattctattgtccattacgcaaaactgcttcaccggtgttttcaaagaactagcgtccacaagcagattatcactgctctagagaaaaggccagttgtgtcgtatagaagatctgatgacgcgacaattttgagtgaacctcctgctggactcaccaagaaagcacaagggagctctaaggctaaacagagaaaaccagttgctaccgagatagctcctgcgacattccatgacagtaccacgccagctaaccaaaacatcgaagaggatcaggacacgtgctccatactactactcccattcgttctgcatctggccttcatggcattcacagccttgttcgtgatgcacgtccaggtgtccacacggttcctatccgctagccccccggtttactgggctgccgcgcacgttctggcttctccgagccgcgccaacagacgatggggctacctgatctgtgtctatttcatcgcgtacattcttctaggtgcttcctttggttcagtaattgagcgttggctactcgaatcgcttggaatctggtgggctgattgtatccttacaatcagaagttggagagcagaagacataataacatcagtcccaactcggaagcagcaaagcgagactatccgaagactagtgtgtgggtccaggacgacgaagagtggtgcccattgttgtccgttagctagccagcagcgtcgccatcgacttgttgatataaataatcaactgatagtgactccgatccaacaaacgctcatcaggtatatagctatagtttgtgtgcatcgacgaggacgacgtactggcctgatatttccgtgcatgtcattgccaaaaaatgggcatttcaaatcgcgacgtcctgctagggaagttccacgtactcagcctaccgctgcatgatgctgccaggaaccgatgtgg

SEQ ID NO: 33074 - DNA, 1990 bp, Zea Mays
catctgtctacaggtgccgatagctgatcctccctgccgcgcacgcgcgtcaatggcgccgccagtcgccggcgtcgtgcgtcttgccgcggcctcccgcgtattagttctgtccctctacctgctcgcccgcctcctcttgcgcccctacgacacctccgctactctccacccaccctgcctctcctctttctcctcttccccggatcccaacacgcccgtctccgccgctatctcgtcgctggccgtgtgggacggtgtccacttcgcccgccccgctgagtgcggctacgagtacgagcagtccttcgccttcctcccactcctccccgcctccctcgtgctcctcgcacgattgttgttcgcgccgctagtaccgatactagggtacagggccgtgctcgtgctctccggctatgtcctcaacaacgtcgcattcgttgctgctgcggcctacttctacagattgtctgtgctgattttgaaggaccagaaagctgcttaccgagcatctgttctgttttgtttcaaccctgcttctgtgttctactcatcattgtattcagaaagtctttatgcacttttttctcttgggggcatcttctacgtgttttccggtgctaatactgttgcagtgataatgctcgctctgtctggttcagctaggtcaaatggagcacttaatgctggctatttctgttttcaggccttgctacaagcatatgatgctactgtacaaaagaaaaggcccttgttggcaattcatgcccttgtggctggagctttgcgctccattttcatatttctacctttctttgctttccaagcatatggatatttgaacatatgtgtacatgggagctcagacgaattgaggccatggtgcaaagcaaaagttcccttattgtatggcttcatccaaagccactactggggagttggtttcttgaggtacttccaagtgaagcagctgccgaactttctcttggcttcaccagtgctttctctcgcggtttattctattgtccattacgcaaaactgcttcaccggtgttttcaaagaactagcgtccacaagcagattatcactgctctagagaaaaggccagttgtgtcgtatagaagatctgatgacgcgacaattttgagtgaacctcctgctggactcaccaagaaagcacaagggagctctaaggctaaacagagaaaaccagttgctaccgagatagctcctgcgacattccatgacagtaccacgccagctaaccaaaacatcgaagaggatcaggacacgtgctccatactactactcccattcgttctgcatctggccttcatggcattcacagccttgttcgtgatgcacgtccaggtgtccacacggttcctatccgctagccccccggtttactgggctgccgcgcacgttctggcttctccgagccgcgccaacagacgatggggctacctgatctgtgtctatttcatcgcgtacattcttctaggtggattttctcgaccagctttgcctgaaggtttccctaggtttgctaggtgcttcctttggttcagtaattgagcgttggctactcgaatcgcttggaatctggtgggctgattaatcagaagttggagagcagaagacataataacatcagtcccaactcggaagcagcaaagcgagactatccgaagactagtgtgtgggtccaggacgacgaagagtggtgcccattgttgtccgttagctagccagcagcgtcgccatcgacttgttgatataaataatcaactgatagtgactccgatccaacaaacgctcatcaggtatatagctatagtttgtgtgcatcgacgaggacgacgtactggcctgatatttccgtgcatgtcattgccaaaaaatgggcatttcaaatcgcgacgtcctgctagggaagttccacgtactcagcctaccgctgcatgatgctgccaggaaccgatgtgg

SEQ ID NO: 33075 - DNA, 2663 bp, Zea Mays
cttgcttgtattttatatgtaggtgagataaattcaatagaattttctcctaagctatttaaaggacaactatggctacaattcaagatataggactctctgcggctatcaacataatgggtgctgtactgttcctagttgcatttgctttccttcgactgcagccaatcaatgatagggtttacttcccaaaatggtacctcaaaggtgcaagagagagtccaagtcatgggggtacatttgtccggaagtttgtcaatttggacatgcgttcatacttgaaatttttaagttgggtgcctgctgctctcaaaatgcctgaggatgagttgattagccatgccggtctggattcagctgtgtatctgaggatttacttggtcggacttaaaatatttgctccaatctcagttctagctttcattgttcttgtccctgttaattggaccaatgatactctgcaattctcgaagttagagcacagcaatgttgataagctttcaatatcaaacataccagttggatcaaaaaggtttatagcccacttggcaatggcgtatgttttcacattttggacctgctatgtactgttacgtgagtatgaagtagttgcaaagatgagactgcgatttctttcatcagagaaacgcagaccagatcagttcacggtccttgtgcggaatataccgcctgatccagatgaatcaattagtgagcttgtggaacatttctttcttgtgaatcatcctggtcactatctgacacatcaggtggtttacaatgcaaataaacttgctaaattggtgaaagagaaagcaaagatgcataattggcttgactactatcagctgagatttgaaaggaatgcatctaaaaggcctactactaagactggttttcttggttgttttggtacgaaggtggatgccattgaatactacacatcagaaattgagaggatagaaaatgaagaagcagaagagcgtgaaaaaattgtaaaggatcccaaatccattgtaccagcagcatttgtttccttccgatcacgttggggtgcagcagtttgtgctcagacacagcaaaccagtaacccaactgtttggttgacagaatgggctccagaacctcgtgatgtgtactgggataatttgtctattccatttgtctcccttacagttcgaaggctgataattgcagtggcattcttcttcctgaacttcttttatgtgttcccaatagcatttgttcagtctcttgcaaatcttgaagggattgagaaggcagcgccgtttctgaagcctctgattgaagagcatactattaaatcattcatccaaggtttccttccgggaattgctctgaagatcttccttatattgctcccaagcatattaatgtttatgtctaaggttgaaggattgacctcaatatcttcactggagagaagatctgcatcaaagtattatattttcatattcttcaatgtgtttctggcaagcattattgcaggatctgctttagagcagctaaaaagctatattcatcagtcagcaaatgaaataccaaggacgattggtgaagcaattccaatgaaggcaaccttttttataacatatacaatggttgatggttgggctggggtagctggtgagatattgagattgaagccactagtgatcttccacctgaaaaactttttcttggtcaagactgagaaagacagggaagaggcaatggaccctggaagtattggttttgactcaagcgaacctcaaattcagctgtatttcttacttggtcttgtctatgcggcagtgacaccatttttgctcccttttgtattgatattctttgggtttgcgtacgttgtataccgccaccagataataaatgtgtataatcaagaatacgagagtgcagcagcattttggccaagtgttcatggacgcataatcacagcgttgattgtatcacagctgcttctccttgggttacttagcacaaaaggcgctggccagtcaacacctgtgctccttgttcttcctgtagtgaccttctatttccacaagtactgcaacaaccgctacaaaccgacttttgtgaaatgcccattgcaggaggcgatgaagaaggataccctggaacgtgccagagagccaggatttgacctcaaaggatacctaatgaatgcctacatccacccggtgttcaaaggtgatggggacgacgacaagttctcagtcgcagatgaaccagaagccgagcaagtcctggtggcaaccaagcggcagtccaggcggaacacccccgtgcccagtaaatacaatgggtcggaatcaccttcgcttcctgaaattgtaaatgaccaacggctataaagatgtctacagttttcctatgtatactaggtatatgcccgtgcgttgccacggaagttaaaaaatagtataaaacatgtataccgaacaccatgttctagacaatgctagtgaaactgaaataaaaatagctacataattgcttaaatagttatacagctcgtagcacaaacaaaacaaagttgggcataacgttaagtgacacttttcctgtatcagacttggactatgtcccggctaatgcttgtagcctttgaatattatcgggacccattgatcactaca

SEQ ID NO: 33076 - DNA, 2670 bp, Zea Mays
gtaagcggccacggagcaaaggaggagtgaagtgataaattcaatagaattttctcctaagctatttaaaggacaactatggctacaattcaagatataggactctctgcggctatcaacataatgggtgctgtactgttcctagttgcatttgctttccttcgactgcagccaatcaatgatagggtttacttcccaaaatggtacctcaaaggtgcaagagagagtccaagtcatgggggtacatttgtccggaagtttgtcaatttggacatgcgttcatacttgaaatttttaagttgggtgcctgctgctctcaaaatgcctgaggatgagttgattagccatgccggtctggattcagctgtgtatctgaggatttacttggtcggacttaaaatatttgctccaatctcagttctagctttcattgttcttgtccctgttaattggaccaatgatactctgcaattctcgaagttagagcacagcaatgttgataagctttcaatatcaaacataccagttggatcaaaaaggtttatagcccacttggcaatggcgtatgttttcacattttggacctgctatgtactgttacgtgagtatgaagtagttgcaaagatgagactgcgatttctttcatcagagaaacgcagaccagatcagttcacggtccttgtgcggaatataccgcctgatccagatgaatcaattagtgagcttgtggaacatttctttcttgtgaatcatcctggtcactatctgacacatcaggtggtttacaatgcaaataaacttgctaaattggtgaaagagaaagcaaagatgcataattggcttgactactatcagctgagatttgaaaggaatgcatctaaaaggcctactactaagactggttttcttggttgttttggtacgaaggtggatgccattgaatactacacatcagaaattgagaggatagaaaatgaagaagcagaagagcgtgaaaaaattgtaaaggatcccaaatccattgtaccagcagcatttgtttccttccgatcacgttggggtgcagcagtttgtgctcagacacagcaaaccagtaacccaactgtttggttgacagaatgggctccagaacctcgtgatgtgtactgggataatttgtctattccatttgtctcccttacagttcgaaggctgataattgcagtggcattcttcttcctgaacttcttttatgtgttcccaatagcatttgttcagtctcttgcaaatcttgaagggattgagaaggcagcgccgtttctgaagcctctgattgaagagcatactattaaatcattcatccaaggtttccttccgggaattgctctgaagatcttccttatattgctcccaagcatattaatgtttatgtctaaggttgaaggattgacctcaatatcttcactggagagaagatctgcatcaaagtattatattttcatattcttcaatgtgtttctggcaagcattattgcaggatctgctttagagcagctaaaaagctatattcatcagtcagcaaatgaaataccaaggacgattggtgaagcaattccaatgaaggcaaccttttttataacatatacaatggttgatggttgggctggggtagctggtgagatattgagattgaagccactagtgatcttccacctgaaaaactttttcttggtcaagactgagaaagacagggaagaggcaatggaccctggaagtattggttttgactcaagcgaacctcaaattcagctgtatttcttacttggtcttgtctatgcggcagtgacaccatttttgctcccttttgtattgatattctttgggtttgcgtacgttgtataccgccaccagataataaatgtgtataatcaagaatacgagagtgcagcagcattttggccaagtgttcatggacgcataatcacagcgttgattgtatcacagctgcttctccttgggttacttagcacaaaaggcgctggccagtcaacacctgtgctccttgttcttcctgtagtgaccttctatttccacaagtactgcaacaaccgctacaaaccgacttttgtgaaatgcccattgcaggaggcgatgaagaaggataccctggaacgtgccagagagccaggatttgacctcaaaggatacctaatgaatgcctacatccacccggtgttcaaaggtgatggggacgacgacaagttctcagtcgcagatgaaccagaagccgagcaagtcctggtggcaaccaagcggcagtccaggcggaacacccccgtgcccagtaaatacaatgggtcggaatcaccttcgcttcctgaaattgtaaatgaccaacggctataaagatgtctacagttttcctatgtatactaggtatatgcccgtgcgttgccacggaagttaaaaaatagtataaaacatgtataccgaacaccatgttctagacaatgctagtgaaactgaaataaaaatagctacataattgcttaaatagttatacagctcgtagcacaaacaaaacaaagttgggcataacgttaagtgacacttttcctgtatcagacttggactatgtcccggctaatgcttgtagcctttgaatattatcgggacccattgatcactaca

SEQ ID NO: 33077 - DNA, 2822 bp, Zea Mays
gatggcttaacgcttcacacggacgtttcctagtggaacgaatttatgcgaagttttatttatggccctttcagctgtcacaccttcacgccttaaattccgcacttcaaacctgagggcattatcattactgctgcttattgttgcgtagcagcatcaactggactcaattgttccagctcaaatataaattcaatagaattttctcctaagctatttaaaggacaactatggctacaattcaagatataggactctctgcggctatcaacataatgggtgctgtactgttcctagttgcatttgctttccttcgactgcagccaatcaatgatagggtttacttcccaaaatggtacctcaaaggtgcaagagagagtccaagtcatgggggtacatttgtccggaagtttgtcaatttggacatgcgttcatacttgaaatttttaagttgggtgcctgctgctctcaaaatgcctgaggatgagttgattagccatgccggtctggattcagctgtgtatctgaggatttacttggtcggacttaaaatatttgctccaatctcagttctagctttcattgttcttgtccctgttaattggaccaatgatactctgcaattctcgaagttagagcacagcaatgttgataagctttcaatatcaaacataccagttggatcaaaaaggtttatagcccacttggcaatggcgtatgttttcacattttggacctgctatgtactgttacgtgagtatgaagtagttgcaaagatgagactgcgatttctttcatcagagaaacgcagaccagatcagttcacggtccttgtgcggaatataccgcctgatccagatgaatcaattagtgagcttgtggaacatttctttcttgtgaatcatcctggtcactatctgacacatcaggtggtttacaatgcaaataaacttgctaaattggtgaaagagaaagcaaagatgcataattggcttgactactatcagctgagatttgaaaggaatgcatctaaaaggcctactactaagactggttttcttggttgttttggtacgaaggtggatgccattgaatactacacatcagaaattgagaggatagaaaatgaagaagcagaagagcgtgaaaaaattgtaaaggatcccaaatccattgtaccagcagcatttgtttccttccgatcacgttggggtgcagcagtttgtgctcagacacagcaaaccagtaacccaactgtttggttgacagaatgggctccagaacctcgtgatgtgtactgggataatttgtctattccatttgtctcccttacagttcgaaggctgataattgcagtggcattcttcttcctgaacttcttttatgtgttcccaatagcatttgttcagtctcttgcaaatcttgaagggattgagaaggcagcgccgtttctgaagcctctgattgaagagcatactattaaatcattcatccaaggtttccttccgggaattgctctgaagatcttccttatattgctcccaagcatattaatgtttatgtctaaggttgaaggattgacctcaatatcttcactggagagaagatctgcatcaaagtattatattttcatattcttcaatgtgtttctggcaagcattattgcaggatctgctttagagcagctaaaaagctatattcatcagtcagcaaatgaaataccaaggacgattggtgaagcaattccaatgaaggcaaccttttttataacatatacaatggttgatggttgggctggggtagctggtgagatattgagattgaagccactagtgatcttccacctgaaaaactttttcttggtcaagactgagaaagacagggaagaggcaatggaccctggaagtattggttttgactcaagcgaacctcaaattcagctgtatttcttacttggtcttgtctatgcggcagtgacaccatttttgctcccttttgtattgatattctttgggtttgcgtacgttgtataccgccaccagataataaatgtgtataatcaagaatacgagagtgcagcagcattttggccaagtgttcatggacgcataatcacagcgttgattgtatcacagctgcttctccttgggttacttagcacaaaaggcgctggccagtcaacacctgtgctccttgttcttcctgtagtgaccttctatttccacaagtactgcaacaaccgctacaaaccgacttttgtgaaatgcccattgcaggaggcgatgaagaaggataccctggaacgtgccagagagccaggatttgacctcaaaggatacctaatgaatgcctacatccacccggtgttcaaaggtgatggggacgacgacaagttctcagtcgcagatgaaccagaagccgagcaagtcctggtggcaaccaagcggcagtccaggcggaacacccccgtgcccagtaaatacaatgggtcggaatcaccttcgcttcctgaaattgtaaatgaccaacggctataaagatgtctacagttttcctatgtatactaggtatatgcccgtgcgttgccacggaagttaaaaaatagtataaaacatgtataccgaacaccatgttctagacaatgctagtgaaactgaaataaaaatagctacataattgcttaaatagttatacagctcgtagcacaaacaaaacaaagttgggcataacgttaagtgacacttttcctgtatcagacttggactatgtcccggctaatgcttgtagcctttgaatattatcgggacccattgatcactaca

SEQ ID NO: 33078 - DNA, 2780 bp, Zea Mays
gatttttataatccctttgcactgttccagtgcggaaggtgctcagctagtttctcgtgggtttgatgttgacacttacgccaccaagtttgttatccattgtatatctcatggctagcctataggaaaggaacaggagtttggataaattcaatagaattttctcctaagctatttaaaggacaactatggctacaattcaagatataggactctctgcggctatcaacataatgggtgctgtactgttcctagttgcatttgctttccttcgactgcagccaatcaatgatagggtttacttcccaaaatggtacctcaaaggtgcaagagagagtccaagtcatgggggtacatttgtccggaagtttgtcaatttggacatgcgttcatacttgaaatttttaagttgggtgcctgctgctctcaaaatgcctgaggatgagttgattagccatgccggtctggattcagctgtgtatctgaggatttacttggtcggacttaaaatatttgctccaatctcagttctagctttcattgttcttgtccctgttaattggaccaatgatactctgcaattctcgaagttagagcacagcaatgttgataagctttcaatatcaaacataccagttggatcaaaaaggtttatagcccacttggcaatggcgtatgttttcacattttggacctgctatgtactgttacgtgagtatgaagtagttgcaaagatgagactgcgatttctttcatcagagaaacgcagaccagatcagttcacggtccttgtgcggaatataccgcctgatccagatgaatcaattagtgagcttgtggaacatttctttcttgtgaatcatcctggtcactatctgacacatcaggtggtttacaatgcaaataaacttgctaaattggtgaaagagaaagcaaagatgcataattggcttgactactatcagctgagatttgaaaggaatgcatctaaaaggcctactactaagactggttttcttggttgttttggtacgaaggtggatgccattgaatactacacatcagaaattgagaggatagaaaatgaagaagcagaagagcgtgaaaaaattgtaaaggatcccaaatccattgtaccagcagcatttgtttccttccgatcacgttggggtgcagcagtttgtgctcagacacagcaaaccagtaacccaactgtttggttgacagaatgggctccagaacctcgtgatgtgtactgggataatttgtctattccatttgtctcccttacagttcgaaggctgataattgcagtggcattcttcttcctgaacttcttttatgtgttcccaatagcatttgttcagtctcttgcaaatcttgaagggattgagaaggcagcgccgtttctgaagcctctgattgaagagcatactattaaatcattcatccaaggtttccttccgggaattgctctgaagatcttccttatattgctcccaagcatattaatgtttatgtctaaggttgaaggattgacctcaatatcttcactggagagaagatctgcatcaaagtattatattttcatattcttcaatgtgtttctggcaagcattattgcaggatctgctttagagcagctaaaaagctatattcatcagtcagcaaatgaaataccaaggacgattggtgaagcaattccaatgaaggcaaccttttttataacatatacaatggttgatggttgggctggggtagctggtgagatattgagattgaagccactagtgatcttccacctgaaaaactttttcttggtcaagactgagaaagacagggaagaggcaatggaccctggaagtattggttttgactcaagcgaacctcaaattcagctgtatttcttacttggtcttgtctatgcggcagtgacaccatttttgctcccttttgtattgatattctttgggtttgcgtacgttgtataccgccaccagataataaatgtgtataatcaagaatacgagagtgcagcagcattttggccaagtgttcatggacgcataatcacagcgttgattgtatcacagctgcttctccttgggttacttagcacaaaaggcgctggccagtcaacacctgtgctccttgttcttcctgtagtgaccttctatttccacaagtactgcaacaaccgctacaaaccgacttttgtgaaatgcccattgcaggaggcgatgaagaaggataccctggaacgtgccagagagccaggatttgacctcaaaggatacctaatgaatgcctacatccacccggtgttcaaaggtgatggggacgacgacaagttctcagtcgcagatgaaccagaagccgagcaagtcctggtggcaaccaagcggcagtccaggcggaacacccccgtgcccagtaaatacaatgggtcggaatcaccttcgcttcctgaaattgtaaatgaccaacggctataaagatgtctacagttttcctatgtatactaggtatatgcccgtgcgttgccacggaagttaaaaaatagtataaaacatgtataccgaacaccatgttctagacaatgctagtgaaactgaaataaaaatagctacataattgcttaaatagttatacagctcgtagcacaaacaaaacaaagttgggcataacgttaagtgacacttttcctgtatcagacttggactatgtcccggctaatgcttgtagcctttgaatattatcgggacccattgatcactaca

SEQ ID NO: 33079 - DNA, 2784 bp, Zea Mays
agaattcaatactgattgcagacaaagtttgattcaacttgtgtttacttagaaatggttatgttgttttgtttcttcagagtgattttatgttactcttttgcagttgcgactgagtcaccacatgcggtgtttgtctctcgatacgataaattcaatagaattttctcctaagctatttaaaggacaactatggctacaattcaagatataggactctctgcggctatcaacataatgggtgctgtactgttcctagttgcatttgctttccttcgactgcagccaatcaatgatagggtttacttcccaaaatggtacctcaaaggtgcaagagagagtccaagtcatgggggtacatttgtccggaagtttgtcaatttggacatgcgttcatacttgaaatttttaagttgggtgcctgctgctctcaaaatgcctgaggatgagttgattagccatgccggtctggattcagctgtgtatctgaggatttacttggtcggacttaaaatatttgctccaatctcagttctagctttcattgttcttgtccctgttaattggaccaatgatactctgcaattctcgaagttagagcacagcaatgttgataagctttcaatatcaaacataccagttggatcaaaaaggtttatagcccacttggcaatggcgtatgttttcacattttggacctgctatgtactgttacgtgagtatgaagtagttgcaaagatgagactgcgatttctttcatcagagaaacgcagaccagatcagttcacggtccttgtgcggaatataccgcctgatccagatgaatcaattagtgagcttgtggaacatttctttcttgtgaatcatcctggtcactatctgacacatcaggtggtttacaatgcaaataaacttgctaaattggtgaaagagaaagcaaagatgcataattggcttgactactatcagctgagatttgaaaggaatgcatctaaaaggcctactactaagactggttttcttggttgttttggtacgaaggtggatgccattgaatactacacatcagaaattgagaggatagaaaatgaagaagcagaagagcgtgaaaaaattgtaaaggatcccaaatccattgtaccagcagcatttgtttccttccgatcacgttggggtgcagcagtttgtgctcagacacagcaaaccagtaacccaactgtttggttgacagaatgggctccagaacctcgtgatgtgtactgggataatttgtctattccatttgtctcccttacagttcgaaggctgataattgcagtggcattcttcttcctgaacttcttttatgtgttcccaatagcatttgttcagtctcttgcaaatcttgaagggattgagaaggcagcgccgtttctgaagcctctgattgaagagcatactattaaatcattcatccaaggtttccttccgggaattgctctgaagatcttccttatattgctcccaagcatattaatgtttatgtctaaggttgaaggattgacctcaatatcttcactggagagaagatctgcatcaaagtattatattttcatattcttcaatgtgtttctggcaagcattattgcaggatctgctttagagcagctaaaaagctatattcatcagtcagcaaatgaaataccaaggacgattggtgaagcaattccaatgaaggcaaccttttttataacatatacaatggttgatggttgggctggggtagctggtgagatattgagattgaagccactagtgatcttccacctgaaaaactttttcttggtcaagactgagaaagacagggaagaggcaatggaccctggaagtattggttttgactcaagcgaacctcaaattcagctgtatttcttacttggtcttgtctatgcggcagtgacaccatttttgctcccttttgtattgatattctttgggtttgcgtacgttgtataccgccaccagataataaatgtgtataatcaagaatacgagagtgcagcagcattttggccaagtgttcatggacgcataatcacagcgttgattgtatcacagctgcttctccttgggttacttagcacaaaaggcgctggccagtcaacacctgtgctccttgttcttcctgtagtgaccttctatttccacaagtactgcaacaaccgctacaaaccgacttttgtgaaatgcccattgcaggaggcgatgaagaaggataccctggaacgtgccagagagccaggatttgacctcaaaggatacctaatgaatgcctacatccacccggtgttcaaaggtgatggggacgacgacaagttctcagtcgcagatgaaccagaagccgagcaagtcctggtggcaaccaagcggcagtccaggcggaacacccccgtgcccagtaaatacaatgggtcggaatcaccttcgcttcctgaaattgtaaatgaccaacggctataaagatgtctacagttttcctatgtatactaggtatatgcccgtgcgttgccacggaagttaaaaaatagtataaaacatgtataccgaacaccatgttctagacaatgctagtgaaactgaaataaaaatagctacataattgcttaaatagttatacagctcgtagcacaaacaaaacaaagttgggcataacgttaagtgacacttttcctgtatcagacttggactatgtcccggctaatgcttgtagcctttgaatattatcgggacccattgatcactaca

SEQ ID NO: 33080 - DNA, 2397 bp, Zea Mays
ctaccactgtagccgttttaggggctacagtccgcccctatccccttcaccggcttcctcctcctcctcctcttccctctcgattccttctctctcccgctaaatggatgggcacgctactgcgccagatttctccccagccggttccttcggccacgcgaccgcgcgctcggaaaactccacggacagcgaaggaggtgaaccaaggacgacgtatctgtcgccggagaaggcgtcaacatacagagcagcgaacaatatcagattattgcaaaaatgtggtacatctttcttcagctggatgtcatcactcacgaatgggttacccatgctagatggagccactgctgccgttccacttgaacagaagttttcagcaagtacaggagatggatctgcagcaccttcccagccacttcaaaacaaccgcagcgttcctatgcaattttttggcttcaatttgctcttccagtccctgtatactcgtaatgttctgcatgtcgcaaatatgctttcaagaaagttcaaacactggacccatcatcaactcaacgaggtgttcgacagttcaaaacttacatgtcaattaagctggaccaggatgacacacaagttctaggcaatgatgcaaatgagattcaacagttttataagaagtactgtgctagtatgagtcatatttcaaaaaagagaaactttgaggagatggctagatattaccaagtggtgtatgctctttatgaagtgctacaggatgtaacaaataaaaacattgatgatcaggtgttgcggtgtgcagacatggttgaggaaaatggtcgtcatttcaagaactacaagtacaacattattcccctcaattttcctggttcttccgaggaaattatggaacttccggagataagaggtgccattgatgcaataagtgacatagatggccttccaatgccagacatgtcttctatccaaaggcatgaggataaatctatccaagatctaattgaatatctttcactagcatttggatttcagaaatcaaatgtagaaaatcaaagagaaaatatggttttgcttctcgcaaatattagtacaagaactgctgcccaggaagggcatcctttggttgatacagtgaatgaattgtggaaaaaaatatttggaaattataagtcatggtgttgctatttgcatattacttcaagtatcataatcagtcatgatattacagaacataagaagcaacagctgaagcttcttcacattggcttgtatcttcttatctggggtgaggcttctaatgttcggtttatgcctgaatgcttgtgctacatattccaccatatggcaaaacagttgcatgacatggttgatgaaaacaattttcaaccaccacaagcacctgtggaagagggatcatttctgaaaaatgtcattgaacctatctttaaggttctgcaaaaagaagcacaaaaaagtagagggggtacagcaggccactcggcttggagaaattatgatgacctgaatgaactattttggtcagagaaatgttttactgagcttaactggccgccggatctttcttccaacttcttttataaagggtgcggcatggcaagaaagcccaagaccaattttgttgaagtacgcacatttctgcacatatttagaagttttaatcgaatgtggatgttttttatacttgctttccaggcaatgctcatagtttcatggagttcttctggatctctttctggaattaccgatggaactgttttaaaaaatgtattaagtgtttttatcacagcagctctactcaactttataacagtaactctggatataatgtttactgtacaagcatggggtagtatggagtggacaaagttagtcagatatttactaaaatttgttgtcgccattgcttggataattattcttccattgacctattctagttccatcaaatacccatccggtgctggcaaaatcctaaatagttggattggggattggtataatcaatcagtttataacattgcgatcgtcatatatatggttccggatattcttgctgccttgtttttcttgttgccacaacttcagaatgtcatggagcgctcagattcacgagtgttggttctcctgatgtggtggattcagcctagattgtatgttggacgtgggatgcacggagatattttgtcaatccttaagtatgtcttcttttgggctgttctgctcatctccaagcttgcattcagtttctatgttgagatatcaccattgattgatccaacaaagttcattcttgaccaacaagttgggaactatgaatggcatcaaatcttccctttctttcatgcaataatgtctatgcttcagttctttttgtaa

SEQ ID NO: 33081 - DNA, 6251 bp, Zea Mays
ctaccactgtagccgttttaggggctacagtccgcccctatccccttcaccggcttcctcctcctcctcctcttccctctcgattccttctctctcccgctaaatggatgggcacgctactgcgccagatttctccccagccggttccttcggccacgcgaccgcgcgctcggaaaactccacggacagcgaaggaggtgaaccaaggacgacgtatctgtcgccggagaaggcgtcaacatacagagcagcgaacaatatcagattattgcaaaaatgtggtacatctttcttcagctggatgtcatcactcacgaatgggttacccatgctagatggagccactgctgccgttccacttgaacagaagttttcagcaagtacaggagatggatctgcagcaccttcccagccacttcaaaacaaccgcagcgttcctatgcaattttttggcttcaatttgctcttccagtccctgtatactcgtaatgttctgcatgtcgcaaatatgctttcaagaaagttcaaacactggacccatcatcaactcaacgaggtgttcgacagttcaaaacttacatgtcaattaagctggaccaggatgacacacaagttctaggcaatgatgcaaatgagattcaacagttttataagaagtactgtgctagtatgagtcatatttcaaaaaagagaaactttgaggagatggctagatattaccaagtggtgtatgctctttatgaagtgctacaggatgtaacaaataaaaacattgatgatcaggtgttgcggtgtgcagacatggttgaggaaaatggtcgtcatttcaagaactacaagtacaacattattcccctcaattttcctggttcttccgaggaaattatggaacttccggagataagaggtgccattgatgcaataagtgacatagatggccttccaatgccagacatgtcttctatccaaaggcatgaggataaatctatccaagatctaattgaatatctttcactagcatttggatttcagaaatcaaatgtagaaaatcaaagagaaaatatggttttgcttctcgcaaatattagtacaagaactgctgcccaggaagggcatcctttggttgatacagtgaatgaattgtggaaaaaaatatttggaaattataagtcatggtgttgctatttgcatattacttcaagtatcataatcagtcatgatattacagaacataagaagcaacagctgaagcttcttcacattggcttgtatcttcttatctggggtgaggcttctaatgttcggtttatgcctgaatgcttgtgctacatattccaccatatggcaaaacagttgcatgacatggttgatgaaaacaattttcaaccaccacaagcacctgtggaagagggatcatttctgaaaaatgtcattgaacctatctttaaggttctgcaaaaagaagcacaaaaaagtagagggggtacagcaggccactcggcttggagaaattatgatgacctgaatgaactattttggtcagagaaatgttttactgagcttaactggccgccggatctttcttccaacttcttttataaagggtgcggcatggcaagaaagcccaagaccaattttgttgaagtacgcacatttctgcacatatttagaagttttaatcgaatgtggatgttttttatacttgctttccaggcaatgctcatagtttcatggagttcttctggatctctttctggaattaccgatggaactgttttaaaaaatgtattaagtgtttttatcacagcagctctactcaactttataacagtaactctggatataatgtttactgtacaagcatggggtagtatggagtggacaaagttagtcagatatttactaaaatttgttgtcgccattgcttggataattattcttccattgacctattctagttccatcaaatacccatccggtgctggcaaaatcctaaatagttggattggggattggtataatcaatcagtttataacattgcgatcgtcatatatatggttccggatattcttgctgccttgtttttcttgttgccacaacttcagaatgtcatggagcgctcagattcacgagtgttggttctcctgatgtggtggattcagcctagattgtatgttggacgtgggatgcacggagatattttgtcaatccttaagtatgtcttcttttgggctgttctgctcatctccaagcttgcattcagtttctatgttgagatatcaccattgattgatccaacaaagttcattcttgaccaacaagttgggaactatgaatggcatcaaatcttccctttcttgccacgcaaccttggtgttgtcattaccatatgggcaccgattgtcatggtttacttcatggacacacaaatatggtatgccattttctccactgtctttggaggtgtttcaggtgccctaagtcatgtgggtgaaatacgaacccttggcatgttgagggccagattcaaatcaattccagaagctttcagtcaatgcaatgcgataaaacagcgagagcatttgagcacagaagcttctttcgtgtttggaattcattcatcaattccttaagagaggaagacttcattagtgatagagagaaggacatgttgatggctccgtcatattcaagcaatttatccatcattcagtggccacctttcctccttgctagcaaggtacccgcagctgttcatatggccatgaattccaaagaaggggatgagcatgagcttattgagaaaatcaaacttgatggagacagatatgatgcagttatagaatgctacaaatccttgatgattatactcaatagccttctgctagacactaatgatcagaatattgtcaatgatattgataaaaaagtgacttatagcatgataaaaaaaactttcttggaagacttcgaaatggcagaaatcggcaaagtaagttctacattggctagattgttgcagctcctgaaaagtgaacctattaatgatgttggagagaggaaaattgttaatgccctgcaagactttatggaaattacgacacgtgatttcatgaaagatggacagagtttcaaagatgaggatgagagaaatcaaagattcatgaacctaaatatgaatatgataaaggaagattattggagggagaagtttgtccggctgcacttattgttgactatgaaggattctgcaatggatgttccaataaacttggatgctcgccgtaggatcaccttctttgcaaactcgctttttatgaaaatgccaagagcaccacgcgtgcatgatatgatttcatttagtgttctgacaccatactacaacgaagaagtactgtattcatcacatgacctgaatagaaaaaatgaagatggtatctcaattttgttctacctacaaaagatctatccagatgaatggaataacttcctagaacgtattggagttgaatcaaataatgaagtgtcgataaaagggcgcatggatgacatccgtttatgggcatcttaccgtggtcaaacacttgccagaactgtgagaggaatgatgtactatagacgagctcttgaactacaatgctatgaagatatgataaatgaccaaggttatggcctagctgatttggatacagctaaagctgcaaggtccaaggccattgctgatattaaattcacttatgttgtctcctgtcaactttatggcgtgcataagacatccaaggattcccgagaaagaggtctctacgagaatatcttaaacctcatgttgacgtatccagcattgcgcattgcttacatcgatgagaaagaagtacaattacgaaatggtaaaatagagaaacagtattactctgttcttgtgaaaggtgatgatgaggaaatctaccggataaggctccctggtaaaccaacagaagttggagaaggcaagcctaataatcaaaatcatgccataatcttcactagaggagaagcacttcaagcaattgacatgaaccaggataactatctagaggaagcatttaaaatgagaaatctcttggaagagttccttcttacacatggaaagtcagagcccaccatattgggtgttcgggagcatatatttacaggaagtgtttcatccctcgcctggtttatgtccagccaggagaccagcttcgtcactattggacaacgtgttcttgccaaccctcttaaggtacgatttcattatggccatcctgatgtttttgatagactctttcatctgacaaggggtggcataagcaaggcatcaaagattatcaaccttagcgaagatatatttgcaggtttcaattcaactctgcgtcgaggaaatgttacacatcatgaatacatacagttgggcaaaggacgtgatgttggaatgaaccaaatatccaactttgaggccaaggtggcaaatggaaatggtgaacaaacactatgccgtgatatttatcgactaggacacagatttgatttctacaggatgctatctctgtattttaccacagttggcttctacttcaatagcatggtggctgttctcacagtgtatgtatttttatatgggaggttataccttgttttgagtggcttagaaaagtcaatactgcaagatccaaatatccaaaacataaaaccatttgaaaatgcacttgccactcaatctgtattccaacttgggatgttgctcgttctcccaatgatgatggagattggccttgagaaaggatttggcagagcattggcagagtttgtaatcatgcaacttcagttagcttctgtattcttcacttttcatcttggaacaaagactcactactatggcaggacgatacttcatggtggagcaaagtatagagctactgggagagggtttgttgtgcgtcatgcaaagttcgctgagaattatcggatgtactcccggagtcactttgtcaaagcactggagctgcttattcttttggttgtctacctagcttatgggagttcatacagaagctcaagtttgtatttgtatgtcacagtttcgatatggttccttgttttctgttggctgtttgcaccttttgtcttcaacccatcctgctttgagtggcacaagactgttgatgactggaatgactggtggaagtggatgggcaatagaggtggtattggattagcgcctgaacaaagttgggaggcttggtgggtatatgcactgtcatggctggttatagcagttgctcttgtgtcactaaaggttgtttcaatggggagagagaagtttgttacaaggattcaactagtgttccgcatcctcaagggcattgtgttccttgtgctcattggtttgcttgtccttttatttgttggttttgaccttgctgtctcggatgttggcgccagtatcttggcattcattcccactggctggtttattcttctggttgcgcaattatgtggaccgctgtttcggaggttgatcatagagccacttcacttgctgtgttgcccatatggtaccggtggtgcatgcagaggtccctgctgtgccaggttcagacagaggaccggtgctgcgcttcggaagatgggaccatgggactccatccaggagatggcgaggatgtacgaatacaccatggggctcctcattttcctgcccattgccgtgctatcgtggttccccttcgtctctgaattccagacacggctgctcttcaaccaggccttcagcagggggctgcagatctctaggatcctcgcggggcagaatggtagcggcacaaagagcgactgatgctttgacattaacggagttatccattccgttgtgccatgtggtatctcgttgctattgtccgctaccgttatgtgtagaatcaagtatgttcatcgtttgaaaaagtgtcgcgcagtttgagtgtgtatgtcggattttaacctcttaattcagttcatattcattggttgtttccatttgatttgcacgtatacgttggaatctgtctgattttcggtgttaaaagtaagtgtttgtttttagctagaactttctctactcctttaaagcaccaattttatatgtcatgctttgcgtacgaagcatgtggattcgtttctttctcgcttctcgtctaccacaaatagaaataggttatgagagaccactcaaacttaacacgacaggaggaag

SEQ ID NO: 33082 - DNA, 6635 bp, Zea Mays
ctaccactgtagccgttttaggggctacagtccgcccctatccccttcaccggcttcctcctcctcctcctcttccctctcgattccttctctctcccgctaaatggatgggcacgctactgcgccagatttctccccagccggttccttcggccacgcgaccgcgcgctcggaaaactccacggacagcgaaggaggtgaaccaaggacgacgtatctgtcgccggagaaggtaagcatcgatccgccgtgtcctacgattcgtttgtcttgctccaggcggcgagcagcagtgggggtcgtcctcgcggatccgccttcaagcttcgcggatcccacccaaaattaaaatcctctcggaaatcagagacgcgaatccctcgccccaagccccgaaacctccgagttctctcgccaatttgatccgcctcaccgtcgccgcccgtccgccggtcggccttgactgctccgtcgcacgtggcggttcgcagcgcggaatctaccttgtgctgacagatccggggaaaccctcgttcctggtcgttccggctcgaatcttctgcggactggcaatgtaagcgttctccattggagggcgacgatctacggggcggttgttggcggggttgcgggaatggagcacgtgttcggagggaagtttaagcctgggaagaagatcgggagcggatctttcggcgagctctatctaggcgtcaacatacagagcagcgaacaatatcagattattgcaaaaatgtggtacatctttcttcagctggatgtcatcactcacgaatgggttacccatgctagatggagccactgctgccgttccacttgaacagaagttttcagcaagtacaggagatggatctgcagcaccttcccagccacttcaaaacaaccgcagcgttcctatgcaattttttggcttcaatttgctcttccagtccctgtatactcgtcgcaaatatgctttcaagaaagttcaaacactggacccatcatcaactcaacgaggtgttcgacagttcaaaacttacatgtcaattaagctggaccaggatgacacacaagttctaggcaatgatgcaaatgagattcaacagttttataagaagtactgtgctagtatgagtcatatttcaaaaaagagaaactttgaggagatggctagatattaccaagtggtgtatgctctttatgaagtgctacaggatgtaacaaataaaaacattgatgatcaggtgttgcggtgtgcagacatggttgaggaaaatggtcgtcatttcaagaactacaagtacaacattattcccctcaattttcctggttcttccgaggaaattatggaacttccggagataagaggtgccattgatgcaataagtgacatagatggccttccaatgccagacatgtcttctatccaaaggcatgaggataaatctatccaagatctaattgaatatctttcactagcatttggatttcagaaatcaaatgtagaaaatcaaagagaaaatatggttttgcttctcgcaaatattagtacaagaactgctgcccaggaagggcatcctttggttgatacagtgaatgaattgtggaaaaaaatatttggaaattataagtcatggtgttgctatttgcatattacttcaagtatcataatcagtcatgatattacagaacataagaagcaacagctgaagcttcttcacattggcttgtatcttcttatctggggtgaggcttctaatgttcggtttatgcctgaatgcttgtgctacatattccaccatatggcaaaacagttgcatgacatggttgatgaaaacaattttcaaccaccacaagcacctgtggaagagggatcatttctgaaaaatgtcattgaacctatctttaaggttctgcaaaaagaagcacaaaaaagtagagggggtacagcaggccactcggcttggagaaattatgatgacctgaatgaactattttggtcagagaaatgttttactgagcttaactggccgccggatctttcttccaacttcttttataaagggtgcggcatggcaagaaagcccaagaccaattttgttgaagtacgcacatttctgcacatatttagaagttttaatcgaatgtggatgttttttatacttgctttccaggcaatgctcatagtttcatggagttcttctggatctctttctggaattaccgatggaactgttttaaaaaatgtattaagtgtttttatcacagcagctctactcaactttataacagtaactctggatataatgtttactgtacaagcatggggtagtatggagtggacaaagttagtcagatatttactaaaatttgttgtcgccattgcttggataattattcttccattgacctattctagttccatcaaatacccatccggtgctggcaaaatcctaaatagttggattggggattggtataatcaatcagtttataacattgcgatcgtcatatatatggttccggatattcttgctgccttgtttttcttgttgccacaacttcagaatgtcatggagcgctcagattcacgagtgttggttctcctgatgtggtggattcagcctagattgtatgttggacgtgggatgcacggagatattttgtcaatccttaagtatgtcttcttttgggctgttctgctcatctccaagcttgcattcagtttctatgttgagatatcaccattgattgatccaacaaagttcattcttgaccaacaagttgggaactatgaatggcatcaaatcttccctttcttgccacgcaaccttggtgttgtcattaccatatgggcaccgattgtcatggtttacttcatggacacacaaatatggtatgccattttctccactgtctttggaggtgtttcaggtgccctaagtcatgtgggtgaaatacgaacccttggcatgttgagggccagattcaaatcaattccagaagctttcagtcaatgcaatgcgataaaacagcgagagcaagcatttgagcacagaagcttctttcgtgtttggaattcattcatcaattccttaagagaggaagacttcattagtgatagagagaaggacatgttgatggctccgtcatattcaagcaatttatccatcattcagtggccacctttcctccttgctagcaaggtacccgcagctgttcatatggccatgaattccaaagaaggggatgagcatgagcttattgagaaaatcaaacttgatggagacagatatgatgcagttatagaatgctacaaatccttgatgattatactcaatagccttctgctagacactaatgatcagaatattgtcaatgatattgataaaaaagtgacttatagcatgataaaaaaaactttcttggaagacttcgaaatggcagaaatcggcaaagtaagttctacattggctagattgttgcagctcctgaaaagtgaacctattaatgatgttggagagaggaaaattgttaatgccctgcaagactttatggaaattacgacacgtgatttcatgaaagatggacagagtttcaaagatgaggatgagagaaatcaaagattcatgaacctaaatatgaatatgataaaggaagattattggagggagaagtttgtccggctgcacttattgttgactatgaaggattctgcaatggatgttccaataaacttggatgctcgccgtaggatcaccttctttgcaaactcgctttttatgaaaatgccaagagcaccacgcgtgcatgatatgatttcatttagtgttctgacaccatactacaacgaagaagtactgtattcatcacatgacctgaatagaaaaaatgaagatggtatctcaattttgttctacctacaaaagatctatccagatgaatggaataacttcctagaacgtattggagttgaatcaaataatgaagtgtcgataaaagggcgcatggatgacatccgtttatgggcatcttaccgtggtcaaacacttgccagaactgtgagaggaatgatgtactatagacgagctcttgaactacaatgctatgaagatatgataaatgaccaaggttatggcctagctgatttggatacagctaaagctgcaaggtccaaggccattgctgatattaaattcacttatgttgtctcctgtcaactttatggcgtgcataagacatccaaggattcccgagaaagaggtctctacgagaatatcttaaacctcatgttgacgtatccagcattgcgcattgcttacatcgatgagaaagaagtacaattacgaaatggtaaaatagagaaacagtattactctgttcttgtgaaaggtgatgatgaggaaatctaccggataaggctccctggtaaaccaacagaagttggagaaggcaagcctaataatcaaaatcatgccataatcttcactagaggagaagcacttcaagcaattgacatgaaccaggataactatctagaggaagcatttaaaatgagaaatctcttggaagagttccttcttacacatggaaagtcagagcccaccatattgggtgttcgggagcatatatttacaggaagggtacgatttcattatggccatcctgatgtttttgatagactctttcatctgacaaggggtggcataagcaaggcatcaaagattatcaaccttagcgaagatatatttgcaggtttcaattcaactctgcgtcgaggaaatgttacacatcatgaatacatacagttgggcaaaggacgtgatgttggaatgaaccaaatatccaactttgaggccaaggtggcaaatggaaatggtgaacaaacactatgccgtgatatttatcgactaggacacagatttgatttctacaggatgctatctctgtattttaccacagttggcttctacttcaatagcatggtggctgttctcacagtgtatgtatttttatatgggaggttataccttgttttgagtggcttagaaaagtcaatactgcaagatccaaatatccaaaacataaaaccatttgaaaatgcacttgccactcaatctgtattccaacttgggatgttgctcgttctcccaatgatgatggagattggccttgagaaaggatttggcagagcattggcagagtttgtaatcatgcaacttcagttagcttctgtattcttcacttttcatcttggaacaaagactcactactatggcaggacgatacttcatggtggagcaaagtatagagctactgggagagggtttgttgtgcgtcatgcaaagttcgctgagaattatcggatgtactcccggagtcactttgtcaaagcactggagctgcttattcttttggttgtctacctagcttatgggagttcatacagaagctcaagtttgtatttgtatgtcacagtttcgatatggttccttgttttctgttggctgtttgcaccttttgtcttcaacccatcctgctttgagtggcacaagactgttgatgactggaatgactggtggaagtggatgggcaatagaggtggtattggattagcgcctgaacaaagttgggaggcttggtgggtatatgcactgtcatggctggttatagcagttgctcttgtgtcactaaaggttgtttcaatggggagagagaagtttgttacaaggattcaactagtgttccgcatcctcaagggcattgtgttccttgtgctcattggtttgcttgtccttttatttgttggttttgaccttgctgtctcggatgttggcgccagtatcttggcattcattcccactggctggtttattcttctggttgcgcaattatgtggaccgctgtttcggaggttgatcatagagccacttcacttgctgtgttgcccatatggtaccggtggtgcatgcagaggtccctgctgtgccaggttcagacagaggaccggtgctgcgcttcggaagatgggaccatgggactccatccaggagatggcgaggatgtacgaatacaccatggggctcctcattttcctgcccattgccgtgctatcgtggttccccttcgtctctgaattccagacacggctgctcttcaaccaggccttcagcagggggctgcagatctctaggatcctcgcggggcagaatggtagcggcacaaagagcgactgatgctttgacattaacggagttatccattccgttgtgccatgtggtatctcgttgctattgtccgctaccgttatgtgtagaatcaagtatgttcatcgtttgaaaaagtgtcgcgcagtttgagtgtgtatgtcggattttaacctcttaattcagttcatattcattggttgtttccatttgatttgcacgtatacgttggaatctgtctgattttcggtgttaaaagtaagtgtttgtttttagctagaactttctctactcctttaaagcaccaattttatatgtcatgctttgcgtacgaagcatgtggattcgtttctttctcgcttctcgtctaccacaaatagaaataggttatgagagaccactcaaacttaacacgacaggaggaag

SEQ ID NO: 33083 - DNA, 6219 bp, Zea Mays
ctaccactgtagccgttttaggggctacagtccgcccctatccccttcaccggcttcctcctcctcctcctcttccctctcgattccttctctctcccgctaaatggatgggcacgctactgcgccagatttctccccagccggttccttcggccacgcgaccgcgcgctcggaaaactccacggacagcgaaggaggtgaaccaaggacgacgtatctgtcgccggagaaggcgtcaacatacagagcagcgaacaatatcagattattgcaaaaatgtggtacatctttcttcagctggatgtcatcactcacgaatgggttacccatgctagatggagccactgctgccgttccacttgaacagaagttttcagcaagtacaggagatggatctgcagcaccttcccagccacttcaaaacaaccgcagcgttcctatgcaattttttggcttcaatttgctcttccagtccctgtatactcgtaatgttctgcatgtcgcaaatatgctttcaagaaagttcaaacactggacccatcatcaactcaacgaggtgttcgacagttcaaaacttacatgtcaattaagctggaccaggatgacacacaagttctaggcaatgatgcaaatgagattcaacagttttataagaagtactgtgctagtatgagtcatatttcaaaaaagagaaactttgaggagatggctagatattaccaagtggtgtatgctctttatgaagtgctacaggatgtaacaaataaaaacattgatgatcaggtgttgcggtgtgcagacatggttgaggaaaatggtcgtcatttcaagaactacaagtacaacattattcccctcaattttcctggttcttccgaggaaattatggaacttccggagataagaggtgccattgatgcaataagtgacatagatggccttccaatgccagacatgtcttctatccaaaggcatgaggataaatctatccaagatctaattgaatatctttcactagcatttggatttcagaaatcaaatgtagaaaatcaaagagaaaatatggttttgcttctcgcaaatattagtacaagaactgctgcccaggaagggcatcctttggttgatacagtgaatgaattgtggaaaaaaatatttggaaattataagtcatggtgttgctatttgcatattacttcaagtatcataatcagtcatgatattacagaacataagaagcaacagctgaagcttcttcacattggcttgtatcttcttatctggggtgaggcttctaatgttcggtttatgcctgaatgcttgtgctacatattccaccatatggcaaaacagttgcatgacatggttgatgaaaacaattttcaaccaccacaagcacctgtggaagagggatcatttctgaaaaatgtcattgaacctatctttaaggttctgcaaaaagaagcacaaaaaagtagagggggtacagcaggccactcggcttggagaaattatgatgacctgaatgaactattttggtcagagaaatgttttactgagcttaactggccgccggatctttcttccaacttcttttataaagggtgcggcatggcaagaaagcccaagaccaattttgttgaagtacgcacatttctgcacatatttagaagttttaatcgaatgtggatgttttttatacttgctttccaggcaatgctcatagtttcatggagttcttctggatctctttctggaattaccgatggaactgttttaaaaaatgtattaagtgtttttatcacagcagctctactcaactttataacagtaactctggatataatgtttactgtacaagcatggggtagtatggagtggacaaagttagtcagatatttactaaaatttgttgtcgccattgcttggataattattcttccattgacctattctagttccatcaaatacccatccggtgctggcaaaatcctaaatagttggattggggattggtataatcaatcagtttataacattgcgatcgtcatatatatggttccggatattcttgctgccttgtttttcttgttgccacaacttcagaatgtcatggagcgctcagattcacgagtgttggttctcctgatgtggtggattcagcctagattgtatgttggacgtgggatgcacggagatattttgtcaatccttaagtatgtcttcttttgggctgttctgctcatctccaagcttgcattcagtttctatgttgagatatcaccattgattgatccaacaaagttcattcttgaccaacaagttgggaactatgaatggcatcaaatcttccctttcttgccacgcaaccttggtgttgtcattaccatatgggcaccgattgtcatggtttacttcatggacacacaaatatggtatgccattttctccactgtctttggaggtgtttcaggtgccctaagtcatgtgggtgaaatacgaacccttggcatgttgagggccagattcaaatcaattccagaagctttcagtcaatgcaatgcgataaaacagcgagagcaagcatttgagcacagaagcttctttcgtgtttggaattcattcatcaattccttaagagaggaagacttcattagtgatagagagaaggacatgttgatggctccgtcatattcaagcaatttatccatcattcagtggccacctttcctccttgctagcaaggtacccgcagctgttcatatggccatgaattccaaagaaggggatgagcatgagcttattgagaaaatcaaacttgatggagacagatatgatgcagttatagaatgctacaaatccttgatgattatactcaatagccttctgctagacactaatgatcagaatattgtcaatgatattgataaaaaagtgacttatagcatgataaaaaaaactttcttggaagacttcgaaatggcagaaatcggcaaaaaaagtgaacctattaatgatgttggagagaggaaaattgttaatgccctgcaagactttatggaaattacgacacgtgatttcatgaaagatggacagagtttcaaagatgaggatgagagaaatcaaagattcatgaacctaaatatgaatatgataaaggaagattattggagggagaagtttgtccggctgcacttattgttgactatgaaggattctgcaatggatgttccaataaacttggatgctcgccgtaggatcaccttctttgcaaactcgctttttatgaaaatgccaagagcaccacgcgtgcatgatatgatttcatttagtgttctgacaccatactacaacgaagaagtactgtattcatcacatgacctgaatagaaaaaatgaagatggtatctcaattttgttctacctacaaaagatctatccagatgaatggaataacttcctagaacgtattggagttgaatcaaataatgaagtgtcgataaaagggcgcatggatgacatccgtttatgggcatcttaccgtggtcaaacacttgccagaactgtgagaggaatgatgtactatagacgagctcttgaactacaatgctatgaagatatgataaatgaccaaggttatggcctagctgatttggatacagctaaagctgcaaggtccaaggccattgctgatattaaattcacttatgttgtctcctgtcaactttatggcgtgcataagacatccaaggattcccgagaaagaggtctctacgagaatatcttaaacctcatgttgacgtatccagcattgcgcattgcttacatcgatgagaaagaagtacaattacgaaatggtaaaatagagaaacagtattactctgttcttgtgaaaggtgatgatgaggaaatctaccggataaggctccctggtaaaccaacagaagttggagaaggcaagcctaataatcaaaatcatgccataatcttcactagaggagaagcacttcaagcaattgacatgaaccaggataactatctagaggaagcatttaaaatgagaaatctcttggaagagttccttcttacacatggaaagtcagagcccaccatattgggtgttcgggagcatatatttacaggaagtgtttcatccctcgcctggtttatgtccagccaggagaccagcttcgtcactattggacaacgtgttcttgccaaccctcttaaggtacgatttcattatggccatcctgatgtttttgatagactctttcatctgacaaggggtggcataagcaaggcatcaaagattatcaaccttagcgaagatatatttgcaggtttcaattcaactctgcgtcgaggaaatgttacacatcatgaatacatacagttgggcaaaggacgtgatgttggaatgaaccaaatatccaactttgaggccaaggtggcaaatggaaatggtgaacaaacactatgccgtgatatttatcgactaggacacagatttgatttctacaggatgctatctctgtattttaccacagttggcttctacttcaatagcatggtggctgttctcacagtgtatgtatttttatatgggaggttataccttgttttgagtggcttagaaaagtcaatactgcaagatccaaatatccaaaacataaaaccatttgaaaatgcacttgccactcaatctgtattccaacttgggatgttgctcgttctcccaatgatgatggagattggccttgagaaaggatttggcagagcattggcagagtttgtaatcatgcaacttcagttagcttctgtattcttcacttttcatcttggaacaaagactcactactatggcaggacgatacttcatggtggagcaaagtatagagctactgggagagggtttgttgtgcgtcatgcaaagttcgctgagaattatcggatgtactcccggagtcactttgtcaaagcactggagctgcttattcttttggttgtctacctagcttatgggagttcatacagaagctcaagtttgtatttgtatgtcacagtttcgatatggttccttgttttctgttggctgtttgcaccttttgtcttcaacccatcctgctttgagtggcacaagactgttgatgactggaatgactggtggaagtggatgggcaatagaggtggtattggattagcgcctgaacaaagttgggaggcttggtgggtatatgcactgtcatggctggttatagcagttgctcttgtgtcactaaaggttgtttcaatggggagagagaagtttgttacaaggattcaactagtgttccgcatcctcaagggcattgtgttccttgtgctcattggtttgcttgtccttttatttgttggttttgaccttgctgtctcggatgttggcgccagtatcttggcattcattcccactggctggtttattcttctggttgcgcaattatgtggaccgctgtttcggaggttgatcatagagccacttcacttgctgtgttgcccatatggtaccggtggtgcatgcagaggtccctgctgtgccaggttcagacagaggaccggtgctgcgcttcggaagatgggaccatgggactccatccaggagatggcgaggatgtacgaatacaccatggggctcctcattttcctgcccattgccgtgctatcgtggttccccttcgtctctgaattccagacacggctgctcttcaaccaggccttcagcagggggctgcagatctctaggatcctcgcggggcagaatggtagcggcacaaagagcgactgatgctttgacattaacggagttatccattccgttgtgccatgtggtatctcgttgctattgtccgctaccgttatgtgtagaatcaagtatgttcatcgtttgaaaaagtgtcgcgcagtttgagtgtgtatgtcggattttaacctcttaattcagttcatattcattggttgtttccatttgatttgcacgtatacgttggaatctgtctgattttcggtgttaaaagtaagtgtttgtttttagctagaactttctctactcctttaaagcaccaattttatatgtcatgctttgcgtacgaagcatgtggattcgtttctttctcgcttctcgtctaccacaaatagaaataggttatgagagaccactcaaacttaacacgacaggaggaag

SEQ ID NO: 33084 - DNA, 6309 bp, Zea Mays
ctaccactgtagccgttttaggggctacagtccgcccctatccccttcaccggcttcctcctcctcctcctcttccctctcgattccttctctctcccgctaaatggatgggcacgctactgcgccagatttctccccagccggttccttcggccacgcgaccgcgcgctcggaaaactccacggacagcgaaggaggtgaaccaaggacgacgtatctgtcgccggagaaggcgtcaacatacagagcagcgaacaatatcagattattgcaaaaatgtggtacatctttcttcagctggatgtcatcactcacgaatgggttacccatgctagatggagccactgctgccgttccacttgaacagaagttttcagcaagtacaggagatggatctgcagcaccttcccagccacttcaaaacaaccgcagcgttcctatgcaattttttggcttcaatttgctcttccagtccctgtatactcgtaatgttctgcatgtcgcaaatatgctttcaagaaagttcaaacactggacccatcatcaactcaacgaggtgttcgacagttcaaaacttacatgtcaattaagctggaccaggatgacacacaagttctaggcaatgatgcaaatgagattcaacagttttataagaagtactgtgctagtatgagtcatatttcaaaaaagagaaactttgaggagatggctagatattaccaagtggtgtatgctctttatgaagtgctacaggatgtaacaaataaaaacattgatgatcaggtgttgcggtgtgcagacatggttgaggaaaatggtcgtcatttcaagaactacaagtacaacattattcccctcaattttcctggttcttccgaggaaattatggaacttccggagataagaggtgccattgatgcaataagtgacatagatggccttccaatgccagacatgtcttctatccaaaggcatgaggataaatctatccaagatctaattgaatatctttcactagcatttggatttcagaaatcaaatgtagaaaatcaaagagaaaatatggttttgcttctcgcaaatattagtacaagaactgctgcccaggaagggcatcctttggttgatacagtgaatgaattgtggaaaaaaatatttggaaattataagtcatggtgttgctatttgcatattacttcaagtatcataatcagtcatgatattacagaacataagaagcaacagctgaagcttcttcacattggcttgtatcttcttatctggggtgaggcttctaatgttcggtttatgcctgaatgcttgtgctacatattccaccatatggcaaaacagttgcatgacatggttgatgaaaacaattttcaaccaccacaagcacctgtggaagagggatcatttctgaaaaatgtcattgaacctatctttaaggttctgcaaaaagaagcacaaaaaagtagagggggtacagcaggccactcggcttggagaaattatgatgacctgaatgaactattttggtcagagaaatgttttactgagcttaactggccgccggatctttcttccaacttcttttataaagggtgcggcatggcaagaaagcccaagaccaattttgttgaagtacgcacatttctgcacatatttagaagttttaatcgaatgtggatgttttttatacttgctttccaggcaatgctcatagtttcatggagttcttctggatctctttctggaattaccgatggaactgttttaaaaaatgtattaagtgtttttatcacagcagctctactcaactttataacagtaactctggatataatgtttactgtacaagcatggggtagtatggagtggacaaagttagtcagatatttactaaaatttgttgtcgccattgcttggataattattcttccattgacctattctagttccatcaaatacccatccggtgctggcaaaatcctaaatagttggattggggattggtataatcaatcagtttataacattgcgatcgtcatatatatggttccggatattcttgctgccttgtttttcttgttgccacaacttcagaatgtcatggagcgctcagattcacgagtgttggttctcctgatgtggtggattcagcctagattgtatgttggacgtgggatgcacggagatattttgtcaatccttaagtatgtcttcttttgggctgttctgctcatctccaagcttgcattcagtttctatgttgagatatcaccattgattgatccaacaaagttcattcttgaccaacaagttgggaactatgaatggcatcaaatcttccctttcttgccacgcaaccttggtgttgtcattaccatatgggcaccgattgtcatggtttacttcatggacacacaaatatggtatgccattttctccactgtctttggaggtgtttcaggtgccctaagtcatgtgggtgaaatacgaacccttggcatgttgagggccagattcaaatcaattccagaagctttcagtcaatgcaatgcgataaaacagcgagagcaagcatttgagcacagaagcttctttcgtgtttggaattcattcatcaattccttaagagaggaagacttcattagtgatagagagaaggacatgttgatggctccgtcatattcaagcaatttatccatcattcagtggccacctttcctccttgctagcaaggtacccgcagctgttcatatggccatgaattccaaagaaggggatgagcatgagcttattgagaaaatcaaacttgatggagacagatatgatgcagttatagaatgctacaaatccttgatgattatactcaatagccttctgctagacactaatgatcagaatattgtcaatgatattgataaaaaagtgacttatagcatgataaaaaaaactttcttggaagacttcgaaatggcagaaatcggcaaagtaagttctacattggctagattgttgcagctcctgaaaagtgaacctattaatgatgttggagagaggaaaattgttaatgccctgcaagactttatggaaattacgacacgtgatttcatgaaagatggacagagtttcaaagatgaggatgagagaaatcaaagattcatgaacctaaatatgaatatgataaaggaagattattggagggagaagtttgtccggctgcacttattgttgactatgaaggattctgcaatggatgttccaataaacttggatgctcgccgtaggatcaccttctttgcaaactcgctttttatgaaaatgccaagagcaccacgcgtgcatgatatgatttcatttagtgttctgacaccatactacaacgaagaagtactgtattcatcacatgacctgaatagaaaaaatgaagatggtatctcaattttgttctacctacaaaagatctatccagatgaatggaataacttcctagaacgtattggagttgaatcaaataatgaagtgtcgataaaagggcgcatggatgacatccgtttatgggcatcttaccgtggtcaaacacttgccagaactgtgagaggaatgatgtactatagacgagctcttgaactacaatgctatgaagatatgataaatgaccaaggttatggcctagctgatttggatacagctaaagctgcaaggtccaaggccattgctgatattaaattcacttatgttgtctcctgtcaactttatggcgtgcataagacatccaaggattcccgagaaagaggtctctacgagaatatcttaaacctcatgttgacgtatccagcattgcgcattgcttacatcgatgagaaagaagtacaattacgaaatggtaaaatagagaaacagtattactctgttcttgtgaaaggtgatgatgaggaaatctaccggataaggctccctggtaaaccaacagaagttggagaaggcaagcctaataatcaaaatcatgccataatcttcactagaggagaagcacttcaagcaattgacatgaaccaggataactatctagaggaagcatttaaaatgagaaatctcttggaagagttccttcttacacatggaaagtcagagcccaccatattgggtgttcgggagcatatatttacaggaagggtacgatttcattatggccatcctgatgtttttgatagactctttcatctgacaaggggtggcataagcaaggcatcaaagattatcaaccttagcgaagatatatttgcaggtttcaattcaactctgcgtcgaggaaatgttacacatcatgaatacatacagttgggcaaaggacgtgatgttggaatgaaccaaatatccaactttgaggccaaggtggcaaatggaaatggtgaacaaacactatgccgtgatatttatcgactaggacacagatttgatttctacaggatgctatctctgtattttaccacagttggcttctacttcaatagcatggtggctgttctcacagtgtatgtatttttatatgggaggttataccttgttttgagtggcttagaaaagtcaatactgcaagatccaaatatccaaaacataaaaccatttgaaaatgcacttgccactcaatctgtattccaacttgggatgttgctcgttctcccaatgatgatggagattggccttgagaaaggatttggcagagcattggcagagtttgtaatcatgcaacttcagttagcttctgtattcttcacttttcatcttggaacaaagactcactactatggcaggacgatacttcatggtggagcaaagtatagagctactgggagagggtttgttgtgcgtcatgcaaagttcgctgagaattatcggatgtactcccggagtcactttgtcaaagcactggagctgcttattcttttggttgtctacctagcttatgggagttcatacagaagctcaagtttgtatttgtatgtcacagtttcgatatggttccttgttttctgttggctgtttgcaccttttgtcttcaacccatcctgctttgagtggcacaagactgttgatgactggaatgactggtggaagtggatgggcaatagaggtggtattggattagcgcctgaacaaagttgggaggcttggtgggtgagtgaacatgaccacctgaggaatgcaacaattcgaagcttgctcttggagttcatcctttccctgcggttcttgatctatcagtatggtattgtttaccacttgcacatagtgcatggcaacaaaagcttcttggtatatgcactgtcatggctggttatagcagttgctcttgtgtcactaaaggttgtttcaatggggagagagaagtttgttacaaggattcaactagtgttccgcatcctcaagggcattgtgttccttgtgctcattggtttgcttgtccttttatttgttggttttgaccttgctgtctcggatgttggcgccagtatcttggcattcattcccactggctggtttattcttctggttgcgcaattatgtggaccgctgtttcggaggttgatcatagagccacttcacttgctgtgttgcccatatggtaccggtggtgcatgcagaggtccctgctgtgccaggttcagacagaggaccggtgctgcgcttcggaagatgggaccatgggactccatccaggagatggcgaggatgtacgaatacaccatggggctcctcattttcctgcccattgccgtgctatcgtggttccccttcgtctctgaattccagacacggctgctcttcaaccaggccttcagcagggggctgcagatctctaggatcctcgcggggcagaatggtagcggcacaaagagcgactgatgctttgacattaacggagttatccattccgttgtgccatgtggtatctcgttgctattgtccgctaccgttatgtgtagaatcaagtatgttcatcgtttgaaaaagtgtcgcgcagtttgagtgtgtatgtcggattttaacctcttaattcagttcatattcattggttgtttccatttgatttgcacgtatacgttggaatctgtctgattttcggtgttaaaagtaagtgtttgtttttagctagaactttctctactcctttaaagcaccaattttatatgtcatgctttgcgtacgaagcatgtggattcgtttctttctcgcttctcgtctaccacaaatagaaataggttatgagagaccactcaaacttaacacgacaggaggaag

SEQ ID NO: 33085 - DNA, 6363 bp, Zea Mays
ctaccactgtagccgttttaggggctacagtccgcccctatccccttcaccggcttcctcctcctcctcctcttccctctcgattccttctctctcccgctaaatggatgggcacgctactgcgccagatttctccccagccggttccttcggccacgcgaccgcgcgctcggaaaactccacggacagcgaaggaggtgaaccaaggacgacgtatctgtcgccggagaaggcgtcaacatacagagcagcgaacaatatcagattattgcaaaaatgtggtacatctttcttcagctggatgtcatcactcacgaatgggttacccatgctagatggagccactgctgccgttccacttgaacagaagttttcagcaagtacaggagatggatctgcagcaccttcccagccacttcaaaacaaccgcagcgttcctatgcaattttttggcttcaatttgctcttccagtccctgtatactcgtaatgttctgcatgtcgcaaatatgctttcaagaaagttcaaacactggacccatcatcaactcaacgaggtgttcgacagttcaaaacttacatgtcaattaagctggaccaggatgacacacaagttctaggcaatgatgcaaatgagattcaacagttttataagaagtactgtgctagtatgagtcatatttcaaaaaagagaaactttgaggagatggctagatattaccaagtggtgtatgctctttatgaagtgctacaggatgtaacaaataaaaacattgatgatcaggtgttgcggtgtgcagacatggttgaggaaaatggtcgtcatttcaagaactacaagtacaacattattcccctcaattttcctggttcttccgaggaaattatggaacttccggagataagaggtgccattgatgcaataagtgacatagatggccttccaatgccagacatgtcttctatccaaaggcatgaggataaatctatccaagatctaattgaatatctttcactagcatttggatttcagaaatcaaatgtagaaaatcaaagagaaaatatggttttgcttctcgcaaatattagtacaagaactgctgcccaggaagggcatcctttggttgatacagtgaatgaattgtggaaaaaaatatttggaaattataagtcatggtgttgctatttgcatattacttcaagtatcataatcagtcatgatattacagaacataagaagcaacagctgaagcttcttcacattggcttgtatcttcttatctggggtgaggcttctaatgttcggtttatgcctgaatgcttgtgctacatattccaccatatggcaaaacagttgcatgacatggttgatgaaaacaattttcaaccaccacaagcacctgtggaagagggatcatttctgaaaaatgtcattgaacctatctttaaggttctgcaaaaagaagcacaaaaaagtagagggggtacagcaggccactcggcttggagaaattatgatgacctgaatgaactattttggtcagagaaatgttttactgagcttaactggccgccggatctttcttccaacttcttttataaagggtgcggcatggcaagaaagcccaagaccaattttgttgaagtacgcacatttctgcacatatttagaagttttaatcgaatgtggatgttttttatacttgctttccaggcaatgctcatagtttcatggagttcttctggatctctttctggaattaccgatggaactgttttaaaaaatgtattaagtgtttttatcacagcagctctactcaactttataacagtaactctggatataatgtttactgtacaagcatggggtagtatggagtggacaaagttagtcagatatttactaaaatttgttgtcgccattgcttggataattattcttccattgacctattctagttccatcaaatacccatccggtgctggcaaaatcctaaatagttggattggggattggtataatcaatcagtttataacattgcgatcgtcatatatatggttccggatattcttgctgccttgtttttcttgttgccacaacttcagaatgtcatggagcgctcagattcacgagtgttggttctcctgatgtggtggattcagcctagattgtatgttggacgtgggatgcacggagatattttgtcaatccttaagtatgtcttcttttgggctgttctgctcatctccaagcttgcattcagtttctatgttgagatatcaccattgattgatccaacaaagttcattcttgaccaacaagttgggaactatgaatggcatcaaatcttccctttcttgccacgcaaccttggtgttgtcattaccatatgggcaccgattgtcatggtttacttcatggacacacaaatatggtatgccattttctccactgtctttggaggtgtttcaggtgccctaagtcatgtgggtgaaatacgaacccttggcatgttgagggccagattcaaatcaattccagaagctttcagtcaatgcaatgcgataaaacagcgagaggtttcatactgaacaaatacttttcttttcactgtttttaattgttattagccaatgcctcgagttgctgaacaagcagatgccttattttcacttgaagaacgcaaagttgcaaccagttgtttgtatttgactaactgtgtcattcttaaccgctagcaagcatttgagcacagaagcttctttcgtgtttggaattcattcatcaattccttaagagaggaagacttcattagtgatagagagaaggacatgttgatggctccgtcatattcaagcaatttatccatcattcagtggccacctttcctccttgctagcaaggtacccgcagctgttcatatggccatgaattccaaagaaggggatgagcatgagcttattgagaaaatcaaacttgatggagacagatatgatgcagttatagaatgctacaaatccttgatgattatactcaatagccttctgctagacactaatgatcagaatattgtcaatgatattgataaaaaagtgacttatagcatgataaaaaaaactttcttggaagacttcgaaatggcagaaatcggcaaagtaagttctacattggctagattgttgcagctcctgaaaagtgaacctattaatgatgttggagagaggaaaattgttaatgccctgcaagactttatggaaattacgacacgtgatttcatgaaagatggacagagtttcaaagatgaggatgagagaaatcaaagattcatgaacctaaatatgaatatgataaaggaagattattggagggagaagtttgtccggctgcacttattgttgactatgaaggattctgcaatggatgttccaataaacttggatgctcgccatgaatggaataacttcctagaacgtattggagttgaatcaaataatgaagtgtcgataaaagggcgcatggatgacatccgtttatgggcatcttaccgtggtcaaacacttgccagaactgtgagaggaatgatgtactatagacgagctcttgaactacaatgctatgaagatatgataaatgaccaaggttatggcctagctgatttggatacagctaaagctgcaaggtccaaggccattgctgatattaaattcacttatgttgtctcctgtcaactttatggcgtgcataagacatccaaggattcccgagaaagaggtctctacgagaatatcttaaacctcatgttgacgtatccagcattgcgcattgcttacatcgatgagaaagaagtacaattacgaaatggtaaaatagagaaacagtattactctgttcttgtgaaaggtgatgatgaggaaatctaccggataaggctccctggtaaaccaacagaagttggagaaggcaagcctaataatcaaaatcatgccataatcttcactagaggagaagcacttcaagcaattgacatgaaccaggataactatctagaggaagcatttaaaatgagaaatctcttggaagagttccttcttacacatggaaagtcagagcccaccatattgggtgttcgggagcatatatttacaggaagtgtttcatccctcgcctggtttatgtccagccaggagaccagcttcgtcactattggacaacgtgttcttgccaaccctcttaaggtacgatttcattatggccatcctgatgtttttgatagactctttcatctgacaaggggtggcataagcaaggcatcaaagattatcaaccttagcgaagatatatttgcaggtttcaattcaactctgcgtcgaggaaatgttacacatcatgaatacatacagttgggcaaaggacgtgatgttggaatgaaccaaatatccaactttgaggccaaggtggcaaatggaaatggtgaacaaacactatgccgtgatatttatcgactaggacacagatttgatttctacaggatgctatctctgtattttaccacagttggcttctacttcaatagcatggtggctgttctcacagtgtatgtatttttatatgggaggttataccttgttttgagtggcttagaaaagtcaatactgcaagatccaaatatccaaaacataaaaccatttgaaaatgcacttgccactcaatctgtattccaacttgggatgttgctcgttctcccaatgatgatggagattggccttgagaaaggatttggcagagcattggcagagtttgtaatcatgcaacttcagttagcttctgtattcttcacttttcatcttggaacaaagactcactactatggcaggacgatacttcatggtggagcaaagtatagagctactgggagagggtttgttgtgcgtcatgcaaagttcgctgagaattatcggatgtactcccggagtcactttgtcaaagcactggagctgcttattcttttggttgtctacctagcttatgggagttcatacagaagctcaagtttgtatttgtatgtcacagtttcgatatggttccttgttttctgttggctgtttgcaccttttgtcttcaacccatcctgctttgagtggcacaagactgttgatgactggaatgactggtggaagtggatgggcaatagaggtggtattggattagcgcctgaacaaagttgggaggcttggtgggtgagtgaacatgaccacctgaggaatgcaacaattcgaagcttgctcttggagttcatcctttccctgcggttcttgatctatcagtatggtattgtttaccacttgcacatagtgcatggcaacaaaagcttcttggtatatgcactgtcatggctggttatagcagttgctcttgtgtcactaaaggttgtttcaatggggagagagaagtttgttacaaggattcaactagtgttccgcatcctcaagggcattgtgttccttgtgctcattggtttgcttgtccttttatttgttggttttgaccttgctgtctcggatgttggcgccagtatcttggcattcattcccactggctggtttattcttctggttgcgcaattatgtggaccgctgtttcggaggttgatcatagagccacttcacttgctgtgttgcccatatggtaccggtggtgcatgcagaggtccctgctgtgccaggttcagacagaggaccggtgctgcgcttcggaagatgggaccatgggactccatccaggagatggcgaggatgtacgaatacaccatggggctcctcattttcctgcccattgccgtgctatcgtggttccccttcgtctctgaattccagacacggctgctcttcaaccaggccttcagcagggggctgcagatctctaggatcctcgcggggcagaatggtagcggcacaaagagcgactgatgctttgacattaacggagttatccattccgttgtgccatgtggtatctcgttgctattgtccgctaccgttatgtgtagaatcaagtatgttcatcgtttgaaaaagtgtcgcgcagtttgagtgtgtatgtcggattttaacctcttaattcagttcatattcattggttgtttccatttgatttgcacgtatacgttggaatctgtctgattttcggtgttaaaagtaagtgtttgtttttagctagaactttctctactcctttaaagcaccaattttatatgtcatgctttgcgtacgaagcatgtggattcgtttctttctcgcttctcgtctaccacaaatagaaataggttatgagagaccactcaaacttaacacgacaggaggaag

SEQ ID NO: 33086 - DNA, 6393 bp, Zea Mays
ctaccactgtagccgttttaggggctacagtccgcccctatccccttcaccggcttcctcctcctcctcctcttccctctcgattccttctctctcccgctaaatggatgggcacgctactgcgccagatttctccccagccggttccttcggccacgcgaccgcgcgctcggaaaactccacggacagcgaaggaggtgaaccaaggacgacgtatctgtcgccggagaaggcgtcaacatacagagcagcgaacaatatcagattattgcaaaaatgtggtacatctttcttcagctggatgtcatcactcacgaatgggttacccatgctagatggagccactgctgccgttccacttgaacagaagttttcagcaagtacaggagatggatctgcagcaccttcccagccacttcaaaacaaccgcagcgttcctatgcaattttttggcttcaatttgctcttccagtccctgtatactcgtaatgttctgcatgtcgcaaatatgctttcaagaaagttcaaacactggacccatcatcaactcaacgaggtgttcgacagttcaaaacttacatgtcaattaagctggaccaggatgacacacaagttctaggcaatgatgcaaatgagattcaacagttttataagaagtactgtgctagtatgagtcatatttcaaaaaagagaaactttgaggagatggctagatattaccaagtggtgtatgctctttatgaagtgctacaggatgtaacaaataaaaacattgatgatcaggtgttgcggtgtgcagacatggttgaggaaaatggtcgtcatttcaagaactacaagtacaacattattcccctcaattttcctggttcttccgaggaaattatggaacttccggagataagaggtgccattgatgcaataagtgacatagatggccttccaatgccagacatgtcttctatccaaaggcatgaggataaatctatccaagatctaattgaatatctttcactagcatttggatttcagaaatcaaatgtagaaaatcaaagagaaaatatggttttgcttctcgcaaatattagtacaagaactgctgcccaggaagggcatcctttggttgatacagtgaatgaattgtggaaaaaaatatttggaaattataagtcatggtgttgctatttgcatattacttcaagtatcataatcagtcatgatattacagaacataagaagcaacagctgaagcttcttcacattggcttgtatcttcttatctggggtgaggcttctaatgttcggtttatgcctgaatgcttgtgctacatattccaccatatggcaaaacagttgcatgacatggttgatgaaaacaattttcaaccaccacaagcacctgtggaagagggatcatttctgaaaaatgtcattgaacctatctttaaggttctgcaaaaagaagcacaaaaaagtagagggggtacagcaggccactcggcttggagaaattatgatgacctgaatgaactattttggtcagagaaatgttttactgagcttaactggccgccggatctttcttccaacttcttttataaagggtgcggcatggcaagaaagcccaagaccaattttgttgaagtacgcacatttctgcacatatttagaagttttaatcgaatgtggatgttttttatacttgctttccaggcaatgctcatagtttcatggagttcttctggatctctttctggaattaccgatggaactgttttaaaaaatgtattaagtgtttttatcacagcagctctactcaactttataacagtaactctggatataatgtttactgtacaagcatggggtagtatggagtggacaaagttagtcagatatttactaaaatttgttgtcgccattgcttggataattattcttccattgacctattctagttccatcaaatacccatccggtgctggcaaaatcctaaatagttggattggggattggtataatcaatcagtttataacattgcgatcgtcatatatatggttccggatattcttgctgccttgtttttcttgttgccacaacttcagaatgtcatggagcgctcagattcacgagtgttggttctcctgatgtggtggattcagcctagattgtatgttggacgtgggatgcacggagatattttgtcaatccttaagtatgtcttcttttgggctgttctgctcatctccaagcttgcattcagtttctatgttgagatatcaccattgattgatccaacaaagttcattcttgaccaacaagttgggaactatgaatggcatcaaatcttccctttcttgccacgcaaccttggtgttgtcattaccatatgggcaccgattgtcatggtttacttcatggacacacaaatatggtatgccattttctccactgtctttggaggtgtttcaggtgccctaagtcatgtgggtgaaatacgaacccttggcatgttgagggccagattcaaatcaattccagaagctttcagtcaatgcaatgcgataaaacagcgagagcaagcatttgagcacagaagcttctttcgtgtttggaattcattcatcaattccttaagagaggaagacttcattagtgatagagagaaggacatgttgatggctccgtcatattcaagcaatttatccatcattcagtggccacctttcctccttgctagcaaggtacccgcagctgttcatatggccatgaattccaaagaaggggatgagcatgagcttattgagaaaatcaaacttgatggagacagatatgatgcagttatagaatgctacaaatccttgatgattatactcaatagccttctgctagacactaatgatcagaatattgtcaatgatattgataaaaaagtgacttatagcatgataaaaaaaactttcttggaagacttcgaaatggcagaaatcggcaaagtaagttctacattggctagattgttgcagctcctgaaaagtgaacctattaatgatgttggagagaggaaaattgttaatgccctgcaagactttatggaaattacgacacgtgatttcatgaaagatggacagagtttcaaagatgaggatgagagaaatcaaagattcatgaacctaaatatgaatatgataaaggaagattattggagggagaagtttgtccggctgcacttattgttgactatgaaggattctgcaatggatgttccaataaacttggatgctcgccgtaggatcaccttctttgcaaactcgctttttatgaaaatgccaagagcaccacgcgtgcatgatatgatttcatttagtgttctgacaccatactacaacgaagaagtactgtattcatcacatgacctgaatagaaaaaatgaagatggtatctcaattttgttctacctacaaaagatctatccagatgaatggaataacttcctagaacgtattggagttgaatcaaataatgaagtgtcgataaaagggcgcatggatgacatccgtttatgggcatcttaccgtggtcaaacacttgccagaactgtgagaggaatgatgtactatagacgagctcttgaactacaatgctatgaagatatgataaatgaccaaggttatggcctagctgatttggatacagctaaagctgcaaggtccaaggccattgctgatattaaattcacttatgttgtctcctgtcaactttatggcgtgcataagacatccaaggattcccgagaaagaggtctctacgagaatatcttaaacctcatgttgacgtatccagcattgcgcattgcttacatcgatgagaaagaagtacaattacgaaatggtaaaatagagaaacagtattactctgttcttgtgaaaggtgatgatgaggaaatctaccggataaggctccctggtaaaccaacagaagttggagaaggcaagcctaataatcaaaatcatgccataatcttcactagaggagaagcacttcaagcaattgacatgaaccaggataactatctagaggaagcatttaaaatgagaaatctcttggaagagttccttcttacacatggaaagtcagagcccaccatattgggtgttcgggagcatatatttacaggaagtgtttcatccctcgcctggtttatgtccagccaggagaccagcttcgtcactattggacaacgtgttcttgccaaccctcttaaggtacgatttcattatggccatcctgatgtttttgatagactctttcatctgacaaggggtggcataagcaaggcatcaaagattatcaaccttagcgaagatatatttgcaggtttcaattcaactctgcgtcgaggaaatgttacacatcatgaatacatacagttgggcaaaggacgtgatgttggaatgaaccaaatatccaactttgaggccaaggtggcaaatggaaatggtgaacaaacactatgccgtgatatttatcgactaggacacagatttgatttctacaggatgctatctctgtattttaccacagttggcttctacttcaatagcatggtggctgttctcacagtgtatgtatttttatatgggaggttataccttgttttgagtggcttagaaaagtcaatactgcaagatccaaatatccaaaacataaaaccatttgaaaatgcacttgccactcaatctgtattccaacttgggatgttgctcgttctcccaatgatgatggagattggccttgagaaaggatttggcagagcattggcagagtttgtaatcatgcaacttcagttagcttctgtattcttcacttttcatcttggaacaaagactcactactatggcaggacgatacttcatggtggagcaaagtatagagctactgggagagggtttgttgtgcgtcatgcaaagttcgctgagaattatcggatgtactcccggagtcactttgtcaaagcactggagctgcttattcttttggttgtctacctagcttatgggagttcatacagaagctcaagtttgtatttgtatgtcacagtttcgatatggttccttgttttctgttggctgtttgcaccttttgtcttcaacccatcctgctttgagtggcacaagactgttgatgactggaatgactggtggaagtggatgggcaatagaggtggtattggattagcgcctgaacaaagttgggaggcttggtgggtgagtgaacatgaccacctgaggaatgcaacaattcgaagcttgctcttggagttcatcctttccctgcggttcttgatctatcagtatggtattgtttaccacttgcacatagtgcatggcaacaaaagcttcttggtatatgcactgtcatggctggttatagcagttgctcttgtgtcactaaaggttgtttcaatggggagagagaagtttgttacaaggattcaactagtgttccgcatcctcaagggcattgtgttccttgtgctcattggtttgcttgtccttttatttgttggttttgaccttgctgtctcggatgttggcgccagtatcttggcattcattcccactggctggtttattcttctggttgcgcaattatgtggaccgctgtttcggaggttgatcatagagccacttcacttgctgtgttgcccatatggtaccggtggtgcatgcagaggtccctgctgtgccaggttcagacagaggaccggtgctgcgcttcggaagatgggaccatgggactccatccaggagatggcgaggatgtacgaatacaccatggggctcctcattttcctgcccattgccgtgctatcgtggttccccttcgtctctgaattccagacacggctgctcttcaaccaggccttcagcagggggctgcagatctctaggatcctcgcggggcagaatggtagcggcacaaagagcgactgatgctttgacattaacggagttatccattccgttgtgccatgtggtatctcgttgctattgtccgctaccgttatgtgtagaatcaagtatgttcatcgtttgaaaaagtgtcgcgcagtttgagtgtgtatgtcggattttaacctcttaattcagttcatattcattggttgtttccatttgatttgcacgtatacgttggaatctgtctgattttcggtgttaaaagtaagtgtttgtttttagctagaactttctctactcctttaaagcaccaattttatatgtcatgctttgcgtacgaagcatgtggattcgtttctttctcgcttctcgtctaccacaaatagaaataggttatgagagaccactcaaacttaacacgacaggaggaag

SEQ ID NO: 33087 - DNA, 6733 bp, Zea Mays
ctaccactgtagccgttttaggggctacagtccgcccctatccccttcaccggcttcctcctcctcctcctcttccctctcgattccttctctctcccgctaaatggatgggcacgctactgcgccagatttctccccagccggttccttcggccacgcgaccgcgcgctcggaaaactccacggacagcgaaggaggtgaaccaaggacgacgtatctgtcgccggagaaggtaagcatcgatccgccgtgtcctacgattcgtttgtcttgctccaggcggcgagcagcagtgggggtcgtcctcgcggatccgccttcaagcttcgcggatcccacccaaaattaaaatcctctcggaaatcagagacgcgaatccctcgccccaagccccgaaacctccgagttctctcgccaatttgatccgcctcaccgtcgccgcccgtccgccggtcggccttgactgctccgtcgcacgtggcggttcgcagcgcggaatctaccttgtgctgacagatccggggaaaccctcgttcctggtcgttccggctcgaatcttctgcggactggcaatgtaagcgttctccattggagggcgacgatctacggggcggttgttggcggggttgcgggaatggagcacgtgttcggagggaagtttaagcctgggaagaagatcgggagcggatctttcggcgagctctatctaggcgtcaacatacagagcagcgaacaatatcagattattgcaaaaatgtggtacatctttcttcagctggatgtcatcactcacgaatgggttacccatgctagatggagccactgctgccgttccacttgaacagaagttttcagcaagtacaggagatggatctgcagcaccttcccagccacttcaaaacaaccgcagcgttcctatgcaattttttggcttcaatttgctcttccagtccctgtatactcgtaatgttctgcatgtcgcaaatatgctttcaagaaagttcaaacactggacccatcatcaactcaacgaggtgttcgacagttcaaaacttacatgtcaattaagctggaccaggatgacacacaagttctaggcaatgatgcaaatgagattcaacagttttataagaagtactgtgctagtatgagtcatatttcaaaaaagagaaactttgaggagatggctagatattaccaagtggtgtatgctctttatgaagtgctacaggatgtaacaaataaaaacattgatgatcaggtgttgcggtgtgcagacatggttgaggaaaatggtcgtcatttcaagaactacaagtacaacattattcccctcaattttcctggttcttccgaggaaattatggaacttccggagataagaggtgccattgatgcaataagtgacatagatggccttccaatgccagacatgtcttctatccaaaggcatgaggataaatctatccaagatctaattgaatatctttcactagcatttggatttcagaaatcaaatgtagaaaatcaaagagaaaatatggttttgcttctcgcaaatattagtacaagaactgctgcccaggaagggcatcctttggttgatacagtgaatgaattgtggaaaaaaatatttggaaattataagtcatggtgttgctatttgcatattacttcaagtatcataatcagtcatgatattacagaacataagaagcaacagctgaagcttcttcacattggcttgtatcttcttatctggggtgaggcttctaatgttcggtttatgcctgaatgcttgtgctacatattccaccatatggcaaaacagttgcatgacatggttgatgaaaacaattttcaaccaccacaagcacctgtggaagagggatcatttctgaaaaatgtcattgaacctatctttaaggttctgcaaaaagaagcacaaaaaagtagagggggtacagcaggccactcggcttggagaaattatgatgacctgaatgaactattttggtcagagaaatgttttactgagcttaactggccgccggatctttcttccaacttcttttataaagggtgcggcatggcaagaaagcccaagaccaattttgttgaagtacgcacatttctgcacatatttagaagttttaatcgaatgtggatgttttttatacttgctttccaggcaatgctcatagtttcatggagttcttctggatctctttctggaattaccgatggaactgttttaaaaaatgtattaagtgtttttatcacagcagctctactcaactttataacagtaactctggatataatgtttactgtacaagcatggggtagtatggagtggacaaagttagtcagatatttactaaaatttgttgtcgccattgcttggataattattcttccattgacctattctagttccatcaaatacccatccggtgctggcaaaatcctaaatagttggattggggattggtataatcaatcagtttataacattgcgatcgtcatatatatggttccggatattcttgctgccttgtttttcttgttgccacaacttcagaatgtcatggagcgctcagattcacgagtgttggttctcctgatgtggtggattcagcctagattgtatgttggacgtgggatgcacggagatattttgtcaatccttaagtatgtcttcttttgggctgttctgctcatctccaagcttgcattcagtttctatgttgagatatcaccattgattgatccaacaaagttcattcttgaccaacaagttgggaactatgaatggcatcaaatcttccctttcttgccacgcaaccttggtgttgtcattaccatatgggcaccgattgtcatggtttacttcatggacacacaaatatggtatgccattttctccactgtctttggaggtgtttcaggtgccctaagtcatgtgggtgaaatacgaacccttggcatgttgagggccagattcaaatcaattccagaagctttcagtcaatgcaatgcgataaaacagcgagagcaagcatttgagcacagaagcttctttcgtgtttggaattcattcatcaattccttaagagaggaagacttcattagtgatagagagaaggacatgttgatggctccgtcatattcaagcaatttatccatcattcagtggccacctttcctccttgctagcaaggtacccgcagctgttcatatggccatgaattccaaagaaggggatgagcatgagcttattgagaaaatcaaacttgatggagacagatatgatgcagttatagaatgctacaaatccttgatgattatactcaatagccttctgctagacactaatgatcagaatattgtcaatgatattgataaaaaagtgacttatagcatgataaaaaaaactttcttggaagacttcgaaatggcagaaatcggcaaagtaagttctacattggctagattgttgcagctcctgaaaagtgaacctattaatgatgttggagagaggaaaattgttaatgccctgcaagactttatggaaattacgacacgtgatttcatgaaagatggacagagtttcaaagatgaggatgagagaaatcaaagattcatgaacctaaatatgaatatgataaaggaagattattggagggagaagtttgtccggctgcacttattgttgactatgaaggattctgcaatggatgttccaataaacttggatgctcgccgtaggatcaccttctttgcaaactcgctttttatgaaaatgccaagagcaccacgcgtgcatgatatgatttcatttagtgttctgacaccatactacaacgaagaagtactgtattcatcacatgacctgaatagaaaaaatgaagatggtatctcaattttgttctacctacaaaagatctatccagatgaatggaataacttcctagaacgtattggagttgaatcaaataatgaagtgtcgataaaagggcgcatggatgacatccgtttatgggcatcttaccgtggtcaaacacttgccagaactgtgagaggaatgatgtactatagacgagctcttgaactacaatgctatgaagatatgataaatgaccaaggttatggcctagctgatttggatacagctaaagctgcaaggtccaaggccattgctgatattaaattcacttatgttgtctcctgtcaactttatggcgtgcataagacatccaaggattcccgagaaagaggtctctacgagaatatcttaaacctcatgttgacgtatccagcattgcgcattgcttacatcgatgagaaagaagtacaattacgaaatggtaaaatagagaaacagtattactctgttcttgtgaaaggtgatgatgaggaaatctaccggataaggctccctggtaaaccaacagaagttggagaaggcaagcctaataatcaaaatcatgccataatcttcactagaggagaagcacttcaagcaattgacatgaaccaggataactatctagaggaagcatttaaaatgagaaatctcttggaagagttccttcttacacatggaaagtcagagcccaccatattgggtgttcgggagcatatatttacaggaagtgtttcatccctcgcctggtttatgtccagccaggagaccagcttcgtcactattggacaacgtgttcttgccaaccctcttaaggtacgatttcattatggccatcctgatgtttttgatagactctttcatctgacaaggggtggcataagcaaggcatcaaagattatcaaccttagcgaagatatatttgcaggtttcaattcaactctgcgtcgaggaaatgttacacatcatgaatacatacagttgggcaaaggacgtgatgttggaatgaaccaaatatccaactttgaggccaaggtggcaaatggaaatggtgaacaaacactatgccgtgatatttatcgactaggacacagatttgatttctacaggatgctatctctgtattttaccacagttggcttctacttcaatagcatggtggctgttctcacagtgtatgtatttttatatgggaggttataccttgttttgagtggcttagaaaagtcaatactgcaagatccaaatatccaaaacataaaaccatttgaaaatgcacttgccactcaatctgtattccaacttgggatgttgctcgttctcccaatgatgatggagattggccttgagaaaggatttggcagagcattggcagagtttgtaatcatgcaacttcagttagcttctgtattcttcacttttcatcttggaacaaagactcactactatggcaggacgatacttcatggtggagcaaagtatagagctactgggagagggtttgttgtgcgtcatgcaaagttcgctgagaattatcggatgtactcccggagtcactttgtcaaagcactggagctgcttattcttttggttgtctacctagcttatgggagttcatacagaagctcaagtttgtatttgtatgtcacagtttcgatatggttccttgttttctgttggctgtttgcaccttttgtcttcaacccatcctgctttgagtggcacaagactgttgatgactggaatgactggtggaagtggatgggcaatagaggtggtattggattagcgcctgaacaaagttgggaggcttggtgggtatatgcactgtcatggctggttatagcagttgctcttgtgtcactaaaggttgtttcaatggggagagagaagtttgttacaaggattcaactagtgttccgcatcctcaagggcattgtgttccttgtgctcattggtttgcttgtccttttatttgttggttttgaccttgctgtctcggatgttggcgccagtatcttggcattcattcccactggctggtttattcttctggttgcgcaattatgtggaccgctgtttcggaggttgatcatagagccacttcacttgctgtgttgcccatatggtaccggtggtgcatgcagaggtccctgctgtgccaggttcagacagaggaccggtgctgcgcttcggaagatgggaccatgggactccatccaggagatggcgaggatgtacgaatacaccatggggctcctcattttcctgcccattgccgtgctatcgtggttccccttcgtctctgaattccagacacggctgctcttcaaccaggccttcagcagggggctgcagatctctaggatcctcgcggggcagaatggtagcggcacaaagagcgactgatgctttgacattaacggagttatccattccgttgtgccatgtggtatctcgttgctattgtccgctaccgttatgtgtagaatcaagtatgttcatcgtttgaaaaagtgtcgcgcagtttgagtgtgtatgtcggattttaacctcttaattcagttcatattcattggttgtttccatttgatttgcacgtatacgttggaatctgtctgattttcggtgttaaaagtaagtgtttgtttttagctagaactttctctactcctttaaagcaccaattttatatgtcatgctttgcgtacgaagcatgtggattcgtttctttctcgcttctcgtctaccacaaatagaaataggttatgagagaccactcaaacttaacacgacaggaggaag

SEQ ID NO: 33088 - DNA, 6302 bp, Zea Mays
ctacattcctctttcgattcttctccagttctccctgtcacgtgactagggctaggctaggctagccaagcagaggagaggggagggcagaattccttgcttgctcggcgggtggtcgaatacgaatactgcggttgccccgccgccccggcaaccgcagcacatctcaccccattcctccgtcagtctccattctctccaatggcgtataaatcgccgctgccgccgaccgccctgcccccatcatcatcatcagtagcagcatcacgttcacgcgcgcggcgatggaggcggggccgtcgagttcggcggcgatgagcgcggcgaggcggaggcgggacgcgctggcgcagacgctggcatcgcggaggctgccggagggtatggcggaagctggggagctggtgcccggagccctcgcccccgaggtcatgcccttcctgcgcgccgccgacgagatcgagccgtacaacccgcgcgtcgcattcctatgtcgcaaatatgctttcaagaaagttcaaacactggacccatcatcaactcaacgaggtgttcgacagttcaaaacttacatgtcaattaagctggaccaggatgacacacaagttctaggcaatgatgcaaatgagattcaacagttttataagaagtactgtgctagtatgagtcatatttcaaaaaagagaaactttgaggagatggctagatattaccaagtggtgtatgctctttatgaagtgctacaggatgtaacaaataaaaacattgatgatcaggtgttgcggtgtgcagacatggttgaggaaaatggtcgtcatttcaagaactacaagtacaacattattcccctcaattttcctggttcttccgaggaaattatggaacttccggagataagaggtgccattgatgcaataagtgacatagatggccttccaatgccagacatgtcttctatccaaaggcatgaggataaatctatccaagatctaattgaatatctttcactagcatttggatttcagaaatcaaatgtagaaaatcaaagagaaaatatggttttgcttctcgcaaatattagtacaagaactgctgcccaggaagggcatcctttggttgatacagtgaatgaattgtggaaaaaaatatttggaaattataagtcatggtgttgctatttgcatattacttcaagtatcataatcagtcatgatattacagaacataagaagcaacagctgaagcttcttcacattggcttgtatcttcttatctggggtgaggcttctaatgttcggtttatgcctgaatgcttgtgctacatattccaccatatggcaaaacagttgcatgacatggttgatgaaaacaattttcaaccaccacaagcacctgtggaagagggatcatttctgaaaaatgtcattgaacctatctttaaggttctgcaaaaagaagcacaaaaaagtagagggggtacagcaggccactcggcttggagaaattatgatgacctgaatgaactattttggtcagagaaatgttttactgagcttaactggccgccggatctttcttccaacttcttttataaagggtgcggcatggcaagaaagcccaagaccaattttgttgaagtacgcacatttctgcacatatttagaagttttaatcgaatgtggatgttttttatacttgctttccaggcaatgctcatagtttcatggagttcttctggatctctttctggaattaccgatggaactgttttaaaaaatgtattaagtgtttttatcacagcagctctactcaactttataacagtaactctggatataatgtttactgtacaagcatggggtagtatggagtggacaaagttagtcagatatttactaaaatttgttgtcgccattgcttggataattattcttccattgacctattctagttccatcaaatacccatccggtgctggcaaaatcctaaatagttggattggggattggtataatcaatcagtttataacattgcgatcgtcatatatatggttccggatattcttgctgccttgtttttcttgttgccacaacttcagaatgtcatggagcgctcagattcacgagtgttggttctcctgatgtggtggattcagcctagattgtatgttggacgtgggatgcacggagatattttgtcaatccttaagtatgtcttcttttgggctgttctgctcatctccaagcttgcattcagtttctatgttgagatatcaccattgattgatccaacaaagttcattcttgaccaacaagttgggaactatgaatggcatcaaatcttccctttcttgccacgcaaccttggtgttgtcattaccatatgggcaccgattgtcatggtttacttcatggacacacaaatatggtatgccattttctccactgtctttggaggtgtttcaggtgccctaagtcatgtgggtgaaatacgaacccttggcatgttgagggccagattcaaatcaattccagaagctttcagtcaatgcaatgcgataaaacagcgagagcaagcatttgagcacagaagcttctttcgtgtttggaattcattcatcaattccttaagagaggaagacttcattagtgatagagagaaggacatgttgatggctccgtcatattcaagcaatttatccatcattcagtggccacctttcctccttgctagcaaggtacccgcagctgttcatatggccatgaattccaaagaaggggatgagcatgagcttattgagaaaatcaaacttgatggagacagatatgatgcagttatagaatgctacaaatccttgatgattatactcaatagccttctgctagacactaatgatcagaatattgtcaatgatattgataaaaaagtgacttatagcatgataaaaaaaactttcttggaagacttcgaaatggcagaaatcggcaaagtaagttctacattggctagattgttgcagctcctgaaaagtgaacctattaatgatgttggagagaggaaaattgttaatgccctgcaagactttatggaaattacgacacgtgatttcatgaaagatggacagagtttcaaagatgaggatgagagaaatcaaagattcatgaacctaaatatgaatatgataaaggaagattattggagggagaagtttgtccggctgcacttattgttgactatgaaggattctgcaatggatgttccaataaacttggatgctcgccgtaggatcaccttctttgcaaactcgctttttatgaaaatgccaagagcaccacgcgtgcatgatatgatttcatttagtgttctgacaccatactacaacgaagaagtactgtattcatcacatgacctgaatagaaaaaatgaagatggtatctcaattttgttctacctacaaaagatctatccagatgaatggaataacttcctagaacgtattggagttgaatcaaataatgaagtgtcgataaaagggcgcatggatgacatccgtttatgggcatcttaccgtggtcaaacacttgccagaactgtgagaggaatgatgtactatagacgagctcttgaactacaatgctatgaagatatgataaatgaccaaggttatggcctagctgatttggatacagctaaagctgcaaggtccaaggccattgctgatattaaattcacttatgttgtctcctgtcaactttatggcgtgcataagacatccaaggattcccgagaaagaggtctctacgagaatatcttaaacctcatgttgacgtatccagcattgcgcattgcttacatcgatgagaaagaagtacaattacgaaatggtaaaatagagaaacagtattactctgttcttgtgaaaggtgatgatgaggaaatctaccggataaggctccctggtaaaccaacagaagttggagaaggcaagcctaataatcaaaatcatgccataatcttcactagaggagaagcacttcaagcaattgacatgaaccaggataactatctagaggaagcatttaaaatgagaaatctcttggaagagttccttcttacacatggaaagtcagagcccaccatattgggtgttcgggagcatatatttacaggaagggtacgatttcattatggccatcctgatgtttttgatagactctttcatctgacaaggggtggcataagcaaggcatcaaagattatcaaccttagcgaagatatatttgcaggtttcaattcaactctgcgtcgaggaaatgttacacatcatgaatacatacagttgggcaaaggacgtgatgttggaatgaaccaaatatccaactttgaggccaaggtggcaaatggaaatggtgaacaaacactatgccgtgatatttatcgactaggacacagatttgatttctacaggatgctatctctgtattttaccacagttggcttctacttcaatagcatggtggctgttctcacagtgtatgtatttttatatgggaggttataccttgttttgagtggcttagaaaagtcaatactgcaagatccaaatatccaaaacataaaaccatttgaaaatgcacttgccactcaatctgtattccaacttgggatgttgctcgttctcccaatgatgatggagattggccttgagaaaggatttggcagagcattggcagagtttgtaatcatgcaacttcagttagcttctgtattcttcacttttcatcttggaacaaagactcactactatggcaggacgatacttcatggtggagcaaagtatagagctactgggagagggtttgttgtgcgtcatgcaaagttcgctgagaattatcggatgtactcccggagtcactttgtcaaagcactggagctgcttattcttttggttgtctacctagcttatgggagttcatacagaagctcaagtttgtatttgtatgtcacagtttcgatatggttccttgttttctgttggctgtttgcaccttttgtcttcaacccatcctgctttgagtggcacaagactgttgatgactggaatgactggtggaagtggatgggcaatagaggtggtattggattagcgcctgaacaaagttgggaggcttggtgggtgagtgaacatgaccacctgaggaatgcaacaattcgaagcttgctcttggagttcatcctttccctgcggttcttgatctatcagtatggtattgtttaccacttgcacatagtgcatggcaacaaaagcttcttggtatatgcactgtcatggctggttatagcagttgctcttgtgtcactaaaggttgtttcaatggggagagagaagtttgttacaaggattcaactagtgttccgcatcctcaagggcattgtgttccttgtgctcattggtttgcttgtccttttatttgttggttttgaccttgctgtctcggatgttggcgccagtatcttggcattcattcccactggctggtttattcttctggttgcgcaattatgtggaccgctgtttcggaggttgatcatagagccacttcacttgctgtgttgcccatatggtaccggtggtgcatgcagaggtccctgctgtgccaggttcagacagaggaccggtgctgcgcttcggaagatgggaccatgggactccatccaggagatggcgaggatgtacgaatacaccatggggctcctcattttcctgcccattgccgtgctatcgtggttccccttcgtctctgaattccagacacggctgctcttcaaccaggccttcagcagggggctgcagatctctaggatcctcgcggggcagaatggtagcggcacaaagagcgactgatgctttgacattaacggagttatccattccgttgtgccatgtggtatctcgttgctattgtccgctaccgttatgtgtagaatcaagtatgttcatcgtttgaaaaagtgtcgcgcagtttgagtgtgtatgtcggattttaacctcttaattcagttcatattcattggttgtttccatttgatttgcacgtatacgttggaatctgtctgattttcggtgttaaaagtaagtgtttgtttttagctagaactttctctactcctttaaagcaccaattttatatgtcatgctttgcgtacgaagcatgtggattcgtttctttctcgcttctcgtctaccacaaatagaaataggttatgagagaccactcaaacttaacacgacaggaggaag

SEQ ID NO: 33089 - DNA, 6245 bp, Zea Mays
aggctaggctagccaagcagaggagaggggagggcagaattccttgcttgctcggcgggtggtcgaatacgaatactgcggttgccccgccgccccggcaaccgcagcacatctcaccccattcctccgtcagtctccattctctccaatggcgtataaatcgccgctgccgccgaccgccctgcccccatcatcatcatcagtagcagcatcacgttcacgcgcgcggcgatggaggcggggccgtcgagttcggcggcgatgagcgcggcgaggcggaggcgggacgcgctggcgcagacgctggcatcgcggaggctgccggagggtatggcggaagctggggagctggtgcccggagccctcgcccccgaggtcatgcccttcctgcgcgccgccgacgagatcgagccgtacaacccgcgcgtcgcattcctatgtcgcaaatatgctttcaagaaagttcaaacactggacccatcatcaactcaacgaggtgttcgacagttcaaaacttacatgtcaattaagctggaccaggatgacacacaagttctaggcaatgatgcaaatgagattcaacagttttataagaagtactgtgctagtatgagtcatatttcaaaaaagagaaactttgaggagatggctagatattaccaagtggtgtatgctctttatgaagtgctacaggatgtaacaaataaaaacattgatgatcaggtgttgcggtgtgcagacatggttgaggaaaatggtcgtcatttcaagaactacaagtacaacattattcccctcaattttcctggttcttccgaggaaattatggaacttccggagataagaggtgccattgatgcaataagtgacatagatggccttccaatgccagacatgtcttctatccaaaggcatgaggataaatctatccaagatctaattgaatatctttcactagcatttggatttcagaaatcaaatgtagaaaatcaaagagaaaatatggttttgcttctcgcaaatattagtacaagaactgctgcccaggaagggcatcctttggttgatacagtgaatgaattgtggaaaaaaatatttggaaattataagtcatggtgttgctatttgcatattacttcaagtatcataatcagtcatgatattacagaacataagaagcaacagctgaagcttcttcacattggcttgtatcttcttatctggggtgaggcttctaatgttcggtttatgcctgaatgcttgtgctacatattccaccatatggcaaaacagttgcatgacatggttgatgaaaacaattttcaaccaccacaagcacctgtggaagagggatcatttctgaaaaatgtcattgaacctatctttaaggttctgcaaaaagaagcacaaaaaagtagagggggtacagcaggccactcggcttggagaaattatgatgacctgaatgaactattttggtcagagaaatgttttactgagcttaactggccgccggatctttcttccaacttcttttataaagggtgcggcatggcaagaaagcccaagaccaattttgttgaagtacgcacatttctgcacatatttagaagttttaatcgaatgtggatgttttttatacttgctttccaggcaatgctcatagtttcatggagttcttctggatctctttctggaattaccgatggaactgttttaaaaaatgtattaagtgtttttatcacagcagctctactcaactttataacagtaactctggatataatgtttactgtacaagcatggggtagtatggagtggacaaagttagtcagatatttactaaaatttgttgtcgccattgcttggataattattcttccattgacctattctagttccatcaaatacccatccggtgctggcaaaatcctaaatagttggattggggattggtataatcaatcagtttataacattgcgatcgtcatatatatggttccggatattcttgctgccttgtttttcttgttgccacaacttcagaatgtcatggagcgctcagattcacgagtgttggttctcctgatgtggtggattcagcctagattgtatgttggacgtgggatgcacggagatattttgtcaatccttaagtatgtcttcttttgggctgttctgctcatctccaagcttgcattcagtttctatgttgagatatcaccattgattgatccaacaaagttcattcttgaccaacaagttgggaactatgaatggcatcaaatcttccctttcttgccacgcaaccttggtgttgtcattaccatatgggcaccgattgtcatggtttacttcatggacacacaaatatggtatgccattttctccactgtctttggaggtgtttcaggtgccctaagtcatgtgggtgaaatacgaacccttggcatgttgagggccagattcaaatcaattccagaagctttcagtcaatgcaatgcgataaaacagcgagagcatttgagcacagaagcttctttcgtgtttggaattcattcatcaattccttaagagaggaagacttcattagtgatagagagaaggacatgttgatggctccgtcatattcaagcaatttatccatcattcagtggccacctttcctccttgctagcaaggtacccgcagctgttcatatggccatgaattccaaagaaggggatgagcatgagcttattgagaaaatcaaacttgatggagacagatatgatgcagttatagaatgctacaaatccttgatgattatactcaatagccttctgctagacactaatgatcagaatattgtcaatgatattgataaaaaagtgacttatagcatgataaaaaaaactttcttggaagacttcgaaatggcagaaatcggcaaagtaagttctacattggctagattgttgcagctcctgaaaagtgaacctattaatgatgttggagagaggaaaattgttaatgccctgcaagactttatggaaattacgacacgtgatttcatgaaagatggacagagtttcaaagatgaggatgagagaaatcaaagattcatgaacctaaatatgaatatgataaaggaagattattggagggagaagtttgtccggctgcacttattgttgactatgaaggattctgcaatggatgttccaataaacttggatgctcgccgtaggatcaccttctttgcaaactcgctttttatgaaaatgccaagagcaccacgcgtgcatgatatgatttcatttagtgttctgacaccatactacaacgaagaagtactgtattcatcacatgacctgaatagaaaaaatgaagatggtatctcaattttgttctacctacaaaagatctatccagatgaatggaataacttcctagaacgtattggagttgaatcaaataatgaagtgtcgataaaagggcgcatggatgacatccgtttatgggcatcttaccgtggtcaaacacttgccagaactgtgagaggaatgatgtactatagacgagctcttgaactacaatgctatgaagatatgataaatgaccaaggttatggcctagctgatttggatacagctaaagctgcaaggtccaaggccattgctgatattaaattcacttatgttgtctcctgtcaactttatggcgtgcataagacatccaaggattcccgagaaagaggtctctacgagaatatcttaaacctcatgttgacgtatccagcattgcgcattgcttacatcgatgagaaagaagtacaattacgaaatggtaaaatagagaaacagtattactctgttcttgtgaaaggtgatgatgaggaaatctaccggataaggctccctggtaaaccaacagaagttggagaaggcaagcctaataatcaaaatcatgccataatcttcactagaggagaagcacttcaagcaattgacatgaaccaggataactatctagaggaagcatttaaaatgagaaatctcttggaagagttccttcttacacatggaaagtcagagcccaccatattgggtgttcgggagcatatatttacaggaagggtacgatttcattatggccatcctgatgtttttgatagactctttcatctgacaaggggtggcataagcaaggcatcaaagattatcaaccttagcgaagatatatttgcaggtttcaattcaactctgcgtcgaggaaatgttacacatcatgaatacatacagttgggcaaaggacgtgatgttggaatgaaccaaatatccaactttgaggccaaggtggcaaatggaaatggtgaacaaacactatgccgtgatatttatcgactaggacacagatttgatttctacaggatgctatctctgtattttaccacagttggcttctacttcaatagcatggtggctgttctcacagtgtatgtatttttatatgggaggttataccttgttttgagtggcttagaaaagtcaatactgcaagatccaaatatccaaaacataaaaccatttgaaaatgcacttgccactcaatctgtattccaacttgggatgttgctcgttctcccaatgatgatggagattggccttgagaaaggatttggcagagcattggcagagtttgtaatcatgcaacttcagttagcttctgtattcttcacttttcatcttggaacaaagactcactactatggcaggacgatacttcatggtggagcaaagtatagagctactgggagagggtttgttgtgcgtcatgcaaagttcgctgagaattatcggatgtactcccggagtcactttgtcaaagcactggagctgcttattcttttggttgtctacctagcttatgggagttcatacagaagctcaagtttgtatttgtatgtcacagtttcgatatggttccttgttttctgttggctgtttgcaccttttgtcttcaacccatcctgctttgagtggcacaagactgttgatgactggaatgactggtggaagtggatgggcaatagaggtggtattggattagcgcctgaacaaagttgggaggcttggtgggtgagtgaacatgaccacctgaggaatgcaacaattcgaagcttgctcttggagttcatcctttccctgcggttcttgatctatcagtatggtattgtttaccacttgcacatagtgcatggcaacaaaagcttcttggtatatgcactgtcatggctggttatagcagttgctcttgtgtcactaaaggttgtttcaatggggagagagaagtttgttacaaggattcaactagtgttccgcatcctcaagggcattgtgttccttgtgctcattggtttgcttgtccttttatttgttggttttgaccttgctgtctcggatgttggcgccagtatcttggcattcattcccactggctggtttattcttctggttgcgcaattatgtggaccgctgtttcggaggttgatcatagagccacttcacttgctgtgttgcccatatggtaccggtggtgcatgcagaggtccctgctgtgccaggttcagacagaggaccggtgctgcgcttcggaagatgggaccatgggactccatccaggagatggcgaggatgtacgaatacaccatggggctcctcattttcctgcccattgccgtgctatcgtggttccccttcgtctctgaattccagacacggctgctcttcaaccaggccttcagcagggggctgcagatctctaggatcctcgcggggcagaatggtagcggcacaaagagcgactgatgctttgacattaacggagttatccattccgttgtgccatgtggtatctcgttgctattgtccgctaccgttatgtgtagaatcaagtatgttcatcgtttgaaaaagtgtcgcgcagtttgagtgtgtatgtcggattttaacctcttaattcagttcatattcattggttgtttccatttgatttgcacgtatacgttggaatctgtctgattttcggtgttaaaagtaagtgtttgtttttagctagaactttctctactcctttaaagcaccaattttatatgtcatgctttgcgtacgaagcatgtggattcgtttctttctcgcttctcgtctaccacaaatagaaataggttatgagagaccactcaaacttaacacgacaggaggaag

SEQ ID NO: 33090 - DNA, 6315 bp, Zea Mays
agaggagaggggagggcagaattccttgcttgctcggcgggtggtcgaatacgaatactgcggttgccccgccgccccggcaaccgcagcacatctcaccccattcctccgtcagtctccattctctccaatggcgtataaatcgccgctgccgccgaccgccctgcccccatcatcatcatcagtagcagcatcacgttcacgcgcgcggcgatggaggcggggccgtcgagttcggcggcgatgagcgcggcgaggcggaggcgggacgcgctggcgcagacgctggcatcgcggaggctgccggagggtatggcggaagctggggagctggtgcccggagccctcgcccccgaggtcatgcccttcctgcgcgccgccgacgagatcgagccgtacaacccgcgcgtcgcattcctatgtcgcaaatatgctttcaagaaagttcaaacactggacccatcatcaactcaacgaggtgttcgacagttcaaaacttacatgtcaattaagctggaccaggatgacacacaagttctaggcaatgatgcaaatgagattcaacagttttataagaagtactgtgctagtatgagtcatatttcaaaaaagagaaactttgaggagatggctagatattaccaagtggtgtatgctctttatgaagtgctacaggatgtaacaaataaaaacattgatgatcaggtgttgcggtgtgcagacatggttgaggaaaatggtcgtcatttcaagaactacaagtacaacattattcccctcaattttcctggttcttccgaggaaattatggaacttccggagataagaggtgccattgatgcaataagtgacatagatggccttccaatgccagacatgtcttctatccaaaggcatgaggataaatctatccaagatctaattgaatatctttcactagcatttggatttcagaaatcaaatgtagaaaatcaaagagaaaatatggttttgcttctcgcaaatattagtacaagaactgctgcccaggaagggcatcctttggttgatacagtgaatgaattgtggaaaaaaatatttggaaattataagtcatggtgttgctatttgcatattacttcaagtatcataatcagtcatgatattacagaacataagaagcaacagctgaagcttcttcacattggcttgtatcttcttatctggggtgaggcttctaatgttcggtttatgcctgaatgcttgtgctacatattccaccatatggcaaaacagttgcatgacatggttgatgaaaacaattttcaaccaccacaagcacctgtggaagagggatcatttctgaaaaatgtcattgaacctatctttaaggttctgcaaaaagaagcacaaaaaagtagagggggtacagcaggccactcggcttggagaaattatgatgacctgaatgaactattttggtcagagaaatgttttactgagcttaactggccgccggatctttcttccaacttcttttataaagggtgcggcatggcaagaaagcccaagaccaattttgttgaagtacgcacatttctgcacatatttagaagttttaatcgaatgtggatgttttttatacttgctttccaggcaatgctcatagtttcatggagttcttctggatctctttctggaattaccgatggaactgttttaaaaaatgtattaagtgtttttatcacagcagctctactcaactttataacagtaactctggatataatgtttactgtacaagcatggggtagtatggagtggacaaagttagtcagatatttactaaaatttgttgtcgccattgcttggataattattcttccattgacctattctagttccatcaaatacccatccggtgctggcaaaatcctaaatagttggattggggattggtataatcaatcagtttataacattgcgatcgtcatatatatggttccggatattcttgctgccttgtttttcttgttgccacaacttcagaatgtcatggagcgctcagattcacgagtgttggttctcctgatgtggtggattcagcctagattgtatgttggacgtgggatgcacggagatattttgtcaatccttaagtatgtcttcttttgggctgttctgctcatctccaagcttgcattcagtttctatgttgagatatcaccattgattgatccaacaaagttcattcttgaccaacaagttgggaactatgaatggcatcaaatcttccctttcttgccacgcaaccttggtgttgtcattaccatatgggcaccgattgtcatggtttacttcatggacacacaaatatggtatgccattttctccactgtctttggaggtgtttcaggtgccctaagtcatgtgggtgaaatacgaacccttggcatgttgagggccagattcaaatcaattccagaagctttcagtcaatgcaatgcgataaaacagcgagagcaagcatttgagcacagaagcttctttcgtgtttggaattcattcatcaattccttaagagaggaagacttcattagtgatagagagaaggacatgttgatggctccgtcatattcaagcaatttatccatcattcagtggccacctttcctccttgctagcaaggtacccgcagctgttcatatggccatgaattccaaagaaggggatgagcatgagcttattgagaaaatcaaacttgatggagacagatatgatgcagttatagaatgctacaaatccttgatgattatactcaatagccttctgctagacactaatgatcagaatattgtcaatgatattgataaaaaagtgacttatagcatgataaaaaaaactttcttggaagacttcgaaatggcagaaatcggcaaagtaagttctacattggctagattgttgcagctcctgaaaagtgaacctattaatgatgttggagagaggaaaattgttaatgccctgcaagactttatggaaattacgacacgtgatttcatgaaagatggacagagtttcaaagatgaggatgagagaaatcaaagattcatgaacctaaatatgaatatgataaaggaagattattggagggagaagtttgtccggctgcacttattgttgactatgaaggattctgcaatggatgttccaataaacttggatgctcgccgtaggatcaccttctttgcaaactcgctttttatgaaaatgccaagagcaccacgcgtgcatgatatgatttcatttagtgttctgacaccatactacaacgaagaagtactgtattcatcacatgacctgaatagaaaaaatgaagatggtatctcaattttgttctacctacaaaagatctatccagatgaatggaataacttcctagaacgtattggagttgaatcaaataatgaagtgtcgataaaagggcgcatggatgacatccgtttatgggcatcttaccgtggtcaaacacttgccagaactgtgagaggaatgatgtactatagacgagctcttgaactacaatgctatgaagatatgataaatgaccaaggttatggcctagctgatttggatacagctaaagctgcaaggtccaaggccattgctgatattaaattcacttatgttgtctcctgtcaactttatggcgtgcataagacatccaaggattcccgagaaagaggtctctacgagaatatcttaaacctcatgttgacgtatccagcattgcgcattgcttacatcgatgagaaagaagtacaattacgaaatggtaaaatagagaaacagtattactctgttcttgtgaaaggtgatgatgaggaaatctaccggataaggctccctggtaaaccaacagaagttggagaaggcaagcctaataatcaaaatcatgccataatcttcactagaggagaagcacttcaagcaattgacatgaaccaggataactatctagaggaagcatttaaaatgagaaatctcttggaagagttccttcttacacatggaaagtcagagcccaccatattgggtgttcgggagcatatatttacaggaagtgtttcatccctcgcctggtttatgtccagccaggagaccagcttcgtcactattggacaacgtgttcttgccaaccctcttaaggtacgatttcattatggccatcctgatgtttttgatagactctttcatctgacaaggggtggcataagcaaggcatcaaagattatcaaccttagcgaagatatatttgcaggtttcaattcaactctgcgtcgaggaaatgttacacatcatgaatacatacagttgggcaaaggacgtgatgttggaatgaaccaaatatccaactttgaggccaaggtggcaaatggaaatggtgaacaaacactatgccgtgatatttatcgactaggacacagatttgatttctacaggatgctatctctgtattttaccacagttggcttctacttcaatagcatggtggctgttctcacagtgtatgtatttttatatgggaggttataccttgttttgagtggcttagaaaagtcaatactgcaagatccaaatatccaaaacataaaaccatttgaaaatgcacttgccactcaatctgtattccaacttgggatgttgctcgttctcccaatgatgatggagattggccttgagaaaggatttggcagagcattggcagagtttgtaatcatgcaacttcagttagcttctgtattcttcacttttcatcttggaacaaagactcactactatggcaggacgatacttcatggtggagcaaagtatagagctactgggagagggtttgttgtgcgtcatgcaaagttcgctgagaattatcggatgtactcccggagtcactttgtcaaagcactggagctgcttattcttttggttgtctacctagcttatgggagttcatacagaagctcaagtttgtatttgtatgtcacagtttcgatatggttccttgttttctgttggctgtttgcaccttttgtcttcaacccatcctgctttgagtggcacaagactgttgatgactggaatgactggtggaagtggatgggcaatagaggtggtattggattagcgcctgaacaaagttgggaggcttggtgggtgagtgaacatgaccacctgaggaatgcaacaattcgaagcttgctcttggagttcatcctttccctgcggttcttgatctatcagtatggtattgtttaccacttgcacatagtgcatggcaacaaaagcttcttggtatatgcactgtcatggctggttatagcagttgctcttgtgtcactaaaggttgtttcaatggggagagagaagtttgttacaaggattcaactagtgttccgcatcctcaagggcattgtgttccttgtgctcattggtttgcttgtccttttatttgttggttttgaccttgctgtctcggatgttggcgccagtatcttggcattcattcccactggctggtttattcttctggttgcgcaattatgtggaccgctgtttcggaggttgatcatagagccacttcacttgctgtgttgcccatatggtaccggtggtgcatgcagaggtccctgctgtgccaggttcagacagaggaccggtgctgcgcttcggaagatgggaccatgggactccatccaggagatggcgaggatgtacgaatacaccatggggctcctcattttcctgcccattgccgtgctatcgtggttccccttcgtctctgaattccagacacggctgctcttcaaccaggccttcagcagggggctgcagatctctaggatcctcgcggggcagaatggtagcggcacaaagagcgactgatgctttgacattaacggagttatccattccgttgtgccatgtggtatctcgttgctattgtccgctaccgttatgtgtagaatcaagtatgttcatcgtttgaaaaagtgtcgcgcagtttgagtgtgtatgtcggattttaacctcttaattcagttcatattcattggttgtttccatttgatttgcacgtatacgttggaatctgtctgattttcggtgttaaaagtaagtgtttgtttttagctagaactttctctactcctttaaagcaccaattttatatgtcatgctttgcgtacgaagcatgtggattcgtttctttctcgcttctcgtctaccacaaatagaaataggttatgagagaccactcaaacttaacacgacaggaggaag

SEQ ID NO: 33091 - DNA, 6274 bp, Zea Mays
ccattctctccaatggcgtataaatcgccgctgccgccgaccgccctgcccccatcatcatcatcagtagcagcatcacgttcacgcgcgcggcgatggaggcggggccgtcgagttcggcggcgatgagcgcggcgaggcggaggcgggacgcgctggcgcagacgctggcatcgcggaggctgccggagggtatggcggaagctggggagctggtgcccggagccctcgcccccgaggtcatgcccttcctgcgcgccgccgacgagatcgagccgtacaacccgcgcgtcgcattcctatgtcgcaaatatgctttcaagaaagttcaaacactggacccatcatcaactcaacgaggtgttcgacagttcaaaacttacatgtcaattaagctggaccaggatgacacacaagttctaggcaatgatgcaaatgagattcaacagttttataagaagtactgtgctagtatgagtcatatttcaaaaaagagaaactttgaggagatggctagatattaccaagtggtgtatgctctttatgaagtgctacaggatgtaacaaataaaaacattgatgatcaggtgttgcggtgtgcagacatggttgaggaaaatggtcgtcatttcaagaactacaagtacaacattattcccctcaattttcctggttcttccgaggaaattatggaacttccggagataagaggtgccattgatgcaataagtgacatagatggccttccaatgccagacatgtcttctatccaaaggcatgaggataaatctatccaagatctaattgaatatctttcactagcatttggatttcagaaatcaaatgtagaaaatcaaagagaaaatatggttttgcttctcgcaaatattagtacaagaactgctgcccaggaagggcatcctttggttgatacagtgaatgaattgtggaaaaaaatatttggaaattataagtcatggtgttgctatttgcatattacttcaagtatcataatcagtcatgatattacagaacataagaagcaacagctgaagcttcttcacattggcttgtatcttcttatctggggtgaggcttctaatgttcggtttatgcctgaatgcttgtgctacatattccaccatatggcaaaacagttgcatgacatggttgatgaaaacaattttcaaccaccacaagcacctgtggaagagggatcatttctgaaaaatgtcattgaacctatctttaaggttctgcaaaaagaagcacaaaaaagtagagggggtacagcaggccactcggcttggagaaattatgatgacctgaatgaactattttggtcagagaaatgttttactgagcttaactggccgccggatctttcttccaacttcttttataaagggtgcggcatggcaagaaagcccaagaccaattttgttgaagtacgcacatttctgcacatatttagaagttttaatcgaatgtggatgttttttatacttgctttccaggcaatgctcatagtttcatggagttcttctggatctctttctggaattaccgatggaactgttttaaaaaatgtattaagtgtttttatcacagcagctctactcaactttataacagtaactctggatataatgtttactgtacaagcatggggtagtatggagtggacaaagttagtcagatatttactaaaatttgttgtcgccattgcttggataattattcttccattgacctattctagttccatcaaatacccatccggtgctggcaaaatcctaaatagttggattggggattggtataatcaatcagtttataacattgcgatcgtcatatatatggttccggatattcttgctgccttgtttttcttgttgccacaacttcagaatgtcatggagcgctcagattcacgagtgttggttctcctgatgtggtggattcagcctagattgtatgttggacgtgggatgcacggagatattttgtcaatccttaagtatgtcttcttttgggctgttctgctcatctccaagcttgcattcagtttctatgttgagatatcaccattgattgatccaacaaagttcattcttgaccaacaagttgggaactatgaatggcatcaaatcttccctttcttgccacgcaaccttggtgttgtcattaccatatgggcaccgattgtcatggtttacttcatggacacacaaatatggtatgccattttctccactgtctttggaggtgtttcaggtgccctaagtcatgtgggtgaaatacgaacccttggcatgttgagggccagattcaaatcaattccagaagctttcagtcaatgcaatgcgataaaacagcgagagcatttgagcacagaagcttctttcgtgtttggaattcattcatcaattccttaagagaggaagacttcattagtgatagagagaaggacatgttgatggctccgtcatattcaagcaatttatccatcattcagtggccacctttcctccttgctagcaaggtacccgcagctgttcatatggccatgaattccaaagaaggggatgagcatgagcttattgagaaaatcaaacttgatggagacagatatgatgcagttatagaatgctacaaatccttgatgattatactcaatagccttctgctagacactaatgatcagaatattgtcaatgatattgataaaaaagtgacttatagcatgataaaaaaaactttcttggaagacttcgaaatggcagaaatcggcaaagtaagttctacattggctagattgttgcagctcctgaaaagtgaacctattaatgatgttggagagaggaaaattgttaatgccctgcaagactttatggaaattacgacacgtgatttcatgaaagatggacagagtttcaaagatgaggatgagagaaatcaaagattcatgaacctaaatatgaatatgataaaggaagattattggagggagaagtttgtccggctgcacttattgttgactatgaaggattctgcaatggatgttccaataaacttggatgctcgccgtaggatcaccttctttgcaaactcgctttttatgaaaatgccaagagcaccacgcgtgcatgatatgatttcatttagtgttctgacaccatactacaacgaagaagtactgtattcatcacatgacctgaatagaaaaaatgaagatggtatctcaattttgttctacctacaaaagatctatccagatgaatggaataacttcctagaacgtattggagttgaatcaaataatgaagtgtcgataaaagggcgcatggatgacatccgtttatgggcatcttaccgtggtcaaacacttgccagaactgtgagaggaatgatgtactatagacgagctcttgaactacaatgctatgaagatatgataaatgaccaaggttatggcctagctgatttggatacagctaaagctgcaaggtccaaggccattgctgatattaaattcacttatgttgtctcctgtcaactttatggcgtgcataagacatccaaggattcccgagaaagaggtctctacgagaatatcttaaacctcatgttgacgtatccagcattgcgcattgcttacatcgatgagaaagaagtacaattacgaaatggtaaaatagagaaacagtattactctgttcttgtgaaaggtgatgatgaggaaatctaccggataaggctccctggtaaaccaacagaagttggagaaggcaagcctaataatcaaaatcatgccataatcttcactagaggagaagcacttcaagcaattgacatgaaccaggataactatctagaggaagcatttaaaatgagaaatctcttggaagagttccttcttacacatggaaagtcagagcccaccatattgggtgttcgggagcatatatttacaggaagtgtttcatccctcgcctggtttatgtccagccaggagaccagcttcgtcactattggacaacgtgttcttgccaaccctcttaaggtacgatttcattatggccatcctgatgtttttgatagactctttcatctgacaaggggtggcataagcaaggcatcaaagattatcaaccttagcgaagatatatttgcaggttagtttttctgagattatgcaaaaacttagttgcttatttctgcccattaagtttacagttgttatatcgacaccaaaggtttcaattcaactctgcgtcgaggaaatgttacacatcatgaatacatacagttgggcaaaggacgtgatgttggaatgaaccaaatatccaactttgaggccaaggtggcaaatggaaatggtgaacaaacactatgccgtgatatttatcgactaggacacagatttgatttctacaggatgctatctctgtattttaccacagttggcttctacttcaatagcatggtggctgttctcacagtgtatgtatttttatatgggaggttataccttgttttgagtggcttagaaaagtcaatactgcaagatccaaatatccaaaacataaaaccatttgaaaatgcacttgccactcaatctgtattccaacttgggatgttgctcgttctcccaatgatgatggagattggccttgagaaaggatttggcagagcattggcagagtttgtaatcatgcaacttcagttagcttctgtattcttcacttttcatcttggaacaaagactcactactatggcaggacgatacttcatggtggagcaaagtatagagctactgggagagggtttgttgtgcgtcatgcaaagttcgctgagaattatcggatgtactcccggagtcactttgtcaaagcactggagctgcttattcttttggttgtctacctagcttatgggagttcatacagaagctcaagtttgtatttgtatgtcacagtttcgatatggttccttgttttctgttggctgtttgcaccttttgtcttcaacccatcctgctttgagtggcacaagactgttgatgactggaatgactggtggaagtggatgggcaatagaggtggtattggattagcgcctgaacaaagttgggaggcttggtgggtgagtgaacatgaccacctgaggaatgcaacaattcgaagcttgctcttggagttcatcctttccctgcggttcttgatctatcagtatggtattgtttaccacttgcacatagtgcatggcaacaaaagcttcttggtatatgcactgtcatggctggttatagcagttgctcttgtgtcactaaaggttgtttcaatggggagagagaagtttgttacaaggattcaactagtgttccgcatcctcaagggcattgtgttccttgtgctcattggtttgcttgtccttttatttgttggttttgaccttgctgtctcggatgttggcgccagtatcttggcattcattcccactggctggtttattcttctggttgcgcaattatgtggaccgctgtttcggaggttgatcatagagccacttcacttgctgtgttgcccatatggtaccggtggtgcatgcagaggtccctgctgtgccaggttcagacagaggaccggtgctgcgcttcggaagatgggaccatgggactccatccaggagatggcgaggatgtacgaatacaccatggggctcctcattttcctgcccattgccgtgctatcgtggttccccttcgtctctgaattccagacacggctgctcttcaaccaggccttcagcagggggctgcagatctctaggatcctcgcggggcagaatggtagcggcacaaagagcgactgatgctttgacattaacggagttatccattccgttgtgccatgtggtatctcgttgctattgtccgctaccgttatgtgtagaatcaagtatgttcatcgtttgaaaaagtgtcgcgcagtttgagtgtgtatgtcggattttaacctcttaattcagttcatattcattggttgtttccatttgatttgcacgtatacgttggaatctgtctgattttcggtgttaaaagtaagtgtttgtttttagctagaactttctctactcctttaaagcaccaattttatatgtcatgctttgcgtacgaagcatgtggattcgtttctttctcgcttctcgtctaccacaaatagaaataggttatgagagaccactcaaacttaacacgacaggaggaag

SEQ ID NO: 33092 - DNA, 4200 bp, Zea Mays
caacttgttcccatgccaagttatgctcatcatcatccctaccagcgtgtacaaccgatgagtgtacccactcattgtcctaatcaaaatcctcaagcactaatgggtcataacttgtaccacctgtctccctactcttttggaacctactttgcatcttccggtttgccacgcaaccttggtgttgtcattaccatatgggcaccgattgtcatggtttacttcatggacacacaaatatggtatgccattttctccactgtctttggaggtgtttcaggtgccctaagtcatgtgggtgaaatacgaacccttggcatgttgagggccagattcaaatcaattccagaagctttcagtcaatgcaatgcgataaaacagcgagagcaagcatttgagcacagaagcttctttcgtgtttggaattcattcatcaattccttaagagaggaagacttcattagtgatagagagaaggacatgttgatggctccgtcatattcaagcaatttatccatcattcagtggccacctttcctccttgctagcaaggtacccgcagctgttcatatggccatgaattccaaagaaggggatgagcatgagcttattgagaaaatcaaacttgatggagacagatatgatgcagttatagaatgctacaaatccttgatgattatactcaatagccttctgctagacactaatgatcagaatattgtcaatgatattgataaaaaagtgacttatagcatgataaaaaaaactttcttggaagacttcgaaatggcagaaatcggcaaagtaagttctacattggctagattgttgcagctcctgaaaagtgaacctattaatgatgttggagagaggaaaattgttaatgccctgcaagactttatggaaattacgacacgtgatttcatgaaagatggacagagtttcaaagatgaggatgagagaaatcaaagattcatgaacctaaatatgaatatgataaaggaagattattggagggagaagtttgtccggctgcacttattgttgactatgaaggattctgcaatggatgttccaataaacttggatgctcgccgtaggatcaccttctttgcaaactcgctttttatgaaaatgccaagagcaccacgcgtgcatgatatgatttcatttagtgttctgacaccatactacaacgaagaagtactgtattcatcacatgacctgaatagaaaaaatgaagatggtatctcaattttgttctacctacaaaagatctatccagatgaatggaataacttcctagaacgtattggagttgaatcaaataatgaagtgtcgataaaagggcgcatggatgacatccgtttatgggcatcttaccgtggtcaaacacttgccagaactgtgagaggaatgatgtactatagacgagctcttgaactacaatgctatgaagatatgataaatgaccaaggttatggcctagctgatttggatacagctaaagctgcaaggtccaaggccattgctgatattaaattcacttatgttgtctcctgtcaactttatggcgtgcataagacatccaaggattcccgagaaagaggtctctacgagaatatcttaaacctcatgttgacgtatccagcattgcgcattgcttacatcgatgagaaagaagtacaattacgaaatggtaaaatagagaaacagtattactctgttcttgtgaaaggtgatgatgaggaaatctaccggataaggctccctggtaaaccaacagaagttggagaaggcaagcctaataatcaaaatcatgccataatcttcactagaggagaagcacttcaagcaattgacatgaaccaggataactatctagaggaagcatttaaaatgagaaatctcttggaagagttccttcttacacatggaaagtcagagcccaccatattgggtgttcgggagcatatatttacaggaagtgtttcatccctcgcctggtttatgtccagccaggagaccagcttcgtcactattggacaacgtgttcttgccaaccctcttaaggtacgatttcattatggccatcctgatgtttttgatagactctttcatctgacaaggggtggcataagcaaggcatcaaagattatcaaccttagcgaagatatatttgcaggtttcaattcaactctgcgtcgaggaaatgttacacatcatgaatacatacagttgggcaaaggacgtgatgttggaatgaaccaaatatccaactttgaggccaaggtggcaaatggaaatggtgaacaaacactatgccgtgatatttatcgactaggacacagatttgatttctacaggatgctatctctgtattttaccacagttggcttctacttcaatagcatggtggctgttctcacagtgtatgtatttttatatgggaggttataccttgttttgagtggcttagaaaagtcaatactgcaagatccaaatatccaaaacataaaaccatttgaaaatgcacttgccactcaatctgtattccaacttgggatgttgctcgttctcccaatgatgatggagattggccttgagaaaggatttggcagagcattggcagagtttgtaatcatgcaacttcagttagcttctgtattcttcacttttcatcttggaacaaagactcactactatggcaggacgatacttcatggtggagcaaagtatagagctactgggagagggtttgttgtgcgtcatgcaaagttcgctgagaattatcggatgtactcccggagtcactttgtcaaagcactggagctgcttattcttttggttgtctacctagcttatgggagttcatacagaagctcaagtttgtatttgtatgtcacagtttcgatatggttccttgttttctgttggctgtttgcaccttttgtcttcaacccatcctgctttgagtggcacaagactgttgatgactggaatgactggtggaagtggatgggcaatagaggtggtattggattagcgcctgaacaaagttgggaggcttggtgggtgagtgaacatgaccacctgaggaatgcaacaattcgaagcttgctcttggagttcatcctttccctgcggttcttgatctatcagtatggtattgtttaccacttgcacatagtgcatggcaacaaaagcttcttggtatatgcactgtcatggctggttatagcagttgctcttgtgtcactaaaggttgtttcaatggggagagagaagtttgttacaaggattcaactagtgttccgcatcctcaagggcattgtgttccttgtgctcattggtttgcttgtccttttatttgttggttttgaccttgctgtctcggatgttggcgccagtatcttggcattcattcccactggctggtttattcttctggttgcgcaattatgtggaccgctgtttcggaggttgatcatagagccacttcacttgctgtgttgcccatatggtaccggtggtgcatgcagaggtccctgctgtgccaggttcagacagaggaccggtgctgcgcttcggaagatgggaccatgggactccatccaggagatggcgaggatgtacgaatacaccatggggctcctcattttcctgcccattgccgtgctatcgtggttccccttcgtctctgaattccagacacggctgctcttcaaccaggccttcagcagggggctgcagatctctaggatcctcgcggggcagaatggtagcggcacaaagagcgactgatgctttgacattaacggagttatccattccgttgtgccatgtggtatctcgttgctattgtccgctaccgttatgtgtagaatcaagtatgttcatcgtttgaaaaagtgtcgcgcagtttgagtgtgtatgtcggattttaacctcttaattcagttcatattcattggttgtttccatttgatttgcacgtatacgttggaatctgtctgattttcggtgttaaaagtaagtgtttgtttttagctagaactttctctactcctttaaagcaccaattttatatgtcatgctttgcgtacgaagcatgtggattcgtttctttctcgcttctcgtctaccacaaatagaaataggttatgagagaccactcaaacttaacacgacaggaggaag

SEQ ID NO: 33093 - DNA, 4104 bp, Zea Mays
atgccaagttatgctcatcatcatccctaccagcgtgtacaaccgatgagtgtacccactcattgtcctaatcaaaatcctcaagcactaatgggtcataacttgtaccacctgtctccctactcttttggaacctactttgcatcttccggtttgccacgcaaccttggtgttgtcattaccatatgggcaccgattgtcatggtttacttcatggacacacaaatatggtatgccattttctccactgtctttggaggtgtttcaggtgccctaagtcatgtgggtgaaatacgaacccttggcatgttgagggccagattcaaatcaattccagaagctttcagtcaatgcaatgcgataaaacagcgagagcaagcatttgagcacagaagcttctttcgtgtttggaattcattcatcaattccttaagagaggaagacttcattagtgatagagagaaggacatgttgatggctccgtcatattcaagcaatttatccatcattcagtggccacctttcctccttgctagcaaggtacccgcagctgttcatatggccatgaattccaaagaaggggatgagcatgagcttattgagaaaatcaaacttgatggagacagatatgatgcagttatagaatgctacaaatccttgatgattatactcaatagccttctgctagacactaatgatcagaatattgtcaatgatattgataaaaaagtgacttatagcatgataaaaaaaactttcttggaagacttcgaaatggcagaaatcggcaaagtaagttctacattggctagattgttgcagctcctgaaaagtgaacctattaatgatgttggagagaggaaaattgttaatgccctgcaagactttatggaaattacgacacgtgatttcatgaaagatggacagagtttcaaagatgaggatgagagaaatcaaagattcatgaacctaaatatgaatatgataaaggaagattattggagggagaagtttgtccggctgcacttattgttgactatgaaggattctgcaatggatgttccaataaacttggatgctcgccgtaggatcaccttctttgcaaactcgctttttatgaaaatgccaagagcaccacgcgtgcatgatatgatttcatttagtgttctgacaccatactacaacgaagaagtactgtattcatcacatgacctgaatagaaaaaatgaagatggtatctcaattttgttctacctacaaaagatctatccagatgaatggaataacttcctagaacgtattggagttgaatcaaataatgaagtgtcgataaaagggcgcatggatgacatccgtttatgggcatcttaccgtggtcaaacacttgccagaactgtgagaggaatgatgtactatagacgagctcttgaactacaatgctatgaagatatgataaatgaccaaggttatggcctagctgatttggatacagctaaagctgcaaggtccaaggccattgctgatattaaattcacttatgttgtctcctgtcaactttatggcgtgcataagacatccaaggattcccgagaaagaggtctctacgagaatatcttaaacctcatgttgacgtatccagcattgcgcattgcttacatcgatgagaaagaagtacaattacgaaatggtaaaatagagaaacagtattactctgttcttgtgaaaggtgatgatgaggaaatctaccggataaggctccctggtaaaccaacagaagttggagaaggcaagcctaataatcaaaatcatgccataatcttcactagaggagaagcacttcaagcaattgacatgaaccaggataactatctagaggaagcatttaaaatgagaaatctcttggaagagttccttcttacacatggaaagtcagagcccaccatattgggtgttcgggagcatatatttacaggaagggtacgatttcattatggccatcctgatgtttttgatagactctttcatctgacaaggggtggcataagcaaggcatcaaagattatcaaccttagcgaagatatatttgcaggtttcaattcaactctgcgtcgaggaaatgttacacatcatgaatacatacagttgggcaaaggacgtgatgttggaatgaaccaaatatccaactttgaggccaaggtggcaaatggaaatggtgaacaaacactatgccgtgatatttatcgactaggacacagatttgatttctacaggatgctatctctgtattttaccacagttggcttctacttcaatagcatggtggctgttctcacagtgtatgtatttttatatgggaggttataccttgttttgagtggcttagaaaagtcaatactgcaagatccaaatatccaaaacataaaaccatttgaaaatgcacttgccactcaatctgtattccaacttgggatgttgctcgttctcccaatgatgatggagattggccttgagaaaggatttggcagagcattggcagagtttgtaatcatgcaacttcagttagcttctgtattcttcacttttcatcttggaacaaagactcactactatggcaggacgatacttcatggtggagcaaagtatagagctactgggagagggtttgttgtgcgtcatgcaaagttcgctgagaattatcggatgtactcccggagtcactttgtcaaagcactggagctgcttattcttttggttgtctacctagcttatgggagttcatacagaagctcaagtttgtatttgtatgtcacagtttcgatatggttccttgttttctgttggctgtttgcaccttttgtcttcaacccatcctgctttgagtggcacaagactgttgatgactggaatgactggtggaagtggatgggcaatagaggtggtattggattagcgcctgaacaaagttgggaggcttggtgggtgagtgaacatgaccacctgaggaatgcaacaattcgaagcttgctcttggagttcatcctttccctgcggttcttgatctatcagtatggtattgtttaccacttgcacatagtgcatggcaacaaaagcttcttggtatatgcactgtcatggctggttatagcagttgctcttgtgtcactaaaggttgtttcaatggggagagagaagtttgttacaaggattcaactagtgttccgcatcctcaagggcattgtgttccttgtgctcattggtttgcttgtccttttatttgttggttttgaccttgctgtctcggatgttggcgccagtatcttggcattcattcccactggctggtttattcttctggttgcgcaattatgtggaccgctgtttcggaggttgatcatagagccacttcacttgctgtgttgcccatatggtaccggtggtgcatgcagaggtccctgctgtgccaggttcagacagaggaccggtgctgcgcttcggaagatgggaccatgggactccatccaggagatggcgaggatgtacgaatacaccatggggctcctcattttcctgcccattgccgtgctatcgtggttccccttcgtctctgaattccagacacggctgctcttcaaccaggccttcagcagggggctgcagatctctaggatcctcgcggggcagaatggtagcggcacaaagagcgactgatgctttgacattaacggagttatccattccgttgtgccatgtggtatctcgttgctattgtccgctaccgttatgtgtagaatcaagtatgttcatcgtttgaaaaagtgtcgcgcagtttgagtgtgtatgtcggattttaacctcttaattcagttcatattcattggttgtttccatttgatttgcacgtatacgttggaatctgtctgattttcggtgttaaaagtaagtgtttgtttttagctagaactttctctactcctttaaagcaccaattttatatgtcatgctttgcgtacgaagcatgtggattcgtttctttctcgcttctcgtctaccacaaatagaaataggttatgagagaccactcaaacttaacacgacaggaggaag

SEQ ID NO: 33094 - DNA, 4029 bp, Zea Mays
atgccaagttatgctcatcatcatccctaccagcgtgtacaaccgatgagtgtacccactcattgtcctaatcaaaatcctcaagcactaatgggtcataacttgtaccacctgtctccctactcttttggaacctactttgcatcttccggtttgccacgcaaccttggtgttgtcattaccatatgggcaccgattgtcatggtttacttcatggacacacaaatatggtatgccattttctccactgtctttggaggtgtttcaggtgccctaagtcatgtgggtgaatatgtaagagagaaggacatgttgatggctccgtcatattcaagcaatttatccatcattcagtggccacctttcctccttgctagcaaggtacccgcagctgttcatatggccatgaattccaaagaaggggatgagcatgagcttattgagaaaatcaaacttgatggagacagatatgatgcagttatagaatgctacaaatccttgatgattatactcaatagccttctgctagacactaatgatcagaatattgtcaatgatattgataaaaaagtgacttatagcatgataaaaaaaactttcttggaagacttcgaaatggcagaaatcggcaaagtaagttctacattggctagattgttgcagctcctgaaaagtgaacctattaatgatgttggagagaggaaaattgttaatgccctgcaagactttatggaaattacgacacgtgatttcatgaaagatggacagagtttcaaagatgaggatgagagaaatcaaagattcatgaacctaaatatgaatatgataaaggaagattattggagggagaagtttgtccggctgcacttattgttgactatgaaggattctgcaatggatgttccaataaacttggatgctcgccgtaggatcaccttctttgcaaactcgctttttatgaaaatgccaagagcaccacgcgtgcatgatatgatttcatttagtgttctgacaccatactacaacgaagaagtactgtattcatcacatgacctgaatagaaaaaatgaagatggtatctcaattttgttctacctacaaaagatctatccagatgaatggaataacttcctagaacgtattggagttgaatcaaataatgaagtgtcgataaaagggcgcatggatgacatccgtttatgggcatcttaccgtggtcaaacacttgccagaactgtgagaggaatgatgtactatagacgagctcttgaactacaatgctatgaagatatgataaatgaccaaggttatggcctagctgatttggatacagctaaagctgcaaggtccaaggccattgctgatattaaattcacttatgttgtctcctgtcaactttatggcgtgcataagacatccaaggattcccgagaaagaggtctctacgagaatatcttaaacctcatgttgacgtatccagcattgcgcattgcttacatcgatgagaaagaagtacaattacgaaatggtaaaatagagaaacagtattactctgttcttgtgaaaggtgatgatgaggaaatctaccggataaggctccctggtaaaccaacagaagttggagaaggcaagcctaataatcaaaatcatgccataatcttcactagaggagaagcacttcaagcaattgacatgaaccaggataactatctagaggaagcatttaaaatgagaaatctcttggaagagttccttcttacacatggaaagtcagagcccaccatattgggtgttcgggagcatatatttacaggaagtgtttcatccctcgcctggtttatgtccagccaggagaccagcttcgtcactattggacaacgtgttcttgccaaccctcttaaggtacgatttcattatggccatcctgatgtttttgatagactctttcatctgacaaggggtggcataagcaaggcatcaaagattatcaaccttagcgaagatatatttgcaggtttcaattcaactctgcgtcgaggaaatgttacacatcatgaatacatacagttgggcaaaggacgtgatgttggaatgaaccaaatatccaactttgaggccaaggtggcaaatggaaatggtgaacaaacactatgccgtgatatttatcgactaggacacagatttgatttctacaggatgctatctctgtattttaccacagttggcttctacttcaatagcatggtggctgttctcacagtgtatgtatttttatatgggaggttataccttgttttgagtggcttagaaaagtcaatactgcaagatccaaatatccaaaacataaaaccatttgaaaatgcacttgccactcaatctgtattccaacttgggatgttgctcgttctcccaatgatgatggagattggccttgagaaaggatttggcagagcattggcagagtttgtaatcatgcaacttcagttagcttctgtattcttcacttttcatcttggaacaaagactcactactatggcaggacgatacttcatggtggagcaaagtatagagctactgggagagggtttgttgtgcgtcatgcaaagttcgctgagaattatcggatgtactcccggagtcactttgtcaaagcactggagctgcttattcttttggttgtctacctagcttatgggagttcatacagaagctcaagtttgtatttgtatgtcacagtttcgatatggttccttgttttctgttggctgtttgcaccttttgtcttcaacccatcctgctttgagtggcacaagactgttgatgactggaatgactggtggaagtggatgggcaatagaggtggtattggattagcgcctgaacaaagttgggaggcttggtgggtgagtgaacatgaccacctgaggaatgcaacaattcgaagcttgctcttggagttcatcctttccctgcggttcttgatctatcagtatggtattgtttaccacttgcacatagtgcatggcaacaaaagcttcttggtatatgcactgtcatggctggttatagcagttgctcttgtgtcactaaaggttgtttcaatggggagagagaagtttgttacaaggattcaactagtgttccgcatcctcaagggcattgtgttccttgtgctcattggtttgcttgtccttttatttgttggttttgaccttgctgtctcggatgttggcgccagtatcttggcattcattcccactggctggtttattcttctggttgcgcaattatgtggaccgctgtttcggaggttgatcatagagccacttcacttgctgtgttgcccatatggtaccggtggtgcatgcagaggtccctgctgtgccaggttcagacagaggaccggtgctgcgcttcggaagatgggaccatgggactccatccaggagatggcgaggatgtacgaatacaccatggggctcctcattttcctgcccattgccgtgctatcgtggttccccttcgtctctgaattccagacacggctgctcttcaaccaggccttcagcagggggctgcagatctctaggatcctcgcggggcagaatggtagcggcacaaagagcgactgatgctttgacattaacggagttatccattccgttgtgccatgtggtatctcgttgctattgtccgctaccgttatgtgtagaatcaagtatgttcatcgtttgaaaaagtgtcgcgcagtttgagtgtgtatgtcggattttaacctcttaattcagttcatattcattggttgtttccatttgatttgcacgtatacgttggaatctgtctgattttcggtgttaaaagtaagtgtttgtttttagctagaactttctctactcctttaaagcaccaattttatatgtcatgctttgcgtacgaagcatgtggattcgtttctttctcgcttctcgtctaccacaaatagaaataggttatgagagaccactcaaacttaacacgacaggaggaag

SEQ ID NO: 33095 - DNA, 2151 bp, Zea Mays
ttgtcatgaaaagtgaacctattaatgatgttggagagaggaaaattgttaatgccctgcaagactttatggaaattacgacacgtgatttcatgaaagatggacagagtttcaaagatgaggatgagagaaatcaaagattcatgaacctaaatatgaatatgataaaggaagattattggagggagaagtttgtccggctgcacttattgttgactatgaaggattctgcaatggatgttccaataaacttggatgctcgccatgaatggaataacttcctagaacgtattggagttgaatcaaataatgaagtgtcgataaaagggcgcatggatgacatccgtttatgggcatcttaccgtggtcaaacacttgccagaactgtgagaggaatgatgtactatagacgagctcttgaactacaatgctatgaagatatgataaatgaccaaggttatggcctagctgatttggatacagctaaagctgcaaggtccaaggccattgctgatattaaattcacttatgttgtctcctgtcaactttatggcgtgcataagacatccaaggattcccgagaaagaggtctctacgagaatatcttaaacctcatgttgacgtatccagcattgcgcattgcttacatcgatgagaaagaagtacaattacgaaatggtaaaatagagaaacagtattactctgttcttgtgaaaggtgatgatgaggaaatctaccggataaggctccctggtaaaccaacagaagttggagaaggcaagcctaataatcaaaatcatgccataatcttcactagaggagaagcacttcaagcaattgacatgaaccaggataactatctagaggaagcatttaaaatgagaaatctcttggaagagttccttcttacacatggaaagtcagagcccaccatattgggtgttcgggagcatatatttacaggaagtgtttcatccctcgcctggtttatgtccagccaggagaccagcttcgtcactattggacaacgtgttcttgccaaccctcttaaggtacgatttcattatggccatcctgatgtttttgatagactctttcatctgacaaggggtggcataagcaaggcatcaaagattatcaaccttagcgaagatatatttgcaggtatatgcactgtcatggctggttatagcagttgctcttgtgtcactaaaggttgtttcaatggggagagagaagtttgttacaaggattcaactagtgttccgcatcctcaagggcattgtgttccttgtgctcattggtttgcttgtccttttatttgttggttttgaccttgctgtctcggatgttggcgccagtatcttggcattcattcccactggctggtttattcttctggttgcgcaattatgtggaccgctgtttcggaggttgatcatagagccacttcacttgctgtgttgcccatatggtaccggtggtgcatgcagaggtccctgctgtgccaggttcagacagaggaccggtgctgcgcttcggaagatgggaccatgggactccatccaggagatggcgaggatgtacgaatacaccatggggctcctcattttcctgcccattgccgtgctatcgtggttccccttcgtctctgaattccagacacggctgctcttcaaccaggccttcagcagggggctgcagatctctaggatcctcgcggggcagaatggtagcggcacaaagagcgactgatgctttgacattaacggagttatccattccgttgtgccatgtggtatctcgttgctattgtccgctaccgttatgtgtagaatcaagtatgttcatcgtttgaaaaagtgtcgcgcagtttgagtgtgtatgtcggattttaacctcttaattcagttcatattcattggttgtttccatttgatttgcacgtatacgttggaatctgtctgattttcggtgttaaaagtaagtgtttgtttttagctagaactttctctactcctttaaagcaccaattttatatgtcatgctttgcgtacgaagcatgtggattcgtttctttctcgcttctcgtctaccacaaatagaaataggttatgagagaccactcaaacttaacacgacaggaggaag

SEQ ID NO: 33096 - DNA, 3570 bp, Zea Mays
agcttctttcgtgtttggaattcattcatcaattccttaagagaggaagacttcattagtgatagagagaaggacatgttgatggctccgtcatattcaagcaatttatccatcattcagtggccacctttcctccttgctagcaaggtacccgcagctgttcatatggccatgaattccaaagaaggggatgagcatgagcttattgagaaaatcaaacttgatggagacagatatgatgcagttatagaatgctacaaatccttgatgattatactcaatagccttctgctagacactaatgatcagaatattgtcaatgatattgataaaaaagtgacttatagcatgataaaaaaaactttcttggaagacttcgaaatggcagaaatcggcaaaaaaagtgaacctattaatgatgttggagagaggaaaattgttaatgccctgcaagactttatggaaattacgacacgtgatttcatgaaagatggacagagtttcaaagatgaggatgagagaaatcaaagattcatgaacctaaatatgaatatgataaaggaagattattggagggagaagtttgtccggctgcacttattgttgactatgaaggattctgcaatggatgttccaataaacttggatgctcgccatgaatggaataacttcctagaacgtattggagttgaatcaaataatgaagtgtcgataaaagggcgcatggatgacatccgtttatgggcatcttaccgtggtcaaacacttgccagaactgtgagaggaatgatgtactatagacgagctcttgaactacaatgctatgaagatatgataaatgaccaaggttatggcctagctgatttggatacagctaaagctgcaaggtccaaggccattgctgatattaaattcacttatgttgtctcctgtcaactttatggcgtgcataagacatccaaggattcccgagaaagaggtctctacgagaatatcttaaacctcatgttgacgtatccagcattgcgcattgcttacatcgatgagaaagaagtacaattacgaaatggtaaaatagagaaacagtattactctgttcttgtgaaaggtgatgatgaggaaatctaccggataaggctccctggtaaaccaacagaagttggagaaggcaagcctaataatcaaaatcatgccataatcttcactagaggagaagcacttcaagcaattgacatgaaccaggataactatctagaggaagcatttaaaatgagaaatctcttggaagagttccttcttacacatggaaagtcagagcccaccatattgggtgttcgggagcatatatttacaggaagtgtttcatccctcgcctggtttatgtccagccaggagaccagcttcgtcactattggacaacgtgttcttgccaaccctcttaaggtacgatttcattatggccatcctgatgtttttgatagactctttcatctgacaaggggtggcataagcaaggcatcaaagattatcaaccttagcgaagatatatttgcaggtttcaattcaactctgcgtcgaggaaatgttacacatcatgaatacatacagttgggcaaaggacgtgatgttggaatgaaccaaatatccaactttgaggccaaggtggcaaatggaaatggtgaacaaacactatgccgtgatatttatcgactaggacacagatttgatttctacaggatgctatctctgtattttaccacagttggcttctacttcaatagcatggtggctgttctcacagtgtatgtatttttatatgggaggttataccttgttttgagtggcttagaaaagtcaatactgcaagatccaaatatccaaaacataaaaccatttgaaaatgcacttgccactcaatctgtattccaacttgggatgttgctcgttctcccaatgatgatggagattggccttgagaaaggatttggcagagcattggcagagtttgtaatcatgcaacttcagttagcttctgtattcttcacttttcatcttggaacaaagactcactactatggcaggacgatacttcatggtggagcaaagtatagagctactgggagagggtttgttgtgcgtcatgcaaagttcgctgagaattatcggatgtactcccggagtcactttgtcaaagcactggagctgcttattcttttggttgtctacctagcttatgggagttcatacagaagctcaagtttgtatttgtatgtcacagtttcgatatggttccttgttttctgttggctgtttgcaccttttgtcttcaacccatcctgctttgagtggcacaagactgttgatgactggaatgactggtggaagtggatgggcaatagaggtggtattggattagcgcctgaacaaagttgggaggcttggtgggtgagtgaacatgaccacctgaggaatgcaacaattcgaagcttgctcttggagttcatcctttccctgcggttcttgatctatcagtatggtattgtttaccacttgcacatagtgcatggcaacaaaagcttcttggtatatgcactgtcatggctggttatagcagttgctcttgtgtcactaaaggttgtttcaatggggagagagaagtttgttacaaggattcaactagtgttccgcatcctcaagggcattgtgttccttgtgctcattggtttgcttgtccttttatttgttggttttgaccttgctgtctcggatgttggcgccagtatcttggcattcattcccactggctggtttattcttctggttgcgcaattatgtggaccgctgtttcggaggttgatcatagagccacttcacttgctgtgttgcccatatggtaccggtggtgcatgcagaggtccctgctgtgccaggttcagacagaggaccggtgctgcgcttcggaagatgggaccatgggactccatccaggagatggcgaggatgtacgaatacaccatggggctcctcattttcctgcccattgccgtgctatcgtggttccccttcgtctctgaattccagacacggctgctcttcaaccaggccttcagcagggggctgcagatctctaggatcctcgcggggcagaatggtagcggcacaaagagcgactgatgctttgacattaacggagttatccattccgttgtgccatgtggtatctcgttgctattgtccgctaccgttatgtgtagaatcaagtatgttcatcgtttgaaaaagtgtcgcgcagtttgagtgtgtatgtcggattttaacctcttaattcagttcatattcattggttgtttccatttgatttgcacgtatacgttggaatctgtctgattttcggtgttaaaagtaagtgtttgtttttagctagaactttctctactcctttaaagcaccaattttatatgtcatgctttgcgtacgaagcatgtggattcgtttctttctcgcttctcgtctaccacaaatagaaataggttatgagagaccactcaaacttaacacgacaggaggaag

SEQ ID NO: 33097 - DNA, 1086 bp, Zea Mays
aaaaaatacgaggaaacaaacagggttcgtcacatcgcttgcgcctctctctctcggggacaactgcttcacccctgccgccgccctacgcttggtgcctaggtcttcatcggatcgttcaccgggcacaagcatcacccagcagactgggatcgcttctcccccgccgaccaagccgtgcctcccctgttgccggcgtcgcccctcccccaccagtgaaactcgcggtctctctccaccgcacgcacctcgtgtagttgtcgccgcgtgcaccccctgtagccccggcgttgggtcctactgctccatccggtttgcttccggcaacaagatcaacaacaagcgagcgaggtagtgaaaagctgcagctgtgatctctggaggtgctcttcctactctttgctggtattttgatggtggcttgatggccagtaatatgcaggcttctgggctgcctcagcctcccagacctcccatgatgggttctagcgctcagccacaaaatcttggaccaccaatgcctatgcagtttaggccagtgattccttcgcagcctcctcctcagttcgtgccaccagcagcacaacagttccgttctgttggtgagcctatgccgggggctaacgttggcatgccagggcaaatgccacattttccacaacctgggcagcacatgcctcactcaaatcaagttccacctgtatcacaaggggttcccatggtatatcagccagctagaccaatgtcatcagcacctatgcaaccacagcaacaagctgcgtatgctgggggccatttgctcaccatgggtgctcctatgcaacccctgacctatacatatcaaccaacatcgatccctcctgtagtgcaaccctggagtacaggcccaggacagagtgtaactcatgtgcctcctctagtgcagtctgggcaccagcaggtgtcagctccaacgactttgcctcctgtcaacttgtctgaacctagctcttcagattggcaggagcacactgcagccgagggaaaaaagtactactataataagaagacaaggcaatcaagttgggagaaaccagttgagttgat

SEQ ID NO: 33098 - DNA, 1068 bp, Zea Mays
aaaaatacgaggaaacaaacagggttcgtcacatcgcttgcgcctctctctctcggggacaactgcttcacccctgccgccgccctacgcttggtgcctaggtcttcatcggatcgttcaccgggcacaagcatcacccagcagactgggatcgcttctcccccgccgaccaagccgtgcctcccctgttgccggcgtcgcccctcccccaccagtgaaactcgcggtctctctccaccgcacgcacctcgtgtagttgtcgccgcgtgcaccccctgtagccccggcgttgggtcctactgctccatccggtttgcttccggcaacaagatcaacaacaagcgagcgagctgtgatctctggaggtgctcttcctactctttgctggtattttgatggtggcttgatggccagtaatatgcaggcttctgggctgcctcagcctcccagacctcccatgatgggttctagcgctcagccacaaaatcttggaccaccaatgcctatgcagtttaggccagtgattccttcgcagcctcctcctcagttcgtgccaccagcagcacaacagttccgttctgttggtgagcctatgccgggggctaacgttggcatgccagggcaaatgccacattttccacaacctgggcagcacatgcctcactcaaatcaagttccacctgtatcacaaggggttcccatggtatatcagccagctagaccaatgtcatcagcacctatgcaaccacagcaacaagctgcgtatgctgggggccatttgctcaccatgggtgctcctatgcaacccctgacctatacatatcaaccaacatcgatccctcctgtagtgcaaccctggagtacaggcccaggacagagtgtaactcatgtgcctcctctagtgcagtctgggcaccagcaggtgtcagctccaacgactttgcctcctgtcaacttgtctgaacctagctcttcagattggcaggagcacactgcagccgagggaaaaaagtactactataataagaagacaaggcaatcaagttgggagaaaccagttgagttgat

SEQ ID NO: 33099 - DNA, 1099 bp, Zea Mays
ggaaacaaacagggttcgtcacatcgcttgcgcctctctctctcggggacaactgcttcacccctgccgccgccctacgcttggtgcctaggtcttcatcggatcgttcaccgggcacaagcatcacccagcagggtttcttgccctatctgtttaagactgggatcgcttctcccccgccgaccaagccgtgcctcccctgttgccggcgtcgcccctcccccaccagtgaaactcgcggtctctctccaccgcacgcacctcgtgtagttgtcgccgcgtgcaccccctgtagccccggcgttgggtcctactgctccatccggtttgcttccggcaacaagatcaacaacaagcgagcgaggtagtgaaaagctgcagctgtgatctctggaggtgctcttcctactctttgctggtattttgatggtggcttgatggccagtaatatgcaggcttctgggctgcctcagcctcccagacctcccatgatgggttctagcgctcagccacaaaatcttggaccaccaatgcctatgcagtttaggccagtgattccttcgcagcctcctcctcagttcgtgccaccagcagcacaacagttccgttctgttggtgagcctatgccgggggctaacgttggcatgccagggcaaatgccacattttccacaacctgggcagcacatgcctcactcaaatcaagttccacctgtatcacaaggggttcccatggtatatcagccagctagaccaatgtcatcagcacctatgcaaccacagcaacaagctgcgtatgctgggggccatttgctcaccatgggtgctcctatgcaacccctgacctatacatatcaaccaacatcgatccctcctgtagtgcaaccctggagtacaggcccaggacagagtgtaactcatgtgcctcctctagtgcagtctgggcaccagcaggtgtcagctccaacgactttgcctcctgtcaacttgtctgaacctagctcttcagattggcaggagcacactgcagccgagggaaaaaagtactactataataagaagacaaggcaatcaagttgggagaaaccagttgagttgat

SEQ ID NO: 33100 - DNA, 1080 bp, Zea Mays
aaacaaacagggttcgtcacatcgcttgcgcctctctctctcggggacaactgcttcacccctgccgccgccctacgcttggtgcctaggtcttcatcggatcgttcaccgggcacaagcatcacccagcagggtttcttgccctatctgtttaagactgggatcgcttctcccccgccgaccaagccgtgcctcccctgttgccggcgtcgcccctcccccaccagtgaaactcgcggtctctctccaccgcacgcacctcgtgtagttgtcgccgcgtgcaccccctgtagccccggcgttgggtcctactgctccatccggtttgcttccggcaacaagatcaacaacaagcgagcgagctgtgatctctggaggtgctcttcctactctttgctggtattttgatggtggcttgatggccagtaatatgcaggcttctgggctgcctcagcctcccagacctcccatgatgggttctagcgctcagccacaaaatcttggaccaccaatgcctatgcagtttaggccagtgattccttcgcagcctcctcctcagttcgtgccaccagcagcacaacagttccgttctgttggtgagcctatgccgggggctaacgttggcatgccagggcaaatgccacattttccacaacctgggcagcacatgcctcactcaaatcaagttccacctgtatcacaaggggttcccatggtatatcagccagctagaccaatgtcatcagcacctatgcaaccacagcaacaagctgcgtatgctgggggccatttgctcaccatgggtgctcctatgcaacccctgacctatacatatcaaccaacatcgatccctcctgtagtgcaaccctggagtacaggcccaggacagagtgtaactcatgtgcctcctctagtgcagtctgggcaccagcaggtgtcagctccaacgactttgcctcctgtcaacttgtctgaacctagctcttcagattggcaggagcacactgcagccgagggaaaaaagtactactataataagaagacaaggcaatcaagttgggagaaaccagttgagttgat

SEQ ID NO: 33101 - DNA, 1064 bp, Zea Mays
aaacagggttcgtcacatcgcttgcgcctctctctctcggggacaactgcttcacccctgccgccgccctacgcttggtgcctaggtcttcatcggatcgttcaccgggcacaagcatcacccagcagactgggatcgcttctcccccgccgaccaagccgtgcctcccctgttgccggcgtcgcccctcccccaccagtgaaactcgcggtctctctccaccgcacgcacctcgtgtagttgtcgccgcgtgcaccccctgtagccccggcgttgggtcctactgctccatccggtttgcttccggcaacaagatcaacaacaagcgagcgaggtagtgaaaagctgcagctgtgatctctggaggtgctcttcctactctttgctggtattttgatggtggcttgatggccagtaatatgcaggcttctgggctgcctcagcctcccagacctcccatgatgggttctagcgctcagccacaaaatcttggaccaccaatgcctatgcaggccagtgattccttcgcagcctcctcctcagttcgtgccaccagcagcacaacagttccgttctgttggtgagcctatgccgggggctaacgttggcatgccagggcaaatgccacattttccacaacctgggcagcacatgcctcactcaaatcaagttccacctgtatcacaaggggttcccatggtatatcagccagctagaccaatgtcatcagcacctatgcaaccacagcaacaagctgcgtatgctgggggccatttgctcaccatgggtgctcctatgcaacccctgacctatacatatcaaccaacatcgatccctcctgtagtgcaaccctggagtacaggcccaggacagagtgtaactcatgtgcctcctctagtgcagtctgggcaccagcaggtgtcagctccaacgactttgcctcctgtcaacttgtctgaacctagctcttcagattggcaggagcacactgcagccgagggaaaaaagtactactataataagaagacaaggcaatcaagttgggagaaaccagttgagttgat

SEQ ID NO: 33102 - DNA, 971 bp, Zea Mays
gttcgtcacatcgcttgcgcctctctctctcggggacaactgcttcacccctgccgccgccctacgcttggtgcctaggtcttcatcggatcgttcaccgggcacaagcatcacccagcagactgggatcgcttctcccccgccgaccaagccgtgcctcccctgttgccggcgtcgcccctcccccaccagtgaaactcgcggtctctctccaccgcacgcacctcgtgtagttgtcgccgcgtgcaccccctgtagccccggcgttgggtcctactgctccatccggtttgcttccggcaacaagatcaacaacaagcgagcgaggtagtgaaaagctgcagctgtgatctctggaggtgctcttcctactctttgctggtattttgatggtggcttgatggccagtaatatgcaggcttctgggctgcctcagcctcccagacctcccatgatgggttctagcgctcagccacaaaatcttggaccaccaatgcctatgcagtttaggccagtgattccttcgcagcctcctcctcagttcgtgccaccagcagcacaacagttccgttctgttggtgagcctatgccgggggctaacgttggcatgccagggcaaatgccacattttccacaacctgggcagcacatgcctcactcaaatcaagttccacctgtatcacaaggggttcccatggtatatcagccagctagaccaatgtcatcagcacctatgcaaccacagcaacaagctgcgtatgctgggggccatttgctcaccatgggtgctcctatgcaacccctgacctatacatatcaaccaacatcgatccctcctgtagtgcaaccctggagtacaggcccaggacagagtgtaactcatgtgcctcctctagtgcagtctgggcaccagcaggtgtcagctccaacgactttgcctcctattggcaggagcacactgcagccgaggg

SEQ ID NO: 33103 - DNA, 1058 bp, Zea Mays
gttcgtcacatcgcttgcgcctctctctctcggggacaactgcttcacccctgccgccgccctacgcttggtgcctaggtcttcatcggatcgttcaccgggcacaagcatcacccagcagggtttcttgccctatctgtttaagactgggatcgcttctcccccgccgaccaagccgtgcctcccctgttgccggcgtcgcccctcccccaccagtgaaactcgcggtctctctccaccgcacgcacctcgtgtagttgtcgccgcgtgcaccccctgtagccccggcgttgggtcctactgctccatccggtttgcttccggcaacaagatcaacaacaagcgagcgaggtagtgaaaagctgcagctgtgatctctggaggtgctcttcctactctttgctggtattttgatggtggcttgatggccagtaatatgcaggcttctgggctgcctcagcctcccagacctcccatgatgggttctagcgctcagccacaaaatcttggaccaccaatgcctatgcagtttaggccagtgattccttcgcagcctcctcctcagttcgtgccaccagcagcacaacagttccgttctgttggtgagcctatgccgggggctaacgttggcatgccagggcaaatgccacattttccacaacctgggcagcacatgcctcactcaaatcaagttccacctgtatcacaaggggttcccatggtatatcagccagctagaccaatgtcatcagcacctatgcaaccacagcaacaagctgcgtatgctgggggccatttgctcaccatgggtgctcctatgcaacccctgacctatacatatcaaccaacatcgatccctcctgtagtgcaaccctggagtacaggcccaggacagagtgtaactcatgtgcctcctctagtgcagtctgggcaccagcaggtgtcagctccaacgactttgcctcctattggcaggagcacactgcagccgagggaaaaaagtactactataataagaagacaaggcaatcaagttgggagaaaccagttgagttgat

SEQ ID NO: 33104 - DNA, 967 bp, Zea Mays
cttgcgcctctctctctcggggacaactgcttcacccctgccgccgccctacgcttggtgcctaggtcttcatcggatcgttcaccgggcacaagcatcacccagcaggtatgcccacccctttctccctgctgctgtgaaactgagcattcaaaccctaactgcctgctagggtttcttgccctatctgtttaagactgggatcgcttctcccccgccgaccaagccgtgcctcccctgttgccggcgtcgcccctcccccaccagtgaaactcgcggtctctctccaccgcacgcacctcgtgtagttgtcgccgcgtgcaccccctgtagccccggcgttgggtcctactgctccatccggtttgcttccggcaacaagatcaacaacaagcgagcgagctgtgatctctggaggtgctcttcctactctttgctggtattttgatggtggcttgatggccagtaatatgcaggcttctgggctgcctcaggcaactgctgtcacatgctgtcaatatcattttgtcatgtcacctgtagtgtacatagtgctcatcatctttattatcttataagcagcctcccagacctcccatgatgggttctagcgctcagccacaaaatcttggaccaccaatgcctatgcaggccagtgattccttcgcagcctcctcctcagttcgtgccaccagcagcacaacagttccgttctgttggtgagcctatgccgggggctaacgttggcatgccagggcaaatgccacattttccacaacctgggcagcacatgcctcactcaaatcaagttccacctgtatcacaaggggttcccatgtatcaaccaacatcgatccctcctgtagtgcaaccctggagtacaggcccaggacagagtgtaactcatgtgcctcctctagtgcagtctgggcaccagcaggtgtcagctccaacgactttgcctcct

SEQ ID NO: 33105 - DNA, 1023 bp, Zea Mays
cgcctctctctctcggggacaactgcttcacccctgccgccgccctacgcttggtgcctaggtcttcatcggatcgttcaccgggcacaagcatcacccagcagactgggatcgcttctcccccgccgaccaagccgtgcctcccctgttgccggcgtcgcccctcccccaccagtgaaactcgcggtctctctccaccgcacgcacctcgtgtagttgtcgccgcgtgcaccccctgtagccccggcgttgggtcctactgctccatccggtttgcttccggcaacaagatcaacaacaagcgagcgagctgtgatctctggaggtgctcttcctactctttgctggtattttgatggtggcttgatggccagtaatatgcaggcttctgggctgcctcagcctcccagacctcccatgatgggttctagcgctcagccacaaaatcttggaccaccaatgcctatgcaggccagtgattccttcgcagcctcctcctcagttcgtgccaccagcagcacaacagttccgttctgttggtgagcctatgccgggggctaacgttggcatgccagggcaaatgccacattttccacaacctgggcagcacatgcctcactcaaatcaagttccacctgtatcacaaggggttcccatggtatatcagccagctagaccaatgtcatcagcacctatgcaaccacagcaacaagctgcgtatgctgggggccatttgctcaccatgggtgctcctatgcaacccctgacctatacatatcaaccaacatcgatccctcctgtagtgcaaccctggagtacaggcccaggacagagtgtaactcatgtgcctcctctagtgcagtctgggcaccagcaggtgtcagctccaacgactttgcctcctgtcaacttgtctgaacctagctcttcagattggcaggagcacactgcagccgagggaaaaaagtactactataataagaagacaaggcaatcaagttgggagaaaccagttgagttgat

SEQ ID NO: 33106 - DNA, 934 bp, Zea Mays
ctctctctctcggggacaactgcttcacccctgccgccgccctacgcttggtgcctaggtcttcatcggatcgttcaccgggcacaagcatcacccagcagactgggatcgcttctcccccgccgaccaagccgtgcctcccctgttgccggcgtcgcccctcccccaccagtgaaactcgcggtctctctccaccgcacgcacctcgtgtagttgtcgccgcgtgcaccccctgtagccccggcgttgggtcctactgctccatccggtttgcttccggcaacaagatcaacaacaagcgagcgagctgtgatctctggaggtgctcttcctactctttgctggtattttgatggtggcttgatggccagtaatatgcaggcttctgggctgcctcagcctcccagacctcccatgatgggttctagcgctcagccacaaaatcttggaccaccaatgcctatgcagtttaggccagtgattccttcgcagcctcctcctcagttcgtgccaccagcagcacaacagttccgttctgttggtgagcctatgccgggggctaacgttggcatgccagggcaaatgccacattttccacaacctgggcagcacatgcctcactcaaatcaagttccacctgtatcacaaggggttcccatggtatatcagccagctagaccaatgtcatcagcacctatgcaaccacagcaacaagctgcgtatgctgggggccatttgctcaccatgggtgctcctatgcaacccctgacctatacatatcaaccaacatcgatccctcctgtagtgcaaccctggagtacaggcccaggacagagtgtaactcatgtgcctcctctagtgcagtctgggcaccagcaggtgtcagctccaacgactttgcctcctattggcaggagcacactgcagccgaggg

SEQ ID NO: 33107 - DNA, 964 bp, Zea Mays
ggcacaagcatcacccagcagggtttcttgccctatctgtttaagactgggatcgcttctcccccgccgaccaagccgtgcctcccctgttgccggcgtcgcccctcccccaccagtgaaactcgcggtctctctccaccgcacgcacctcgtgtagttgtcgccgcgtgcaccccctgtagccccggcgttgggtcctactgctccatccggtttgcttccggcaacaagatcaacaacaagcgagcgagctgtgatctctggaggtgctcttcctactctttgctggtattttgatggtggcttgatggccagtaatatgcaggcttctgggctgcctcagcctcccagacctcccatgatgggttctagcgctcagccacaaaatcttggaccaccaatgcctatgcaggccagtgattccttcgcagcctcctcctcagttcgtgccaccagcagcacaacagttccgttctgttggtgagcctatgccgggggctaacgttggcatgccagggcaaatgccacattttccacaacctgggcagcacatgcctcactcaaatcaagttccacctgtatcacaaggggttcccatggtatatcagccagctagaccaatgtcatcagcacctatgcaaccacagcaacaagctgcgtatgctgggggccatttgctcaccatgggtgctcctatgcaacccctgacctatacatatcaaccaacatcgatccctcctgtagtgcaaccctggagtacaggcccaggacagagtgtaactcatgtgcctcctctagtgcagtctgggcaccagcaggtgtcagctccaacgactttgcctcctgtcaacttgtctgaacctagctcttcagattggcaggagcacactgcagccgagggaaaaaagtactactataataagaagacaaggcaatcaagttgggagaaaccagttgagttgat

SEQ ID NO: 33108 - DNA, 493 bp, Zea Mays
cttggaccaccaatgcctatgcaggccagtgattccttcgcagcctcctcctcagttcgtgccaccagcagcacaacagttccgttctgttggtgagcctatgccgggggctaacgttggcatgccagggcaaatgccacattttccacaacctgggcagcacatgcctcactcaaatcaagttccacctgtatcacaaggggttcccatggtatatcagccagctagaccaatgtcatcagcacctatgcaaccacagcaacaagctgcgtatgctgggggccatttgctcaccatgggtgctcctatgcaacccctgacctatacatatcaaccaacatcgatccctcctgtagtgcaaccctggagtacaggcccaggacagagtgtaactcatgtgcctcctctagtgcagtctgggcaccagcaggtgtcagctccaacgactttgcctcctctcttcagattggcaggagcacactgcagccgaggg

SEQ ID NO: 33109 - DNA, 140 bp, Zea Mays
tgcctatgcagtatcaaccaacatcgatccctcctgtagtgcaaccctggagtacaggcccaggacagagtgtaactcatgtgcctcctctagtgcagtctgggcaccagcaggtgtcagctccaacgactttgcctcct

SEQ ID NO: 33110 - DNA, 3117 bp, Zea Mays
aacaaagtgaccaagcaatcaaaatggactattcctgacgagttaaaggttgcacgtgaattggcagagaaggcatcaaatcaacaacctgatcaagaatcaggaatagctactagtgctcttgtcagatctgctgcctttgaaccttctactgcacctgctaatcagtcgtcatctgctgttggtataattgcttccagcacacatgatgggtcatcaaactctgttctttctgcaagcacagaagttccattagttgcaacagatgcagggtccagcagaaacaacgatgaaaattcatctctgaccactggggctgacgcagaggatggtacatcggctgaagatttggaggaggccaaaaagaccatgccagttgcagggaagattaatgtcactccagtggaggagaaaacaagtgaagaagaacctgtagtctatgccactaagatggaagcaaaaaatgcgttcaagtccctgcttgagtcggtaaatgtggagtctgattggacatgggatcagactatgagagtcatcataaatgacaaaagatatggtgctttgaaaactcttggagagagaaagcaagctttcaatgagtacttgaaccagcgcaaaaagtttgaagccgaagaaaaacgtatcaaacagaggaaagcacgtgatgatttccttgcaatgttggaagaacgcaaggagcttacatcatcaacaagatggagcaaagcaatacttatgtttgaagatgatgaaagattcaaagcagttgaacgtccaagggagcgtgaagatttatttgagaactatcttgtggaactgcataagaaggaaaaagccaaggctgctgaagaacacaaaagatatgtagcagaatacagagcttttctagaatcatgtgacttcatcaaggcaagtactcagtggagaaaagttcaggaacgtctggaggacgatgaacgttattcccgacttgagaagtttgatcggttggatatttttcaagagtacattcgacacctagagaaagaagaggaagagcagaagcgggtacaaaaggatcaagtgagaagacaagagaggaaaaaccgtgatgggtttcgtaaaatgctggaagaacatgttgctgatggcacacttaatgcaagaactcggtggcgtgattactgtgcacagataaaagattcacagtcctacttggctgtagcgtcaaacacatctggctctacaccgaaagagttatttgatgacgtgatcgaggaacttgacaaacagtatcaagaagacaagacccaaattaaagaagtggtgaaatctggaaagattcctatgacaacatcatggacattagaggaattccaaactgctattctggaggatgatgctcttaaaggaatatcaaccatcaacatcaagcttatctatgatgatcagcttgaaaggctcaaggaaaaagagcaaaaggaggctaagaagcgccagcgtttgggtgaaaatttttcagatcttttgtattccatcaaggaaatatcagcttcttcaacatgggatgattctaaacagcttttcgaggatagccaagagttcagggccttggacagtgagacttatgctagagagctttttgaagagtgcgttgtccacctgaaagaaaggttaaaagagaaagaacgtttgagggaggaagaaaaggcaaaaagagagaaagagcgtgaggagaaagagaagaagaaagagaaagagaaagaaaggaaggagaaagaacgcaaagaaaaagaaagagaccaccgggaggagagagaaaaggagaaagggaaggatcgatcaaggagagatgaaatggagtttgatggtgctgatttgaacacccatggtacaaaagataagaaaagagataaagaaaaagaaaagaaacataagagacgtcaccatgacacagatgatgtaagctctgagagggatgataaagacgatgctaagaagtctcggaggcatagcagcagtgatcgcaagaaatctaggaagcatgcacatggctcagattcagatagtgaaaaccggcacaaaagacataaaaaggaccgagatagtagtagaagaaatggagcacatgagctggaagatggtgaacttggagaggatggggagatctattagtctttctgtttgctaccgagattgtcagtaattacttccccttgtcatgttctccattgctcttatttttcttacttttgactttttattagtgctttggcgtaacaatcactagtgttatagttatttagttccatacattctgaaatatttccttaaatatctacatttcttcaataccaattgtcgtttatttccttttttgcataatcaatgtgtggattctagggtagttgcacatattattctctggaaagcgaaagggcctctagcctagtggttaaggcttcggagtagcaccaccaagtcccgggcttgattcccctcgggggcggaatttcgggcttggttaaaaaatcccctcgatgtgcctcattcgctctcgggttacgatgtcctgtgcgccattgtttcggttgacgccggtccgttagtaatttgaggccagggttcggggattttctcggctgggactattgtttcggtctcttcttaatgttataccgggagggtggtcattccctcctcggtcgagttattattctctggaaaaggtgcaacacttcaaccatgtggtttgcttcatgtggatgtcctggtttgggtaggtgtgacttgtgagtagtaaaacttttatctgggtgttggaattgtagccatgtacattatgaaaatattttcttgccttcctagacactttatctttgccttctcttttttttcctttgtacttcactgtgtaggtttgttattttggcacatcagtacatgggaggtgaaaagttagtgtgccttaattatcctttagaactttggctggacatgcaactttagatagccataaccgcaagctgtcttgtcctattctcagaaaaataaataaacaaaaccgttgatttatttatatttttccaactatatatgctatttatgtcctgatgaagtttattactgacatttgac

SEQ ID NO: 33111 - DNA, 2884 bp, Zea Mays
aacaaagtgaccaagcaatcaaaatggactattcctgacgagttaaaggttgcacgtgaattggcagagaaggcatcaaatcaacaacctgatcaagaatcaggaatagctactagtgctcttcacacatgatgggtcatcaaactctgttctttctggtgctcccctgccgcacaatgtggagaatacttccagttctattgttggcatgcaaaatggtggttcgagtactgctgttgttcctgttgcagcaagcacagaagttccattagttgcaacagatgcagggtccagcagaaacaacgatgaaaattcatctctgaccactggggctgacgcagaggatggtacatcggctgaagatttggaggaggccaaaaagaccatgccagttgcagggaagattaatgtcactccagtggaggagaaaacaagtgaagaagaacctgtagtctatgccactaagatggaagcaaaaaatgcgttcaagtccctgcttgagtcggtaaatgtggagtctgattggacatgggatcagactatgagagtcatcataaatgacaaaagatatggtgctttgaaaactcttggagagagaaagcaagctttcaatgagtacttgaaccagcgcaaaaagtttgaagccgaagaaaaacgtatcaaacagaggaaagcacgtgatgatttccttgcaatgttggaagaacgcaaggagcttacatcatcaacaagatggagcaaagcaatacttatgtttgaagatgatgaaagattcaaagcagttgaacgtccaagggagcgtgaagatttatttgagaactatcttgtggaactgcataagaaggaaaaagccaaggctgctgaagaacacaaaagatatgtagcagaatacagagcttttctagaatcatgtgacttcatcaaggcaagtactcagtggagaaaagttcaggaacgtctggaggacgatgaacgttattcccgacttgagaagtttgatcggttggatatttttcaagagtacattcgacacctagagaaagaagaggaagagcagaagcgggtacaaaaggatcaagtgagaagacaagagaggaaaaaccgtgatgggtttcgtaaaatgctggaagaacatgttgctgatggcacacttaatgcaagaactcggtggcgtgattactgtgcacagataaaagattcacagtcctacttggctgtagcgtcaaacacatctggctctacaccgaaagagttatttgatgacgtgatcgaggaacttgacaaacagtatcaagaagacaagacccaaattaaagaagtggtgaaatctggaaagattcctatgacaacatcatggacattagaggaattccaaactgctattctggaggatgatgctcttaaaggaatatcaaccatcaacatcaagcttatctatgatgatcagcttgaaaggctcaaggaaaaagagcaaaaggaggctaagaagcgccagcgtttgggtgaaaatttttcagatcttttgtattccatcaaggaaatatcagcttcttcaacatgggatgattctaaacagcttttcgaggatagccaagagttcagggccttggacagtgagacttatgctagagagctttttgaagagtgcgttgtccacctgaaagaaaggttaaaagagaaagaacgtttgagggaggaagaaaaggcaaaaagagagaaagagcgtgaggagaaagagaagaagaaagagaaagagaaagaaaggaaggagaaagaacgcaaagaaaaagaaagagaccaccgggaggagagagaaaaggagaaagggaaggatcgatcaaggagagatgaaatggagtttgatggtgctgatttgaacacccatggtacaaaagataagaaaagagataaagaaaaagaaaagaaacataagagacgtcaccatgacacagatgatgtaagctctgagagggatgataaagacgatgctaagaagtctcggaggcatagcagcagtgatcgcaagaaatctaggaagcatgcacatggctcagattcagatagtgaaaaccggcacaaaagacataaaaaggaccgagatagtagtagaagaaatggagcacatgagctggaagatggtgaacttggagaggatggggagatctattagtctttctgtttgctaccgagattcattcatctccagtcttgttacacatggatttattgccatctcttgcctgttgagttgcgcacttgggctgaagcctaccagctggatttttgctctgccgcacctgtgatgctactgctggggggcaatggatatagcaataacaccagctactgctggggggcaatggatgtagcaataacaccagcccatgcttgacacctttctttggtccttctggcagctgaccaggctaaattttcatttccttcaaagtccatggtgctgtctgtgctgaggtaacagattgctcagtttgcaacgagtttctttgtgagtgatgtgcttttgggagagcatggagtgtttgatttgtcgctaatgtcatgttaaggcttgttcattgtactaggatttagttatctatggaaatttgtcaaggattgctgggcttgaagattcagcgtgtttgtattatggttttcatttactagcttatccaggtctgctcttaaacccgtagggctttgtacccagaaaagtactggctgctttcagacgcaggcatcctgttggggagagttggcagcgtatcatcattttattagcattctagcgtcctgactcgcgaattgttctcacccaacactttgtccttgaagttgtacttgacggattgttatttttctgatgcaatgcttgagatgttcc

SEQ ID NO: 33112 - DNA, 2737 bp, Zea Mays
aacaaagtgaccaagcaatcaaaatggactattcctgacgagttaaaggttgcacgtgaattggcagagaaggcatcaaatcaacaacctgatcaagaatcaggaatagctactagtgctcttgtcagatctgctgcctttgaaccttctactgcacctgctaatcagtcgtcatctgctgttggtataattgcttccagcacacatgatgggtcatcaaactctgttctttctggtgctcccctgccgcacaatgtggagaatacttccagttctattgttggcatgcaaaatggtggttcgagtactgctgttgttcctgttgcagcaagcacagaagttccattagttgcaacagatgcagggtccagcagaaacaacgatgaaaattcatctctgaccactggggctgacgcagaggatggtacatcggctgaagatttggaggaggccaaaaagaccatgccagttgcagggaagattaatgtcactccagtggaggagaaaacaagtgaagaagaacctgtagtctatgccactaagatggaagcaaaaaatgcgttcaagtccctgcttgagtcggtaaatgtggagtctgattggacatgggatcagactatgagagtcatcataaatgacaaaagatatggtgctttgaaaactcttggagagagaaagcaagctttcaatgagtacttgaaccagcgcaaaaagtttgaagccgaagaaaaacgtatcaaacagaggaaagcacgtgatgatttccttgcaatgttggaagaacgcaaggagcttacatcatcaacaagatggagcaaagcaatacttatgtttgaagatgatgaaagattcaaagcagttgaacgtccaagggagcgtgaagatttatttgagaactatcttgtggaactgcataagaaggaaaaagccaaggctgctgaagaacacaaaagatatgtagcagaatacagagcttttctagaatcatgtgacttcatcaaggcaagtactcagtggagaaaagttcaggaacgtctggaggacgatgaacgttattcccgacttgagaagtttgatcggttggatatttttcaagagtacattcgacacctagagaaagaagaggaagagcagaagcgggtacaaaaggatcaagtgagaagacaagagaggaaaaaccgtgatgggtttcgtaaaatgctggaagaacatgttgctgatggcacacttaatgcaagaactcggtggcgtgattactgtgcacagataaaagattcacagtcctacttggctgtagcgtcaaacacatctggctctacaccgaaagagttatttgatgacgtgatcgaggaacttgacaaacagtatcaagaagacaagacccaaattaaagaagtggtgaaatctggaaagattcctatgacaacatcatggacattagaggaattccaaactgctattctggaggatgatgctcttaaaggaatatcaaccatcaacatcaagcttatctatgatgatcagcttgaaaggctcaaggaaaaagagcaaaaggaggctaagaagcgccagcgtttgggtgaaaatttttcagatcttttgtattccatcaaggaaatatcagcttcttcaacatgggatgattctaaacagcttttcgaggatagccaagagttcagggccttggacagtgagacttatgctagagagctttttgaagagtgcgttgtccacctgaaagaaaggttaaaagagaaagaacgtttgagggaggaagaaaaggcaaaaagagagaaagagcgtgaggagaaagagaagaagaaagagaaagagaaagaaaggaaggagaaagaacgcaaagaaaaagaaagagaccaccgggaggagagagaaaaggagaaagggaaggatcgatcaaggagagatgaaatggagtttgatggtgctgatttgaacacccatggtacaaaagataagaaaagagataaagaaaaagaaaagaaacataagagacgtcaccatgacacagatgatgtaagctctgagagggatgataaagacgatgctaagaagtctcggaggcatagcagcagtgatcgcaagaaatctaggaagcatgcacatggctcagattcagatagtgaaaaccggcacaaaagacataaaaaggaccgagatagtagtagaagaaatggagcacatgagctggaagatggtgaacttggagaggatggggagatctattagtctttctgtttgctaccgagattctgaccaggctaaattttcatttccttcaaagtccatggtgctgtctgtgctgaggtaacagattgctcagtttgcaacgagtttctttgtgagtgatgtgcttttgggagagcatggagtgtttgatttgtcgctaatgtcatgttaaggcttgttcattgtactaggatttagttatctatggaaatttgtcaaggattgctgggcttgaagattcagcgtgtttgtattatggttttcatttactagcttatccaggtctgctcttaaacccgtagggctttgtacccagaaaagtactggctgctttcagacgcaggcatcctgttggggagagttggcagcgtatcatcattttattagcattctagcgtcctgactcgcgaattgttctcacccaacactttgtccttgaagttgtacttgacggattgttatttttctgatgcaatgcttgagatgttcc

SEQ ID NO: 33113 - DNA, 2781 bp, Zea Mays
aacaaagtgaccaagcaatcaaaatggactattcctgacgagttaaaggttgcacgtgaattggcagagaaggcatcaaatcaacaacctgatcaagaatcaggaatagctactagtgctcttcacacatgatgggtcatcaaactctgttctttctggtgctcccctgccgcacaatgtggagaatacttccagttctattgttggcatgcaaaatggtggttcgagtactgctgttgttcctgttgcagcaagcacagaagttccattagttgcaacagatgcagggtccagcagaaacaacgatgaaaattcatctctgaccactggggctgacgcagaggatggtacatcggctgaagatttggaggaggccaaaaagaccatgccagttgcagggaagattaatgtcactccagtggaggagaaaacaagtgaagaagaacctgtagtctatgccactaagatggaagcaaaaaatgcgttcaagtccctgcttgagtcggtaaatgtggagtctgattggacatgggatcagactatgagagtcatcataaatgacaaaagatatggtgctttgaaaactcttggagagagaaagcaagctttcaatgagtacttgaaccagcgcaaaaagtttgaagccgaagaaaaacgtatcaaacagaggaaagcacgtgatgatttccttgcaatgttggaagaacgcaaggagcttacatcatcaacaagatggagcaaagcaatacttatgtttgaagatgatgaaagattcaaagcagttgaacgtccaagggagcgtgaagatttatttgagaactatcttgtggaactgcataagaaggaaaaagccaaggctgctgaagaacacaaaagatatgtagcagaatacagagcttttctagaatcatgtgacttcatcaaggcaagtactcagtggagaaaagttcaggaacgtctggaggacgatgaacgttattcccgacttgagaagtttgatcggttggatatttttcaagagtacattcgacacctagagaaagaagaggaagagcagaagcgggtacaaaaggatcaagtgagaagacaagagaggaaaaaccgtgatgggtttcgtaaaatgctggaagaacatgttgctgatggcacacttaatgcaagaactcggtggcgtgattactgtgcacagataaaagattcacagtcctacttggctgtagcgtcaaacacatctggctctacaccgaaagagttatttgatgacgtgatcgaggaacttgacaaacagtatcaagaagacaagacccaaattaaagaagtggtgaaatctggaaagattcctatgacaacatcatggacattagaggaattccaaactgctattctggaggatgatgctcttaaaggaatatcaaccatcaacatcaagcttatctatgatgatcagcttgaaaggctcaaggaaaaagagcaaaaggaggctaagaagcgccagcgtttgggtgaaaatttttcagatcttttgtattccatcaaggaaatatcagcttcttcaacatgggatgattctaaacagcttttcgaggatagccaagagttcagggccttggacagtgagacttatgctagagagctttttgaagagtgcgttgtccacctgaaagaaaggttaaaagagaaagaacgtttgagggaggaagaaaaggcaaaaagagagaaagagcgtgaggagaaagagaagaagaaagagaaagagaaagaaaggaaggagaaagaacgcaaagaaaaagaaagagaccaccgggaggagagagaaaaggagaaagggaaggatcgatcaaggagagatgaaatggagtttgatggtgctgatttgaacacccatggtacaaaagataagaaaagagataaagaaaaagaaaagaaacataagagacgtcaccatgacacagatgatgtaagctctgagagggatgataaagacgatgctaagaagtctcggaggcatagcagcagtgatcgcaagaaatctaggaagcatgcacatggctcagattcagatagtgaaaaccggcacaaaagacataaaaaggaccgagatagtagtagaagaaatggagcacatgagctggaagatggtgaacttggagaggatggggagatctattagtctttctgtttgctaccgagattctacttgtagcattcatctccagtcttgttacacatggatttattgccatctcttgcctgttgagttgcgcacttgggctgaagcctaccagctggatttttgctctgccgcacctgtgatgctactgctggggggcaatggatatagcaataacaccagctactgctggggggcaatggatgtagcaataacaccagcccatgcttgacacctttctttggtccttctggcagctgaccaggctaaattttcatttccttcaaagtccatggtgctgtctgtgctgaggatttagttatctatggaaatttgtcaaggattgctgggcttgaagattcagcgtgtttgtattatggttttcatttactagcttatccaggtctgctcttaaacccgtagggctttgtacccagaaaagtactggctgctttcagacgcaggcatcctgttggggagagttggcagcgtatcatcattttattagcattctagcgtcctgactcgcgaattgttctcacccaacactttgtccttgaagttgtacttgacggattgttatttttctgatgcaatgcttgagatgttcc

SEQ ID NO: 33114 - DNA, 2529 bp, Zea Mays
aacaaagtgaccaagcaatcaaaatggactattcctgacgagttaaaggttgcacgtgaattggcagagaaggcatcaaatcaacaacctgatcaagaatcaggaatagctactagtgctcttgtcagatctgctgcctttgaaccttctactgcacctgctaatcagtcgtcatctgctgttggtataattgcttccagcacacatgatgggtcatcaaactctgttctttctggtgctcccctgccgcacaatgtggagaatacttccagttctattgttggcatgcaaaatggtggttcgagtactgctgttgttcctgttgcagcaagcacagaagttccattagttgcaacagatgcagggtccagcagaaacaacgatgaaaattcatctctgaccactggggctgacgcagaggatggtacatcggctgaagatttggaggaggccaaaaagaccatgccagttgcagggaagattaatgtcactccagtggaggagaaaacaagtgaagaagaacctgtagtctatgccactaagatggaagcaaaaaatgcgttcaagtccctgcttgagtcggtaaatgtggagtctgattggacatgggatcagactatgagagtcatcataaatgacaaaagatatggtgctttgaaaactcttggagagagaaagcaagctttcaatgagtacttgaaccagcgcaaaaagtttgaagccgaagaaaaacgtatcaaacagaggaaagcacgtgatgatttccttgcaatgttggaagaacgcaaggagcttacatcatcaacaagatggagcaaagcaatacttatgtttgaagatgatgaaagattcaaagcagttgaacgtccaagggagcgtgaagatttatttgagaactatcttgtggaactgcataagaaggaaaaagccaaggctgctgaagaacacaaaagatatgtagcagaatacagagcttttctagaatcatgtgacttcatcaaggcaagtactcagtggagaaaagttcaggaacgtctggaggacgatgaacgttattcccgacttgagaagtttgatcggttggatatttttcaagagtacattcgacacctagagaaagaagaggaagagcagaagcgggtacaaaaggatcaagtgagaagacaagagaggaaaaaccgtgatgggtttcgtaaaatgctggaagaacatgttgctgatggcacacttaatgcaagaactcggtggcgtgattactgtgcacagataaaagattcacagtcctacttggctgtagcgtcaaacacatctggctctacaccgaaagagttatttgatgacgtgatcgaggaacttgacaaacagtatcaagaagacaagacccaaattaaagaagtggtgaaatctggaaagattcctatgacaacatcatggacattagaggaattccaaactgctattctggaggatgatgctcttaaaggaatatcaaccatcaacatcaagcttatctatgatgatcagcttgaaaggctcaaggaaaaagagcaaaaggaggctaagaagcgccagcgtttgggtgaaaatttttcagatcttttgtattccatcaaggaaatatcagcttcttcaacatgggatgattctaaacagcttttcgaggatagccaagagttcagggccttggacagtgagacttatgctagagagctttttgaagagtgcgttgtccacctgaaagaaaggttaaaagagaaagaacgtttgagggaggaagaaaaggcaaaaagagagaaagagcgtgaggagaaagagaagaagaaagagaaagagaaagaaaggaaggagaaagaacgcaaagaaaaagaaagagaccaccgggaggagagagaaaaggagaaagggaaggatcgatcaaggagagatgaaatggagtttgatggtgctgatttgaacacccatggtacaaaagataagaaaagagataaagaaaaagaaaagaaacataagagacgtcaccatgacacagatgatgtaagctctgagagggatgataaagacgatgctaagaagtctcggaggcatagcagcagtgatcgcaagaaatctaggaagcatgcacatggctcagattcagatagtgaaaaccggcacaaaagacataaaaaggaccgagatagtagtagaagaaatggagcacatggctcagattcagatagtgaaaaccggcacaaaagacataaaaaggaccgagatagtagtagaagaaatggagcacatgagctggaagatggtgaacttggagaggatggggagatctattagtctttctgtttgctaccgagattgtcagtaattacttccccttgtcatgttctccattgctcctatttttcttacttttgacttgttattagtgctttggcttaacaatcactagtgttatagttatttagttccatacattctgaaatattttcttaaatatctacatttcttcaataccaattgtcgtttcttttctttttg

SEQ ID NO: 33115 - DNA, 2274 bp, Zea Mays
aacaaagtgaccaagcaatcaaaatggactattcctgacgagttaaaggttgcacgtgaattggcagagaaggcatcaaatcaacaacctgatcaagaatcaggaatagctactagtgctcttgtcagatctgctgcctttgaaccttctactgcacctgctaatcagtcgtcatctgctgttggtataattgcttccagcacacatgatgggtcatcaaactctgttctttctggtgctcccctgccgcacaatgtggagaatacttccagttctattgttggcatgcaaaatggtggttcgagtactgctgttgttcctgttgcagcaagcacagaagttccattagttgcaacagatgcagggtccagcagaaacaacgatgaaaattcatctctgaccactggggctgacgcagaggatggtacatcggctgaagatttggaggaggccaaaaagaccatgccagttgcagggaagattaatgtcactccagtggaggagaaaacaagtgaagaagaacctgtagtctatgccactaagatggaagcaaaaaatgcgttcaagtccctgcttgagtcggtaaatgtggagtctgattggacatgggatcagactatgagagtcatcataaatgacaaaagatatggtgctttgaaaactcttggagagagaaagcaagctttcaatgagtacttgaaccagcgcaaaaagtttgaagccgaagaaaaacgtatcaaacagaggaaagcacgtgatgatttccttgcaatgttggaagaacgcaaggagcttacatcatcaacaagatggagcaaagcaatacttatgtttgaagatgatgaaagattcaaagcagttgaacgtccaagggagcgtgaagatttatttgagaactatcttgtggaactgcataagaaggaaaaagccaaggctgctgaagaacacaaaagatatgtagcagaatacagagcttttctagaatcatgtgacttcatcaaggcaagtactcagtggagaaaagttcaggaacgtctggaggacgatgaacgttattcccgacttgagaagtttgatcggttggatatttttcaagagtacattcgacacctagagaaagaagaggaagagcagaagcgggtacaaaaggatcaagtgagaagacaagagaggaaaaaccgtgatgggtttcgtaaaatgctggaagaacatgttgctgatggcacacttaatgcaagaactcggtggcgtgattactgtgcacagataaaagattcacagtcctacttggctgtagcgtcaaacacatctggctctacaccgaaagagttatttgatgacgtgatcgaggaacttgacaaacagtatcaagaagacaagacccaaattaaagaagtggtgaaatctggaaagattcctatgacaacatcatggacattagaggaattccaaactgctattctggaggatgatgctcttaaaggaatatcaaccatcaacatcaagcttatctatgatgatcagcttgaaaggctcaaggaaaaagagcaaaaggaggctaagaagcgccagcgtttgggtgaaaatttttcagatcttttgtattccatcaaggaaatatcagcttcttcaacatgggatgattctaaacagcttttcgaggatagccaagagttcagggccttggacagtgagacttatgctagagagctttttgaagagtgcgttgtccacctgaaagaaaggttaaaagagaaagaacgtttgagggaggaagaaaaggcaaaaagagagaaagagcgtgaggagaaagagaagaagaaagagaaagagaaagaaaggaaggagaaagaacgcaaagaaaaagaaagagaccaccgggaggagagagaaaaggagaaagggaaggatcgatcaaggagagatgaaatggagtttgatggtgctgatttgaacacccatggtacaaaagataagaaaagagataaagaaaaagaaaagaaacataagagacgtcaccatgacacagatgatgtaagctctgagagggatgataaagacgatgctaagaagtctcggaggcatagcagcagtgatcgcaagaaatctaggaagcatgcacatggctcagattcagatagtgaaaaccggcacaaaagacataaaaaggaccgagatagtagtagaagaaatggagcacatgagctggaagatggtgaacttggagaggatggggagatctattagtctttctgtttgctaccgagattctac

SEQ ID NO: 33116 - DNA, 2701 bp, Zea Mays
cgtgaattggcagagaaggcatcaaatcaacaacctgatcaagaatcaggaatagctactagtgctcttgtcagatctgctgcctttgaaccttctactgcacctgctaatcagtcgtcatctgctgttggtataattgcttccagcacacatgatgggtcatcaaactctgttctttctggtgctcccctgccgcacaatgtggagaatacttccagttctattgttggcatgcaaaatggtggttcgagtactgctgttgttcctgttgcagcaagcacagaagttccattagttgcaacagatgcagggtccagcagaaacaacgatgaaaattcatctctgaccactggggctgacgcagaggatggtacatcggctgaagatttggaggaggccaaaaagaccatgccagttgcagggaagattaatgtcactccagtggaggagaaaacaagtgaagaagaacctgtagtctatgccactaagatggaagcaaaaaatgcgttcaagtccctgcttgagtcggtaaatgtggagtctgattggacatgggatcagactatgagagtcatcataaatgacaaaagatatggtgctttgaaaactcttggagagagaaagcaagctttcaatgagtacttgaaccagcgcaaaaagtttgaagccgaagaaaaacgtatcaaacagaggaaagcacgtgatgatttccttgcaatgttggaagaacgcaaggagcttacatcatcaacaagatggagcaaagcaatacttatgtttgaagatgatgaaagattcaaagcagttgaacgtccaagggagcgtgaagatttatttgagaactatcttgtggaactgcataagaaggaaaaagccaaggctgctgaagaacacaaaagatatgtagcagaatacagagcttttctagaatcatgtgacttcatcaaggcaagtactcagtggagaaaagttcaggaacgtctggaggacgatgaacgttattcccgacttgagaagtttgatcggttggatatttttcaagagtacattcgacacctagagaaagaagaggaagagcagaagcgggtacaaaagtatcaagaagacaagacccaaattaaagaagtggtgaaatctggaaagattcctatgacaacatcatggacattagaggaattccaaactgctattctggaggatgatgctcttaaaggaatatcaaccatcaacatcaagcttatctatgatgatcagcttgaaaggctcaaggaaaaagagcaaaaggaggctaagaagcgccagcgtttgggtgaaaatttttcagatcttttgtattccatcaaggaaatatcagcttcttcaacatgggatgattctaaacagcttttcgaggatagccaagagttcagggccttggacagtgagacttatgctagagagctttttgaagagtgcgttgtccacctgaaagaaaggttaaaagagaaagaacgtttgagggaggaagaaaaggcaaaaagagagaaagagcgtgaggagaaagagaagaagaaagagaaagagaaagaaaggaaggagaaagaacgcaaagaaaaagaaagagaccaccgggaggagagagaaaaggagaaagggaaggatcgatcaaggagagatgaaatggagtttgatggtgctgatttgaacacccatggtacaaaagataagaaaagagataaagaaaaagaaaagaaacataagagacgtcaccatgacacagatgatgtaagctctgagagggatgataaagacgatgctaagaagtctcggaggcatagcagcagtgatcgcaagaaatctaggaagcatgcacatggctcagattcagatagtgaaaaccggcacaaaagacataaaaaggaccgagatagtagtagaagaaatggagcacatgagctggaagatggtgaacttggagaggatggggagatctattagtctttctgtttgctaccgagattctacttgtagcattcatctccagtcttgttacacatggatttattgccatctcttgcctgttgagttgcgcacttgggctgaagcctaccagctggatttttgctctgccgcacctgtgatgctactgctggggggcaatggatatagcaataacaccagctactgctggggggcaatggatgtagcaataacaccagcccatgcttgacacctttctttggtccttctggcagctgaccaggctaaattttcatttccttcaaagtccatggtgctgtctgtgctgaggtaacagattgctcagtttgcaacgagtttctttgtgagtgatgtgcttttgggagagcatggagtgtttgatttgtcgctaatgtcatgttaaggcttgttcattgtactaggatttagttatctatggaaatttgtcaaggattgctgggcttgaagattcagcgtgtttgtattatggttttcatttactagcttatccaggtctgctcttaaacccgtagggctttgtacccagaaaagtactggctgctttcagacgcaggcatcctgttggggagagttggcagcgtatcatcattttattagcattctagcgtcctgactcgcgaattgttctcacccaacactttgtccttgaagttgtacttgacggattgttatttttctgatgcaatgcttgagatgttcc

SEQ ID NO: 33117 - DNA, 2621 bp, Zea Mays
aacagatgcagggtccagcagcagaaacaacgatgaaaattcatctctgaccactggggctgacgcagaggatggtacatcggctgaagatttggaggaggccaaaaagaccatgccagttgcagggaagattaatgtcactccagtggaggagaaaacaagtgaagaagaacctgtagtctatgccactaagatggaagcaaaaaatgcgttcaagtccctgcttgagtcggtaaatgtggagtctgattggacatgggatcagactatgagagtcatcataaatgacaaaagatatggtgctttgaaaactcttggagagagaaagcaagctttcaatgagtacttgaaccagcgcaaaaagtttgaagccgaagaaaaacgtatcaaacagaggaaagcacgtgatgatttccttgcaatgttggaagaacgcaaggagcttacatcatcaacaagatggagcaaagcaatacttatgtttgaagatgatgaaagattcaaagcagttgaacgtccaagggagcgtgaagatttatttgagaactatcttgtggaactgcataagaaggaaaaagccaaggctgctgaagaacacaaaagatatgtagcagaatacagagcttttctagaatcatgtgacttcatcaaggcaagtactcagtggagaaaagttcaggaacgtctggaggacgatgaacgttattcccgacttgagaagtttgatcggttggatatttttcaagagtacattcgacacctagagaaagaagaggaagagcagaagcgggtacaaaaggatcaagtgagaagacaagagaggaaaaaccgtgatgggtttcgtaaaatgctggaagaacatgttgctgatggcacacttaatgcaagaactcggtggcgtgattactgtgcacagataaaagattcacagtcctacttggctgtagcgtcaaacacatctggctctacaccgaaagagttatttgatgacgtgatcgaggaacttgacaaacagtatcaagaagacaagacccaaattaaagaagtggtgaaatctggaaagattcctatgacaacatcatggacattagaggaattccaaactgctattctggaggatgatgctcttaaaggaatatcaaccatcaacatcaagcttatctatgatgatcagcttgaaaggctcaaggaaaaagagcaaaaggaggctaagaagcgccagcgtttgggtgaaaatttttcagatcttttgtattccatcaaggaaatatcagcttcttcaacatgggatgattctaaacagcttttcgaggatagccaagagttcagggccttggacagtgagacttatgctagagagctttttgaagagtgcgttgtccacctgaaagaaaggttaaaagagaaagaacgtttgagggaggaagaaaaggcaaaaagagagaaagagcgtgaggagaaagagaagaagaaagagaaagagaaagaaaggaaggagaaagaacgcaaagaaaaagaaagagaccaccgggaggagagagaaaaggagaaagggaaggatcgatcaaggagagatgaaatggagtttgatggtgctgatttgaacacccatggtacaaaagataagaaaagagataaagaaaaagaaaagaaacataagagacgtcaccatgacacagatgatgtaagctctgagagggatgataaagacgatgctaagaagtctcggaggcatagcagcagtgatcgcaagaaatctaggaagcatgcacatggctcagattcagatagtgaaaaccggcacaaaagacataaaaaggaccgagatagtagtagaagaaatggagcacatgagctggaagatggtgaacttggagaggatggggagatctattagtctttctgtttgctaccgagattctacttgtagcattcatctccagtcttgttacacatggatttattgccatctcttgcctgttgagttgcgcacttgggctgaagcctaccagctggatttttgctctgccgcacctgtgatgctactgctggggggcaatggatatagcaataacaccagctactgctggggggcaatggatgtagcaataacaccagcccatgcttgacacctttctttggtccttctggcagctgaccaggctaaattttcatttccttcaaagtccatggtgctgtctgtgctgaggtaacagattgctcagtttgcaacgagtttctttgtgagtgatgtgcttttgggagagcatggagtgtttgatttgtcgctaatgtcatgttaaggcttgttcattgtactaggatttagttatctatggaaatttgtcaaggattgctgggcttgaagattcagcgtgtttgtattatggttttcatttactagcttatccaggtctgctcttaaacccgtagggctttgtacccagaaaagtactggctgctttcagacgcaggcatcctgttggggagagttggcagcgtatcatcattttattagcattctagcgtcctgactcgcgaattgttctcacccaacactttgtccttgaagttgtacttgacggattgttatttttctgatgcaatgcttgagatgttcc

SEQ ID NO: 33118 - DNA, 2452 bp, Zea Mays
actggggctgacgcagaggatggtacatcggctgaagatttggaggaggccaaaaagaccatgccagttgcagggaagattaatgtcactccagtggaggagaaaacaagtgaagaagaacctgtagtctatgccactaagatggaagcaaaaaatgcgttcaagtccctgcttgagtcggtaaatgtggagtctgattggacatgggatcagactatgagagtcatcataaatgacaaaagatatggtgctttgaaaactcttggagagagaaagcaagctttcaatgagtacttgaaccagcgcaaaaagtttgaagccgaagaaaaacgtatcaaacagaggaaagcacgtgatgatttccttgcaatgttggaagaacgcaaggagcttacatcatcaacaagatggagcaaagcaatacttatgtttgaagatgatgaaagattcaaagcagttgaacgtccaagggagcgtgaagatttatttgagaactatcttgtggaactgcataagaaggaaaaagccaaggctgctgaagaacacaaaagatatgtagcagaatacagagcttttctagaatcatgtgacttcatcaaggcaagtactcagtggagaaaagttcaggaacgtctggaggacgatgaacgttattcccgacttgagaagtttgatcggttggatatttttcaagagtacattcgacacctagagaaagaagaggaagagcagaagcgggtacaaaagataaaagattcacagtcctacttggctgtagcgtcaaacacatctggctctacaccgaaagagttatttgatgacgtgatcgaggaacttgacaaacagtatcaagaagacaagacccaaattaaagaagtggtgaaatctggaaagattcctatgacaacatcatggacattagaggaattccaaactgctattctggaggatgatgctcttaaaggaatatcaaccatcaacatcaagcttatctatgatgatcagcttgaaaggctcaaggaaaaagagcaaaaggaggctaagaagcgccagcgtttgggtgaaaatttttcagatcttttgtattccatcaaggaaatatcagcttcttcaacatgggatgattctaaacagcttttcgaggatagccaagagttcagggccttggacagtgagacttatgctagagagctttttgaagagtgcgttgtccacctgaaagaaaggttaaaagagaaagaacgtttgagggaggaagaaaaggcaaaaagagagaaagagcgtgaggagaaagagaagaagaaagagaaagagaaagaaaggaaggagaaagaacgcaaagaaaaagaaagagaccaccgggaggagagagaaaaggagaaagggaaggatcgatcaaggagagatgaaatggagtttgatggtgctgatttgaacacccatggtacaaaagataagaaaagagataaagaaaaagaaaagaaacataagagacgtcaccatgacacagatgatgtaagctctgagagggatgataaagacgatgctaagaagtctcggaggcatagcagcagtgatcgcaagaaatctaggaagcatgcacatggctcagattcagatagtgaaaaccggcacaaaagacataaaaaggaccgagatagtagtagaagaaatggagcacatgagctggaagatggtgaacttggagaggatggggagatctattagtctttctgtttgctaccgagattctacttgtagcattcatctccagtcttgttacacatggatttattgccatctcttgcctgttgagttgcgcacttgggctgaagcctaccagctggatttttgctctgccgcacctgtgatgctactgctggggggcaatggatatagcaataacaccagctactgctggggggcaatggatgtagcaataacaccagcccatgcttgacacctttctttggtccttctggcagctgaccaggctaaattttcatttccttcaaagtccatggtgctgtctgtgctgaggtaacagattgctcagtttgcaacgagtttctttgtgagtgatgtgcttttgggagagcatggagtgtttgatttgtcgctaatgtcatgttaaggcttgttcattgtactaggatttagttatctatggaaatttgtcaaggattgctgggcttgaagattcagcgtgtttgtattatggttttcatttactagcttatccaggtctgctcttaaacccgtagggctttgtacccagaaaagtactggctgctttcagacgcaggcatcctgttggggagagttggcagcgtatcatcattttattagcattctagcgtcctgactcgcgaattgttctcacccaacactttgtccttgaagttgtacttgacggattgttatttttctgatgcaatgcttgagatgttcc

SEQ ID NO: 33119 - DNA, 2783 bp, Zea Mays
gacgcagaggatggtacatcggctgaagatttggaggaggccaaaaagaccatgccagttgcagggaagattaatgtcactccagtggaggagaaaacaagtgaagaagaacctgtagtctatgccactaagatggaagcaaaaaatgcgttcaagtccctgcttgagtcggtaaatgtggagtctgattggacatgggatcagactatgagagtcatcataaatgacaaaagatatggtgctttgaaaactcttggagagagaaagcaagctttcaatgagtacttgaaccagcgcaaaaagtttgaagccgaagaaaaacgtatcaaacagaggaaagcacgtgatgatttccttgcaatgttggaagaacgcaaggagcttacatcatcaacaagatggagcaaagcaatacttatgtttgaagatgatgaaagattcaaagcagttgaacgtccaagggagcgtgaagatttatttgagaactatcttgtggaactgcataagaaggaaaaagccaaggctgctgaagaacacaaaagatatgtagcagaatacagagcttttctagaatcatgtgacttcatcaaggcaagtactcagtggagaaaagttcaggaacgtctggaggacgatgaacgttattcccgacttgagaagtttgatcggagtacattcgacacctagagaaagaagaggaagagcagaagcgggtacaaaaggatcaagtgagaagacaagagaggaaaaaccgtgatgggtttcgtaaaatgctggaagaacatgttgctgatggcacacttaatgcaagaactcggtggcgtgattactgtgcacagataaaagattcacagtcctacttggctgtagcgtcaaacacatctggctctacaccgaaagagttatttgatgacgtgatcgaggaacttgacaaacagtatcaagaagacaagacccaaattaaagaagtggtgaaatctggaaagattcctatgacaacatcatggacattagaggaattccaaactgctattctggaggatgatgctcttaaaggaatatcaaccatcaacatcaagcttatctatgatgatcagcttgaaaggctcaaggaaaaagagcaaaaggaggctaagaagcgccagcgtttgggtgaaaatttttcagatcttttgtattccatcaaggaaatatcagcttcttcaacatgggatgattctaaacagcttttcgaggatagccaagagttcagggccttggacagtgagacttatgctagagagctttttgaagagtgcgttgtccacctgaaagaaaggttaaaagagaaagaacgtttgagggaggaagaaaaggcaaaaagagagaaagagcgtgaggagaaagagaagaagaaagagaaagagaaagaaaggaaggagaaagaacgcaaagaaaaagaaagagaccaccgggaggagagagaaaaggagaaagggaaggatcgatcaaggagagatgaaatggagtttgatggtgctgatttgaacacccatggtacaaaagataagaaaagagataaagaaaaagaaaagaaacataagagacgtcaccatgacacagatgatgtaagctctgagagggatgataaagacgatgctaagaagtctcggaggcatagcagcagtgatcgcaagaaatctaggaagcatgcacatggctcagattcagatagtgaaaaccggcacaaaagacataaaaaggaccgagatagtagtagaagaaatggagcacatgagctggaagatggtgaacttggagaggatggggagatctattagtctttctgtttgctaccgagattgtcagtaattacttccccttgtcatgttctccattgctcttatttttcttacttttgactttttattagtgctttggcgtaacaatcactagtgttatagttatttagttccatacattctgaaatatttccttaaatatctacatttcttcaataccaattgtcgtttatttccttttttgcataatcaatgtgtggattctagggtagttgcacatattattctctggaaagcgaaagggcctctagcctagtggttaaggcttcggagtagcaccaccaagtcccgggcttgattcccctcgggggcggaatttcgggcttggttaaaaaatcccctcgatgtgcctcattcgctctcgggttacgatgtcctgtgcgccattgtttcggttgacgccggtccgttagtaatttgaggccagggttcggggattttctcggctgggactattgtttcggtctcttcttaatgttataccgggagggtggtcattccctcctcggtcgagttattattctctggaaaaggtgcaacacttcaaccatgtggtttgcttcatgtggatgtcctggtttgggtaggtgtgacttgtgagtagtaaaacttttatctgggtgttggaattgtagccatgtacattatgaaaatattttcttgccttcctagacactttatctttgccttctcttttttttcctttgtacttcactgtgtaggtttgttattttggcacatcagtacatgggaggtgaaaagttagtgtgccttaattatcctttagaactttggctggacatgcaactttagatagccataaccgcaagctgtcttgtcctattctcagaaaaataaataaacaaaaccgttgatttatttatatttttccaactatatatgctatttatgtcctgatgaagtttattactgacatttgac

SEQ ID NO: 33120 - DNA, 145 bp, Zea Mays
ctcctttttgcagcctatctgctgtccaacaccttcttaaggctgtattgaaccgatcaaaatggataagttttctaccccaaactgctgagaagactgacatcacatcttcctttataattgaccaacacaccttatagaatct

SEQ ID NO: 33121 - DNA, 1913 bp, Zea Mays
ggaagcaaaaaatgcgttcaagtccctgcttgagtcggtaaatgtggagtctgattggacatgggatcagactatgagagtcatcataaatgacaaaagatatggtgctttgaaaactcttggagagagaaagcaagctttcaatgagtacttgaaccagcgcaaaaagtttgaagccgaagaaaaacgtatcaaacagaggaaagcacgtgatgatttccttgcaatgttggaagaacgcaaggagcttacatcatcaacaagatggagcaaagcaatacttatgtttgaagatgatgaaagattcaaagcagttgaacgtccaagggagcgtgaagatttatttgagaactatcttgtggaactgcataagaaggaaaaagccaaggctgctgaagaacacaaaagatatgtagcagaatacagagcttttctagaatcatgtgacttcatcaaggcaagtactcagtggagaaaagttcaggaacgtctggaggacgatgaacgttattcccgacttgagaagtttgatcggttggatatttttcaagagtacattcgacacctagagaaagaagaggaagagcagaagcgggtacaaaaggatcaagtgagaagacaagagaggaaaaaccgtgatgggtttcgtaaaatgctggaagaacatgttgctgatggcacacttaatgcaagaactcggtggcgtgattactgtgcacagataaaagattcacagtcctacttggctgtagcgtcaaacacatctggctctacaccgaaagagttatttgatgacgtgatcgaggaacttgacaaacagtatcaagaagacaagacccaaattaaagaagtggtgaaatctggaaagattcctatgacaacatcatggacattagaggaattccaaactgctattctggaggatgatgctcttaaaggaatatcaaccatcaacatcaagcttatctatgatgatcagcttgaaaggctcaaggaaaaagagcaaaaggaggctaagaagcgccagcgtttgggtgaaaatttttcagatcttttgtattccatcaaggaaatatcagcttcttcaacatgggatgattctaaacagcttttcgaggatagccaagagttcagggccttggacagtgagacttatgctagagagctttttgaagagtgcgttgtccacctgaaagaaaggttaaaagagaaagaacgtttgagggaggaagaaaaggcaaaaagagagaaagagcgtgaggagaaagagaagaagaaagagaaagagaaagaaaggaaggagaaagaacgcaaagaaaaagaaagagaccaccgggaggagagagaaaaggagaaagggaaggatcgatcaaggagagatgaaatggagtttgatggtgctgatttgaacacccatggtacaaaagataagaaaagagataaagaaaaagaaaagaaacataagagacgtcaccatgacacagatgatgtaagctctgagagggatgataaagacgatgctaagaagtctcggaggcatagcagcagtgatcgcaagaaatctaggaagcatgcacatggctcagattcagatagtgaaaaccggcacaaaagacataaaaaggaccgagatagtagtagaagaaatggagcacatgagctggaagatggtgaacttggagaggatggggagatctattagtctttctgtttgctaccgagattggctttgtacccagaaaagtactggctgctttcagacgcaggcatcctgttggggagagttggcagcgtatcatcattttattagcattctagcgtcctgactcgcgaattgttctcacccaacactttgtccttgaagttgtacttgacggattgttatttttctgatgcaatgcttgagatgttcc

SEQ ID NO: 33122 - DNA, 3882 bp, Zea Mays
cgtattcctatacttatccgaaccgacaaaattagagatgacaacgtatttattatacctgacccgaattggatccattgccatccctatatcaatctaggttacaaccaggtccaacgacacgcgggttgggccttcttgttcgcttgggtcttgtcttgttagccgatctgtgactcccccgccatcgatgccaagtttgccccgttgccggcgtcacccctcccctcgacggtgaagctcatagcttccctccaccgccggtgtcgcttctcccccgccgaccaagccgtgcctgtcgccggcgtcgcccctcccccactagtgaaactcgcggtctctccaccgcacgcgcctcgtgtagttgtggctgcgtgcaccccctgtagccccggcgataggtcctactgctccatccggtttgcttccggcaacaagatcaacaacaagcgagcgaggtagtgaaaagctgcagctgtgatctctggaggtgctcttcctactctttctggtattttgatggtggcttgatggccagtaatatgcagtcttctgggctgcctcagcctccaagacctcccatgatgggttctagcgctcagccacaaaatcttggaccaccaatgcctatgcagtttaggccagtgatgccttcgcagcatcctcctcagttcatgccaccagcagcacagcagttccgtcctgttggtgagcctatggcgggggctaacgttggcatgccagggcaaatgccacattttccacaacctgggcagcacttgcctcactcaaatcaagttccacctgtatcacaaggggttcccatggtatatcagccagctagaccaatgtcatcagcacctatgcaacaacagcaacaaactgcgtatgctgggggccatttgcccaccatgggtgctcctatgcaacccctgacctatacatatcaaccaacatcgatccctcctgtagcgcaaccctggagtacaggcccaggacagagtgtacatcatgtgcctcctctagtgccgtctgggcaccagccggtgtcagctccaacgactttgcctcctgtcaacttgtctgaacctagctcttcagactggcaggaacacactgcagccgagggaaaaaagtactactataataagaagacaaggcaatcaagttgggagaaaccagttgagttgatgacacctttggagagggctgatgcctcaactgaatggaaagaatttactacaccagaaggacggaagtactatttcaacaaagtgaccaagcaatcaaaatggactattcctgacgagttaaaggttgcacgtgaattggcagagaacgcatcaaatcaacaacctgatcgagaatcaggaatagctactagtgctcttgtcagatctgctgcctttgaaccttctactgcacctgctaatcagtcgtcatctgctgttggtataattgcttccagcgcacatgatggatcatcaaactctgttctttctggtcctcccctgccgcacaatgtggagaatacttccagttctattgttggcatgcaaaatggtggttcgagtactgctgttgttcctgttgcagcaagcacagaagttccattagttgcaacagatgcagggtccagcagaaacaacgatgaaaattcatctctgaccactggggctgacgcagaggatggtacatccgctgaagatttggtggaggccaaaaagaccatgccagttgcagggaagattaatgtcactccagtggaggagaaaacaagtgaagaagaacctgtagtctatgccactaagatggaagcaaaaaatgcgttcaagtccctgcttgagtcggtaaatgtggagtctgattggacatgggatcagactatgagagtcatcataaatgacaaaagatatggtgctttgaaaactcttggagagagaaagcaagctttcaatgagtacttgaaccagcgcaaaaagtttgaagccgaagaaaaacgtatcaaacagaggaaagcacgtgatgatttccttgcaatgttggaagaaagcaaggagcttacatcatcaacaagatggagcaaagcaatacttatgtttgaagatgatgaaagattcaaagcagttgagcgtccaagggagcgtgaagatttatttgagaactatcttgtggaactgcataagaaggaaaaagccaaggctgctgaagaacacaaaagatatgtagcagagtacagagcttttctagaatcatgtgacttcatcaaggcaagcactcagtggagaaaagttcaggaacgcctggaggacgatgaacgttattcccgacttgagaagtttgatcggttggatatttttcaagagtacattcgacacctagagaaagaagaggaagagcagaagcgggtacaaaaggatcaagtgagaagacaagagaggaaaaaccgtgatgggtttcgtaaaatgttggaagaacatgttgctgatggcacacttaatgcaagaactcggtggcgtgattactgtgcacagataaaagattcacagtcctacttggctgtagcatcaaacacatctggctctacaccgaaagagttatttgatgacgtgatcgaggaacttggcaaacagtatcaagaagacaagatccaaattaaagaagtggtgaaatctggaaagattcctatgacaacttcatggacattagaggaattccaaactgctactctggaggatgatgctcttaaaggaatatcaaccatcaacatcaagcttgtatatgacgatcagcttgaaaggctcaaggaaaaagagcaaaaggacgctaagaagcgccagcgcttgggtgaaaatttttcagatcttttgtattccatcaaggaaatatcagcttcttcaacatgggatgattctaaacagcttttcgaggatagccaagagttcagggccttggacagtgagacttatgctagagagctttttgaagagtgcgttgtccacctgaaagaaaggttaaaagagaaagaacgtttgagggaggaagaaaaggcaaaaagagagaaagagcgtgaggagaaagagaagaagaaagagaaagaaaggaaggagaaagaacgcaaagaaaaagaaagagaccaccgggaggagagagaaaaggagaaagggaaggatcgatcaaggagagatgaaatggagtttgatggtgctgatttgaacacccatggtgcaaaagataagaaaagagataaagataaagaaaagaaacataagagacgtcaccatgacacagatgatgtaagctctgagagggatgataaagacgatgctaagaagtctcggaggcatagcagtgatcgcaagaaatctaggaagcatgcacatggctcagattcagatagtgaaaaccggcacaaaagacataaaaaggaccgagatagtagtagaagaaatggagcacatgagctggaagatggtgaacttggagaggatggggagatctattagtctttctgtttgctaccgagattctacttgtagcactcatctccagtcttgttacacatggatttattgccatctcttgcctgttgagttgcgcacttgggctgaagcctaccagctggatttttgctctgccgcacctgtgatgctactgctggggggcaatggatatagcaataacaccagctactgctggggagcaatggatgtagcaataacaccagcccatgcttgacacctttctttggtccttctggcagctgaccaggctaaattttcatttccttcaaagtccatggtgctgtctgtgctgagaagcgaggtcacgacgaatctgaagatcaactttggagaactacatggagttgcaagtataagg

SEQ ID NO: 33123 - DNA, 3545 bp, Zea Mays
cctatacttatccgaaccgacaaaattagagatgacaacgtatttattatacctgacccgaattggatccattgccatccctatatcaatctaggttacaaccaggtccaacgacacgcgggttgggccttcttgttcgcttgggtcttgtcttgttagccgatctgtgactcccccgccatcgatgccaagtttgccccgttgccggcgtcacccctcccctcgacggtgaagctcatagcttccctccaccgccggtgtcgcttctcccccgccgaccaagccgtgcctgtcgccggcgtcgcccctcccccactagtgaaactcgcggtctctccaccgcacgcgcctcgtgtagttgtggctgcgtgcaccccctgtagccccggcgataggtcctactgctccatccggtttgcttccggcaacaagatcaacaacaagcgagcgaggtagtgaaaagctgcagctgtgatctctggaggtgctcttcctactctttctggtattttgatggtggcttgatggccagtaatatgcagtcttctgggctgcctcagcctccaagacctcccatgatgggttctagcgctcagccacaaaatcttggaccaccaatgcctatgcagtttaggccagtgatgccttcgcagcatcctcctcagttcatgccaccagcagcacagcagttccgtcctgttggtgagcctatggcgggggctaacgttggcatgccagggcaaatgccacattttccacaacctgggcagcacttgcctcactcaaatcaagttccacctgtatcacaaggggttcccatggtatatcagccagctagaccaatgtcatcagcacctatgcaacaacagcaacaaactgcgtatgctgggggccatttgcccaccatgggtgctcctatgcaacccctgacctatacatatcaaccaacatcgatccctcctgtagcgcaaccctggagtacaggcccaggacagagtgtacatcatgtgcctcctctagtgccgtctgggcaccagccggtgtcagctccaacgactttgcctcctgtcaacttgtctgaacctagctcttcagactggcaggaacacactgcagccgagggaaaaaagtactactataataagaagacaaggcaatcaagttgggagaaaccagttgagttgatgacacctttggagagggctgatgcctcaactgaatggaaagaatttactacaccagaaggacggaagtactatttcaacaaagtgaccaagcaatcaaaatggactattcctgacgagttaaaggttgcacgtgaattggcagagaacgcatcaaatcaacaacctgatcgagaatcaggaatagctactagtgctcttgtcagatctgctgcctttgaaccttctactgcacctgctaatcagtcgtcatctgctgttggtataattgcttccagcgcacatgatggatcatcaaactctgttctttctggtcctcccctgccgcacaatgtggagaatacttccagttctattgttggcatgcaaaatggtggttcgagtactgctgttgttcctgttgcagcaagcacagaagttccattagttgcaacagatgcagggtccagcagaaacaacgatgaaaattcatctctgaccactggggctgacgcagaggatggtacatccgctgaagatttggtggaggccaaaaagaccatgccagttgcagggaagattaatgtcactccagtggaggagaaaacaagtgaagaagaacctgtagtctatgccactaagatggaagcaaaaaatgcgttcaagtccctgcttgagtcggtaaatgtggagtctgattggacatgggatcagactatgagagtcatcataaatgacaaaagatatggtgctttgaaaactcttggagagagaaagcaagctttcaatgagtacttgaaccagcgcaaaaagtttgaagccgaagaaaaacgtatcaaacagaggaaagcacgtgatgatttccttgcaatgttggaagaaagcaaggagcttacatcatcaacaagatggagcaaagcaatacttatgtttgaagatgatgaaagattcaaagcagttgagcgtccaagggagcgtgaagatttatttgagaactatcttgtggaactgcataagaaggaaaaagccaaggctgctgaagaacacaaaagatatgtagcagagtacagagcttttctagaatcatgtgacttcatcaaggcaagcactcagtggagaaaagttcaggaacgcctggaggacgatgaacgttattcccgacttgagaagtttgatcggttggatatttttcaagagtacattcgacacctagagaaagaagaggaagagcagaagcgggtacaaaaggatcaagtgagaagacaagagaggaaaaaccgtgatgggtttcgtaaaatgttggaagaacatgttgctgatggcacacttaatgcaagaactcggtggcgtgattactgtgcacagataaaagattcacagtcctacttggctgtagcatcaaacacatctggctctacaccgaaagagttatttgatgacgtgatcgaggaacttggcaaacagtatcaagaagacaagatccaaattaaagaagtggtgaaatctggaaagattcctatgacaacttcatggacattagaggaattccaaactgctactctggaggatgatgctcttaaaggaatatcaaccatcaacatcaagcttgtatatgacgatcagcttgaaaggctcaaggaaaaagagcaaaaggacgctaagaagcgccagcgcttgggtgaaaatttttcagatcttttgtattccatcaaggaaatatcagcttcttcaacatgggatgattctaaacagcttttcgaggatagccaagagttcagggccttggacagtgagacttatgctagagagctttttgaagagtgcgttgtccacctgaaagaaaggttaaaagagaaagaacgtttgagggaggaagaaaaggcaaaaagagagaaagagcgtgaggagaaagagaagaagaaagagaaagaaaggaaggagaaagaacgcaaagaaaaagaaagagaccaccgggaggagagagaaaaggagaaagggaaggatcgatcaaggagagatgaaatggagtttgatggtgctgatttgaacacccatggtgcaaaagataagaaaagagataaagataaagaaaagaaacataagagacgtcaccatgacacagatgatgtaagctctgagagggatgataaagacgatgctaagaagtctcggaggcatagcagtgatcgcaagaaatctaggaagcatgcacatggctcagattcagatagtgaaaaccggcacaaaagacataaaaaggaccgagatagtagtagaagaaatggagcacatgagctggaagatggtgaacttggagaggatggggagatctattagtctttctgtttgctaccgagattgtcaagaacatgtatcgtcaag

SEQ ID NO: 33124 - DNA, 3372 bp, Zea Mays
gatccattgccatccctatatcaatctaggttacaaccaggtccaacgacacgcgggttgggccttcttgttcgcttgggtcttgtcttgttagccgatctgtgactcccccgccatcgatgccaagtttgccccgttgccggcgtcacccctcccctcgacggtgaagctcatagcttccctccaccgccggtgtcgcttctcccccgccgaccaagccgtgcctgtcgccggcgtcgcccctcccccactagtgaaactcgcggtctctccaccgcacgcgcctcgtgtagttgtggctgcgtgcaccccctgtagccccggcgataggtcctactgctccatccggtttgcttccggcaacaagatcaacaacaagcgagcgaggtagtgaaaagctgcagctgtgatctctggaggtgctcttcctactctttctggtattttgatggtggcttgatggccagtaatatgcagtcttctgggctgcctcagcctccaagacctcccatgatgggttctagcgctcagccacaaaatcttggaccaccaatgcctatgcagtttaggccagtgatgccttcgcagcatcctcctcagttcatgccaccagcagcacagcagttccgtcctgttggtgagcctatggcgggggctaacgttggcatgccagggcaaatgccacattttccacaacctgggcagcacttgcctcactcaaatcaagttccacctgtatcacaaggggttcccatggtatatcagccagctagaccaatgtcatcagcacctatgcaacaacagcaacaaactgcgtatgctgggggccatttgcccaccatgggtgctcctatgcaacccctgacctatacatatcaaccaacatcgatccctcctgtagcgcaaccctggagtacaggcccaggacagagtgtacatcatgtgcctcctctagtgccgtctgggcaccagccggtgtcagctccaacgactttgcctcctgtcaacttgtctgaacctagctcttcagactggcaggaacacactgcagccgagggaaaaaagtactactataataagaagacaaggcaatcaagttgggagaaaccagttgagttgatgacacctttggagagggctgatgcctcaactgaatggaaagaatttactacaccagaaggacggaagtactatttcaacaaagtgaccaagcaatcaaaatggactattcctgacgagttaaaggttgcacgtgaattggcagagaacgcatcaaatcaacaacctgatcgagaatcaggaatagctactagtgctcttgtcagatctgctgcctttgaaccttctactgcacctgctaatcagtcgtcatctgctgttggtataattgcttccagcgcacatgatggatcatcaaactctgttctttctggtcctcccctgccgcacaatgtggagaatacttccagttctattgttggcatgcaaaatggtggttcgagtactgctgttgttcctgttgcagcaagcacagaagttccattagttgcaacagatgcagggtccagcagaaacaacgatgaaaattcatctctgaccactggggctgacgcagaggatggtacatccgctgaagatttggtggaggccaaaaagaccatgccagttgcagggaagattaatgtcactccagtggaggagaaaacaagtgaagaagaacctgtagtctatgccactaagatggaagcaaaaaatgcgttcaagtccctgcttgagtcggtaaatgtggagtctgattggacatgggatcagactatgagagtcatcataaatgacaaaagatatggtgctttgaaaactcttggagagagaaagcaagctttcaatgagtacttgaaccagcgcaaaaagtttgaagccgaagaaaaacgtatcaaacagaggaaagcacgtgatgatttccttgcaatgttggaagaaagcaaggagcttacatcatcaacaagatggagcaaagcaatacttatgtttgaagatgatgaaagattcaaagcagttgagcgtccaagggagcgtgaagatttatttgagaactatcttgtggaactgcataagaaggaaaaagccaaggctgctgaagaacacaaaagatatgtagcagagtacagagcttttctagaatcatgtgacttcatcaaggcaagcactcagtggagaaaagttcaggaacgcctggaggacgatgaacgttattcccgacttgagaagtttgatcggttggatatttttcaagagtacattcgacacctagagaaagaagaggaagagcagaagcgggtacaaaaggatcaagtgagaagacaagagaggaaaaaccgtgatgggtttcgtaaaatgttggaagaacatgttgctgatggcacacttaatgcaagaactcggtggcgtgattactgtgcacagataaaagattcacagtcctacttggctgtagcatcaaacacatctggctctacaccgaaagagttatttgatgacgtgatcgaggaacttggcaaacagtatcaagaagacaagatccaaattaaagaagtggtgaaatctggaaagattcctatgacaacttcatggacattagaggaattccaaactgctactctggaggatgatgctcttaaaggaatatcaaccatcaacatcaagcttgtatatgacgatcagcttgaaaggctcaaggaaaaagagcaaaaggacgctaagaagcgccagcgcttgggtgaaaatttttcagatcttttgtattccatcaaggaaatatcagcttcttcaacatgggatgattctaaacagcttttcgaggatagccaagagttcagggccttggacagtgagacttatgctagagagctttttgaagagtgcgttgtccacctgaaagaaaggaaggagaaagaacgcaaagaaaaagaaagagaccaccgggaggagagagaaaaggagaaagggaaggatcgatcaaggagagatgaaatggagtttgatggtgctgatttgaacacccatggtgcaaaagataagaaaagagataaagataaagaaaagaaacataagagacgtcaccatgacacagatgatgtaagctctgagagggatgataaagacgatgctaagaagtctcggaggcatagcagtgatcgcaagaaatctaggaagcatgcacatggctcagattcagatagtgaaaaccggcacaaaagacataaaaaggaccgagatagtagtagaagaaatggagcacatgagctggaagatggtgaacttggagaggatggggagatctattagtctttctgtttgctaccgagattctac

SEQ ID NO: 33125 - DNA, 3675 bp, Zea Mays
ctaggttacaaccaggtccaacgacacgcgggttgggccttcttgttcgcttgggtcttgtcttgttagccgaggaattgatttactaaggaatgccgagaaaccctaagactgcgtgtctcctctttgctagatctgtgactcccccgccatcgatgccaagtttgccccgttgccggcgtcacccctcccctcgacggtgaagctcatagcttccctccaccgccggtgtcgcttctcccccgccgaccaagccgtgcctgtcgccggcgtcgcccctcccccactagtgaaactcgcggtctctccaccgcacgcgcctcgtgtagttgtggctgcgtgcaccccctgtagccccggcgataggtcctactgctccatccggtttgcttccggcaacaagatcaacaacaagcgagcgaggtagtgaaaagctgcagctgtgatctctggaggtgctcttcctactctttctggtattttgatggtggcttgatggccagtaatatgcagtcttctgggctgcctcagcctccaagacctcccatgatgggttctagcgctcagccacaaaatcttggaccaccaatgcctatgcagtttaggccagtgatgccttcgcagcatcctcctcagttcatgccaccagcagcacagcagttccgtcctgttggtgagcctatggcgggggctaacgttggcatgccagggcaaatgccacattttccacaacctgggcagcacttgcctcactcaaatcaagttccacctgtatcacaaggggttcccatggtatatcagccagctagaccaatgtcatcagcacctatgcaacaacagcaacaaactgcgtatgctgggggccatttgcccaccatgggtgctcctatgcaacccctgacctatacatatcaaccaacatcgatccctcctgtagcgcaaccctggagtacaggcccaggacagagtgtacatcatgtgcctcctctagtgccgtctgggcaccagccggtgtcagctccaacgactttgcctcctgtcaacttgtctgaacctagctcttcagactggcaggaacacactgcagccgagggaaaaaagtactactataataagaagacaaggcaatcaagttgggagaaaccagttgagttgatgacacctttggagagggctgatgcctcaactgaatggaaagaatttactacaccagaaggacggaagtactatttcaacaaagtgaccaagcaatcaaaatggactattcctgacgagttaaaggttgcacgtgaattggcagagaacgcatcaaatcaacaacctgatcgagaatcaggaatagctactagtgctcttgtcagatctgctgcctttgaaccttctactgcacctgctaatcagtcgtcatctgctgttggtataattgcttccagcgcacatgatggatcatcaaactctgttctttctggtcctcccctgccgcacaatgtggagaatacttccagttctattgttggcatgcaaaatggtggttcgagtactgctgttgttcctgttgcagcaagcacagaagttccattagttgcaacagatgcagggtccagcagaaacaacgatgaaaattcatctctgaccactggggctgacgcagaggatggtacatccgctgaagatttggtggaggccaaaaagaccatgccagttgcagggaagattaatgtcactccagtggaggagaaaacaagtgaagaagaacctgtagtctatgccactaagatggaagcaaaaaatgcgttcaagtccctgcttgagtcggtaaatgtggagtctgattggacatgggatcagactatgagagtcatcataaatgacaaaagatatggtgctttgaaaactcttggagagagaaagcaagctttcaatgagtacttgaaccagcgcaaaaagtttgaagccgaagaaaaacgtatcaaacagaggaaagcacgtgatgatttccttgcaatgttggaagaaagcaaggagcttacatcatcaacaagatggagcaaagcaatacttatgtttgaagatgatgaaagattcaaagcagttgagcgtccaagggagcgtgaagatttatttgagaactatcttgtggaactgcataagaaggaaaaagccaaggctgctgaagaacacaaaagatatgtagcagagtacagagcttttctagaatcatgtgacttcatcaaggcaagcactcagtggagaaaagttcaggaacgcctggaggacgatgaacgttattcccgacttgagaagtttgatcggttggatatttttcaagagtacattcgacacctagagaaagaagaggaagagcagaagcgggtacaaaaggatcaagtgagaagacaagagaggaaaaaccgtgatgggtttcgtaaaatgttggaagaacatgttgctgatggcacacttaatgcaagaactcggtggcgtgattactgtgcacagataaaagattcacagtcctacttggctgtagcatcaaacacatctggctctacaccgaaagagttatttgatgacgtgatcgaggaacttggcaaacagtatcaagaagacaagatccaaattaaagaagtggtgaaatctggaaagattcctatgacaacttcatggacattagaggaattccaaactgctactctggaggatgatgctcttaaaggaatatcaaccatcaacatcaagcttgtatatgacgatcagcttgaaaggctcaaggaaaaagagcaaaaggacgctaagaagcgccagcgcttgggtgaaaatttttcagatcttttgtattccatcaaggaaatatcagcttcttcaacatgggatgattctaaacagcttttcgaggatagccaagagttcagggccttggacagtgagacttatgctagagagctttttgaagagtgcgttgtccacctgaaagaaaggttaaaagagaaagaacgtttgagggaggaagaaaaggcaaaaagagagaaagagcgtgaggagaaagagaagaagaaagagaaagaaaggaaggagaaagaacgcaaagaaaaagaaagagaccaccgggaggagagagaaaaggagaaagggaaggatcgatcaaggagagatgaaatggagtttgatggtgctgatttgaacacccatggtgcaaaagataagaaaagagataaagataaagaaaagaaacataagagacgtcaccatgacacagatgatgtaagctctgagagggatgataaagacgatgctaagaagtctcggaggcatagcagtgatcgcaagaaatctaggaagcatgcacatggctcagattcagatagtgaaaaccggcacaaaagacataaaaaggaccgagatagtagtagaagaaatggagcacatgagctggaagatggtgaacttggagaggatggggagatctattagtctttctgtttgctaccgagattgtcagtaattacttccccttgtcatgttctccattgctcctatttttcttacttttgacttgttattagtgctttggcttaacaatcactagtgttatagttatttagttccatacattctgaaatattttcttaaatatctacatttcttcaataccaattgtcgtttcttttctttttg

SEQ ID NO: 33126 - DNA, 3654 bp, Zea Mays
caacgacacgcgggttgggccttcttgttcgcttgggtcttgtcttgttagccgaggaattgatttactaaggaatgccgagaaaccctaagactgcgtgtctcctctttgctagatctgtgactcccccgccatcgatgccaagtttgccccgttgccggcgtcacccctcccctcgacggtgaagctcatagcttccctccaccgccggtgtcgcttctcccccgccgaccaagccgtgcctgtcgccggcgtcgcccctcccccactagtgaaactcgcggtctctccaccgcacgcgcctcgtgtagttgtggctgcgtgcaccccctgtagccccggcgataggtcctactgctccatccggtttgcttccggcaacaagatcaacaacaagcgagcgaggtagtgaaaagctgcagctgtgatctctggaggtgctcttcctactctttctggtattttgatggtggcttgatggccagtaatatgcagtcttctgggctgcctcagcctccaagacctcccatgatgggttctagcgctcagccacaaaatcttggaccaccaatgcctatgcagtttaggccagtgatgccttcgcagcatcctcctcagttcatgccaccagcagcacagcagttccgtcctgttggtgagcctatggcgggggctaacgttggcatgccagggcaaatgccacattttccacaacctgggcagcacttgcctcactcaaatcaagttccacctgtatcacaaggggttcccatggtatatcagccagctagaccaatgtcatcagcacctatgcaacaacagcaacaaactgcgtatgctgggggccatttgcccaccatgggtgctcctatgcaacccctgacctatacatatcaaccaacatcgatccctcctgtagcgcaaccctggagtacaggcccaggacagagtgtacatcatgtgcctcctctagtgccgtctgggcaccagccggtgtcagctccaacgactttgcctcctgtcaacttgtctgaacctagctcttcagactggcaggaacacactgcagccgagggaaaaaagtactactataataagaagacaaggcaatcaagttgggagaaaccagttgagttgatgacacctttggagagggctgatgcctcaactgaatggaaagaatttactacaccagaaggacggaagtactatttcaacaaagtgaccaagcaatcaaaatggactattcctgacgagttaaaggttgcacgtgaattggcagagaacgcatcaaatcaacaacctgatcgagaatcaggaatagctactagtgctcttgtcagatctgctgcctttgaaccttctactgcacctgctaatcagtcgtcatctgctgttggtataattgcttccagcgcacatgatggatcatcaaactctgttctttctggtcctcccctgccgcacaatgtggagaatacttccagttctattgttggcatgcaaaatggtggttcgagtactgctgttgttcctgttgcagcaagcacagaagttccattagttgcaacagatgcagggtccagcagaaacaacgatgaaaattcatctctgaccactggggctgacgcagaggatggtacatccgctgaagatttggtggaggccaaaaagaccatgccagttgcagggaagattaatgtcactccagtggaggagaaaacaagtgaagaagaacctgtagtctatgccactaagatggaagcaaaaaatgcgttcaagtccctgcttgagtcggtaaatgtggagtctgattggacatgggatcagactatgagagtcatcataaatgacaaaagatatggtgctttgaaaactcttggagagagaaagcaagctttcaatgagtacttgaaccagcgcaaaaagtttgaagccgaagaaaaacgtatcaaacagaggaaagcacgtgatgatttccttgcaatgttggaagaaagcaaggagcttacatcatcaacaagatggagcaaagcaatacttatgtttgaagatgatgaaagattcaaagcagttgagcgtccaagggagcgtgaagatttatttgagaactatcttgtggaactgcataagaaggaaaaagccaaggctgctgaagaacacaaaagatatgtagcagagtacagagcttttctagaatcatgtgacttcatcaaggcaagcactcagtggagaaaagttcaggaacgcctggaggacgatgaacgttattcccgacttgagaagtttgatcggttggatatttttcaatacattcgacacctagagaaagaagaggaagagcagaagcgggtacaaaaggatcaagtgagaagacaagagaggaaaaaccgtgatgggtttcgtaaaatgttggaagaacatgttgctgatggcacacttaatgcaagaactcggtggcgtgattactgtgcacagataaaagattcacagtcctacttggctgtagcatcaaacacatctggctctacaccgaaagagttatttgatgacgtgatcgaggaacttggcaaacagtatcaagaagacaagatccaaattaaagaagtggtgaaatctggaaagattcctatgacaacttcatggacattagaggaattccaaactgctactctggaggatgatgctcttaaaggaatatcaaccatcaacatcaagcttgtatatgacgatcagcttgaaaggctcaaggaaaaagagcaaaaggacgctaagaagcgccagcgcttgggtgaaaatttttcagatcttttgtattccatcaaggaaatatcagcttcttcaacatgggatgattctaaacagcttttcgaggatagccaagagttcagggccttggacagtgagacttatgctagagagctttttgaagagtgcgttgtccacctgaaagaaaggttaaaagagaaagaacgtttgagggaggaagaaaaggcaaaaagagagaaagagcgtgaggagaaagagaagaagaaagagaaagaaaggaaggagaaagaacgcaaagaaaaagaaagagaccaccgggaggagagagaaaaggagaaagggaaggatcgatcaaggagagatgaaatggagtttgatggtgctgatttgaacacccatggtgcaaaagataagaaaagagataaagataaagaaaagaaacataagagacgtcaccatgacacagatgatgtaagctctgagagggatgataaagacgatgctaagaagtctcggaggcatagcagtgatcgcaagaaatctaggaagcatgcacatggctcagattcagatagtgaaaaccggcacaaaagacataaaaaggaccgagatagtagtagaagaaatggagcacatgagctggaagatggtgaacttggagaggatggggagatctattagtctttctgtttgctaccgagattgtcagtaattacttccccttgtcatgttctccattgctcctatttttcttacttttgacttgttattagtgctttggcttaacaatcactagtgttatagttatttagttccatacattctgaaatattttcttaaatatctacatttcttcaataccaattgtcgtttcttttctttttg

SEQ ID NO: 33127 - DNA, 1908 bp, Zea Mays
gcgggttgggccttcttgttcgcttgggtcttgtcttgttagccgaggaattgatttactaaggaatgccgagaaaccctaagactgcgtgtctcctctttgctagatctgtgactcccccgccatcgatgccaagtttgccccgttgccggcgtcacccctcccctcgacggtgaagctcatagcttccctccaccgccggtgtcgcttctcccccgccgaccaagccgtgcctgtcgccggcgtcgcccctcccccactagtgaaactcgcggtctctccaccgcacgcgcctcgtgtagttgtggctgcgtgcaccccctgtagccccggcgataggtcctactgctccatccggtttgcttccggcaacaagatcaacaacaagcgagcgaggtagtgaaaagctgcagctgtgatctctggaggtgctcttcctactctttctggtattttgatggtggcttgatggccagtaatatgcagtcttctgggctgcctcagcctccaagacctcccatgatgggttctagcgctcagccacaaaatcttggaccaccaatgcctatgcagtttaggccagtgatgccttcgcagcatcctcctcagttcatgccaccagcagcacagcagttccgtcctgttggtgagcctatggcgggggctaacgttggcatgccagggcaaatgccacattttccacaacctgggcagcacttgcctcactcaaatcaagttccacctgtatcacaaggggttcccatggtatatcagccagctagaccaatgtcatcagcacctatgcaacaacagcaacaaactgcgtatgctgggggccatttgcccaccatgggtgctcctatgcaacccctgacctatacatatcaaccaacatcgatccctcctgtagcgcaaccctggagtacaggcccaggacagagtgtacatcatgtgcctcctctagtgccgtctgggcaccagccggtgtcagctccaacgactttgcctcctgtcaacttgtctgaacctagctcttcagactggcaggaacacactgcagccgagggaaaaaagtactactataataagaagacaaggcaatcaagttgggagaaaccagttgagttgatgacacctttggagagggctgatgcctcaactgaatggaaagaatttactacaccagaaggacggaagtactatttcaacaaagtgaccaagcaatcaaaatggactattcctgacgagttaaaggttgcacgtgaattggcagagaacgcatcaaatcaacaacctgatcgagaatcaggaatagctactagtgctcttgtcagatctgctgcctttgaaccttctactgcacctgctaatcagtcgtcatctgctgttggtataattgcttccagcgcacatgatggatcatcaaactctgttctttctggtcctcccctgccgcacaatgtggagaatacttccagttctattgttggcatgcaaaatggtggttcgagtactgctgttgttcctgttgcagcaagcacagaagttccattagttgcaacagatgcagggtccagcagaaacaacgatgaaaattcatctctgaccactggggctgacgcagaggatggtacatccgctgaagatttggtggtatgtttgattttctcgtgttgttttgtttcataaggtttgcaagtgcttcataattgatgtatttataatcctttgctaaatcttgtccaagctagtgacccccacattctaaaaagctgtctctagttgcctttttgttataaacttttcagtttttgctccatttctcattttgtatgtgaatatccttgtcaacattcttgtggtgcctgtttttttacagccttttagcactacggggtcaaagcagcc

SEQ ID NO: 33128 - DNA, 3631 bp, Zea Mays
gcgggttgggccttcttgttcgcttgggtcttgtcttgttagccgaggaattgatttactaaggaatgccgagaaaccctaagactgcgtgtctcctctttgctagatctgtgactcccccgccatcgatgccaagtttgccccgttgccggcgtcacccctcccctcgacggtgaagctcatagcttccctccaccgccggtgtcgcttctcccccgccgaccaagccgtgcctgtcgccggcgtcgcccctcccccactagtgaaactcgcggtctctccaccgcacgcgcctcgtgtagttgtggctgcgtgcaccccctgtagccccggcgataggtcctactgctccatccggtttgcttccggcaacaagatcaacaacaagcgagcgagctgtgatctctggaggtgctcttcctactctttctggtattttgatggtggcttgatggccagtaatatgcagtcttctgggctgcctcagcctccaagacctcccatgatgggttctagcgctcagccacaaaatcttggaccaccaatgcctatgcagtttaggccagtgatgccttcgcagcatcctcctcagttcatgccaccagcagcacagcagttccgtcctgttggtgagcctatggcgggggctaacgttggcatgccagggcaaatgccacattttccacaacctgggcagcacttgcctcactcaaatcaagttccacctgtatcacaaggggttcccatggtatatcagccagctagaccaatgtcatcagcacctatgcaacaacagcaacaaactgcgtatgctgggggccatttgcccaccatgggtgctcctatgcaacccctgacctatacatatcaaccaacatcgatccctcctgtagcgcaaccctggagtacaggcccaggacagagtgtacatcatgtgcctcctctagtgccgtctgggcaccagccggtgtcagctccaacgactttgcctcctgtcaacttgtctgaacctagctcttcagactggcaggaacacactgcagccgagggaaaaaagtactactataataagaagacaaggcaatcaagttgggagaaaccagttgagttgatgacacctttggagagggctgatgcctcaactgaatggaaagaatttactacaccagaaggacggaagtactatttcaacaaagtgaccaagcaatcaaaatggactattcctgacgagttaaaggttgcacgtgaattggcagagaacgcatcaaatcaacaacctgatcgagaatcaggaatagctactagtgctcttgtcagatctgctgcctttgaaccttctactgcacctgctaatcagtcgtcatctgctgttggtataattgcttccagcgcacatgatggatcatcaaactctgttctttctggtcctcccctgccgcacaatgtggagaatacttccagttctattgttggcatgcaaaatggtggttcgagtactgctgttgttcctgttgcagcaagcacagaagttccattagttgcaacagatgcagggtccagcagaaacaacgatgaaaattcatctctgaccactggggctgacgcagaggatggtacatccgctgaagatttggtggaggccaaaaagaccatgccagttgcagggaagattaatgtcactccagtggaggagaaaacaagtgaagaagaacctgtagtctatgccactaagatggaagcaaaaaatgcgttcaagtccctgcttgagtcggtaaatgtggagtctgattggacatgggatcagactatgagagtcatcataaatgacaaaagatatggtgctttgaaaactcttggagagagaaagcaagctttcaatgagtacttgaaccagcgcaaaaagtttgaagccgaagaaaaacgtatcaaacagaggaaagcacgtgatgatttccttgcaatgttggaagaaagcaaggagcttacatcatcaacaagatggagcaaagcaatacttatgtttgaagatgatgaaagattcaaagcagttgagcgtccaagggagcgtgaagatttatttgagaactatcttgtggaactgcataagaaggaaaaagccaaggctgctgaagaacacaaaagatatgtagcagagtacagagcttttctagaatcatgtgacttcatcaaggcaagcactcagtggagaaaagttcaggaacgcctggaggacgatgaacgttattcccgacttgagaagtttgatcggttggatatttttcaagagtacattcgacacctagagaaagaagaggaagagcagaagcgggtacaaaaggatcaagtgagaagacaagagaggaaaaaccgtgatgggtttcgtaaaatgttggaagaacatgttgctgatggcacacttaatgcaagaactcggtggcgtgattactgtgcacagataaaagattcacagtcctacttggctgtagcatcaaacacatctggctctacaccgaaagagttatttgatgacgtgatcgaggaacttggcaaacagtatcaagaagacaagatccaaattaaagaagtggtgaaatctggaaagattcctatgacaacttcatggacattagaggaattccaaactgctactctggaggatgatgctcttaaaggaatatcaaccatcaacatcaagcttgtatatgacgatcagcttgaaaggctcaaggaaaaagagcaaaaggacgctaagaagcgccagcgcttgggtgaaaatttttcagatcttttgtattccatcaaggaaatatcagcttcttcaacatgggatgattctaaacagcttttcgaggatagccaagagttcagggccttggacagtgagacttatgctagagagctttttgaagagtgcgttgtccacctgaaagaaaggttaaaagagaaagaacgtttgagggaggaagaaaaggcaaaaagagagaaagagcgtgaggagaaagagaagaagaaagagaaagaaaggaaggagaaagaacgcaaagaaaaagaaagagaccaccgggaggagagagaaaaggagaaagggaaggatcgatcaaggagagatgaaatggagtttgatggtgctgatttgaacacccatggtgcaaaagataagaaaagagataaagataaagaaaagaaacataagagacgtcaccatgacacagatgatgtaagctctgagagggatgataaagacgatgctaagaagtctcggaggcatagcagtgatcgcaagaaatctaggaagcatgcacatggctcagattcagatagtgaaaaccggcacaaaagacataaaaaggaccgagatagtagtagaagaaatggagcacatgagctggaagatggtgaacttggagaggatggggagatctattagtctttctgtttgctaccgagattgtcagtaattacttccccttgtcatgttctccattgctcctatttttcttacttttgacttgttattagtgctttggcttaacaatcactagtgttatagttatttagttccatacattctgaaatattttcttaaatatctacatttcttcaataccaattgtcgtttcttttctttttg

SEQ ID NO: 33129 - DNA, 3553 bp, Zea Mays
gttcgcttgggtcttgtcttgttagccgatctgtgactcccccgccatcgatgccaagtttgccccgttgccggcgtcacccctcccctcgacggtgaagctcatagcttccctccaccgccggtgtcgcttctcccccgccgaccaagccgtgcctgtcgccggcgtcgcccctcccccactagtgaaactcgcggtctctccaccgcacgcgcctcgtgtagttgtggctgcgtgcaccccctgtagccccggcgataggtcctactgctccatccggtttgcttccggcaacaagatcaacaacaagcgagcgagctgtgatctctggaggtgctcttcctactctttctggtattttgatggtggcttgatggccagtaatatgcagtcttctgggctgcctcagcctccaagacctcccatgatgggttctagcgctcagccacaaaatcttggaccaccaatgcctatgcagtttaggccagtgatgccttcgcagcatcctcctcagttcatgccaccagcagcacagcagttccgtcctgttggtgagcctatggcgggggctaacgttggcatgccagggcaaatgccacattttccacaacctgggcagcacttgcctcactcaaatcaagttccacctgtatcacaaggggttcccatggtatatcagccagctagaccaatgtcatcagcacctatgcaacaacagcaacaaactgcgtatgctgggggccatttgcccaccatgggtgctcctatgcaacccctgacctatacatatcaaccaacatcgatccctcctgtagcgcaaccctggagtacaggcccaggacagagtgtacatcatgtgcctcctctagtgccgtctgggcaccagccggtgtcagctccaacgactttgcctcctgtcaacttgtctgaacctagctcttcagactggcaggaacacactgcagccgagggaaaaaagtactactataataagaagacaaggcaatcaagttgggagaaaccagttgagttgatgacacctttggagagggctgatgcctcaactgaatggaaagaatttactacaccagaaggacggaagtactatttcaacaaagtgaccaagcaatcaaaatggactattcctgacgagttaaaggttgcacgtgaattggcagagaacgcatcaaatcaacaacctgatcgagaatcaggaatagctactagtgctcttgtcagatctgctgcctttgaaccttctactgcacctgctaatcagtcgtcatctgctgttggtataattgcttccagcgcacatgatggatcatcaaactctgttctttctggtcctcccctgccgcacaatgtggagaatacttccagttctattgttggcatgcaaaatggtggttcgagtactgctgttgttcctgttgcagcaagcacagaagttccattagttgcaacagatgcagggtccagcagaaacaacgatgaaaattcatctctgaccactggggctgacgcagaggatggtacatccgctgaagatttggtggaggccaaaaagaccatgccagttgcagggaagattaatgtcactccagtggaggagaaaacaagtgaagaagaacctgtagtctatgccactaagatggaagcaaaaaatgcgttcaagtccctgcttgagtcggtaaatgtggagtctgattggacatgggatcagactatgagagtcatcataaatgacaaaagatatggtgctttgaaaactcttggagagagaaagcaagctttcaatgagtacttgaaccagcgcaaaaagtttgaagccgaagaaaaacgtatcaaacagaggaaagcacgtgatgatttccttgcaatgttggaagaaagcaaggagcttacatcatcaacaagatggagcaaagcaatacttatgtttgaagatgatgaaagattcaaagcagttgagcgtccaagggagcgtgaagatttatttgagaactatcttgtggaactgcataagaaggaaaaagccaaggctgctgaagaacacaaaagatatgtagcagagtacagagcttttctagaatcatgtgacttcatcaaggcaagcactcagtggagaaaagttcaggaacgcctggaggacgatgaacgttattcccgacttgagaagtttgatcggttggatatttttcaagagtacattcgacacctagagaaagaagaggaagagcagaagcgggtacaaaaggatcaagtgagaagacaagagaggaaaaaccgtgatgggtttcgtaaaatgttggaagaacatgttgctgatggcacacttaatgcaagaactcggtggcgtgattactgtgcacagataaaagattcacagtcctacttggctgtagcatcaaacacatctggctctacaccgaaagagttatttgatgacgtgatcgaggaacttggcaaacagtatcaagaagacaagatccaaattaaagaagtggtgaaatctggaaagattcctatgacaacttcatggacattagaggaattccaaactgctactctggaggatgatgctcttaaaggaatatcaaccatcaacatcaagcttgtatatgacgatcagcttgaaaggctcaaggaaaaagagcaaaaggacgctaagaagcgccagcgcttgggtgaaaatttttcagatcttttgtattccatcaaggaaatatcagcttcttcaacatgggatgattctaaacagcttttcgaggatagccaagagttcagggccttggacagtgagacttatgctagagagctttttgaagagtgcgttgtccacctgaaagaaaggttaaaagagaaagaacgtttgagggaggaagaaaaggcaaaaagagagaaagagcgtgaggagaaagagaagaagaaagagaaagaaaggaaggagaaagaacgcaaagaaaaagaaagagaccaccgggaggagagagaaaaggagaaagggaaggatcgatcaaggagagatgaaatggagtttgatggtgctgatttgaacacccatggtgcaaaagataagaaaagagataaagataaagaaaagaaacataagagacgtcaccatgacacagatgatgtaagctctgagagggatgataaagacgatgctaagaagtctcggaggcatagcagtgatcgcaagaaatctaggaagcatgcacatggctcagattcagatagtgaaaaccggcacaaaagacataaaaaggaccgagatagtagtagaagaaatggagcacatgagctggaagatggtgaacttggagaggatggggagatctattagtctttctgtttgctaccgagattgtcagtaattacttccccttgtcatgttctccattgctcctatttttcttacttttgacttgttattagtgctttggcttaacaatcactagtgttatagttatttagttccatacattctgaaatattttcttaaatatctacatttcttcaataccaattgtcgtttcttttctttttg

SEQ ID NO: 33130 - DNA, 1513 bp, Zea Mays
caacaacaagcgagcgagctgtgatctctggaggtgctcttcctactctttctggtattttgatggtggcttgatggccagtaatatgcagtcttctgggctgcctcagcctccaagacctcccatgatgggttctagcgctcagccacaaaatcttggaccaccaatgcctatgcagtttaggccagtgatgccttcgcagcatcctcctcagttcatgccaccagcagcacagcagttccgtcctgttggtgagcctatggcgggggctaacgttggcatgccagggcaaatgccacattttccacaacctgggcagcacttgcctcactcaaatcaagttccacctgtatcacaaggggttcccatggtatatcagccagctagaccaatgtcatcagcacctatgcaacaacagcaacaaactgcgtatgctgggggccatttgcccaccatgggtgctcctatgcaacccctgacctatacatatcaaccaacatcgatccctcctgtagcgcaaccctggagtacaggcccaggacagagtgtacatcatgtgcctcctctagtgccgtctgggcaccagccggtgtcagctccaacgactttgcctcctgtcaacttgtctgaacctagctcttcagactggcaggaacacactgcagccgagggaaaaaagtactactataataagaagacaaggcaatcaagttgggagaaaccagttgagttgatgacacctttggagagggctgatgcctcaactgaatggaaagaatttactacaccagaaggacggaagtactatttcaacaaagtgaccaagcaatcaaaatggactattcctgacgagttaaaggttgcacgtgaattggcagagaacgcatcaaatcaacaacctgatcgagaatcaggaatagctactagtgctcttgtcagatctgctgcctttgaaccttctactgcacctgctaatcagtcgtcatctgctgttggtataattgcttccagcgcacatgatggatcatcaaactctgttctttctggtcctcccctgccgcacaatgtggagaatacttccagttctattgttggcatgcaaaatggtggttcgagtactgctgttgttcctgttgcagcaagcacagaagttccattagttgcaacagatgcagggtccagcagaaacaacgatgaaaattcatctctgaccactggggctgacgcagaggatggtacatccgctgaagatttggtggtatgtttgattttctcgtgttgttttgtttcataaggtttgcaagtgcttcataattgatgtatttataatcctttgctaaatcttgtccaagctagtgacccccacattctaaaaagctgtctctagttgcctttttgttataaacttttcagtttttgctccatttctcattttgtatgtgaatatccttgtcaacattcttgtggtgcctgtttttttacagccttttagcactacggggtcaaagcagcc

SEQ ID NO: 33131 - DNA, 806 bp, Zea Mays
caagcactcagtggagaaaagttcaggaacgcctggaggacgatgaacgttattcccgacttgagaagtttgatcggttggatatttttcaagagtacattcgacacctagagaaagaagaggaagagcagaagcgggtacaaaaggcaaaaagagagaaagagcgtgaggagaaagagaagaagaaagagaaagaaaggaaggagaaagaacgcaaagaaaaagaaagagaccaccgggaggagagagaaaaggagaaagggaaggatcgatcaaggagagatgaaatggagtttgatggtgctgatttgaacacccatggtgcaaaagataagaaaagagataaagataaagaaaagaaacataagagacgtcaccatgacacagatgatgtaagctctgagagggatgataaagacgatgctaagaagtctcggaggcatagcagtgatcgcaagaaatctaggaagcatgcacatggctcagattcagatagtgaaaaccggcacaaaagacataaaaaggaccgagatagtagtagaagaaatggagcacatgagctggaagatggtgaacttggagaggatggggagatctattagtctttctgtttgctaccgagattgtcagtaattacttccccttgtcatgttctccattgctcctatttttcttacttttgacttgttattagtgctttggcttaacaatcactagtgttatagttatttagttccatacattctgaaatattttcttaaatatctacatttcttcaataccaattgtcgtttcttttctttttg

SEQ ID NO: 33132 - DNA, 1023 bp, Zea Mays
atggacgatgaccttcatctggccgctgtggaggaggagcaccggctagaagatcataacgaagcagaggatgcccgagccctgtttggcggtagtgctgccatcaacatcgacaatgatgatgatgtccctggtgccgccaccggtggtcagacgggcacaggctccacgagcccgacatcgaccggcacaagcattgctgccaccagttctactaagaaagaacaacaacgtgctggtatagttcaatctgcgcttaagtataattatgatggttccttgaaacattgggagtattctccttctgttgcacgtactgaactctgtcggttgatagctaaagaggacctacctctatggtctgattgaattgatcgagttccatcccagctatttaaaatccacgccgatgatcgcgaatttgacgactgtaattatcagtagctatctgcttcggtgcttagatctaggccattgagtctaatctggacggttcacttgcacccataccccttcgtccgcatatagtttcataaaagcccctttcctttctacgattcgacccgtcgtcctattttatataggatgtctcagggttaactttttaacagctcagtccctagactttacaaatagacccctggaagctatatttaggtataaagttaataacaaaatatctagaaacttgtttaatccatatctcatccattttaactctgttttgattcgtttaagtttggttagcttcgtaataaaattgtctacacattaaaaacatcatttgtatcattccacatacttctataattggatattatttaacttaggttagttgattgataattctagtcaatgtgactataattataatcaaactaagatatgtccaattataacttagactaaaattgaattatgtataatatttttctcgcatgatttatatagaatatatttttaatcacctaaaacttcagaaattcacatctttttaactgtaactctgattttagtgattct

SEQ ID NO: 33133 - DNA, 1642 bp, Zea Mays
agtggttcaactttgatcaccccggtcctgcaccagcggcggcatgggaaagaagattcgcaacaccgatggcacctcgacgccggccaggcccatgaatcaggccgtgtcgctccgcgaggagacctccgggaggacgcgcgtagacgatgcctccctgctgagggtcaagcatttgcagaggctagcggcgtgggcgggcccggaggccggggtgcgcccgatcggcgcgctgctggggcgccgcctcgccgcgagcgccgaggccgccggagtacccctcaacgccgccactttcctttgccagaggtgtgagacaatcttaaagccaggcttcaactgcactgtccgcataaggaacaagagaaataaagcaaaacgtcggaagaaatcaaactgttgtcagaacagtgtttcctatgcatgccatttctgtggagatcagaacctaatattgggtagtgggaagggtgttgttcagagcctgttactgtcaagagggcatgctaccatgaactcatcccatataattgtgagaggaaacggtagcaacacaagagcacatgataagaaagaagtgcttgagctttctcaagcagcaattttgcaagtggaatcgtcatctctgttgaggcagtcgactactgaaagtgacgagcatggcgaaaggttaaattgtaatcttgatgaacagatgcgtgaaactagccatatttttcctgagaaggttaggatatgtgaagctactttgcaagcagaacttgcacctggttcatcatttgtcacgcctcagaaaatgaaaccaccggtggtgactgttgcaaaagattcagcaggactactcaagacaggaagtggcatgatttctggctcagccattgacgccctctcaggctccagcaagtctgcctcgaatggctctagaaataatgtgaaatatgcagcaagagattcttctcaggtttctggcagctcaaggaagcgggcaaggaagggttggacaacgctgaaacagatggctgagaaggatgagctcgagaggaaggagaagatggggaattttgtaatcccgttcttcatgcagtaagtgggatgctaaaatatttgccggcattgtgatcgtttggtcattagtttatctattgagaaggacagtgtttttttttgccggctagattttgcagtattaaagatacgaggttaacaaagtttggttgaattaacaacatgtgattaaaggggaacacgtccaaggcgagccatcagccatagcaacattatatcctgttgcggtgcgattgcctacgttcagccggaactttgtaatccagctgcaaaatctaatagctcgctctacgcccaaaattacattgtcggcaacaaattctagacgaaccatgataacattgacgatgaacctaaaaacgcagaagcattttgagtcttcctcatcaatgagtagtaaactaagcaaaagaaaaatcacttccttgtcaaggagcttaggagttgtttggaagcaaagtatttttttgggttttcagataaaagtatgatattagagcatatcatgttattcttcgtcaggaggtgtttgactatattgtaaaaactcagttgtgaatatcattgtttaatagtt

SEQ ID NO: 33134 - DNA, 1688 bp, Zea Mays
caggggagctggagctgttttaggcgtacagaggcagagccatgttttggtgctctgcccttctggctctggctccgaaggagcagcgtctggggagcccctcccaaacatggcctacgtctatgaacattgtgaatatttccgacaatctaacttttagaccaactacaattatttcctatcaagctgaaagtggcttagtcgagccgacaacactacttgatggcagtgaacaagcagttatattgctttgtcaggatattgatattatttctgttatccttattttgttaacgtcatttctatgttttgattagtgctgtatcatcgactggtggaggacttgtatgtaattgtgtgagacaatcttaaagccaggcttcaactgcactgtccgcataaggaacaagagaaataaagcaaaacgtcggaagaaatcaaactgttgtcagaacagtgtttcctatgcatgccatttctgtggagatcagaacctaatattgggtagtgggaagggtgttgttcagagcctgttactgtcaagagggcatgctaccatgaactcatcccatataattgtgagaggaaacggtagcaacacaagagcacatgataagaaagaagtgcttgagctttctcaagcagcaattttgcaagtggaatcgtcatctctgttgaggcagtcgactactgaaagtgacgagcatggcgaaaggttaaattgtaatcttgatgaacagatgcgtgaaactagccatatttttcctgagaaggttaggatatgtgaagctactttgcaagcagaacttgcacctggttcatcatttgtcacgcctcagaaaatgaaaccaccggtggtgactgttgcaaaagattcagcaggactactcaagacaggaagtggcatgatttctggctcagccattgacgccctctcaggctccagcaagtctgcctcgaatggctctagaaataatgtgaaatatgcagcaagagattcttctcaggtttctggcagctcaaggaagcgggcaaggaagggttggacaacgctgaaacagatggctgagaaggatgagctcgagaggaaggagaagatggggaattttgtaatcccgttcttcatgcagtaagtgggatgctaaaatatttgccggcattgtgatcgtttggtcattagtttatctattgagaaggacagtgtttttttttgccggctagattttgcagtattaaagatacgaggttaacaaagtttggttgaattaacaacatgtgattaaaggggaacacgtccaaggcgagccatcagccatagcaacattatatcctgttgcggtgcgattgcctacgttcagccggaactttgtaatccagctgcaaaatctaatagctcgctctacgcccaaaattacattgtcggcaacaaattctagacgaaccatgataacattgacgatgaacctaaaaacgcagaagcattttgagtcttcctcatcaatgagtagtaaactaagcaaaagaaaaatcacttccttgtcaaggagcttaggagttgtttggaagcaaagtatttttttgggttttcagataaaagtatgatattagagcatatcatgttattcttcgtcaggaggtgtttgactatattgtaaaaactcagttgtgaatatcattgtttaatagtt

SEQ ID NO: 33135 - DNA, 1358 bp, Zea Mays
aacatggcctacgtctatgaacattgtgtgagacaatcttaaagccaggcttcaactgcactgtccgcataaggaacaagagaaataaagcaaaacgtcggaagaaatcaaactgttgtcagaacagtgtttcctatgcatgccatttctgtggagatcagaacctaatattgggtagtgggaagggtgttgttcagagcctgttactgtcaagagggcatgctaccatgaactcatcccatataattgtgagaggaaacggtagcaacacaagagcacatgataagaaagaagtgcttgagctttctcaagcagcaattttgcaagtggaatcgtcatctctgttgaggcagtcgactactgaaagtgacgagcatggcgaaaggttaaattgtaatcttgatgaacagatgcgtgaaactagccatatttttcctgagaaggttaggatatgtgaagctactttgcaagcagaacttgcacctggttcatcatttgtcacgcctcagaaaatgaaaccaccggtggtgactgttgcaaaagattcagcaggactactcaagacaggaagtggcatgatttctggctcagccattgacgccctctcaggctccagcaagtctgcctcgaatggctctagaaataatgtgaaatatgcagcaagagattcttctcaggtttctggcagctcaaggaagcgggcaaggaagggttggacaacgctgaaacagatggctgagaaggatgagctcgagaggaaggagaagatggggaattttgtaatcccgttcttcatgcagtaagtgggatgctaaaatatttgccggcattgtgatcgtttggtcattagtttatctattgagaaggacagtgtttttttttgccggctagattttgcagtattaaagatacgaggttaacaaagtttggttgaattaacaacatgtgattaaaggggaacacgtccaaggcgagccatcagccatagcaacattatatcctgttgcggtgcgattgcctacgttcagccggaactttgtaatccagctgcaaaatctaatagctcgctctacgcccaaaattacattgtcggcaacaaattctagacgaaccatgataacattgacgatgaacctaaaaacgcagaagcattttgagtcttcctcatcaatgagtagtaaactaagcaaaagaaaaatcacttccttgtcaaggagcttaggagttgtttggaagcaaagtatttttttgggttttcagataaaagtatgatattagagcatatcatgttattcttcgtcaggaggtgtttgactatattgtaaaaactcagttgtgaatatcattgtttaatagtt

SEQ ID NO: 33136 - DNA, 2191 bp, Zea Mays
aagctgcacactggaggcgggggtcaagatatattcacttcgtgtggattcagtgcactccgagatcatccaagcgggggtggacgaggacgaggagaccaactttcagaaggcaagctgcacactggaggcgggggtcaagatatattcacttcgtgtggattcagtgcactccgaggcttacaaggtgcttggtgggataaaccgtgccggaaggggtgaagaggctgatttggaggaaggcagcaatgttgaacctgcacaggatgaagcaatcaataaaaaggatgctgataggaggatttcacctgcttcaacgttggagtcgtcatttgaggctctcaatgtaaagaaatttgatgttgctttcacggtggatcctctataccatcaaactaccgctcagtttgatgaaggtggggcaaagggccttttgttgtataaccttggagtttatggtagctgccgtgtgctgttcgattcatttgaagctccagacaaatgcatcttaagtgatatgcaaactgagcaggctgagacaattgacctttcatttgctaaagagcaaattgaggaaatggtcactcaaatgcgtctatgtaatgatatttctccaaccctgagggatattgttgctcaatttgatgaagaaaaccaaaggccatcacataggttatctcctggtcaaatgccagtaatggaagatcagatggatgatggtaatgaagcagacgataacgatagcatgctacctgattctggaacttgggattttggtgattgtcatgaccatgaggatacatatgatcaaaactgtaatccaatggattccatctcaacaaactttcaagaggaattcaatgaatacactgttgagattcctcagggtactattgtaaacgatagagttgacaaaattgcatctcttgtgttacttggcatggcctcatcaaaagcaaatgcttgggcaggacctgagcactggaaatatcggaaagctaaagatttggaggctgctccaacttcatcaggtgattcagaaataacaaataagataaagaaaagaaccaaggataaacctgacattggtttcacaaaagcattggacaatgagcttccaaatatcttcgcggctcccaaaaatccaaagacattactgtttcctgcaaacagggctatttgcagcaataaacttccagaagattgccattaccggcctgaaagccttgttaaattatttcttctcccagatgttttgtgtcttgctaagagaagaaaatcacttgatgctccagtggataataatgatgactttatcccatctgaaccttgggaagatgacaacttttgcaatgaccacattgatgaaggacatgtgtgtagtgatgtagaagagccagtaaatcttatcaataaaccgagacaggtcaacaagattgatatacagtatgacaaggtatcaaaacaagtggatgttcatgctttaaaagaagtgctttggaatcacatccatgcatctgctgagactggtcaggaaagagaggaacctggaccaccgctgcgcctatctcaggtgttacatgaccttccaagcagcagcccagatgctgtagcaactgatatttcgccacacctgtatttcatctgccttctgcatctggcaaatgagcacaacttgaagctctgtgatcgccccatgttggatgaaatagacatatacatgccgccgacttcaccgcttgtgaagtgaaccatgctgtaccggagatgctagtcttttttattttgtttattgttgaccggcctaaaccaacgccatgattattgggtagtgatctctgattgttgctaaggtgcccgtcgtgacatgctcagctcactgatgtaacttgaaaaatgaaacttcatatattttttaaagtagtgatgctcggaacgatactgcattgacttatgcctttcaacagactagagttaaagatggtccgagtcgtcgttcggagcaaggagtgcgcgctgccagatcgcagcggaagctcgatcgcccgtcggggcgttgtgttgggcagagctacggagggcggctgcacgtatcagcgaggagagtgcggtgctccgacagtcctcgctcggctgtcggtcggggacatcgcgtcgggtggagccgcggacggctgctggtcgaacgaca

SEQ ID NO: 33137 - DNA, 2522 bp, Zea Mays
cgcaccgcagcgcatccgcccccaaaatttgaaatcacgactgggagggatcccgaacgacggtccaaaattttccctacccaaccccctctatccatcctgtcccgttccgctccgccgccgccgtcgaccgcacgagatgccgccggccgaggacgccccaccgcagaccccccctcccgcgcgctggacggcggccgggtcgcgggtgctgctgcagtctccgcctccagcgttcccgctcggatccaatgacgaccagcaagaacgcgcccgcgcccgcgcggcggcgcgtgccgcctccgtccgccgccgatccctcgccgcctccattgcgccctccaaggacccgcgccacgacctcctcaaccgcgagcaggtcatggacctcttccataactgtatcaagctcgcatcggagaacaaaattaaccagaagaacacgtgggagctaggcctaatcgatcatctcagcgagatcatccaagcgggggtggacgaggacgaggagaccaactttcagaaggcaagctgcacactggaggcgggggtcaagatatattcacttcgtgtggattcagtgcactccgaggcttacaaggtgcttggtgggataaaccgtgccggaaggggtgaagaggctgatttggaggaaggcagcaatgttgaacctgcacaggatgaagcaatcaataaaaaggatgctgataggaggatttcacctgcttcaacgttggagtcgtcatttgaggctctcaatgtaaagaaatttgatgttgctttcacggtggatcctctataccatcaaactaccgctcagtttgatgaaggtggggcaaagggccttttgttgtataaccttggagtttatggtagctgccgtgtgctgttcgattcatttgaagctccagacaaatgcatcttaagtgatatgcaaactgagcaggctgagacaattgacctttcatttgctaaagagcaaattgaggaaatggtcactcaaatgcgtctatgtaatgatatttctccaaccctgagggatattgttgctcaatttgatgaagaaaaccaaaggccatcacataggttatctcctggtcaaatgccagtaatggaagatcagatggatgatggtaatgaagcagacgataacgatagcatgctacctgattctggaacttgggattttggtgattgtcatgaccatgaggatacatatgatcaaaactgtaatccaatggattccatctcaacaaactttcaagaggaattcaatgaatacactgttgagattcctcagggtactattgtaaacgatagagttgacaaaattgcatctcttgtgttacttggcatggcctcatcaaaagcaaatgcttgggcaggacctgagcactggaaatatcggaaagctaaagatttggaggctgctccaacttcatcaggtgattcagaaataacaaataagataaagaaaagaaccaaggataaacctgacattggtttcacaaaagcattggacaatgagcttccaaatatcttcgcggctcccaaaaatccaaagacattactgtttcctgcaaacagggctatttgcagcaataaacttccagaagattgccattaccggcctgaaagccttgttaaattatttcttctcccagatgttttgtgtcttgctaagagaagaaaatcacttgatgctccagtggataataatgatgactttatcccatctgaaccttgggaagatgacaacttttgcaatgaccacattgatgaaggacatgtgtgtagtgatgtagaagagccagtaaatcttatcaataaaccgagacaggtcaacaagattgatatacagtatgacaaggtatcaaaacaagtggatgttcatgctttaaaagaagtgctttggaatcacatccatgcatctgctgagactggtcaggaaagagaggaacctggaccaccgctgcgcctatctcaggtgttacatgaccttccaagcagcagcccagatgctgtagcaactgatatttcgccacacctgtatttcatctgccttctgcatctggcaaatgagcacaacttgaagctctgtgatcgccccatgttggatgaaatagacatatacatgccgccgacttcaccgcttgtgaagtgaaccatgctgtaccggagatgctagtcttttttattttgtttattgttgaccggcctaaaccaacgccatgattattgggtagtgatctctgattgttgctaaggtgcccgtcgtgacatgctcagctcactgatactagagttaaagatggtccgagtcgtcgttcggagcaaggagtgcgcgctgccagatcgcagcggaagctcgatcgcccgtcggggcgttgtgttgggcagagctacggagggcggctgcacgtatcagcgaggagagtgcggtgctccgacagtcctcgctcggctgtcggtcggggacatcgcgtcgggtggagccgcggacggctgctggtcgaacgaca

SEQ ID NO: 33138 - DNA, 2486 bp, Zea Mays
cgcagcgcatccgcccccaaaatttgaaatcacgactgggagggatcccgaacgacggtccaaaattttccctacccaaccccctctatccatcctgtcccgttccgctccgccgccgccgtcgaccgcacgagatgccgccggccgaggacgccccaccgcagaccccccctcccgcgcgctggacggcggccgggtcgcgggtgctgctgcagtctccgcctccagcgttcccgctcggatccaatgacgaccagcaagaacgcgcccgcgcccgcgcggcggcgcgtgccgcctccgtccgccgccgatccctcgccgcctccattgcgccctccaaggacccgcgccacgacctcctcaaccgcgagcaggtcatggacctcttccataactgtatcaagctcgcatcggagaacaaaattaaccagaagaacacgtgggagctaggcctaatcgatcatctcagcgagatcatccaagcgggggtggacgaggacgaggagaccaactttcagaaggcaagctgcacactggaggcgggggtcaagatatattcacttcgtgtggattcagtgcactccgaggcttacaaggtgcttggtgggataaaccgtgccggaaggggtgaagaggctgatttggaggaaggcagcaatgttgaacctgcacaggatgaagcaatcaataaaaaggatgctgataggaggatttcacctgcttcaacgttggagtcgtcatttgaggctctcaatgtaaagaaatttgatgttgctttcacggtggatcctctataccatcaaactaccgctcagtttgatgaaggtggggcaaagggccttttgttgtataaccttggagtttatggtagctgccgtgtgctgttcgattcatttgaagctccagacaaatgcatcttaagtgatatgcaaactgagcaggctgagacaattgacctttcatttgctaaagagcaaattgaggaaatggtcactcaaatgcgtctatgtaatgatatttctccaaccctgagggatattgttgctcaatttgatgaagaaaaccaaaggccatcacataggttatctcctggtcaaatgccagtaatggaagatcagatggatgatggtaatgaagcagacgataacgatagcatgctacctgattctggaacttgggattttggtgattgtcatgaccatgaggatacatatgatcaaaactgtaatccaatggattccatctcaacaaactttcaagaggaattcaatgaatacactgttgagattcctcagggtactattgtaaacgatagagttgacaaaattgcatctcttgtgttacttggcatggcctcatcaaaagcaaatgcttgggcaggacctgagcactggaaatatcggaaagctaaagatttggaggctgctccaacttcatcaggtgattcagaaataacaaataagataaagaaaagaaccaaggataaacctgacattggtttcacaaaagcattggacaatgagcttccaaatatcttcgcggctcccaaaaatccaaagacattactgtttcctgcaaacagggctatttgcagcaataaacttccagaagattgccattaccggcctgaaagccttgttaaattatttcttctcccagatgttttgtgtcttgctaagagaagaaaatcacttgatgctccagtggataataatgatgactttatcccatctgaaccttgggaagatgacaacttttgcaatgaccacattgatgaaggacatgtgtgtagtgatgtagaagagccagtaaatcttatcaataaaccgagacaggtcaacaagattgatatacagtatgacaaggtatcaaaacaagtggatgttcatgctttaaaagaagtgctttggaatcacatccatgcatctgctgagactggtcaggaaagagaggaacctggaccaccgctgcgcctatctcaggtgttacatgaccttccaagcagcagcccagatgctgtagcaactgatatttcgccacacctgtatttcatctgccttctgcatctggcaaatgagcacaacttgaagctctgtgatcgccccatgttggatgaaatagacatatacatgccgccgacttcaccgcttgtgaagtgaaccatgctgtaccggagatgctagtcttttttattttgtttattgttgaccggcctaaaccaacgccatgattattgggtagtgatctctgattgttgctaagactagagttaaagatggtccgagtcgtcgttcggagcaaggagtgcgcgctgccagatcgcagcggaagctcgatcgcccgtcggggcgttgtgttgggcagagctacggagggcggctgcacgtatcagcgaggagagtgcggtgctccgacagtcctcgctcggctgtcggtcggggacatcgcgtcgggtggagccgcggacggctgctggtcgaacgaca

SEQ ID NO: 33139 - DNA, 2391 bp, Zea Mays
cgcagcgcatccgcccccaaaatttgaaatcacgactgggagggatcccgaacgacggtccaaaattttccctacccaaccccctctatccatcctgtcccgttccgctccgccgccgccgtcgaccgcacgagatgccgccggccgaggacgccccaccgcagaccccccctcccgcgcgctggacggcggccgggtcgcgggtgctgctgcagtctccgcctccagcgttcccgctcggatccaatgacgaccagcaagaacgcgcccgcgcccgcgcggcggcgcgtgccgcctccgtccgccgccgatccctcgccgcctccattgcgccctccaaggacccgcgccacgacctcctcaaccgcgagcaggtcatggacctcttccataactgtatcaagctcgcatcggagaacaaaattaaccagaagaacacgtgggagctaggcctaatcgatcatctcagcgagatcatccaagcgggggtggacgaggacgaggagaccaactttcagaaggcaagctgcacactggaggcgggggtcaagatatattcacttcgtgtggattcagtgcactccgaggcttacaaggtgcttggtgggataaaccgtgccggaaggggtgaagaggctgatttggaggaaggcagcaatgttgaacctgcacaggatgaagcaatcaataaaaaggatgctgataggaggatttcacctgcttcaacgttggagtcgtcatttgaggctctcaatgtaaagaaatttgatgttgctttcacggtggatcctctataccatcaaactaccgctcagtttgatgaaggtggggcaaagggccttttgttgtataaccttggagtttatggtagctgccgtgtgctgttcgattcatttgaagctccagacaaatgcatcttaagtgatatgcaaactgagcaggctgagacaattgacctttcatttgctaaagagcaaattgaggaaatggtcactcaaatgcgtctatgtaatgatatttctccaaccctgagggatattgttgctcaatttgatgaagaaaaccaaaggccatcacataggttatctcctggtcaaatgccagtaatggaagatcagatggatgatggtaatgaagcagacgataacgatagcatgctacctgattctggaacttgggattttggtgattgtcatgaccatgaggatacatatgatcaaaactgtaatccaatggattccatctcaacaaactttcaagaggaattcaatgaatacactgttgagattcctcagggtactattgtaaacgatagagttgacaaaattgcatctcttgtgttacttggcatggcctcatcaaaagcaaatgcttgggcaggacctgagcactggaaatatcggaaagctaaagatttggaggctgctccaacttcatcaggtgattcagaaataacaaataagataaagaaaagaaccaaggataaacctgacattggtttcacaaaagcattggacaatgagcttccaaatatcttcgcggctcccaaaaatccaaagacattactgtttcctgcaaacagggctatttgcagcaataaacttccagaagattgccattaccggcctgaaagccttgttaaattatttcttctcccagatgttttgtgtcttgctaagagaagaaaatcacttgatgctccagtggataataatgatgactttatcccatctgaaccttgggaagatgacaacttttgcaatgaccacattgatgaaggacatgtgtgtagtgatgtagaagagccagtaaatcttatcaataaaccgagacaggtcaacaagattgatatacagtatgacaaggtatcaaaacaagtggatgttcatgctttaaaagaagtgctttggaatcacatccatgcatctgctgagactggtcaggaaagagaggaacctggaccaccgctgcgcctatctcaggtgttacatgaccttccaagcagcagcccagatgctgtagcaactgatatttcgccacacctgtatttcatctgccttctgcatctggcaaatgagcacaacttgaagctctgtgatcgccccatgttggatgaaatagacatatacatgccgccgacttcaccgcttgtgaagtgaaccatgctactagagttaaagatggtccgagtcgtcgttcggagcaaggagtgcgcgctgccagatcgcagcggaagctcgatcgcccgtcggggcgttgtgttgggcagagctacggagggcggctgcacgtatcagcgaggagagtgcggtgctccgacagtcctcgctcggctgtcggtcggggacatcgcgtcgggtggagccgcggacggctgctggtcgaacgaca

SEQ ID NO: 33140 - DNA, 812 bp, Zea Mays
gtaagacaccggatctgaggctcagggaccggatggagtgagaacaagtcaacaagattgatatacagtatgacaaggtatcaaaacaagtggatgttcatgctttaaaagaagtgctttggaatcacatccatgcatctgctgagactggtcaggaaagagaggaacctggaccaccgctgcgcctatctcaggtgttacatgaccttccaagcagcagcccagatgctgtagcaactgatatttcgccacacctgtatttcatctgccttctgcatctggcaaatgagcacaacttgaagctctgtgatcgccccatgttggatgaaatagacatatacatgccgccgacttcaccgcttgtgaagtgaaccatgctgtaccggagatgctagtcttttttattttgtttattgttgaccggcctaaaccaacgccatgattattgggtagtgatctctgattgttgctaaggtgcccgtcgtgacatgctcagctcactgatgtaacttgaaaaatgaaacttcatatattttttaaagtagtgatgctcggaacgatactgcattgacttatgcctttcaacagactagagttaaagatggtccgagtcgtcgttcggagcaaggagtgcgcgctgccagatcgcagcggaagctcgatcgcccgtcggggcgttgtgttgggcagagctacggagggcggctgcacgtatcagcgaggagagtgcggtgctccgacagtcctcgctcggctgtcggtcggggacatcgcgtcgggtggagccgcggacggctgctggtcgaacgaca

SEQ ID NO: 33141 - DNA, 493 bp, Zea Mays
cccacacgcagcagccccatctatcaattccttttctctcttggaactccctcgtccgcccaattaagctggccacgagcccacgacatggagcctcccataactgccctccccatattccctatgcgtgagcacagcaagccccacggccaaccaattcgacgtctgagccggtccggcgagcagccgcacccccatgaactccggcgccgctgccatagggccgatcctcgctcgctgctctggcaacttggcaagtccctcgactacgatccattccgagcttcgaggaatcgacggtcaagcttcggcgatcaaatgatccagttcttcgagttctacgagatcgaagaccctgagcatctgtttggtgaaggcaagtgtcctttgacccattatgtcccattcacttttaatgcactgtcccacattacttaattaaaacctaaggattgactagctttctatttaccttatccttgtttaccttttg

SEQ ID NO: 33142 - DNA, 339 bp, Zea Mays
cctgtgtccaccataaaaggaacctaataatgcgagaatttgagcgctctaaggcccgtcgaattggtagaaacatgaaaaacagggcactgaatatgtttggtaacatgtaaagggcaacagcataattataaattgattcattctgcaaattttgaatccaattgctgagaaacttcacaaggcctgtgggattttgaatagagcttgagtacgtagtaggaagaattatcaaccaggcaacagctacagcaaattttaggatatatcttatcctttgtgagcactccaggctcttccaagctttccagttgagaattaactctagcgtggctgaaa

SEQ ID NO: 33143 - DNA, 100 bp, Zea Mays
cagaaatgccgctgttataaagattgtcaatacatttttgaaaacatttggttcaaatatagaagaaagtgacccagaagggctccaggcaatgattacc

SEQ ID NO: 33144 - DNA, 98 bp, Zea Mays
ctcagtttcattcttggctctggtaggttctgcaaaaaagtcagctgttggatccatcggccatccaagttttttgaagcatttttttgacctgaaaa

SEQ ID NO: 33145 - DNA, 177 bp, Zea Mays
ctttttcctgtgctaaggaacagagatgcaagtatgaagaaggaattaccacatttcaaaaaagaagagaaggaattaccaaaaatattcattcaagtcgtcgtagtttctccacaatgagtggctcaccttaccacgtttgctccttgcagcttccttttgcatcagttgaaaaat

SEQ ID NO: 33146 - DNA, 949 bp, Zea Mays
ctccctttgattcgcaacactgtctttctacaacaatataacagaacatgacattatgaattcatttttcccaaaatgcttgttactcaaatgcacggcattgtaaaaccaatatgcattttttttaaatgcacatgcaaagaaactacaaacaaaatctgagatccaacccaatatctgttgcaggttgacatatatgtaatttccatttcttcttaattgttagactcttgtttagggttatgttagggttttcctatatctacctatttaccactattgtaatgggcttgatccatctaactcctctatataatatacacccaaccaggattatgatttcacatattctaacttcatctctctctcccctctccctctccgcctccacctccccctccctctctctctctctctctctctctctctctctctccagccgccccctcacgtggccgccagccaagcatccctggccgctggcccgaccctccacctcccgttgcccctgcagcctagccgcaccgccgtctgggcgtctcctgactggacgcaccgcctccccatgcagcctggacgcgcccccatcgccatggatccaaccccggcgaccacggaggctctgctcctccccgacgccgccagcgacctcccctacgacgggctcggcctccccgacttctctattgccacgagcgcggtcacaggcggcctcactaccgctgctggcacgagccacctcctcgccgcgcaacaccggcgtcctctcccccacccgcctcccatccgctccttgcagcactcgcgggcgccaccccccggcttccccactccatccggctccgttgctcccccgccaccgactggagccaaggttattaaaacgataaaacgttgggatgctcatgggtgaaattttgacttttaaacgtttaaactttgtttaaac

SEQ ID NO: 33147 - DNA, 1552 bp, Zea Mays
ctaactcttctgtctcgtctctgtccgcgctgccggctatccatctccgctgagcacgacagcaccgtccccagtggcaactcaatcgaagccgatccagagtccagactaacctcttggcctccgcttgttccggccatgtcgcgcttcttccgcggcgccgccctcaccgctgccgcagcggttgcgggcctgtcctctgcattctcgcggagcctcatttcgcccctcccccttgcggcttctccctcttccccgtcgacgctcatcgcggcctccggtcacctagccctcgtacgcgcgcacccaggtcttcgcgagctcgacgccatgcttacaccggcctccttcctcgttgacgcgacccaggcgttcctcattgtcgcactgcgctgtccgcctatcttccccgaaacgatccgccggagcccggaaagcctcgccgagcagatcctgtccgcagaatcggagggccacaccgcgatggaggaggcagccttgaaggcccggaccatcatggcactcatggatgcgcgtgaaggccgcctcgacgacgcgctcgacgccatcgtgctcctcgccgcggagcgcccaggcgacaccaccttgcgcctctatgccgccgcgctctgctacgtgctaagccgccacgaggagggggggcagtggctacaagattccgccgtgcccgacctctcccgctacgagcacaagtttcatttcgtggaggccgtccttaacgccgcgatcggttccgcgccgcgcgccgtggtgggctcggaggagctggtcttggtcagcacgctctggctgctcgagatgtcgatgtggtccattttcacgcacggtaatctgcgggagaggcttctggtgttagcgatgatggcattcctgcggggcgtcgtggcgaggaagttacacagagatgatggtccagcaacgaagcagggatcttaggaggccaccccaaactaactaggtgaattgtctttagaactccattcacgtttaggtgaccgtgtctggaaattcattggttaagacggagtattgaagtcaagtggtgatcacttaatcattagctgttgttgaagtgttgtgcagaaatcctcaaccaaatgcatattgtccaaatttgacttttatcttggcgctgccgttatattccatagactggtacgaaagtaatgcattcatgccttcgctggtttcgcagccaaggtgcgaatagcaatgttaaaaagctgtatggattgttagaattacattcatatgcttggaggtgtcatgataatcttttactcttcaatttttctcgcagttactacctttatgctaaattaaagattcttttactatgtatctagaaaaattaaaataaactaatgaggtgtttgatttgatgaatcactctatccaaaaattaagtggtgcatcatagatccattcctcaaatttggtggaatgactttattccacatattagtactaaacaactaactatgaggaataaggtggtgatggattaactcactccattccacaaaccaaa

SEQ ID NO: 33148 - DNA, 2961 bp, Zea Mays
gtcatttctgattgccctcgcttcttcttcttcctcctttgtgaccttctccttcttagctgggagcctgggatggcggcgccgctgctcttctacgacctcggcctcatcgcgtcctcatcctccggtgatggacgcgatggcaactcctcctcctcccgcctccaactcttagccaccacggcgcgcgctctcgagcttggctacgccggcgtcgctctcgaccaccaccaccgcggcctcctcgccgactcccacgtctgccgcaccgacactttcgcgcccctctcctctctcccgctcccatcctctgccgctctccatcgtcgccgcctcgcctctcccgcctccgaggccttccgccagtacacccgcatcaccctctccctcgactccgctgcagccaccgcttcggcgctcgccccctccgccgcccgcctcctccgcacttacgacctcgtcgcagcccgccccctcacccaggccgcattcgatcacctctgtcagacacccctctcagcccaacaccttgacctcatttccatcgatttctcctcccacggtaagatgcccttccgcatcaagccacccatgctcaagctcgccctgcaaaaggggctgcatttcgagatcgcctactccccactcctttctactgacgtcaatgacaagaggaatctcattgctcaagtcaagctattggtggactggaccaaaggaaaaaatctcatcatctcaagcgctgctcatactgcttcccagatcagagggccctatgatgtcatcaacctatctgcttacttacttggcattcccattgaccgagcaaaagctgctatgtccacgagctgcaggtcacttgttttgaaggctatgaggaagaaacacttttacaaagaaacaattagagttgacaggttattaccaaatgaagagttgagttcaacaaaattcaagcttgctgattggatcggttggaattctgtatcatctgaaggagtagcaaatcagctggaaccttcttctaactttgatgaggttcctggttcacccgtatgtggtataatggaagggtcacacgaaaaaactcatagtcctgatctgtctgtcgtttccaaactgccagaacaacctagtcatcaagaacaattcccatcccagacccaagaagatacactacaagttgacagaactgtagttgtgacagactctgggcaatcatctatcttcccagcatctttcaattatcagaatgctatacttgagaaggctgaaaacaatgaagtttttgtgaatccttttgtgcagcctggtgcaggttgttctgctgacccagaaattatcgtcaagcatgttgaattcgtgcaggacacaatggaagtagatacaatagaatcatgcaggacaaaactcatgggtgacaatattgcttcgacctctgatactagtactaagctagcatgttcttctcttctccatggcagagagctttctggtactagtcttgaggatcaggggccaggtcactctagtgaaagcctagctaatgagaagtatgatatgaaatatcacactgattgcacctacggtgtgaacgataagaccctattggttcaagaaattctttctggtgccgatatttggcctgaggacaaggattcagatgggtctgctggaatgcaagttgataatgaggcttccagaggtacttcagaatcactggagtgtcccccatgtggggtagatgacaaggcaccatctgatctttcattttactcgagtcataaattatgcacggatgttgcaattctgcccaaagtagtggagggaaaagtagagcaaagtagggatgaaaacatagtacaaactgtggaaaatgaagcagaatctgttgacacaaaaacaagaacatctatttcagtggaacctatgtcccatggtcaggagatcagctcaactattcatacaagaaacactggtgcaagctgtgaaagtgatgagctgaaagaacagaattctaagaacacagatgcttctttggataaaagtgttgctaaaatgcatgaactactaaaatttccttatccaagtggtaaggttgagatgtccacaatcagaccaggttgcacgtaaaaggaagtcgtaagagttgtggtgtacagaggcaatttggcctcctgccagaggacaatagatctatggtgccctttgactttatcttgtcggttcgctaaggccactccaagtcgtcagggtgatacgcatttcctgagtgggctactgtagggattcacgtgaagctgtggccacaaataggagcagggagtgctgcggttgatgtaaggacactcccaaccagttgccaactgaaaacagcgtcctgggtcaatagcaggaaacttgtgcccaatagttgcttgaaacgaaacttgtgcccaatagttgcttgaaacaaaactgattcttgaggggactcagcctcgctgtcgactgcattattcaaaggcggtatgatatcatttcttcctccccccaccaaaaatcttgggagatgtcacttgtgattttggaagctcatcatatgagctagtgcgctggactggcagcttttttgcaagggatgctttttttgtgtttacttgcgaccgtcatagggtgggtgacatgatctttttgtttctccaaatctggatgtaaattctaactgactgcatgtgtccatccatgcatcacattactctgagtagggaatggagaggaatgctagaatatttttgcatgttgattcccttggtctttggtgtggtcaactgcaagttgagcatgtgtctgtctgtcctggtgtaacaacagcacagggcatatatgggatcggggaatatcgttttcgttgtccttgatcgcttgctgtttctagctttggtgctgtgtgctcgctatctatttcaaggtgattggttg

SEQ ID NO: 33149 - DNA, 3676 bp, Zea Mays
cttgagctaagcagcgcgcacgtcgtggtcattggcctccaccagatccgatgccttctttttcgctcttgctctgctctcatgggcagggcagggcatgcccatctacttgaattgcgatgcgtacatacatcgctgtctccatctagctgcacacatatatacatacatgcatacagagtgagagagaaacagatcgatctcacttagctgctgctgctgctgctgcttgctggtggcctgggcctggctgctgtgtctgtatcgatgtgtccgtattttctccatctcgtctgcatacgctgcaattggtaaggagctagctggcctttcatgtcttccatgctgccatagccatacggccggccggcaggcaggaggataccccatcgctcgctgcacatgcatgtatgcatggggatacatgttcatcatcagcagcacagtggctctgtatcccccatcccaatctgatcctatataggaggagaaggaggagcagcagcagcagccaggcgcggccggcggccggagtagtatccgaatccgctcaacacccaccggctggtctctagctttcctatcgatcaatggctttcaaaggactcccgcgtgattcccgagggtccctcgaagtcttcaatccagacgcccctgtttcagatcgagcaaccacctccccgtttctcctccctcctgcggccgcgtcccatcccagcctcctcgccgccggagatggcggcgatgctgacgtgggtcgggcgacacagagggccgccgagtggggcctcgtcctccagaccgacgagcacaccggccgcccccagggtgtcgtcgcccgtccctccggttccaaccgcaccagcgagagtggcaactccatcgacgagagggccgccgccgccggtgctggtagagctctcccccgggtgtcggaggagcttcgcgccgcgctctcagcgttccagcagaccttcgtcgtgtccgatgccacccgccctgaccaccccatcctctacgccagcgctggattcttcaacatgacgggctactcctccaatgaggtcgtcggaaggaactgccgcttccttcaaggttctgggaccgaccccgtagagatttccaagatcagacaggctctcgcagctgggtcaaattactgtggccgtatcctcaactacaagaaggatggtacaccattctggaacctcctaaccgttgcccccataaaggatgaggatggcagggtcctcaagttcattgggatgcaagtggaagtaagtaagtacacggaaggtaacaaagatactgctcttcgtccaaatggattgccagagtcactcatcaaatatgatgcaaggcagaaggatcatgctcgtagctcagtctcggagctcctacttgccctgaaggatccacggtcattgtcagaatcaagaaacaataccttaaaaaggaaatcacaggaatcagcaggttcagctctagttcccggcaagagaagctccgaaactggatcccgtcgtaactcacatagtggaatgagaaactctctacaaaaaatcagtgaggtgcctgaaggagggaataagaccaggaaatctggtttgcgttcttttatgggccttattggtatgggacatgggaatgtagagaagaacattctaaaaccaagggaagatcccctacttgatagcgatgatgagagaccagatagcttcgatgacgatttcaggaagaaagaaatgagaaagggcatagatttggctaccacacttgaacgtattgaaaagaattttgtcatcaccgacccgaggttaccagataatccaattatatttgcatcggatagctttttgcgtttgacagagtattgccgcgaagaaatattgggaagaaactgcaggtttcttcaaggacctgaaactgaccgtgggacagtaaagaagataagagatgccatagataaccaaacagaagttactgttcagctgataaattatacaaagagcggtaagaaattctggaacctctttcacttgcagcctatgcgtgatcagaagggtgatgttcaatacttcattggggttcaattggatggaactgagcgtgttcgagaggctgctgcaaaagatggtgccatactggttaagaaaactgcagacaatattgatgaggctgcaaaggagcttccggatgctaatttgagacctgaggatctatgggctaatcactcaaaaccagtcttgccaaagccacatatgaaggatactgcatcgtggagagccatccaaaaggttcttgagaacggtgaaagcattgatttgaaacatttcagaccagtaaggcctttaggatctggtgatactggcagtgtccacttggtggagttgcttggcacaggtgaatactttgccatgaaagctatggataaaagtgtcatgcttaaccgaaacaaggtccatagagctaccgctgaacgacaaatccttgatatgttggaccacccattccttccgacattgtatgcatcatttcagacaaagacacatatatgtcttattgttgactattgtgctggtggggaactctttatgctccttgataggcaacctatgaaggttctgaaggaggatgcggtcaggttctatgctgcagaagtggtcacagcacttgaatacctacattgccaaggtataatctacagagacttaaagccagagaacattttacttcatagagatgggcacatttcattgacagactttgatttgtcttgcttgacatcctgccgaccacaagtgtttcttccacacgatattgataagaagaaaaagaggaggaagagcaggagtaatcccatattttttgctgaaccaatgcgagcatcaaattcttttgttggtacagaggagtacattgcaccggagattattaccggagctggccatacgagtgctgtagattggtgggcgctaggaattcttctatatgagatgttatatggttatacaccgttcagagggaaaacaagacaaaggacatttgctaatattctgcacaaggatatcagatttcctgcgagcatacaggtgagcctggcggcaaggcagctgatataccggttgttacaccgagaccctgcaaataggctaggttcctatgagggcgctatggagatcaaacaacaccccttctttcgtggcataaactgggctctagttcgtgccgccacgcccccagagctggaggctcccctccaggatacattggaggccacactgcctcctcctgcagctgatggggctcacaccgatatgttctgatcatacattggtccatgatgctacatgttaatttgcttaaaggaagaaaaaatattagatgatgaagatgcatgactttggcatagatgagaacaataatgtatgttaaggactaattatcttgatccatctatgcatgctcacaattagaataagattggatgtgtatattgtttctgtggttgcaatatacgcacgagtctatgaaaggacctatggatagcttgaggggatgacagacactaggcatgttgattagtactccctccgtttcgttttacaagtcgtttccaacagcttcgtgctgattaaggaatctatgaatcaatgattctgccctcccacaagcc

SEQ ID NO: 33150 - DNA, 3677 bp, Zea Mays
gcgcacgtcgtggtcattggcctccaccagatccgatgccttctttttcgctcttgctctgctctcatgggcagggcagggcatgcccatctacttgaattgcgatgcgtacatacatcgctgtctccatctagctgcacacatatatacatacatgcatacagagtgagagagaaacagatcgatctcacttagctgctgctgctgctgctgcttgctggtggcctgggcctggctgctgtgtctgtatcgatgtgtccgtattttctccatctcgtctgcatacgctgcaattggtaaggagctagctggcctttcatgtcttccatgctgccatagccatacggccggccggcaggcaggaggataccccatcgctcgctgcacatgcatgtatgcatggggatacatgttcatcatcagcagcacagtggctctgtatcccccatcccaatctgatcctatataggaggagaaggaggagcagcagcagcagccaggcgcggccggcggccggagtagtatccgaatccgctcaacacccaccggctggtctctagctttcctatcgatcaatggctttcaaaggactcccgcgtgattcccgagggtccctcgaagtcttcaatccagacgcccctgtttcagatcgagcaaccacctccccgtttctcctccctcctgcggccgcgtcccatcccagcctcctcgccgccggagatggcggcgatgctgacgtgggtcgggcgacacagagggccgccgagtggggcctcgtcctccagaccgacgagcacaccggccgcccccagggtgtcgtcgcccgtccctccggttccaaccgcaccagcgagagtggcaactccatcgacgagagggccgccgccgccggtgctggtagagctctcccccgggtgtcggaggagcttcgcgccgcgctctcagcgttccagcagaccttcgtcgtgtccgatgccacccgccctgaccaccccatcctctacgccagcgctggattcttcaacatgacgggctactcctccaatgaggtcgtcggaaggaactgccgcttccttcaaggttctgggaccgaccccgtagagatttccaagatcagacaggctctcgcagctgggtcaaattactgtggccgtatcctcaactacaagaaggatggtacaccattctggaacctcctaaccgttgcccccataaaggatgaggatggcagggtcctcaagttcattgggatgcaagtggaagtaagtaagtacacggaaggtaacaaagatactgctcttcgtccaaatggattgccagagtcactcatcaaatatgatgcaaggcagaaggatcatgctcgtagctcagtctcggagctcctacttgccctgaaggatccacggtcattgtcagaatcaagaaacaataccttaaaaaggaaatcacaggaatcagcaggttcagctctagttcccggcaagagaagctccgaaactggatcccgtcgtaactcacatagtggaatgagaaactctctacaaaaaatcagtgaggtgcctgaaggagggaataagaccaggaaatctggtttgcgttcttttatgggccttattggtatgggacatgggaatgtagagaagaacattctaaaaccaagggaagatcccctacttgatagcgatgatgagagaccagatagcttcgatgacgatttcaggaagaaagaaatgagaaagggcatagatttggctaccacacttgaacgtattgaaaagaattttgtcatcaccgacccgaggttaccagataatccaattatatttgcatcggatagctttttgcgtttgacagagtattgccgcgaagaaatattgggaagaaactgcaggtttcttcaaggacctgaaactgaccgtgggacagtaaagaagataagagatgccatagataaccaaacagaagttactgttcagctgataaattatacaaagagcggtaagaaattctggaacctctttcacttgcagcctatgcgtgatcagaagggtgatgttcaatacttcattggggttcaattggatggaactgagcgtgttcgagaggctgctgcaaaagatggtgccatactggttaagaaaactgcagacaatattgatgaggctgcaaaggagcttccggatgctaatttgagacctgaggatctatgggctaatcactcaaaaccagtcttgccaaagccacatatgaaggatactgcatcgtggagagccatccaaaaggttcttgagaacggtgaaagcattgatttgaaacatttcagaccagtaaggcctttaggatctggtgatactggcagtgtccacttggtggagttgcttggcacaggtgaatactttgccatgaaagctatggataaaagtgtcatgcttaaccgaaacaaggtccatagagctaccgctgaacgacaaatccttgatatgttggaccacccattccttccgacattgtatgcatcatttcagacaaagacacatatatgtcttattgttgactattgtgctggtggggaactctttatgctccttgataggcaacctatgaaggttctgaaggaggatgcggtcaggttctatgctgcagaagtggtcacagcacttgaatacctacattgccaaggtataatctacagagacttaaagccagagaacattttacttcatagagatgggcacatttcattgacagactttgatttgtcttgcttgacatcctgccgaccacaagtgtttcttccacacgatattgataagaagaaaaagaggaggaagagcaggagtaatcccatattttttgctgaaccaatgcgagcatcaaattcttttgttggtacagaggagtacattgcaccggtatttatatatatatgagattattaccggagctggccatacgagtgctgtagattggtgggcgctaggaattcttctatatgagatgttatatggttatacaccgttcagagggaaaacaagacaaaggacatttgctaatattctgcacaaggatatcagatttcctgcgagcatacaggtgagcctggcggcaaggcagctgatataccggttgttacaccgagaccctgcaaataggctaggttcctatgagggcgctatggagatcaaacaacaccccttctttcgtggcataaactgggctctagttcgtgccgccacgcccccagagctggaggctcccctccaggatacattggaggccacactgcctcctcctgcagctgatggggctcacaccgatatgttctgatcatacattggtccatgatgctacatgttaatttgcttaaaggaagaaaaaatattagatgatgaagatgcatgactttggcatagatgagaacaataatgtatgttaaggactaattatcttgatccatctatgcatgctcacaattagaataagattggatgtgtatattgtttctgtggttgcaatatacgcacgagtctatgaaaggacctatggatagcttgaggggatgacagacactaggcatgttgattagtactccctccgtttcgttttacaagtcgtttccaacagcttcgtgctgattaaggaatctatgaatcaatgattctgccctcccacaagcc

SEQ ID NO: 33151 - DNA, 3656 bp, Zea Mays
gcgcacgtcgtggtcattggcctccaccagatccgatgccttctttttcgctcttgctctgctctcatgggcagggcagggcatgcccatctacttgaattgcgatgcgtacatacatcgctgtctccatctagctgcacacatatatacatacatgcatacagagtgagagagaaacagatcgatctcacttagctgctgctgctgctgctgcttgctggtggcctgggcctggctgctgtgtctgtatcgatgtgtccgtattttctccatctcgtctgcatacgctgcaattggtaaggagctagctggcctttcatgtcttccatgctgccatagccatacggccggccggcaggcaggaggataccccatcgctcgctgcacatgcatgtatgcatggggatacatgttcatcatcagcagcacagtggctctgtatcccccatcccaatctgatcctatataggaggagaaggaggagcagcagcagcagccaggcgcggccggcggccggagtagtatccgaatccgctcaacacccaccggctggtctctagctttcctatcgatcaatggctttcaaaggactcccgcgtgattcccgagggtccctcgaagtcttcaatccagacgcccctgtttcagatcgagcaaccacctccccgtttctcctccctcctgcggccgcgtcccatcccagcctcctcgccgccggagatggcggcgatgctgacgtgggtcgggcgacacagagggccgccgagtggggcctcgtcctccagaccgacgagcacaccggccgcccccagggtgtcgtcgcccgtccctccggttccaaccgcaccagcgagagtggcaactccatcgacgagagggccgccgccgccggtgctggtagagctctcccccgggtgtcggaggagcttcgcgccgcgctctcagcgttccagcagaccttcgtcgtgtccgatgccacccgccctgaccaccccatcctctacgccagcgctggattcttcaacatgacgggctactcctccaatgaggtcgtcggaaggaactgccgcttccttcaaggttctgggaccgaccccgtagagatttccaagatcagacaggctctcgcagctgggtcaaattactgtggccgtatcctcaactacaagaaggatggtacaccattctggaacctcctaaccgttgcccccataaaggatgaggatggcagggtcctcaagttcattgggatgcaagtggaagtaagtaagtacacggaaggtaacaaagatactgctcttcgtccaaatggattgccagagtcactcatcaaatatgatgcaaggcagaaggatcatgctcgtagctcagtctcggagctcctacttgccctgaaggatccacggtcattgtcagaatcaagaaacaataccttaaaaaggaaatcacaggaatcagcaggttcagctctagttcccggcaagagaagctccgaaactggatcccgtcgtaactcacatagtggaatgagaaactctctacaaaaaatcagtgaggtgcctgaaggagggaataagaccaggaaatctggtttgcgttcttttatgggccttattggtatgggacatgggaatgtagagaagaacattctaaaaccaagggaagatcccctacttgatagcgatgatgagagaccagatagcttcgatgacgatttcaggaagaaagaaatgagaaagggcatagatttggctaccacacttgaacgtattgaaaagaattttgtcatcaccgacccgaggttaccagataatccaattatatttgcatcggatagctttttgcgtttgacagagtattgccgcgaagaaatattgggaagaaactgcaggtttcttcaaggacctgaaactgaccgtgggacagtaaagaagataagagatgccatagataaccaaacagaagttactgttcagctgataaattatacaaagagcgaaattctggaacctctttcacttgcagcctatgcgtgatcagaagggtgatgttcaatacttcattggggttcaattggatggaactgagcgtgttcgagaggctgctgcaaaagatggtgccatactggttaagaaaactgcagacaatattgatgaggctgcaaaggagcttccggatgctaatttgagacctgaggatctatgggctaatcactcaaaaccagtcttgccaaagccacatatgaaggatactgcatcgtggagagccatccaaaaggttcttgagaacggtgaaagcattgatttgaaacatttcagaccagtaaggcctttaggatctggtgatactggcagtgtccacttggtggagttgcttggcacaggtgaatactttgccatgaaagctatggataaaagtgtcatgcttaaccgaaacaaggtccatagagctaccgctgaacgacaaatccttgatatgttggaccacccattccttccgacattgtatgcatcatttcagacaaagacacatatatgtcttattgttgactattgtgctggtggggaactctttatgctccttgataggcaacctatgaaggttctgaaggaggatgcggtcaggttctatgctgcagaagtggtcacagcacttgaatacctacattgccaaggtataatctacagagacttaaagccagagaacattttacttcatagagatgggcacatttcattgacagactttgatttgtcttgcttgacatcctgccgaccacaagtgtttcttccacacgatattgataagaagaaaaagaggaggaagagcaggagtaatcccatattttttgctgaaccaatgcgagcatcaaattcttttgttggtacagaggagtacattgcaccggagattattaccggagctggccatacgagtgctgtagattggtgggcgctaggaattcttctatatgagatgttatatggttatacaccgttcagagggaaaacaagacaaaggacatttgctaatattctgcacaaggatatcagatttcctgcgagcatacaggtgagcctggcggcaaggcagctgatataccggttgttacaccgagaccctgcaaataggctaggttcctatgagggcgctatggagatcaaacaacaccccttctttcgtggcataaactgggctctagttcgtgccgccacgcccccagagctggaggctcccctccaggatacattggaggccacactgcctcctcctgcagctgatggggctcacaccgatatgttctgatcatacattggtccatgatgctacatgttaatttgcttaaaggaagaaaaaatattagatgatgaagatgcatgactttggcatagatgagaacaataatgtatgttaaggactaattatcttgatccatctatgcatgctcacaattagaataagattggatgtgtatattgtttctgtggttgcaatatacgcacgagtctatgaaaggacctatggatagcttgaggggatgacagacactaggcatgttgattagtactccctccgtttcgttttacaagtcgtttccaacagcttcgtgctgattaaggaatctatgaatcaatgattctgccctcccacaagcc

SEQ ID NO: 33152 - DNA, 1685 bp, Zea Mays
cttcacatgctcccatgttcttgtaagaaattctggaacctctttcacttgcagcctatgcgtgatcagaagggtgatgttcaatacttcattggggttcaattggatggaactgagcgtgttcgagaggctgctgcaaaagatggtgccatactggttaagaaaactgcagacaatattgatgaggctgcaaaggagcttccggatgctaatttgagacctgaggatctatgggctaatcactcaaaaccagtcttgccaaagccacatatgaaggatactgcatcgtggagagccatccaaaaggttcttgagaacggtgaaagcattgatttgaaacatttcagaccagtaaggcctttaggatctggtgatactggcagtgtccacttggtggagttgcttggcacaggtgaatactttgccatgaaagctatggataaaagtgtcatgcttaaccgaaacaaggtccatagagctaccgctgaacgacaaatccttgatatgttggaccacccattccttccgacattgtatgcatcatttcagacaaagacacatatatgtcttattgttgactattgtgctggtggggaactctttatgctccttgataggcaacctatgaaggttctgaaggaggatgcggtcaggttctatgctgcagaagtggtcacagcacttgaatacctacattgccaaggtataatctacagagacttaaagccagagaacattttacttcatagagatgggcacatttcattgacagactttgatttgtcttgcttgacatcctgccgaccacaagtgtttcttccacacgatattgataagaagaaaaagaggaggaagagcaggagtaatcccatattttttgctgaaccaatgcgagcatcaaattcttttgttggtacagaggagtacattgcaccggagattattaccggagctggccatacgagtgctgtagattggtgggcgctaggaattcttctatatgagatgttatatggttatacaccgttcagagggaaaacaagacaaaggacatttgctaatattctgcacaaggatatcagatttcctgcgagcatacaggtgagcctggcggcaaggcagctgatataccggttgttacaccgagaccctgcaaataggctaggttcctatgagggcgctatggagatcaaacaacaccccttctttcgtggcataaactgggctctagttcgtgccgccacgcccccagagctggaggctcccctccaggatacattggaggccacactgcctcctcctgcagctgatggggctcacaccgatatgttctgatcatacattggtccatgatgctacatgttaatttgcttaaaggaagaaaaaatattagatgatgaagatgcatgactttggcatagatgagaacaataatgtatgttaaggactaattatcttgatccatctatgcatgctcacaattagaataagattggatgtgtatattgtttctgtggttgcaatatacgcacgagtctatgaaaggacctatggatagcttgaggggatgacagacactaggcatgttgattagtactccctccgtttcgttttacaagtcgtttccaacagcttcgtgctgattaaggaatctatgaatcaatgattctgccctcccacaagcc

SEQ ID NO: 33153 - DNA, 2547 bp, Zea Mays
atttttttcaaccatatacataatttgtcggagattaatgaaatagaaaggcaaaattgtcgggcccacatgtcagtcaaccactcaacctctagctagcatgtacgccgttccccaacctctggcgtagtcttgttcatcttcgatctcctccatctcccttcatcctctctctcgctgtttgaggagaactgcctgcccctgctccctcttccgctcctccccgcgccccgctcgccatccccagacttcatttcaggccgggatggacgactacgcccgggagatgatggagctcaagacgctcgtcacccgcaccctcgagaagaagggcgtcctcgccaagattagggctgagctaagagcaagcgtgtttgaagccattgaagaggaggatcgggtggagaatgatgatggagggaaccctgctttgcttggtagctgtaatgaccgagctaagcaactgcatgcttcaccttcaggtaggttactaactgcacttgtatgcgaatacttggagtgggcgcaactaagtcacacaatgaaagtttacttgccagagtgtaacctgcccaaggacttctggaagaatgaactgaaagacttctctaacaaaagtggagctgaagggagcaggagtgctgaaagtggtccaatgcttttagatgttctcgaaggttatctgaaatatgaggtttatctcttgcatgatcattaacagaagcaaaaatcatccttttgtttctttatgtttcccaataaagaaaaaaggggaaagtttctggtgtagtgtgcccaattcttttgtccctagaaaactgtgtagtcctgtatggattaaggtaacaaatctctagctatagctgccactatagtcagttctagctgttttaggcactacaccatttgtacccccattcatcttaccctgttttagcctgctatagccaggtattagccttatgggaactctgcaactagtatggatcctctgacgcgttatgttttgtatgcagaaaagatagtatattactatattgagctggagcaataatccttcatattattggtgtcttgcttaatcaaactgtccaaaaattggattgtctgccaaaactacaatacgcatcaaggcgttaccttagaacaaaaagtaggtgttgttattctggaagattaaggagataggtttatcaagatcaagcacatcttcacaatttgtaatttttctaaaagctgaaacattttggcaatgtagataatgattcttggaataacaagaatggatatacattgatatgctcttttcaagaatggatacactgcatgcatgtgatttatatttacaatgcatcatcattatcattgtactgagatctgcttacatgtgatttttcaatctcaacttattgatggaaggcctgtactcaaggcctccttttgatggtctgtgatgcttggggtatgagctgcatttatgctgctttctgcctatgacctttaggccctgtttgtttaccctctagattatataatgcagcttaaataagagacaaacaaacaacacaaattattaggtggattatataatctacatacctagattatgataatccataggcaggtcattaggtgcttatataatccataggcaggtcattaggtgcttatataatccatgaccataagttagattatataatcctggaaggaaacaaacaggaccttagttcactgcacacacaaaacttgtttttttccagcttgactttcactgtcctcgagcaagtaaagttgctttttcctattatacttcattaataacatcttttattattaacctccaaatatagtcaacatgctctagcttaaattttttggttttcttcagcatgctttggtcatctaattgtgttgttttggtcagaatttgtctcaaacaaggatgggcggcaggaggatgatgagttcagaatctgatccatcactaaatgttgaacatcggagcatgaggagggcaccattatcgtcagctgggaacctgcctcctatggggaggccaatctcttcgtcgcagcaggcatcagatcgcagagggggatcttcagcttccaacacaaggaaagatgagtacaactggagatacgataccaccgatgatatatctgaagaggtgctacgggcatcgactgctctagaaagtgttcagctagaccgcaaatctcggaatctgccaacatcttggaggcattcaggggatggcgccgagtaacaacaaggctttggagctggttgcttgacttgaccctgtatcatgtaatttgtatgccaatcatttgcagtgatacgatgcttggattgctgctatcttagagaagtggtaaactggttatgcgtgtttgtcttgtaacgaacaaaacaactttagtgttagtttcatgttgcaattttcaaagctctcatgttggaactgcgtggactagtttcatcgtcataaagctcattttattcccgtagaacattatttaatcatcactcgcttcatca

SEQ ID NO: 33154 - DNA, 2510 bp, Zea Mays
caacctctagctagcatgtacgccgttccccaacctctggcgtagtcttgttcatcttcgatctcctccatctcccttcatcctctctctcgctgtttgaggagaactgcctgcccctgctccctcttccgctcctccccgcgccccgctcgccatccccagacttcatttcaggccgggatggacgactacgcccgggagatgatggagctcaagacgctcgtcacccgcaccctcgagaagaagggcgtcctcgccaagattagggctgagctaagagcaagcgtgtttgaagccattgaagaggaggatcgggtggagaatgatgatggagggaaccctgctttgcttggtagctgtaatgaccgagctaagcaactgcatgcttcaccttcaggtaggttactaactgcacttgtatgcgaatacttggagtgggcgcaactaagtcacacaatgaaagtttacttgccagagtgtaacctgcccaaggacttctggaagaatgaactgaaagacttctctaacaaaagtggagctgaagggagcaggagtgctgaaagtggtccaatgcttttagatgttctcgaaggttatctgaaatatgaggtttatctcttgcatgatcattaacagaagcaaaaatcatccttttgtttctttatgtttcccaataaagaaaaaaggggaaagtttctggtgtagtgtgcccaattcttttgtccctagaaaactgtgtagtcctgtatggattaaggtaacaaatctctagctatagctgccactatagtcagttctagctgttttaggcactacaccatttgtacccccattcatcttaccctgttttagcctgctatagccaggtattagccttatgggaactctgcaactagtatggatcctctgacgcgttatgttttgtatgcagaaaagatagtatattactatattgagctggagcaataatccttcatattattggtgtcttgcttaatcaaactgtccaaaaattggattgtctgccaaaactacaatacgcatcaaggcgttaccttagaacaaaaagtaggtgttgttattctggaagattaaggagataggtttatcaagatcaagcacatcttcacaatttgtaatttttctaaaagctgaaacattttggcaatgtagataatgattcttggaataacaagaatggatatacattgatatgctcttttcaagaatggatacactgcatgcatgtgatttatatttacaatgcatcatcattatcattgtactgagatctgcttacatgtgatttttcaatctcaacttattgatggaaggcctgtactcaaggcctccttttgatggtctgtgatgcttggggtatgagctgcatttatgctgctttctgcctatgacctttaggccctgtttgtttaccctctagattatataatgcagcttaaataagagacaaacaaacaacacaaattattaggtggattatataatctacatacctagattatgataatccataggcaggtcattaggtgcttatataatccataggcaggtcattaggtgcttatataatccatgaccataagttagattatataatcctggaaggaaacaaacaggaccttagttcactgcacacacaaaacttgtttttttccagcttgactttcactgtcctcgagcaagtaaagttgctttttcctattatacttcattaataacatcttttattattaacctccaaatatagtcaacatgctctagcttaaattttttggttttcttcagcatgctttggtcatctaattgtgttgttttggtcagaatttgtctcaaacaaggatgggcggcaggaggatgatgagttcagaatctgatccatcactaaatgttgaacatcggagcatgaggagggcaccattatcgtcagctgggaacctgcctcctatggggaggccaatctcttcgtcgcagcaggcatcagatcgcagagggggatcttcagcttccaacacaaggaaagatgagtacaactggagatacgataccaccgatgatatatctgaagaggtgctacgggcatcgactgctctagaaagtgttcagctagaccgcaaatctcggaatctgccaacatcttggaggtaggtggggccatcgtttgattaatcgcccctccctcataataatgtgcattcaggggatggcgccgagtaacaacaaggctttggagctggttgcttgacttgaccctgtatcatgtaatttgtatgccaatcatttgcagtgatacgatgcttggattgctgctatcttagagaagtggtaaactggttatgcgtgtttgtcttgtaacgaacaaaacaactttagtgttagtttcatgttgcaattttcaaagctctcatgttggaactgcgtggactagtttcatcgtcataaagctcattttattcccgtagaacattatttaatcatcactcgcttcatca

SEQ ID NO: 33155 - DNA, 4606 bp, Zea Mays
attttaggacgaagggatattatgttgagattcagattgagatgaggtagataagatagagatatgtttgaatcagtcttaatcagcgcaaaagaaaagtatggatgagtttggtgcggcacaccacaaggaagagcacagaaaatcccaaattcccaccacgcaggtcgcaggcgcacccgtctctcccttcttcctcctctccctcttctacacccgacaggcacaggcacaggcacaacgcatcgtccccctccctttccagcgccccaaccacaaggaacagccgaacaggtcggggtcaagccatcggaccttgattccgcttgccctcctgctttatcccgccgccgccgtcgtcgtctcaaccgcccactccttcctctccctgccgctcctgcgaatcgcgaaatcggagacccccggaccgccctccaatgacgaccatgagcgacgatggtgaccgcacctgcccgctctgtgccgaggagatggacatcactgaccagcagctcaagccatgcaaatgcggttatgatatttgtgtttggtgctggcaccacatcatagacatggctgagaaggaggaaacagtgggccgctgccctgcatgccgcacatgctatgacaaggacaggatcgtcaagatggctgccacttgtgacaggacagtggcagagaaaaatgcagagaagaagcacaggacccaaaaggttaagccaaaggcagcaccttcagcagcagcaacatcaactgtagaatctaagaagcatctggctagtgtcagggttatccagagaaatctggtgtatataattgggctacctgcacatttatgcaatgagagcgtacttgagtgtagggagtactttggccaatatgggaaaattttgaaggtttcagtttcccgtccgactgggcctccctctcagcaggcatcagcaaacagcaatattagtgtctatattacttatgccaaagaagaagaggccatccggtgtattcaagctgtacacaattttgtcttggaagggaaagtgttaagggcatgttttggtactacgaagtattgccatgcatggctgcgaaacatgacatgtgggaatccagattgtctctatttgcatgatgtaggcagtcaggaggatagttttactaaagatgagatcatctcagcatatacaaggactagagtccctcagatggcatctggtgtttcgcaaagacgcacaggcactgtgttgcctcctccaggagatgatttctcttacagtgcggtggtttcagccaagcatacatttaagaatggaacacttaataccaccagtcagcccagactttcacctccaaacagtagttctgggaggtccacgcttccatcagctgcctcatgggggcagcgtgatttgaatgccaggacaacagctactggagcgacatcgtcacaatctcatacaaaaccaaaatcagaatcacaaagtaatccattttcaagttcttcagtattttcctgtacaaaaacaccctcttcatggaatgatgatacaagtacagcagcaaaaatatctgaaggacagcaactgtcagaaaaagagtctagaaccttgcagccgtataagcctggtatttcaaaggaaacacaagctttatcatcactggagtcatcactggacatagacttctcaacaataccttcagcttggaatgacgatgacattgtagtaccagatgtgatgccaaaaggaagtgatgaaaatcaagttgcaaataaaaatggtgagctaacccatccagcatccaagtcactggttttatctaagaaagacataaaaatgaacattaccagcaaaactccttcagattttgtatcaagtccagcaatatctaaatcagatgtaagtactagtgatggtgaccactcactcaccaatattactcctaaatgccttgcttcaaatgctgtagaatgccaatctagtcatactgctgtggagaaaatgttggaggatattggatccaaggacactgacatggagaagctatctgctcagatatcttcagtaacattaggtggcaacgacgagattcagagtatggcaggaaatcaacaaccagatgtaatgccatgcacatctgttgatgtgctcatggatcagaattttggcagagacctagctcatcccaatcctgacgagctcttattgccttctgaaaataaggatagtattgtttcttgtcaatatagttctgataagcgtcttgattggagtttggagatgcaaaattgtagcgttactcctttaaatgatagaatggactctgcactgctcactgacaaaattcatagtagacagctggatggttcagagcaatcatcatattcatcatttgttgaatttcctagtacagtggatacctcattgtggaatgatacagaaaataacgctgcattgacgattgacaatataacttcttcacagatgcagccagggttttcttcaactgataacacttatgccttgctaaatggaggtcaagatgggctaggtactgtatatacacatgataatgtttctgtatatacacatggcaatgtttctggacatcctggaatgggaagtcatcaccatagagcaatgggttcattaagaaacaatagtataggaagttttgacaagaccataagcgtaaataagtatgaaagaagaataatttctgatacgttgtcagagtttaatccatgggatgattcatattcgactgctaacaattttgctaggatgcttagggaatctaaaaataatgatgtccattgcattgcgccttcatggaaatcaggaaccgggatcaaagagtccagattttcatttgctagacaggataaccaaggaaacttgtttgattcatctctcagaaactgtggtactggtactgagcagaatttcagtttgctaccccagaattctcgaggaaatatttaccagaatggccttgcattccaatctctagagaatgaattttcaaacaataactctcctggtgtattagatatggcaactactggtacatcgatgtctaaaatatctgcccccccaggattttcggcaccaacaagagtaccccctcctggattttctactgcatttccatcccaggatagtttgaaccccactcctgtgtttccttctggaattttgtgccatggcgggtctatcccccctcctagattctcttcattttcttctggaatttcaactcaggaagtgtctaagcctcctactagaccgccttctccattttcttctagattttcatcacaggacggtcttgacccctcttctagattccctttttcttctggattttcatcacatgatgggtctaatcagtcgtatggctcaacgaacccagaaaatcttctccggggtactgttcagggtggcaacagtaatcattatcaatctcagtttggaaggcactcaagtgacatggagtttgatgatcctgctatattagccatgggcaaagggctgatgcctggaattggcgattcagggctggagatgaaaaatactcctgcttttcaagcacagttgcaaccagcaagtagtgatccaagatttcagttacatgtacagccaaatgtgcagtctcgtcaaaacatgagattcacagaccctatgcaagatggtttgaaccatatgaacgataattacctggcatccagatttttagctcagaaccagggtcctctatctccttatgtgcagattccgcaacaacccagaaactcgcaggttataaatggtcactgggacgggtggagtgatttgagacaagggaataacgctcctatgtcagacatgtccaggatattatatccaagtgaagtgaacaagttgcatatgctgggttcaaatgatgtccataacagagcctttggaatgtgatcgtctcctgggataatgtgcgactttgagctgacatgttcaacttggggcgttttgtgcaagtaactggttgcacaacacatagtatacctgaggtggttaatggtgttgtgctcatgagctggcacacgactatttattgctgttggagttgaccaaaatgaaccttagttttggtccatccatttggaattaccaggttcattctcgtctatgatttgtgaagcttgaatgaaaagaaagattacgtgcctgagaagaacaaggcagctgaagttgaaatagatagagatatgtctattatgggatgtggtgtgacttgcgagcgaaagagatgaagaagattaggtgggcttggcttgatggcagcttgttttttcttgtgtcttgtacatgatgatattggtcggtggttgtatatgacttgtgatcgacggtggctgcattaacctgtagtggttgcccttgctccttcctgcctgttttgtttgcagctcctcctgttttgcatagtttatgctgattaagggaattggtgaaagtctagtgttacccatggtataataatagggaactggtttctttgttagcattacttcatttgtctaaaaaaaatccgttaaccggctctgataccaattgaaagtcgactagag

SEQ ID NO: 33156 - DNA, 4755 bp, Zea Mays
ttgaatcagtcttaatcagcgcaaaagaaaagtatggatgagtttggtgcggcacaccacaaggaagagcacagaaaatcccaaattcccaccacgcaggtcgcaggcgcacccgtctctcccttcttcctcctctccctcttctacacccgacaggcacaggcacaggcacaacgcatcgtccccctccctttccagcgccccaaccacaaggaacagccgaacaggtcggggtcaagccatcggaccttgattccgcttgccctcctgctttatcccgccgccgccgtcgtcgtctcaaccgcccactccttcctctccctgccgctcctgcgaatcgcgaaatcggagacccccggaccgccctccaatgacgaccatgagcgacgatggtgaccgcacctgcccgctctgtgccgaggagatggacatcactgaccagcagctcaagccatgcaaatgcggttatgatatttgtgtttggtgctggcaccacatcatagacatggctgagaaggaggaaacagtgggccgctgccctgcatgccgcacatgctatgacaaggacaggatcgtcaagatggctgccacttgtgacaggacagtggcagagaaaaatgcagagaagaagcacaggacccaaaaggttaagccaaaggcagcaccttcagcagcagcaacatcaactgtagaatctaagaagcatctggctagtgtcagggttatccagagaaatctggtgtatataattgggctacctgcacatttatgcaatgagagcgtacttgagtgtagggagtactttggccaatatgggaaaattttgaaggtttcagtttcccgtccgactgggcctccctctcagcaggcatcagcaaacagcaatattagtgtctatattacttatgccaaagaagaagaggccatccggtgtattcaagctgtacacaattttgtcttggaagggaaagtgttaagggcatgttttggtactacgaagtattgccatgcatggctgcgaaacatgacatgtgggaatccagattgtctctatttgcatgatgtaggcagtcaggaggatagttttactaaagatgagatcatctcagcatatacaaggactagagtccctcagatggcatctggtgtttcgcaaagacgcacaggcactgtgttgcctcctccaggagatgatttctcttacagtgcggtggtttcagccaagcatacatttaagaatggaacacttaataccaccagtcagcccagactttcacctccaaacagtagttctgggaggtccacgcttccatcagctgcctcatgggggcagcgtgatttgaatgccaggacaacagctactggagcgacatcgtcacaatctcatacaaaaccaaaatcagaatcacaaagtaatccattttcaagttcttcagtattttcctgtacaaaaacaccctcttcatggaatgatgatacaagtacagcagcaaaaatatctgaaggacagcaactgtcagaaaaagagtctagaaccttgcagccgtataagcctggtatttcaaaggaaacacaagctttatcatcactggagtcatcactggacatagacttctcaacaataccttcagcttggaatgacgatgacattgtagtaccagatgtgatgccaaaaggaagtgatgaaaatcaagttgcaaataaaaatggtgagctaacccatccagcatccaagtcactggttttatctaagaaagacataaaaatgaacattaccagcaaaactccttcagattttgtatcaagtccagcaatatctaaatcagatgtaagtactagtgatggtgaccactcactcaccaatattactcctaaatgccttgcttcaaatgctgtagaatgccaatctagtcatactgctgtggagaaaatgttggaggatattggatccaaggacactgacatggagaagctatctgctcagatatcttcagtaacattaggtggcaacgacgagattcagagtatggcaggaaatcaacaaccagatgtaatgccatgcacatctgttgatgtgctcatggatcagaattttggcagagacctagctcatcccaatcctgacgagctcttattgccttctgaaaataaggatagtattgtttcttgtcaatatagttctgataagcgtcttgattggagtttggagatgcaaaattgtagcgttactcctttaaatgatagaatggactctgcactgctcactgacaaaattcatagtagacagctggatggttcagagcaatcatcatattcatcatttgttgaatttcctagtacagtggatacctcattgtggaatgatacagaaaataacgctgcattgacgattgacaatataacttcttcacagatgcagccagggttttcttcaactgataacacttatgccttgctaaatggaggtcaagatgggctaggtactgtatatacacatgataatgtttctgtatatacacatggcaatgtttctggacatcctggaatgggaagtcatcaccatagagcaatgggttcattaagaaacaatagtataggaagttttgacaagaccataagcgtaaataagtatgaaagaagaataatttctgatacgttgtcagagtttaatccatgggatgattcatattcgactgctaacaattttgctaggatgcttagggaatctaaaaataatgatgtccattgcattgcgccttcatggaaatcaggaaccgggatcaaagagtccagattttcatttgctagacaggataaccaaggaaacttgtttgattcatctctcagaaactgtggtactggtactgagcagaatttcagtttgctaccccagaattctcgaggaaatatttaccagaatggccttgcattccaatctctagagaatgaattttcaaacaataactctcctggtgtattagatatggcaactactggtgagtgctattatacctttttacttctttgcctgactgagcagaatgataagtactgcaatttgaatgaatttactctgtgtgccacacttatttttcattgagcattggtaaagatattctgactcatgcaaatggattgttgatctattggtgcttattatgtattttttcccactgttaaatttattttttatgaagaatttgctttctcaggtacatcgatgtctaaaatatctgcccccccaggattttcggcaccaacaagagtaccccctcctggattttctactgcatttccatcccaggatagtttgaaccccactcctgtgtttccttctggaattttgtgccatggcgggtctatcccccctcctagattctcttcattttcttctggaatttcaactcaggaagtgtctaagcctcctactagaccgccttctccattttcttctagattttcatcacaggacggtcttgacccctcttctagattccctttttcttctggattttcatcacatgatgggtctaatcagtcgtatggctcaacgaacccagaaaatcttctccggggtactgttcagggtggcaacagtaatcattatcaatctcagtttggaaggcactcaagtgacatggagtttgatgatcctgctatattagccatgggcaaagggctgatgcctggaattggcgattcagggctggagatgaaaaatactcctgcttttcaagcacagttgcaaccagcaagtagtgatccaagatttcagttacatgtacagccaaatgtgcagtctcgtcaaaacatgagattcacagaccctatgcaagatggtttgaaccatatgaacgataattacctggcatccagatttttagctcagaaccagggtcctctatctccttatgtgcagattccgcaacaacccagaaactcgcaggttataaatggtcactgggacgggtggagtgatttgagacaagggaataacgctcctatgtcagacatgtccaggatattatatccaagtgaagtgaacaagttgcatatgctgggttcaaatgatgtccataacagagcctttggaatgtgatcgtctcctgggataatgtgcgactttgagctgacatgttcaacttggggcgttttgtgcaagtaactggttgcacaacacatagtatacctgaggtggttaatggtgttgtgctcatgagctggcacacgactatttattgctgttggagttgaccaaaatgaaccttagttttggtccatccatttggaattaccaggttcattctcgtctatgatttgtgaagcttgaatgaaaagaaagattacgtgcctgagaagaacaaggcagctgaagttgaaatagatagagatatgtctattatgggatgtggtgtgacttgcgagcgaaagagatgaagaagattaggtgggcttggcttgatggcagcttgttttttcttgtgtcttgtacatgatgatattggtcggtggttgtatatgacttgtgatcgacggtggctgcattaacctgtagtggttgcccttgctccttcctgcctgttttgtttgcagctcctcctgttttgcatagtttatgctgattaagggaattggtgaaagtctagtgttacccatggtataataatagggaactggtttctttgttagcattacttcatttgtctaaaaaaaatccgttaaccggctctgataccaattgaaagtcgactagag

SEQ ID NO: 33157 - DNA, 4240 bp, Zea Mays
agcacagaaaatcccaaattcccaccacgcaggtcgcaggcgcacccgtctctcccttcttcctcctctccctcttctacacccgacaggcacaggcacaggcacaacgcatcgtccccctccctttccagcgccccaaccacaaggaacagccgaacaggtcggggtcaagccatcggaccttgattccgcttgccctcctgctttatcccgccgccgccgtcgtcgtctcaaccgcccactccttcctctccctgccgctcctgcgaatcgcgaaatcggagacccccggaccgccctccaatgacgaccatgagcgacgatggtgaccgcacctgcccgctctgtgccgaggagatggacatcactgaccagcagctcaagccatgcaaatgcggttatgatatttgtgtttggtgctggcaccacatcatagacatggctgagaaggaggaaacagtgggccgctgccctgcatgccgcacatgctatgacaaggacaggatcgtcaagatggctgccacttgtgacaggacagtggcagagaaaaatgcagagaagaagcacaggacccaaaaggttaagccaaaggcagcaccttcagcagcagcaacatcaactgtagaatctaagaagcatctggctagtgtcagggttatccagagaaatctggtgtatataattgggctacctgcacatttatgcaatgagagcgtacttgagtgtagggagtactttggccaatatgggaaaattttgaaggtttcagtttcccgtccgactgggcctccctctcagcaggcatcagcaaacagcaatattagtgtctatattacttatgccaaagaagaagaggccatccggtgtattcaagctgtacacaattttgtcttggaagggaaagtgttaagggcatgttttggtactacgaagtattgccatgcatggctgcgaaacatgacatgtgggaatccagattgtctctatttgcatgatgtaggcagtcaggaggatagttttactaaagatgagatcatctcagcatatacaaggactagagtccctcagatggcatctggtgtttcgcaaagacgcacaggcactgtgttgcctcctccaggagatgatttctcttacagtgcggtggtttcagccaagcatacatttaagaatggaacacttaataccaccagtcagcccagactttcacctccaaacagtagttctgggaggtccacgcttccatcagctgcctcatgggggcagcgtgatttgaatgccaggacaacagctactggagcgacatcgtcacaatctcatacaaaaccaaaatcagaatcacaaagtaatccattttcaagttcttcagtattttcctgtacaaaaacaccctcttcatggaatgatgatacaagtacagcagcaaaaatatctgaaggacagcaactgtcagaaaaagagtctagaaccttgcagccgtataagcctggtatttcaaaggaaacacaagctttatcatcactggagtcatcactggacatagacttctcaacaataccttcagcttggaatgacgatgacattgtagtaccagatgtgatgccaaaaggaagtgatgaaaatcaagttgcaaataaaaatggtgagctaacccatccagcatccaagtcactggttttatctaagaaagacataaaaatgaacattaccagcaaaactccttcagattttgtatcaagtccagcaatatctaaatcagatgtaagtactagtgatggtgaccactcactcaccaatattactcctaaatgccttgcttcaaatgctgtagaatgccaatctagtcatactgctgtggagaaaatgttggaggatattggatccaaggacactgacatggagaagctatctgctcagatatcttcagtaacattaggtggcaacgacgagattcagagtatggcaggaaatcaacaaccagatgtaatgccatgcacatctgttgatgtgctcatggatcagaattttggcagagacctagctcatcccaatcctgacgagctcttattgccttctgaaaataaggatagtattgtttcttgtcaatatagttctgataagcgtcttgattggagtttggagatgcaaaattgtagcgttactcctttaaatgatagaatggactctgcactgctcactgacaaaattcatagtagacagctggatggttcagagcaatcatcatattcatcatttgttgaatttcctagtacagtggatacctcattgtggaatgatacagaaaataacgctgcattgacgattgacaatataacttcttcacagatgcagccagggttttcttcaactgataacacttatgccttgctaaatggaggtcaagatgggctaggatgcttagggaatctaaaaataatgatgtccattgcattgcgccttcatggaaatcaggaaccgggatcaaagagtccagattttcatttgctagacaggataaccaaggaaacttgtttgattcatctctcagaaactgtggtactggtactgagcagaatttcagtttgctaccccagaattctcgaggaaatatttaccagaatggccttgcattccaatctctagagaatgaattttcaaacaataactctcctggtgtattagatatggcaactactggtacatcgatgtctaaaatatctgcccccccaggattttcggcaccaacaagagtaccccctcctggattttctactgcatttccatcccaggatagtttgaaccccactcctgtgtttccttctggaattttgtgccatggcgggtctatcccccctcctagattctcttcattttcttctggaatttcaactcaggaagtgtctaagcctcctactagaccgccttctccattttcttctagattttcatcacaggacggtcttgacccctcttctagattccctttttcttctggattttcatcacatgatgggtctaatcagtcgtatggctcaacgaacccagaaaatcttctccggggtactgttcagggtggcaacagtaatcattatcaatctcagtttggaaggcactcaagtgacatggagtttgatgatcctgctatattagccatgggcaaagggctgatgcctggaattggcgattcagggctggagatgaaaaatactcctgcttttcaagcacagttgcaaccagcaagtagtgatccaagatttcagttacatgtacagccaaatgtgcagtctcgtcaaaacatgagattcacagaccctatgcaagatggtttgaaccatatgaacgataattacctggcatccagatttttagctcagaaccagggtcctctatctccttatgtgcagattccgcaacaacccagaaactcgcaggttataaatggtcactgggacgggtggagtgatttgagacaagggaataacgctcctatgtcagacatgtccaggatattatatccaagtgaagtgaacaagttgcatatgctgggttcaaatgatgtccataacagagcctttggaatgtgatcgtctcctgggataatgtgcgactttgagctgacatgttcaacttggggcgttttgtgcaagtaactggttgcacaacacatagtatacctgaggtggttaatggtgttgtgctcatgagctggcacacgactatttattgctgttggagttgaccaaaatgaaccttagttttggtccatccatttggaattaccaggttcattctcgtctatgatttgtgaagcttgaatgaaaagaaagattacgtgcctgagaagaacaaggcagctgaagttgaaatagatagagatatgtctattatgggatgtggtgtgacttgcgagcgaaagagatgaagaagattaggtgggcttggcttgatggcagcttgttttttcttgtgtcttgtacatgatgatattggtcggtggttgtatatgacttgtgatcgacggtggctgcattaacctgtagtggttgcccttgctccttcctgcctgttttgtttgcagctcctcctgttttgcatagtttatgctgattaagggaattggtgaaagtctagtgttacccatggtataataatagggaactggtttctttgttagcattacttcatttgtctaaaaaaaatccgttaaccggctctgataccaattgaaagtcgactagag

SEQ ID NO: 33158 - DNA, 4456 bp, Zea Mays
agcacagaaaatcccaaattcccaccacgcaggtcgcaggcgcacccgtctctcccttcttcctcctctccctcttctacacccgacaggcacaggcacaggcacaacgcatcgtccccctccctttccagcgccccaaccacaaggaacagccgaacaggtcggggtcaagccatcggaccttgattccgcttgccctcctgctttatcccgccgccgccgtcgtcgtctcaaccgcccactccttcctctccctgccgctcctgcgaatcgcgaaatcggagacccccggaccgccctccaatgacgaccatgagcgacgatggtgaccgcacctgcccgctctgtgccgaggagatggacatcactgaccagcagctcaagccatgcaaatgcggttatgatatttgtgtttggtgctggcaccacatcatagacatggctgagaaggaggaaacagtgggccgctgccctgcatgccgcacatgctatgacaaggacaggatcgtcaagatggctgccacttgtgacaggacagtggcagagaaaaatgcagagaagaagcacaggacccaaaaggttaagccaaaggcagcaccttcagcagcagcaacatcaactgtagaatctaagaagcatctggctagtgtcagggttatccagagaaatctggtgtatataattgggctacctgcacatttatgcaatgagagcgtacttgagtgtagggagtactttggccaatatgggaaaattttgaaggtttcagtttcccgtccgactgggcctccctctcagcaggcatcagcaaacagcaatattagtgtctatattacttatgccaaagaagaagaggccatccggtgtattcaagctgtacacaattttgtcttggaagggaaagtgttaagggcatgttttggtactacgaagtattgccatgcatggctgcgaaacatgattgtctctatttgcatgatgtaggcagtcaggaggatagttttactaaagatgagatcatctcagcatatacaaggactagagtccctcagatggcatctggtgtttcgcaaagacgcacaggcactgtgttgcctcctccaggagatgatttctcttacagtgcggtggtttcagccaagcatacatttaagaatggaacacttaataccaccagtcagcccagactttcacctccaaacagtagttctgggaggtccacgcttccatcagctgcctcatgggggcagcgtgatttgaatgccaggacaacagctactggagcgacatcgtcacaatctcatacaaaaccaaaatcagaatcacaaagtaatccattttcaagttcttcagtattttcctgtacaaaaacaccctcttcatggaatgatgatacaagtacagcagcaaaaatatctgaaggacagcaactgtcagaaaaagagtctagaaccttgcagccgtataagcctggtatttcaaaggaaacacaagctttatcatcactggagtcatcactggacatagacttctcaacaataccttcagcttggaatgacgatgacattgtagtaccagatgtgatgccaaaaggaagtgatgaaaatcaagttgcaaataaaaatggtgagctaacccatccagcatccaagtcactggttttatctaagaaagacataaaaatgaacattaccagcaaaactccttcagattttgtatcaagtccagcaatatctaaatcagatgtaagtactagtgatggtgaccactcactcaccaatattactcctaaatgccttgcttcaaatgctgtagaatgccaatctagtcatactgctgtggagaaaatgttggaggatattggatccaaggacactgacatggagaagctatctgctcagatatcttcagtaacattaggtggcaacgacgagattcagagtatggcaggaaatcaacaaccagatgtaatgccatgcacatctgttgatgtgctcatggatcagaattttggcagagacctagctcatcccaatcctgacgagctcttattgccttctgaaaataaggatagtattgtttcttgtcaatatagttctgataagcgtcttgattggagtttggagatgcaaaattgtagcgttactcctttaaatgatagaatggactctgcactgctcactgacaaaattcatagtagacagctggatggttcagagcaatcatcatattcatcatttgttgaatttcctagtacagtggatacctcattgtggaatgatacagaaaataacgctgcattgacgattgacaatataacttcttcacagatgcagccagggttttcttcaactgataacacttatgccttgctaaatggaggtcaagatgggctaggtactgtatatacacatgataatgtttctgtatatacacatggcaatgtttctggacatcctggaatgggaagtcatcaccatagagcaatgggttcattaagaaacaatagtataggaagttttgacaagaccataagcgtaaataagtatgaaagaagaataatttctgatacgttgtcagagtttaatccatgggatgattcatattcgactgctaacaattttgctaggatgcttagggaatctaaaaataatgatgtccattgcattgcgccttcatggaaatcaggaaccgggatcaaagagtccagattttcatttgctagacaggataaccaaggaaacttgtttgattcatctctcagaaactgtggtactggtactgagcagaatttcagtttgctaccccagaattctcgaggaaatatttaccagaatggccttgcattccaatctctagagaatgaattttcaaacaataactctcctggtgtattagatatggcaactactggtacatcgatgtctaaaatatctgcccccccaggattttcggcaccaacaagagtaccccctcctggattttctactgcatttccatcccaggatagtttgaaccccactcctgtgtttccttctggaattttgtgccatggcgggtctatcccccctcctagattctcttcattttcttctggaatttcaactcaggaagtgtctaagcctcctactagaccgccttctccattttcttctagattttcatcacaggacggtcttgacccctcttctagattccctttttcttctggattttcatcacatgatgggtctaatcagtcgtatggctcaacgaacccagaaaatcttctccggggtactgttcagggtggcaacagtaatcattatcaatctcagtttggaaggcactcaagtgacatggagtttgatgatcctgctatattagccatgggcaaagggctgatgcctggaattggcgattcagggctggagatgaaaaatactcctgcttttcaagcacagttgcaaccagcaagtagtgatccaagatttcagttacatgtacagccaaatgtgcagtctcgtcaaaacatgagattcacagaccctatgcaagatggtttgaaccatatgaacgataattacctggcatccagatttttagctcagaaccagggtcctctatctccttatgtgcagattccgcaacaacccagaaactcgcaggttataaatggtcactgggacgggtggagtgatttgagacaagggaataacgctcctatgtcagacatgtccaggatattatatccaagtgaagtgaacaagttgcatatgctgggttcaaatgatgtccataacagagcctttggaatgtgatcgtctcctgggataatgtgcgactttgagctgacatgttcaacttggggcgttttgtgcaagtaactggttgcacaacacatagtatacctgaggtggttaatggtgttgtgctcatgagctggcacacgactatttattgctgttggagttgaccaaaatgaaccttagttttggtccatccatttggaattaccaggttcattctcgtctatgatttgtgaagcttgaatgaaaagaaagattacgtgcctgagaagaacaaggcagctgaagttgaaatagatagagatatgtctattatgggatgtggtgtgacttgcgagcgaaagagatgaagaagattaggtgggcttggcttgatggcagcttgttttttcttgtgtcttgtacatgatgatattggtcggtggttgtatatgacttgtgatcgacggtggctgcattaacctgtagtggttgcccttgctccttcctgcctgttttgtttgcagctcctcctgttttgcatagtttatgctgattaagggaattggtgaaagtctagtgttacccatggtataataatagggaactggtttctttgttagcattacttcatttgtctaaaaaaaatccgttaaccggctctgataccaattgaaagtcgactagag

SEQ ID NO: 33159 - DNA, 1186 bp, Zea Mays
ggagcccctaggtttgggaatccctatgataataaattggatttattcctcttttatctattgcaccgctagcgtgcaccggtgattgggtgagcaagcctttccaatctctcgctcttgtgaccctacgccaagagtgggtgaataggttttttttggaaagcacatttctattaggccctcaacactgggtccactcaagagtccgcttcccttcattcctggcctcctcagtcatctagtttcaccagtgttttggttggagggaataaagatgccatgttgtcagttgatgctcgatgcaattatgtctatgaatcatactgccaccagcacaccatcatggttgcgtcgtttgcatgcgaaaaaaggaatatctgtgccatccaacctacaaattgatgacttcatcaatggagatggatcccaaccttcactatgcttgcctgtaccaacttcttcctaccaccaccataaaaatcttcttgacatttccaaaaaccaacatcaaaaggctactgagaccgaacaatgtaaaccacctaacagtcagacacaacaaagcccaaggtttgaaaaacctcacatgccacaaccacagcccaaagccatgatttctaatgttttggggaccccttccattgatcccatggataccttgcccctcaaggcttttcgcaagaaaaagaaatccaccagcagcacattgtgcaacaaatccatcaataaagagatgcagaccaccttcatgatgtcaaacgttctagatgtcccctcatgtaattcgatagaaaccacaccttataatcccatatgcaagcagccaaaacccaataccaatgtcaccaatgctttagcaatcccctcctccactccaatgaataccatacagcctcgcaaaggtatgaaaatgaacacaaaaggaaaaaatcggtatgaaggcaagtggaatggtaatatttattacaccatcgtcgacaccagtattgataaatgcaagggcaccaaaaaatcaatttgtagcaatgacttcatggtctctagcaaaaatcctaagcagacctttgaacaacatgattccatcataaagggaaagcgaaggtttaatctcctctccaatctacaagaaaagtatgagaaggataaagaggtcaccttacaggaaaaagtagaattgagttgctag

SEQ ID NO: 33160 - DNA, 1762 bp, Zea Mays
ggagcccctaggtttgggaatccctatgataataaattggatttattcctcttttatctattgcaccgctagcgtgcaccggtgattgggtgagcaagcctttccaatctctcgctcttgtgaccctacgccaagagtgggtgaataggttttttttggaaagcacatttctattaggccctcaacactgggtccactcaagagtccgcttcccttcattcctggcctcctcagtcatctagtttcaccagtgttttggttggagggaataaagatgccatgttgtcagttgatgctcgatgcaattatgtctatgaatcatactgccaccagcacaccatcatggttgcgtcgtttgcatgcgaaaaaaggaatatctgtgccatccaacctacaaattgatgacttcatcaatggagatggatcccaaccttcactatgcttgcctgtaccaacttcttcctaccaccaccataaaaatcttcttgacatttccaaaaaccaacatcaaaaggctactgagaccgaacaatgtaaaccacctaacagtcagacacaacaaagcccaaggtttgaaaaacctcacatgccacaaccacagcccaaagccatgatttctaatgttttggggaccccttccattgatcccatggataccttgcccctcaaggcttttcgcaagaaaaagaaatccaccagcagcacattgtgcaacaaatccatcaataaagagatgcagaccaccttcatgatgtcaaacgttctagatgtcccctcatgtaattcgatagaaaccacaccttataatcccatatgcaagcagccaaaacccaataccaatgtcaccaatgctttagcaatcccctcctccactccaatgaataccatacagcctcgcaaaggtatgaaaatgaacacaaaaggaaaaaatcggtatgaaggcaagtggaatggtaatatttattacaccatcgtcgacaccagtattgataaatgcaagggcaccaaaaaatcaatttgtagcaatgacttcatggtctctagcaaaaatcctaagcagacctttgaacaacatgattccatcataaagggaaagcgaaggtttaatctcctctccaatctacaagaaaagtatgagaaggataaagaggtcaccttacaggaaaagagcacaaaagtcaagaataatcatgacactagggatacgacaagtgcagtcatagagaggccccaaagcattgatatcactaccattgacactagtatcaatggatggaaagccaccaaacacctcatccataggggacaagtttgggagattgttgatagaaaatccacaatacggcctctacacaagaaattgtctacgatgaggaagagaaaatggctacacacaaggaataatgctttttagaggtaaaggtgtcattaaaatattggatggtcaaattcaaactcaaaaaggactagatgttctcaaccagtactagaagacaatggtgacactactattcaaatacaaaccataaggaggaggaagatctcagacatcataacattaatttaaaggggaaaattaagccaatgattatgtaggaaatatattgttactttattattactgatgaattatgttgattcagttaccatcagattgtttcatcctttctattcgttaaagtcgtcattaaactaaaatagatattttaattcttgtggttgctggcaagataatgaaataatatgctttattaaaaaaata

SEQ ID NO: 33161 - DNA, 1764 bp, Zea Mays
gagcccctaggtttgggaatccctatgataataaattggatttattcctcttttatctattgcaccgctagcgtgcaccggtgattgggtgagcaagcctttccaatctctcgctcttgtgaccctacgccaagagtgggtgaataggttttttttggaaagcacatttctattaggccctcaacactgggtccactcaagagtccgcttcccttcattcctggcctcctcagtcatctagtttcaccagtgttttggttggagggaataaagatgccatgttgtcagttgatgctcgatgcaattatgtctatgaatcatactgccaccagcacaccatcatggttgcgtcgtttgcatgcgaaaaaaggaatatctgtgccatccaacctacaaattgatgacttcatcaatggagatggatcccaaccttcactatgcttgcctgtaccaacttcttcctaccaccaccataaaaatcttcttgacatttccaaaaaccaacatcaaaaggctactgagaccgaacaatgtaaaccacctaacagtcagacacaacaaagcccaaggtttgaaaaacctcacatgccacaaccacagcccaaagccatgatttctaatgttttggggaccccttccattgatcccatggataccttgcccctcaaggcttttcgcaagaaaaagaaatccaccagcagcacattgtgcaacaaatccatcaataaagagatgcagaccaccttcatgatgtcaaacgttctagatgtcccctcatgtaattcgatagaaaccacaccttataatcccatatgcaagcagccaaaacccaataccaatgtcaccaatgctttagcaatcccctcctccactccaatgaataccatacagcctcgcaaaggtatgaaaatgaacacaaaaggaaaaaatcggtatgaaggcaagtggaatggtaatatttattacaccatcgtcgacaccagtattgataaatgcaagggcaccaaaaaatcaatttgtagcaatgacttcatggtctctagcaaaaatcctaagcagacctttgaacaacatgattccatcataaagggaaagcgaaggtttaatctcctctccaatctacaagaaaagtatgagaaggataaagaggtcaccttacagaaggaaaagagcacaaaagtcaagaataatcatgacactagggatacgacaagtgcagtcatagagaggccccaaagcattgatatcactaccattgacactagtatcaatggatggaaagccaccaaacacctcatccataggggacaagtttgggagattgttgatagaaaatccacaatacggcctctacacaagaaattgtctacgatgaggaagagaaaatggctacacacaaggaataatgctttttagaggtaaaggtgtcattaaaatattggatggtcaaattcaaactcaaaaaggactagatgttctcaaccagtactagaagacaatggtgacactactattcaaatacaaaccataaggaggaggaagatctcagacatcataacattaatttaaaggggaaaattaagccaatgattatgtaggaaatatattgttactttattattactgatgaattatgttgattcagttaccatcagattgtttcatcctttctattcgttaaagtcgtcattaaactaaaatagatattttaattcttgtggttgctggcaagataatgaaataatatgctttattaaaaaaata

SEQ ID NO: 33162 - DNA, 1624 bp, Zea Mays
atgataataaattggatttattcctcttttatctattgcaccgctagcgtgcaccggtgattggagtccgcttcccttcattcctggcctcctcagtcatctagtttcaccagtgttttggttggagggaataaagatgccatgttgtcagttgatgctcgatgcaattatgtctatgaatcatactgccaccagcacaccatcatggttgcgtcgtttgcatgcgaaaaaaggaatatctgtgccatccaacctacaaattgatgacttcatcaatggagatggatcccaaccttcactatgcttgcctgtaccaacttcttcctaccaccaccataaaaatcttcttgacatttccaaaaaccaacatcaaaaggctactgagaccgaacaatgtaaaccacctaacagtcagacacaacaaagcccaaggtttgaaaaacctcacatgccacaaccacagcccaaagccatgatttctaatgttttggggaccccttccattgatcccatggataccttgcccctcaaggcttttcgcaagaaaaagaaatccaccagcagcacattgtgcaacaaatccatcaataaagagatgcagaccaccttcatgatgtcaaacgttctagatgtcccctcatgtaattcgatagaaaccacaccttataatcccatatgcaagcagccaaaacccaataccaatgtcaccaatgctttagcaatcccctcctccactccaatgaataccatacagcctcgcaaaggtatgaaaatgaacacaaaaggaaaaaatcggtatgaaggcaagtggaatggtaatatttattacaccatcgtcgacaccagtattgataaatgcaagggcaccaaaaaatcaatttgtagcaatgacttcatggtctctagcaaaaatcctaagcagacctttgaacaacatgattccatcataaagggaaagcgaaggtttaatctcctctccaatctacaagaaaagtatgagaaggataaagaggtcaccttacaggaaaagagcacaaaagtcaagaataatcatgacactagggatacgacaagtgcagtcatagagaggccccaaagcattgatatcactaccattgacactagtatcaatggatggaaagccaccaaacacctcatccataggggacaagtttgggagattgttgatagaaaatccacaatacggcctctacacaagaaattgtctacgatgaggaagagaaaatggctacacacaaggaataatgctttttagaggtaaaggtgtcattaaaatattggatggtcaaattcaaactcaaaaaggactagatgttctcaaccagtactagaagacaatggtgacactactattcaaatacaaaccataaggaggaggaagatctcagacatcataacattaatttaaaggggaaaattaagccaatgattatgtaggaaatatattgttactttattattactgatgaattatgttgattcagttaccatcagattgtttcatcctttctattcgttaaagtcgtcattaaactaaaatagatattttaattcttgtggttgctggcaagataatgaaataatatgctttattaaaaaaata

SEQ ID NO: 33163 - DNA, 1014 bp, Zea Mays
taggccctcaacactgggtccactcaagagagtccgcttcccttcattcctggcctcctcagtcatctagtttcaccagtgttttggttggagggaataaagatgccatgttgtcagttgatgctcgatgcaattatgtctatgaatcatactgccaccagcacaccatcatggttgcgtcgtttgcatgcgaaaaaaggaatatctgtgccatccaacctacaaattgatgacttcatcaatggagatggatcccaaccttcactatgcttgcctgtaccaacttcttcctaccaccaccataaaaatcttcttgacatttccaaaaaccaacatcaaaaggctactgagaccgaacaatgtaaaccacctaacagtcagacacaacaaagcccaaggtttgaaaaacctcacatgccacaaccacagcccaaagccatgatttctaatgttttggggaccccttccattgatcccatggataccttgcccctcaaggcttttcgcaagaaaaagaaatccaccagcagcacattgtgcaacaaatccatcaataaagagatgcagaccaccttcatgatgtcaaacgttctagatgtcccctcatgtaattcgatagaaaccacaccttataatcccatatgcaagcagccaaaacccaataccaatgtcaccaatgctttagcaatcccctcctccactccaatgaataccatacagcctcgcaaaggtatgaaaatgaacacaaaaggaaaaaatcggtatgaaggcaagtggaatggtaatatttattacaccatcgtcgacaccagtattgataaatgcaagggcaccaaaaaatcaatttgtagcaatgacttcatggtctctagcaaaaatcctaagcagacctttgaacaacatgattccatcataaagggaaagcgaaggtttaatctcctctccaatctacaagaaaagtatgagaaggataaagaggtcaccttacaggaaaaagtagaattgagttgctag

SEQ ID NO: 33164 - DNA, 2263 bp, Zea Mays
ctcagattgaatcatgttcacatggtagggacgccactaaaaacttgtccagttagagatgcggtgagaggattgaaattgaataaaaagggatggcagccaaaagggattatcctcttcaacctcctgggtaactaaaaattccccggcatctcgtgctgtcttctctctctcctttccccttccccggctccccgcggcccgcaccgctgtgttgtgctggttggttccgtcgcgtcgcttgcttagatcagatctctccttctctccccggatcccgactgcctccctcccccttccacctcaggctagccgagagagatctcggcaccgccgcccgttgccatggcggcggccaacgcccccatcgccatgcgcgaggcgctcacgctcacgagcctgggcatcgcgccgcagttcgtcaccttcacccacgtcaccatggagtcggagaagtacatctgcgtccgcgagacctccccgcagaacagcgtcgtcatcatcgacatggccatgcccatgcagccgctccgacggcccatcaccgccgactccgccctcatgaaccccaacaccaggatcctcgccctcaaagcccaaatacctggaacaacacaggatcacctccaaatattcaacatcgaggctaagactaaggtcaagtcccaccagatgccggagcaggttgtattctggaaatggatcactcccaaattgttgggtttagtgacacaaacatctgtttaccactggtcgattgaaggtgattctgagcccttgaagatgtttgataggacagctaatctggcaaacaatcagatcatcaactatcgatgtgacccagcggagaagtggcttgtacttattggaattgcacctggagccccagagaggccacaactggtgaagggaaatatgcaacttttttctgtcgatcaacagcgtagccaggcacttgaagcccacgcagcatcttttgcaacatttaaggttgttggtaatgagaatccatcaactcttatttgtttcgcctcaaagacaactaatgctggacagatcacttcaaagttgcatgttattgaactgggtgcacagccagggaaacctggtttttctaagaaacaagccgacctcttcttccccccagatttccaggatgattttcctgtagctatgcaggtttcacaaaagtatgggcttatctatgtaattactaagcttggccttttgtttgtatatgacttggaaactgccgcggcagtttacagaaatagaatcagtccagaccctatattcttgacggcggaatcttcctctactggtggattttatgccatcaacagaagagggcaggttttacatgccacagttaatgatgcaactgttgtaccttttgtcagtggccaattaaacaaccttgagcttgctgtgaatctggccaagagagctaaccttccaggcgctgagaacttggttgtgcaaagattccaggaactgtttgcacagacaaaatacaaggaagcagctgagcttgccgcagaatctccccagggtctcctgaggacgcctgagactgtggcaaaatttcagagtgttcctgtgcaagctgggcaaacgcccccactcttgcagtactttggcacattgcttactcgagggaagctcaatgcctttgagtctcttgagctatctcgacttgtcgtcaatcagaacaaaaagaatcttcttgaaaactggttggcagaagataagctggagtgtagcgaagaactaggagaccttgtcaagactgtggacaatgatcttgcactgaaaatatacataaaggctagggcaacccctaaagttgttgctgcttttgctgaaaggagggagtttgacaagatactgatatactcaaagcaggttgggtacactccagattatctcttcctcctccagaccatcttgcgtacagatccacagggagctgtgaactttgctcttatgatgtcacaaatggagggaggctgcccagtagattataatacaataactgatcttttccttcagagaaatatgatacgggaggcaacagcttttctgttggatgttctgaaaccaaacttgccagagcatgcttttcttcaaaccaaggttttggagataaacttagtgacttacccgaatgttgctgatgccattcttgctaatggtatgttcagtcattatgatcgccctcgtattgctcagctgtgtgaaaaggctgggttgtacttgcgag

SEQ ID NO: 33165 - DNA, 1223 bp, Zea Mays
aaaaattccccggcatctcgtgctgtcttctctctctcctttccccttccccggctccccgcggcccgcaccgctgtgttgtgctggttggttccgtcgcgtcgcttgcttagatcagatctctccttctctccccggatcccgactgcctccctcccccttccacctcaggctagccgagagagatctcggcaccgccgcccgttgccatggcggcggccaacgcccccatcgccatgcgcgaggcgctcacgttcgtcaccttcacccacgtcaccatggagtcggagaagtacatctgcgtccgcgagacctccccgcagaacagcgtcgtcatcatcgacatggccatgcccatgcagccgctccgacggcccatcaccgccgactccgccctcatgaaccccaacaccaggatcctcgccctcaaagcccaaatacctggaacaacacaggatcacctccaaatattcaacatcgaggctaagactaaggtcaagtcccaccagatgccggagcaggttgtattctggaaatggatcactcccaaattgttgggtttagtgacacaaacatctgtttaccactggtcgattgaaggtgattctgagcccttgaagatgtttgataggacagctaatctggcaaacaatcagatcatcaactatcgatgtgacccagcggagaagtggcttgtacttattggaattgcacctggagccccagagaggccacaactggtgaagggaaatatgcaacttttttctgtcgatcaacagcgtagccaggcacttgaagcccacgcagcatcttttgcaacatttaaggttgttggtaatgagaatccatcaactcttatttgtttcgcctcaaagacaactaatgctggacagatcacttcaaagttgcatgttattgaactgggtgcacagccagggaaacctggtttttctaagaaacaagccgacctcttcttccccccagatttccaggatgattttcctgtagctatgcaggtttcacaaaagtatgggcttatctatgtaattactaagcttggccttttgtttgtatatgacttggaaactgccgcggcagtttacagaaatagaatcagtccagaccctatattcttgacggcggaatcttcctctactggtggattttatgccatcaacagaagagggcaggttttacatgccacagttaatgatgcaactgtt

SEQ ID NO: 33166 - DNA, 531 bp, Zea Mays
gcaaaactacctgatgcccgtccactgattaatgtttgtgatcgctttggttttgtgccagatctcactcactatctgtacacaaacaacatgcttcgatatatcgaaggctatgttcagaaggtgaatcccgggaatgctccattggtagtggggcaattacttgatgatgaatgccctgaagattttatcaagggtttgatcctctctgttcgttctctcctccctgttgagcctttggttgatgaatgtgagaagaggaaccgcctacgtttgctcactcaattcttggagcacttagtgagtgaaggtagccaagatgtgcatgtccataatgctcttggtaaaatcatcattgacagcaacaacaatcctgagcatttccttactaccaacccattttacgactctcgtgttgtgggtaaatattgtgaaaagcgggatcctacacttgctgttgttgcttacagacgtgggcagtgtgacgatgaacttattaacgtcactaacaagaattcgttattcaagctg

SEQ ID NO: 33167 - DNA, 1753 bp, Zea Mays
caaaatgttggtgaccgtctgtatgacgaagaactatatgaagctgcaaaaatcatctatgctttcatctcaaactgggctaagctggctgttaccctggttaagctgaagcagtttcaaggtgctgtggatgctgctcgcaaggctaacagtgccaaaacatggaaggaggtctgctttgcttgtgttgacgccgaggagttccgtcttgcacaaatttgtggtctcaatattattgttcaggttgatgacttggaagaagtcagtgagtactaccaaaatagaggatgcttcaatgaactcattgctctcatggagagtggtcttggacttgaacgtgcacacatgggcatcttcacagaattgggagttctatatgctagataccgctctgagaagcttatggaacacatcaaacttttctccacacgtctcaatattcctaagcttattcgagcttgtgatgaacagcagcactggaaagaacttacctacctgtacatacaatatgatgaatttgacaatgctgccaccactattatgaaccactctccagatgcatgggatcatatgcagttcaaggatgtttgtgttaaagttgcaaatgttgagctatactacaaggcagttcacttctatttgcaggagcatcctgatctcatcaatgatatgctgaatgtgcttgcacttcgtttagatcataccagagttgtagacataatgcgcaaggctggtcaattgcatcttgtgaaaccatatatggttgcagttcagagtaacaatgtctctgctgtgaatgaagccttgaacgaactttatgttgaagaggaagactacgagagactccgtgaatcagttgatatgcatgacaactttgaccaaataggtcttgcccagaagcttgagaagcatgaattgctggagatgaggaggattgctgcctacatttacaagaaggctggcaggtggaagcaatccattgctctatcaaagaaagataacatgtacaaggattgtatggagacatgctcacaatctggtgaccgtgaactgtcagaggacttgcttgtctatttcatcgagcagttcatccgtgaatacactagcaaggtggatgatttagtgaaggacaaaatcgagtcacagaatgaagaaagagccaaagagaaggaggagaaagatcttgtggctcagcagaacatgtatgcgcaactgcttcctcttgccctgcctgctccgccaatgcccggcatgggtggccctccacctccgatgggcggaatgggcatgcctccgatgggcgggatgggcatgccgccgatgggccctggtccgatgccagcattcgggatgccaccaatgggaagctactgagatgttttttttggcagagagcttagatgatgatttgatatgttcctgtgtaagcagaggcggaaacctcattggagttgtagatggttacattttggaattaatattctttatggtaccaggaaatttttggcgagtgaaatcttggccagagtcatcggataggacggggatgattaggttggttgagcatgagctggtgaaagctggtaccatttgtatagtgtgatgaaatctttgtagacattttgcttgtgtaataataatacttgttcgcacagcgaaggacaaacaaatgtatgctgacttgtgacgtcctgttcattgcaatttgttagtatgtgttttcttggaagaagacaataacattcgatagata

SEQ ID NO: 33168 - DNA, 2745 bp, Zea Mays
caacactgagtcaaagagaggctgaatggtctagcgatattatgcattgagaagaagttattggacgatatcgatagcataccgatgtctctgtatcaaggaatattcgaagaaactttataagatgatccaatatgccaacttgccagtgtcagtgcaatggtgactagcaaatcctcgtggagccaggttgtaaaaaataccaggccgacaaacctgtccgttgctgcaagaaacctccaaccacaggaccttggagccgtgatatttggttgcacaaacagtaccattcaagagtgtcactcacggcaactttttggcttgccaaaaacacatatttcatatgtacgaaacattaaggaaggactacctctcttcctcttcaattatgatgatcgaagattgtatggtatttacgaagcttcagggaatggaaaattctgtcctgaatcaaatgcatggtcacaagatagcaagggcaaaacaagctatcctgcccaggttgcaatgcgggtaaaggtgtggtgttttccgctagcagagaatcagttcagaaatgcaattatagccaattactaccagaaaattcccggtgtccctggccagaagcttcattttttcaagtttgaattggatcatgctcaaacacgtgttttgatggatatgtttactccttctccttctcccaacagtttctggacgccccctgctgcagcaccagctgacgagcatgcgaaagaattagtgttgtcacctggatgggcaccagagtgtgaagggaacaataacctcaaatcagaaaaggttgtcaagtcatatgcagacatagtgaagaagaacacatttgtggaagttgggacaagagatgtggatgtggaacatgcaggctcaggtgatgaatcttctggtggtttcgatgaactggattgtcagtacacaccaacagagagggaggactacgctctatcagatagggtggttcaagtgcaacaacagtaccctgataagcaggcagaagtgcttagctttgatcgggttttacaagggcgcatcacttttcctggtcagcagtggcattctgatttttatgccaatactacccaaactgaggataacgatgcatatagctgcgagtatgcccaagaggtcaaatatgcaattctggatggcagctctaatttgccagaaaccttagattctgaagttgataaactgtccctggggcattctgatttgctggtgcagttgttggactctgaatcatgcacagaagctaagctgattgatgcagtgaaacagttatctggacgaatagaggtgatggagaagaagcaggcttggtccaacaaagaagtcaaacatctacaagggatgaatgagaggttactgaaaagaattgttgaactaaagggaaccgttatgacattgaattctaaaatagatcctttaaccctagatgattcacttaaccagtttgtagaacaatgtttgggttcagaagatgtcatttatttagttggtggttttgatggcttctcatctttgccatcactagactctttttccccttcattggacatactaacaccccttaaaccaatggctgttggcaagtcatattcctcaactgttgcactagagggcaagatatttgttcttggtggtggtgatggtgcttgctggtttgatacagttgactgttatgaccgaagccgtgatgattggtccacatgcccatcgttgacttgtgacaaggggagccttgctggggttagtgtcaacgggagaatctatgcatttggtggtggagatggaaccaagtgtttctctgatgttgaaatgtttgatcctgtgcatggaaagtggataaagaatcaacctatgctggaaaagcgctttgctctagctggtgtagcactaaatggtgcgatttatgctgttggtggcttcaatggtgttcaatatttgagctgtgctgaaagacttgatcctcgggagcctaactggaaaatgctaccaaagatgagtgcaggaaggggctgtcatacacttacagttcttaatgagaagatattctcgattggtggatatgacactagggctaaagcaatggtgtctactgttgaggtgtatgagccaaggatgccatcgtgggtgatggttgaacccatgaactacaccagaggatatcattcttcagctgtgctcggtggctcaatattcacctttggtggggtgaaaggtgaagcagacacaatcttggatgtggtggaacactacaaggaagggtgtggctggatgacaacgggattgaagtcgattggcagaagatgctactgctcagcgattgttctctgactgtaactgccttaaaaccaagtgagaatgaggagactgataataggtaaaactaatatattaatattaggtaaaaactaagaaggctcttgcttagcctgaactgacaacactagacacgatggacctcgtagtttctgaatcggcgaactgtaaaacaaacattgagctgtttgtgttgtccgacactggatggtgggtggatgcatgcatgagtgaatcggtactgaactgatgtagagatgacacttccatggatgaatatccaagtatttgactctgtatgttgagctttttctctttccggttccagctttttactaaagcagcttgcctaaacaaaaaaaggcactgtaaatggacctgtgacatttacctgaatttgtt

SEQ ID NO: 33169 - DNA, 2482 bp, Zea Mays
tgtctctgtatcaaggaatattcgaagaaactttataagatgatccaatatgccaagcttgccaaaaacacatatttcatatgtacgaaacattaaggaaggactacctctcttcctcttcaattatgatgatcgaagattgtatggtatttacgaagcttcagggaatggaaaattctgtcctgaatcaaatgcatggtcacaagatagcaagggcaaaacaagctatcctgcccaggttgcaatgcgggtaaaggtgtggtgttttccgctagcagagaatcagttcagaaatgcaattatagccaattactaccagaaaattcccggtgtccctggccagaagcttcattttttcaagtttgaattggatcatgctcaaacacgtgttttgatggatatgtttactccttctccttctcccaacagtttctggacgccccctgctgcagcaccagctgacgagcatgcgaaagaattagtgttgtcacctggatgggcaccagagtgtgaagggaacaataacctcaaatcagaaaaggttgtcaagtcatatgcagacatagtgaagaagaacacatttgtggaagttgggacaagagatgtggatgtggaacatgcaggctcaggtgatgaatcttctggtggtttcgatgaactggattgtcagtacacaccaacagagagggaggactacgctctatcagatagggtggttcaagtgcaacaacagtaccctgataagcaggcagaagtgcttagctttgatcgggttttacaagggcgcatcacttttcctggtcagcagtggcattctgatttttatgccaatactacccaaactgaggataacgatgcatatagctgcgagtatgcccaagaggtcaaatatgcaattctggatggcagctctaatttgccagaaaccttagattctgaagttgataaactgtccctggggcattctgatttgctggtgcagttgttggactctgaatcatgcacagaagctaagctgattgatgcagtgaaacagttatctggacgaatagaggtgatggagaagaagcaggcttggtccaacaaagaagtcaaacatctacaagggatgaatgagaggttactgaaaagaattgttgaactaaagggaaccgttatgacattgaattctaaaatagatcctttaaccctagatgattcacttaaccagtttgtagaacaatgtttgggttcagaagatgtcatttatttagttggtggttttgatggcttctcatctttgccatcactagactctttttccccttcattggacatactaacaccccttaaaccaatggctgttggcaagtcatattcctcaactgttgcactagagggcaagatatttgttcttggtggtggtgatggtgcttgctggtttgatacagttgactgttatgaccgaagccgtgatgattggtccacatgcccatcgttgacttgtgacaaggggagccttgctggggttagtgtcaacgggagaatctatgcatttggtggtggagatggaaccaagtgtttctctgatgttgaaatgtttgatcctgtgcatggaaagtggataaagaatcaacctatgctggaaaagcgctttgctctagctggtgtagcactaaatggtgcgatttatgctgttggtggcttcaatggtgttcaatatttgagctgtgctgaaagacttgatcctcgggagcctaactggaaaatgctaccaaagatgagtgcaggaaggggctgtcatacacttacagttcttaatgagaagatattctcgattggtggatatgacactagggctaaagcaatggtgtctactgttgaggtgtatgagccaaggatgccatcgtgggtgatggttgaacccatgaactacaccagaggatatcattcttcagctgtgctcggtggctcaatattcacctttggtggggtgaaaggtgaagcagacacaatcttggatgtggtggaacactacaaggaagggtgtggctggatgacaacgggattgaagtcgattggcagaagatgctactgctcagcgattgttctctgactgtaactgccttaaaaccaagtgagaatgaggagactgataataggtaaaactaatatattaatattaggtaaaaactaagaaggctcttgcttagcctgaactgacaacactagacacgatggacctcgtagtttctgaatcggcgaactgtaaaacaaacattgagctgtttgtgttgtccgacactggatggtgggtggatgcatgcatgagtgaatcggtactgaactgatgtagagatgacacttccatggatgaatatccaagtatttgactctgtatgttgagctttttctctttccggttccagctttttactaaagcagcttgcctaaacaaaaaaaggcactgtaaatggacctgtgacatttacctgaatttgtt

SEQ ID NO: 33170 - DNA, 2850 bp, Zea Mays
atcagtttcacgatccctcctcatcaaccacacttccattctcttctcagttctcaccgtgcaggcgtagtgcgtagtgtgcagaggccaggacagaaaagagaggcagcgcagtatccatccaaccacgccgtcttccttccgccgcgagggcttccgctgcagcgcgatcgccgcattccaccctcttccttcctgggacagcagggctttggcactcgactcctccgccacagctccaaccaaagcaaagcggttttcaagcttgccagtgtcagtgcaatggtgactagcaaatcctcgtggagccaggttgtaaaaaataccaggccgacaaacctgtccgttgctgcaagaaacctccaaccacaggaccttggagccgtgatatttggttgcacaaacagtaccattcaagagtgtcactcacggcaactttttggcttgccaaaaacacatatttcatatgtacgaaacattaaggaaggactacctctcttcctcttcaattatgatgatcgaagattgtatggtatttacgaagcttcagggaatggaaaattctgtcctgaatcaaatgcatggtcacaagatagcaagggcaaaacaagctatcctgcccaggttgcaatgcgggtaaaggtgtggtgttttccgctagcagagaatcagttcagaaatgcaattatagccaattactaccagaaaattcccggtgtccctggccagaagcttcattttttcaagtttgaattggatcatgctcaaacacgtgttttgatggatatgtttactccttctccttctcccaacagtttctggacgccccctgctgcagcaccagctgacgagcatgcgaaagaattagtgttgtcacctggatgggcaccagagtgtgaagggaacaataacctcaaatcagaaaaggttgtcaagtcatatgcagacatagtgaagaagaacacatttgtggaagttgggacaagagatgtggatgtggaacatgcaggctcaggtgatgaatcttctggtggtttcgatgaactggattgtcagtacacaccaacagagagggaggactacgctctatcagatagggtggttcaagtgcaacaacagtaccctgataagcaggcagaagtgcttagctttgatcgggttttacaagggcgcatcacttttcctggtcagcagtggcattctgatttttatgccaatactacccaaactgaggataacgatgcatatagctgcgagtatgcccaagaggtcaaatatgcaattctggatggcagctctaatttgccagaaaccttagattctgaagttgataaactgtccctggggcattctgatttgctggtgcagttgttggactctgaatcatgcacagaagctaagctgattgatgcagtgaaacagttatctggacgaatagaggcttggtccaacaaagaagtcaaacatctacaagggatgaatgagaggttactgaaaagaattgttgaactaaagggaaccgttatgacattgaattctaaaatagatcctttaaccctagatgattcacttaaccagtttgtagaacaatgtttgggttcagaagatgtcatttatttagttggtggttttgatggcttctcatctttgccatcactagactctttttccccttcattggacatactaacaccccttaaaccaatggctgttggcaagtcatattcctcaactgttgcactagagggcaagatatttgttcttggtggtggtgatggtgcttgctggtttgatacagttgactgttatgaccgaagccgtgatgattggtccacatgcccatcgttgacttgtgacaaggggagccttgctggggttagtgtcaacgggagaatctatgcatttggtggtggagatggaaccaagtgtttctctgatgttgaaatgtttgatcctgtgcatggaaagtggataaagaatcaacctatgctggaaaagcgctttgctctagctggtgtagcactaaatggtgcgatttatgctgttggtggcttcaatggtgttcaatatttgagctgtgctgaaagacttgatcctcgggagcctaactggaaaatgctaccaaagatgagtgcaggaaggggctgtcatacacttacagttcttaatgagaagatattctcgattggtggatatgacactagggctaaagcaatggtgtctactgttgaggtgtatgagccaaggatgccatcgtgggtgatggttgaacccatgaactacaccagaggatatcattcttcagctgtgctcggtggctcaatattcacctttggtggggtgaaaggtgaagcagacacaatcttggatgtggtggaacactacaaggaagggtgtggctggatgacaacgggattgaagtcgattggcagaagatgctactgctcagcgattgttctctgactgtaactgccttaaaaccaagtgagaatgaggagactgataataggtaaaactaatatattaatattaggtaaaaactaagaaggctcttgcttagcctgaactgacaacactagacacgatggacctcgtagtttctgaatcggcgaactgtaaaacaaacattgagctgtttgtgttgtccgacactggatggtgggtggatgcatgcatgagtgaatcggtactgaactgatgtagagatgacacttccatggatgaatatccaagtatttgactctgtatgttgagctttttctctttccggttccagctttttactaaagcagcttgcctaaacaaaaaaaggcactgtaaatggacctgtgacatttacctgaatttgtt

SEQ ID NO: 33171 - DNA, 2687 bp, Zea Mays
agtttcacgatccctcctcatcaaccacacttccattctcttctcagttctcaccgtgcaggcgtagtgcgtagtgtgcagaggccaggacagaaaagagaggcagcgcagtatccatccaaccacgccgtcttccttccgccgcgagggcttccgctgcagcgcgatcgccgcattccaccctcttccttcctgggacagcagggctttggcactcgactcctccgccacagctccaaccaaagcaaagcggttttcaaggcttgccaaaaacacatatttcatatgtacgaaacattaaggaaggactacctctcttcctcttcaattatgatgatcgaagattgtatggtatttacgaagcttcagggaatggaaaattctgtcctgaatcaaatgcatggtcacaagatagcaagggcaaaacaagctatcctgcccaggttgcaatgcgggtaaaggtgtggtgttttccgctagcagagaatcagttcagaaatgcaattatagccaattactaccagaaaattcccggtgtccctggccagaagcttcattttttcaagtttgaattggatcatgctcaaacacgtgttttgatggatatgtttactccttctccttctcccaacagtttctggacgccccctgctgcagcaccagctgacgagcatgcgaaagaattagtgttgtcacctggatgggcaccagagtgtgaagggaacaataacctcaaatcagaaaaggttgtcaagtcatatgcagacatagtgaagaagaacacatttgtggaagttgggacaagagatgtggatgtggaacatgcaggctcaggtgatgaatcttctggtggtttcgatgaactggattgtcagtacacaccaacagagagggaggactacgctctatcagatagggtggttcaagtgcaacaacagtaccctgataagcaggcagaagtgcttagctttgatcgggttttacaagggcgcatcacttttcctggtcagcagtggcattctgatttttatgccaatactacccaaactgaggataacgatgcatatagctgcgagtatgcccaagaggtcaaatatgcaattctggatggcagctctaatttgccagaaaccttagattctgaagttgataaactgtccctggggcattctgatttgctggtgcagttgttggactctgaatcatgcacagaagctaagctgattgatgcagtgaaacagttatctggacgaatagaggtgatggagaagaagcaggcttggtccaacaaagaagtcaaacatctacaagggatgaatgagaggttactgaaaagaattgttgaactaaagggaaccgttatgacattgaattctaaaatagatcctttaaccctagatgattcacttaaccagtttgtagaacaatgtttgggttcagaagatgtcatttatttagttggtggttttgatggcttctcatctttgccatcactagactctttttccccttcattggacatactaacaccccttaaaccaatggctgttggcaagtcatattcctcaactgttgcactagagggcaagatatttgttcttggtggtggtgatggtgcttgctggtttgatacagttgactgttatgaccgaagccgtgatgattggtccacatgcccatcgttgacttgtgacaaggggagccttgctggggttagtgtcaacgggagaatctatgcatttggtggtggagatggaaccaagtgtttctctgatgttgaaatgtttgatcctgtgcatggaaagtggataaagaatcaacctatgctggaaaagcgctttgctctagctggtgtagcactaaatggtgcgatttatgctgttggtggcttcaatggtgttcaatatttgagctgtgctgaaagacttgatcctcgggagcctaactggaaaatgctaccaaagatgagtgcaggaaggggctgtcatacacttacagttcttaatgagaagatattctcgattggtggatatgacactagggctaaagcaatggtgtctactgttgaggtgtatgagccaaggatgccatcgtgggtgatggttgaacccatgaactacaccagaggatatcattcttcagctgtgctcggtggctcaatattcacctttggtggggtgaaaggtgaagcagacacaatcttggatgtggtggaacactacaaggaagggtgtggctggatgacaacgggattgaagtcgattggcagaagatgctactgctcagcgattgttctctgactgtaactgccttaaaaccaagtgagaatgaggagactgataataggtaaaactaatatattaatattaggtaaaaactaagaaggctcttgcttagcctgaactgacaacactagacacgatggacctcgtagtttctgaatcggcgaactgtaaaacaaacattgagctgtttgtgttgtccgacactggatggtgggtggatgcatgcatgagtgaatcggtactgaactgatgtagagatgacacttccatggatgaatatccaagtatttgactctgtatgttgagctttttctctttccggttccagctttttactaaagcagcttgcctaaacaaaaaaaggcactgtaaatggacctgtgacatttacctgaatttgtt

SEQ ID NO: 33172 - DNA, 1259 bp, Zea Mays
gcggccctgctctgcgctgacttctctcccgtatctgtcgtaactcgtaacagatcgtcggcgcagtaaccatctcgtcgaatccgatggccctcggcgacagcgccaccacgccgccggtggccaagctctccatctccggcgcggccctcgcggcgctcctgcaccgctgcgcggccgcagccggcgactgcgacggcctcctcttcggccgcgcctcgcacctgcccgcgccgccggccgctctctccgactacgacgacgccgccgcggcggcggcccctcccgcccccgcgctctccatctccgtctccggccactgctccctctcccacccctcatccctctccgactccctcggccgcttccaaccccactcctcccccgcccccgcctccgcccccgcccccatcggcttcttctcctcccgccgccgcaccgcgctccgcccctccatgcgcgaggccgtcctcgctcactccctctccgcaaccctagcctccgcccacccgctcctcctcatcctcgtctccccctccgcctcccccaaccactccacccactcctacgactaccgcgccttcctcctccacggcggccgcctcgtcccggcctcgctcgccatcgtcaacgtcgggcccggattccgggaccagtaccacgccttcaccgccgagtcgcccatgccctggctgccgtcggctccggcgcctgggcacgctcacaccctcgtggagcagaaggcggtggatgaaatggtggacgggtttgggatcggaaggctgcaggagctcctcggcgctgctgcggggcaggcggccgagattgatgacatgtacgcagggatgctcagcaagctggagaagctcgccagggaggtggaaaagagcaatctccgtgtgctcgagcaggcttgctgcttttcttcgcgacaagcaaatgcagtagatagtgagttgaggagcaaagatcgacaaaatggtaaaggcctatttatgtggtttcagactccgtacttgtttctatatggtttgttcgttacatattggcagcactgtttacagtagggaccctgtgaaaattacctcataagctggggcttcttagggctttatctgtctggtgccaaattcttaaactaccataagtgcttgctccctgctatacgttgttattagagcatctccaacaacaaaccctaaaatagagtcctaaaatttgaaataggaccatatttagaatatttagggtctcaaaag

SEQ ID NO: 33173 - DNA, 1388 bp, Zea Mays
cacccccgcatcgcctcacgcctctttctttccgattctaaccccgccgaggacacccgccgtaccgtaccttctgtccaatcggattccatacggacgccgagtttaccgtcctacccctgacggcgactttcccccaccagtgtcgtaggggcaaatacggaaaacacaggcacagcccgcgttttccccagtacgacacgctgcaggggctgcatcgtcatctcccctccccgcctcaccacatcccaccgcgtctcctccttgtcccgcaccttctccatctccatcgccggcctccatttcttgcctcccgtgccagccagtcactctcgtccgccgcagatcgagaagccaccaccaccaccaccaccaccgcatggccatggcagcccagcagcaccggcaccacaagcgccgccgcatcgccctctccccctccccgtccccgtccctcgcgcccatccccggcgcccccacgccgccgctcgactcgctggccgacgagctcctcttcctggtcctggaccgcgtggcccaggccgacccgcgggcgctcaagtccttcgcgctggcctcccgcgcctgccacgccgcggagtcacggcaccgccggacgctccgcccgctccgcgcggacctcctgcccgccgcgctggcgcggtacccgtccgcgacccgcctcgacctcaccctctgcgcgcgcgtccccgacgccgccctcgcctccgccgccgtctccggctcctccgccctccgcgccgtcgacctctcccgctcccgcgggttcggcgccgcgggcgtcgccgcgctcgccgccgcgtgcccggacctcgccgacctcgacctctccaatggggtccacctcggggacgccgcggcggccgaggtagcgcgggccagggcgctgcggaggctctcgctggtccgctggaagccgctcaccgacatgggcctcggatgcgtcgccgtcgggtgcacggagctgaaggacctctcgctcaagtggtgccttggactcacggatctggggatccagctcctcgccctcaagtgcaggaagctcaccagcctggatctctcctacaccatgatcacaaaggatagcttgccttctatcatgaagctacccaatcttcaagagctgacactggtggggtgtattggaatcgatgatggtgctcttgttagtcttgagagagaatgcagtaaatcactacaggtgcttgatatgtctcagtgtcagaatatcaccgatgtaggagtttcatccatcctgaagtcggtacccaatctattggaactggatctttcatactgctgtcctgttactccttctatggtgagaaacttccagaagcttcctaaactgcaggccctgaagctgg

SEQ ID NO: 33174 - DNA, 2803 bp, Zea Mays
ccatttcttgcctcccgtgccagccagtcactctcgtccgccgcagatcgagaagccaccaccaccaccaccaccaccgcatggccatggcagcccagcagcaccggcaccacaagcgccgccgcatcgccctctccccctccccgtccccgtccctcgcgcccatccccggcgcccccacgccgccgctcgactcgctggccgacgagctcctcttcctggtcctggaccgcgtggcccaggccgacccgcgggcgctcaagtccttcgcgctggcctcccgcgcctgccacgccgcggagtcacggcaccgccggacgctccgcccgctccgcgcggacctcctgcccgccgcgctggcgcggtacccgtccgcgacccgcctcgacctcaccctctgcgcgcgcgtccccgacgccgccctcgcctccgccgccgtctccggctcctccgccctccgcgccgtcgacctctcccgctcccgcgggttcggcgccgcgggcgtcgccgcgctcgccgccgcgtgcccggacctcgccgacctcgacctctccaatggggtccacctcggggacgccgcggcggccgaggtagcgcgggccagggcgctgcggaggctctcgctggtccgctggaagccgctcaccgacatgggcctcggatgcgtcgccgtcgggtgcacggagctgaaggacctctcgctcaagtggtgccttggactcacggatctggggatccagctcctcgccctcaagtgcaggaagctcaccagcctggatctctcctacaccatgatcacaaaggatagcttgccttctatcatgaagctacccaatcttcaagagctgacactggtggggtgtattggaatcgatgatggtgctcttgttagtcttgagagagaatgcagtaaatcactacaggtgcttgatatgtctcagtgtcagaatatcaccgatgtaggagtttcatccatcctgaagtcggtacccaatctattggaactggatctttcatactgctgtccttcttgtagccatgtttccagtggagcactccaactgattgggaagcactgttctcacttggaagagttggaccttactgacagtgatttggatgatgaaggattgaaagctcttgccagatgtagcgaactttcgagcctaaaaattggcatttgcttgaagataagtgatgaaggtcttagccacattggaaggtgtggagttattagcgatgatggaattattcaaattgcgcagggttgtccgatgctagagtctatcaacctatcatactgcacagaaataacagaccgttcactgatttcactctcaaaatgcgcaaagctgaatactttggagatccgtggctgccccagtgtttcatcgattgggctctcagaaatagcgatggggtgcaggctgctttccaagcttgatattaagaaatgcttcgggattaatgatgttggaatgctttacctttcccagttcgctcatagcctccgtcagataaacttgtcatactgttcagtcaccgatgttgggctcctttccctttctagcatatccggcctgcagaacatgaccatcgtccatttggcgggtataacacccaatggcttgacagcaactcttatggtttgcggtgggttgacgaaagtgaagcttcatgaagcattcagatccatgatgcctcctcatacgataaaaaatgttgaggcacgtggctgtgttttccagtggatcgataaaccgttcaaggttgaggtggagccttgtgatgtatggaagcaacagtcacaagatgtgcttgtgcgatgagaatacaggagacctcgagcgtagccgctatcgtggaaatcgtggcatgcatcgtatggatggatgagttgttgttggctggcaatggcatccagaagtgaagtctgatggggggagctccaaactcagcgttgtaatcagtgcgattcggcacaaagataccagcatttgagcagaggtgtatgtatgtcttgatgttgttttatactgctatagatgtgtagatcccattgtttggtgaggtgatcatttgcgaggaagttgactattagcatgtattaagataaaaaggaaagagatgagaaaatgtttttgaaatttagtacgatatgccttgcagtgcctgtatctgttgcattcatatttgtgatcagctggaatgaagtggcttgcattcatgttttatactgccgtgtttgggatgcaagaagagaatgaaggggcactggtgatctctgcctgcttggaatgaagtggatttgccggttgcatacgacacaggaggatgtagttcctggagtttgttgagtccgatttggatcagggttggacaggcacatgaaactcgatcgaagcatacagctgaagggtaaggggaagagagcgaggtcaggcgccttggggctggtagtatcgaaggaacgagacattcgatgattgtaagacaggattacaggagatgcacagcctcccttgcctctggatctgttactaagactttcaacttctgcttatatgtcgtaaaaaatattaataaaaaatctcgaattggattggttggggtgcgccaggctcagccagtagtgcaacggccgagcgacgctcgaggggcccagtggcaagccactgtagtggaccctcccccacaaaaaataaatttaatatcgaagtgaacacatggtccacatatcagatattaaactgataagaacagatactacacttgatcttagccaaaaggccgagaaaggtat

SEQ ID NO: 33175 - DNA, 1308 bp, Zea Mays
ctttctagccttgccctcgacggtggccacacgaacacgacgcctagtcgcccacttcgatctcttcactgccaccatccctctgctcgtctcaccgtcgactgtgtcctatctgtgccgcagcgcagggaaagtcagctcctgctcctgctacgatgcctcgaccccgcgcctctccgcctcctccatcctcctccacgtggttgtgctccctgacacagtctcctcgtcgacggcaacaagctgccatgtccttcgccaacaagaaccgtgcgccgccgcctctcactggcaccgtcgcacgcagaccggtcacactgtcgccggtggcaccgccaccttgccccgccttcttcctccacttgtcgccaccctattcttccctcgacgcagccgcaagcgctgccctccaccgggctcgcctccatggccgcgcgtaggtgggtcgctctcgctccccaccccgtcgccttcctcctcatacaatacaaacagagggcagggagcaaacaagaagcaaaggtgggggaagcagggaggcgaggcaagcagtggtgaagtggaacggagctaggcttcggctgggttccatggtgtgggtgtggttttggcgatagatggagactcaagcgtgggtggttgtgggcacgaggagccacacggagctggacgccacggcgaggaggaggaagagaaggagatggtcgtctcctccatatgcgcaagtcgttcaaggactcgctcaaggtgctcgaggccgacatccaacacgccaacaccctggcagcagatttctcgagggactacgacggggtctatctctagatgtacaaccccgacgcccacttcttcctcttcctcatgtagtggaccgattgcagcctagatggcgcacttgggctgctcaagatcctaatctacaaggtttatgtagatgggagtaccaccgtgacttgggagctaacttggataatgatctcttagttctcaaggctgtaaattaccttttcctgcaccaagctgtgaagttgtttcctctcagatgaagcaaaaccaaaaaatatctttttaaattttagaaatcgcactgaagccatgagtgcttcatggaattcagtcatctgttggggtacaaatatgaactgtagttttcccccaatttttctctctttattttttcagtgcattaacattgatagtattggttttttttcctaggaaattatgtctaaatacaagctcataactaattctgtaactttgatattaagatgggtgttcgcctgatgatttttaaatggaaaagga

SEQ ID NO: 33176 - DNA, 1678 bp, Zea Mays
aacgcgaagctttctgccgaaacagtggggtttgggcgcttgtccacggccgccgccaacaacgagttcctgacctccgccgtctcttccccgctccctcgcgctcgcagtcgcagctccggccgccctattttgcggaattcggtagatttgtttccttcatgggtcgcaccatcaagaaggccaggaaagcgaaacccaagaagtctaagaagaaaactgaagcgtcttcatcgtccaatcatgcggttgcctctggtccggctaaggtctggcaaccgggtgtagatgcactggaagatggggaggagcttcagtttgatcctgaggcttataattatctccgaggttttggcattggctggtcttgcttgaggcggagaaagcttcattgaattatatcggtgttttcaagctttctaacataaatgggaaaaagcgggaacctataccagcttcagcagttgatggtgacactgatgtggatagtgacagcagcagtgatgaagaagatgaagaaattaacgaggatacaaagcccatcctacatctaaaaaaggtggctcatgcggggtgtgtaaatcggatacgctcaatgactcaaaagccacatatatgtgctacttggggagatactggtcatgttcaggtgtgggacttgagctccttccttaattctttagcagagtcaggggcatctgcacccaaagaagacgatataatccacaaacacttacccatgaaagtttttagtggccataaagatgagggatatgccattgattggagtccacttgttactggaagacttgtttctggtgactgcaataagtgcattcacctatgggaaccgacttcaaataactggaacgtagatgcaaacccatttgttggacacactgctagtgttgaagatctacagtggagtcccacggaagccgacatatttgcctcgtgttctgtggatggcttgctagctgcatgatagcttctgggtgcgacgatggcagtttctcagttcatgatcttagatcaattcaggactcgttggtagcacattttgagtaccacaagaaagcaattacatccatcgagtggagcccacacgaagcatcatcattagctgtaacatctgaagaccaccagctcacatctgggacctttcattggaacgggacaccgaggaggaggctgagttcagagcgaagatgaaagagcaggcaaacgcccctgacgatttgccgcctcagcttctctttgctcatcagggtcagagagacttgaaagaagtgcactggcacccacagataccgtcgatgatcatatcgacggcaatcgacggcttcaacgtgttgatgcctagcaacatcgatacaaccattcctggcagcacagatacagcaatgccgcctgctgagccataggttaggtgtttctggtagctcatgattccaggttcatgcggtggtgagtgtagttgccatttgtcatgtgtcgacagtgctatgctgtcgtgttggagcatgatgggaaaattttgattggctggcgttctatgataatatgattaggatttaatatgtgcatgctttttttagttttaccagcatctttgatggttgtgggccccatcatatgtcaaattatcaaccgatgttttcgttgcatttaagcattt

SEQ ID NO: 33177 - DNA, 1612 bp, Zea Mays
aacgcgaagctttctgccgaaacagtggggtttgggcgcttgtccacggccgccgccaacaacgagttcctgacctccgccgtctcttccccgctccctcgcgctcgcagtcgcagctccggccgccctattttgcggaattcggtagatttgtttccttcatgggtcgcaccatcaagaaggccaggaaagcgaaacccaagaagtctaagaaggcggagaaagcttcattgaattatatcggtgttttcaagctttctaacataaatgggaaaaagcgggaacctataccagcttcagcagttgatggtgacactgatgtggatagtgacagcagcagtgatgaagaagatgaagaaattaacgaggatacaaagcccatcctacatctaaaaaaggtggctcatgcggggtgtgtaaatcggatacgctcaatgactcaaaagccacatatatgtgctacttggggagatactggtcatgttcaggtgtgggacttgagctccttccttaattctttagcagagtcaggggcatctgcacccaaagaagacgatataatccacaaacacttacccatgaaagtttttagtggccataaagatgagggatatgccattgattggagtccacttgttactggaagacttgtttctggtgactgcaataagtgcattcacctatgggaaccgacttcaaataactggaacgtagatgcaaacccatttgttggacacactgctagtgttgaagatctacagtggagtcccacggaagccgacatatttgcctcgtgttctgtggatggtacgatatcaatatgggatgtacgtacagggaagaaaccttctatttctgtcaaagctcataaagcagatgtgaatgttatctcatggaacaggcttgctagctgcatgatagcttctgggtgcgacgatggcagtttctcagttcatgatcttagatcaattcaggactcgttggtagcacattttgagtaccacaagaaagcaattacatccatcgagtggagcccacacgaagcatcatcattagctgtaacatctgaagaccaccagctcacaatctgggacctttcattggaacgggacaccgaggaggaggctgagttcagagcgaagatgaaagagcaggcaaacgcccctgacgatttgccgcctcagcttctctttgctcatcagggtcagagagacttgaaagaagtgcactggcacccacagataccgtcgatgatcatatcgacggcaatcgacggcttcaacgtgttgatgcctagcaacatcgatacaaccattcctggcagcacagatacagcaatgccgcctgctgagccataggttaggtgtttctggtagctcatgattccaggttcatgcggtggtgagtgtagttgccatttgtcatgtgtcgacagtgctatgctgtcgtgttggagcatgatgggaaaattttgattggctggcgttctatgataatatgattaggatttaatatgtgcatgctttttttagttttaccagcatctttgatggttgtgggccccatcatatgtcaaattatcaaccgatgttttcgttgcatttaagcattt

SEQ ID NO: 33178 - DNA, 1758 bp, Zea Mays
aacgcgaagctttctgccgaaacagtggggtttgggcgcttgtccacggccgccgccaacaacgagttcctgacctccgccgtctcttccccgctccctcgcgctcgcagtcgcagctccggccgccctattttgcggaattcggtagatttgtttccttcatgggtcgcaccatcaagaaggccaggaaagcgaaacccaagaagtctaagaagaaaactgaagcgtcttcatcgtccaatcatgcggttgcctctggtccggctaaggtctggcaaccgggtgtagatgcactggaagatggggaggagcttcagtttgatcctgaggcttataattatctccgaggttttggcattggctggtcttgcttgagttttgatgttgtgcgcgatcaacttagactcgtccgatcagagttccctcatacattatatggtgttgctgggacgcaggcggagaaagcttcattgaattatatcggtgttttcaagctttctaacataaatgggaaaaagcgggaacctataccagcttcagcagttgatggtgacactgatgtggatagtgacagcagcagtgatgaagaagatgaagaaattaacgaggatacaaagcccatcctacatctaaaaaaggtggctcatgcggggtgtgtaaatcggatacgctcaatgactcaaaagccacatatatgtgctacttggggagatactggtcatgttcaggtgtgggacttgagctccttccttaattctttagcagagtcaggggcatctgcacccaaagaagacgatataatccacaaacacttacccatgaaagtttttagtggccataaagatgagggatatgccattgattggagtccacttgttactggaagacttgtttctggtgactgcaataagtgcattcacctatgggaaccgacttcaaataactggaacgtagatgcaaacccatttgttggacacactgctagtgttgaagatctacagtggagtcccacggaagccgacatatttgcctcgtgttctgtggatggcttgctagctgcatgatagcttctgggtgcgacgatggcagtttctcagttcatgatcttagatcaattcaggactcgttggtagcacattttgagtaccacaagaaagcaattacatccatcgagtggagcccacacgaagcatcatcattagctgtaacatctgaagaccaccagctcacaatctgggacctttcattggaacgggacaccgaggaggaggctgagttcagagcgaagatgaaagagcaggcaaacgcccctgacgatttgccgcctcagcttctctttgctcatcagggtcagagagacttgaaagaagtgcactggcacccacagataccgtcgatgatcatatcgacggcaatcgacggcttcaacgtgttgatgcctagcaacatcgatacaaccattcctggcagcacagatacagcaatgccgcctgctgagccataggttaggtgtttctggtagctcatgattccaggttcatgcggtggtgagtgtagttgccatttgtcatgtgtcgacagtgctatgctgtcgtgttggagcatgatgggaaaattttgattggctggcgttctatgataatatgattaggatttaatatgtgcatgctttttttagttttaccagcatctttgatggttgtgggccccatcatatgtcaaattatcaaccgatgttttcgttgcatttaagcattt

SEQ ID NO: 33179 - DNA, 1773 bp, Zea Mays
aacgcgaagctttctgccgaaacagtggggtttgggcgcttgtccacggccgccgccaacaacgagttcctgacctccgccgtctcttccccgctccctcgcgctcgcagtcgcagctccggccgccctattttgcggaattcggtagatttgtttccttcatgggtcgcaccatcaagaaggccaggaaagcgaaacccaagaagtctaagaagaaaactgaagcgtcttcatcgtccaatcatgcggttgcctctggtccggctaaggtctggcaaccgggtgtagatgcactggaagatggggaggagcttcagtttgatcctgaggcttataattatctccgaggttttggcattggctggtcttgcttgaggcggagaaagcttcattgaattatatcggtgttttcaagctttctaacataaatgggaaaaagcgggaacctataccagcttcagcagttgatggtgacactgatgtggatagtgacagcagcagtgatgaagaagatgaagaaattaacgaggatacaaagcccatcctacatctaaaaaaggtggctcatgcggggtgtgtaaatcggatacgctcaatgactcaaaagccacatatatgtgctacttggggagatactggtcatgttcaggtgtgggacttgagctccttccttaattctttagcagagtcaggggcatctgcacccaaagaagacgatataatccacaaacacttacccatgaaagtttttagtggccataaagatgagggatatgccattgattggagtccacttgttactggaagacttgtttctggtgactgcaataagtgcattcacctatgggaaccgacttcaaataactggaacgtagatgcaaacccatttgttggacacactgctagtgttgaagatctacagtggagtcccacggaagccgacatatttgcctcgtgttctgtggatggtacgatatcaatatgggatgtacgtacagggaagaaaccttctatttctgtcaaagctcataaagcagatgtgaatgttatctcatggaacaggcttgctagctgcatgatagcttctgggtgcgacgatggcagtttctcagttcatgatcttagatcaattcaggactcgttggtagcacattttgagtaccacaagaaagcaattacatccatcgagtggagcccacacgaagcatcatcattagctgtaacatctgaagaccaccagctcacaatctgggacctttcattggaacgggacaccgaggaggaggctgagttcagagcgaagatgaaagagcaggcaaacgcccctgacgatttgccgcctcagcttctctttgctcatcagggtcagagagacttgaaagaagtgcactggcacccacagataccgtcgatgatcatatcgacggcaatcgacggcttcaacgtgttgatgcctagcaacatcgatacaaccattcctggcagcacagatacagcaatgccgcctgctgagccataggttaggtgtttctggtagctcatgattccaggttcatgcggtggtgagtgtagttgccatttgtcatgtgtcgacagtgctatgctgtcgtgttggagcatgatgggaaaattttgattggctggcgttctatgataatatgattaggatttaatatgtgcatgctttttttagttttaccagcatctttgatggttgtgggccccatcatatgtcaaattatcaaccgatgttttcgttgcatttaagcattt

SEQ ID NO: 33180 - DNA, 3592 bp, Zea Mays
caggccacagcctcactcatgcgttcacaatcacacctgctgtttttcttctccagttcacctcgcgcgcgtgacaactagggagcccgccgccgcccaggtcttcgtcgaaccctttgccggcaacgagaacccgccacgccagctccgtaattgtggcgatggttgctcctacgggatcttgaattcttgacacacacacacaccgatggtaatggtgatggagggaggaaggacggaaggcgacgagctgattgctgattatgtggattgccttatgtctctggacaccaacacccggcctgtccacagcgatggtctcatcctcggtgctccaggcgggggaggagggacggtcgatgccggaactgagccagatgccatgagagatatcccctcatccgaggaccccaatgagcccgtgctcggcatgacgtttgagtccgatgaggccgccaaggcattctacaacgactatgccaggcggcttggcttccccttccgcgtcggcaggtctcggcggtcgaagggcacagaggaggttgtcgtcatgaagaggttcgtttgctccagggaaggggtgtacaagaagaaacagacctcgccggatgaggcggcaaggaagcgtgagaggatgtctatgcgagagggttgcaatgctatgatggaggtggttagggaggcggaccattgggttgtctccaaacttgagaaggctcacaaccatgagctcggcacttgtagcgccaaggttgggtaccttcgtgcgagaagttctcttggtggctctgataaggccacaatggtggggcctgacgagatggcgtttcttaggcagaatgtcctgggggaaggaggagacgcccagggccttcttgattatctcaagaagatgcaagccaatgacccggcgttctgccatgctatacaggttgacaagaatggctgtgtggtgaatgttttctgggctgatgctagggccaaagcagcttatcggcatttcggggatgctataacgttcgacacgacgtacaagaagaacaagcatatgatgccctttgttactttctcgggagtcaaccatcatctgcagactgttatttttggatgtgcattgcttatggaagagactgagttctcgtttatatggctatttgaaacatggttagcggcaatgggaggtaaggcaccatgctcattggtcactgaccaaaacagggccatgaaggctgcaattgggaaggtttttccgaattcctgtcaccgtttctgtaagtggagtattctgagtagaaccaagcaaaagctgacccatacatactcagagcatccaaccctaagagatgagcttgagagctgtgtgcttgagactgaaaccatctcgacattcgaaaccacttggatgtcaatcattgatagatatgacttgagaaagaattcatggcttcaagcaatatacaatatccgccaaaaatgggttcctttgtacctgatggatacattctttgcagaaacgttccccacatggaaattggaaaccatgaatgatttctataagaaatatttcaatacaaaaacaacgcttgaagtttttcttaatcagttcgatttgagcttggcaggccgatatgaggatgaggcaaaagcagatatggatgcctacttaaataaggcaactacaaaaactgcatcgctaatagaaaaacaggcagcagggacctataccaaagcagtcttcagtaggtttcaggaggaatttacagagtctctagggtttatcattcagaaaaccgaagacggctgcataagtaaatacagcatcacaaaatatgaagatccatcagacacattctgcgtgacttataatgcttccaataagatggcaaactgtagttgcaagtactttgaattctccggtattctgtgccgccatattcttggagtatacataatagttgatccacgaacacttccaactgaatattttatgaaacgttggacaaggaaggcaagagatgatgatgctttgttagaagataataacaacaatactcatgatgaggatgcttctcagtccaccacaagccgctacaataccctatgtgctgatgccatcagatgtgctgagaaaggagctggatcggaggcagtatataaggcagcaaaagatatcttacagaaggcatatgaagagattattgcttatgaaagaaatactggccagggatctcaaagggatgttataaacatcaacgaggatgtcacgattgatgatgcaatgaatgataaatctatgccagattctggacgaaaggtgactaatctactaggccaatttgttaattccacttggtctccggtctaatccacgtttttgtcatctctttggagatgaaaatgtgatttagcagcattagcagctgtcatgatcgtcatgcaatatctattttggattgggtagcagcgaacaactcaacaacacttggacatttcaacatgaaatgatctccatgagaagaatgtccgcctgacttcagtagaccaggacaatttagtttgaagatgctggatcatttctgtgatgattaagtctttgtcacttcaataagcgtcctgtatggtgttgcctgtagccctgtatggccgaagctactaaaggtcatcaacaaagacaagtcttctgttcactaaaaatacgagaagtgagacgaagatggcggtcatgcaagctctaaatttaacacaagggactttcaacgacagatatctgggcttaccagttcgctttgggcagtccaggacaaaaacttcttagtacttaaatgataatgtgacaacgtattcaaggttggaaagaaaagctgctgtcaaaagccagtaaataagtgctgataaaggccgtagcacaaggaattccaacatatgctatgggatgctttgacttaaggaagacttgtctgctcaaatcagcaatgccatattcagatattggtggagtcaacaggacatgggaaacaaagtgcattgggtgaattgggctaaaatgaaaacgctaagggcttgttcgtttcacggttagtccatgtggattggttagtccatgtggattgggtggtattgagtcggtttaaatccataacaaatcaaaatccattccaatacacttcagtccacatgaaactggaataatcgaacaaggtctaaagagttgtgatggaatggagtttagagatatcgtagtatgttcttttataaacttagtcaaaactaaacaagttcaacttcaacttataatgaaattaaatagacgaataagtacattgctaatgctggtcttcagagagtgcgatggtttgtttcatatgattcactatgatgcttgtatcatatataattaattcatgttccgcattcagtgacagattattgggatgatgccacaaactcctaatttctgttacaccggatacttctgttcccatttgtttgctgaaagacagcttgccccggttgcaattaagttcattgctttaaatctgcagaactgagggtactgtacaaaacgaggacgatgtagctgcccagttcttcg

SEQ ID NO: 33181 - DNA, 3620 bp, Zea Mays
caggccacagcctcactcatgcgttcacaatcacacctgctgtttttcttctccagttcacctcgcgcgcgtgacaactagggagcccgccgccgcccaggtcttcgtcgaaccctttgccggcaacgagaacccgccacgccagctccgtaattgtggcgatggttgctcctacgggatcttgaattcttgacacacacacacaccgatggtaatggtgatggagggaggaaggacggaaggcgacgagctgattgctgattatgtggattgccttatgtctctggacaccaacacccggcctgtccacagcgatggtctcatcctcggtgctccaggcgggggaggagggacggtcgatgccggaactgagccagatgccatgagagatatcccctcatccgaggaccccaatgagcccgtgctcggcatgacgtttgagtccgatgaggccgccaaggcattctacaacgactatgccaggcggcttggcttccccttccgcgtcggcaggtctcggcggtcgaagggcacagaggaggttgtcgtcatgaagaggttcgtttgctccagggaaggggtgtacaagaagaaacagacctcgccggatgaggcggcaaggaagcgtgagaggatgtctatgcgagagggttgcaatgctatgatggaggtggttagggaggcggaccattgggttgtctccaaacttgagaaggctcacaaccatgagctcggcacttgtagcgccaaggttgggtaccttcgtgcgagaagttctcttggtggctctgataaggccacaatggtggggcctgacgagatggcgtttcttaggcagaatgtcctgggggaaggaggagacgcccagggccttcttgattatctcaagaagatgcaagccaatgacccggcgttctgccatgctatacaggttgacaagaatggctgtgtggtgaatgttttctgggctgatgctagggccaaagcagcttatcggcatttcggggatgctataacgttcgacacgacgtacaagaagaacaagcatatgatgccctttgttactttctcgggagtcaaccatcatctgcagactgttatttttggatgtgcattgcttatggaagagactgagttctcgtttatatggctatttgaaacatggttagcggcaatgggaggtaaggcaccatgctcattggtcactgaccaaaacagggccatgaaggctgcaattgggaaggtttttccgaattcctgtcaccgtttctgtaagtggagtattctgagtagaaccaagcaaaagctgacccatacatactcagagcatccaaccctaagagatgagcttgagagctgtgtgcttgagactgaaaccatctcgacattcgaaaccacttggatgtcaatcattgatagatatgacttgagaaagaattcatggcttcaagcaatatacaatatccgccaaaaatgggttcctttgtacctgatggatacattctttgcagaaacgttccccacatggaaattggaaaccatgaatgatttctataagaaatatttcaatacaaaaacaacgcttgaagtttttcttaatcagttcgatttgagcttggcaggccgatatgaggatgaggcaaaagcagatatggatgcctacttaaataaggcaactacaaaaactgcatcgctaatagaaaaacaggcagcagggacctataccaaagcagtcttcagtaggtttcaggaggaatttacagagtctctagggtttatcattcagaaaaccgaagacggctgcataagtaaatacagcatcacaaaatatgaagatccatcagacacattctgcgtgacttataatgcttccaataagatggcaaactgtagttgcaagtactttgaattctccggtattctgtgccgccatattcttggagtatacataatagttgatccacgaacacttccaactgaatattttatgaaacgttggacaaggaaggcaagagatgatgatgctttgttagaagataataacaacaatactcatgatgaggatgcttctcagtccaccacaagccgctacaataccctatgtgctgatgccatcagatgtgctgagaaaggagctggatcggaggcagtatataaggcagcaaaagatatcttacagaaggcatatgaagagattattgcttatgaaagaaatactggccagggatctcaaagggatgttataaacatcaacgaggatgtcacgattgatgatgcaatgaatgataaatctatgccagattctggacgaaagcattagcagctgtcatgatcgtcatgcaatatctattttggattgggtagcagcgaacaactcaacaacacttggacatttcaacatgaaatgatctccatgagaagaatgtccgcctgacttcagtagaccaggacaatttagtttgaagatgctggatcatttctgtgatgattaagtctttgtcacttcaataagcgtcctgtatggtgttgcctgtagccctgtatggccgaagctactaaaggtaattagggtttgataaagttaaagcaaccgagtcccaaacttttgatcttgattcgtgcaaacggggacgatgcaacacattttcaaggtattctggacctttatgaagcatgctctgggcaggtcatcaacaaagacaagtcttctgttcactaaaaatacgagaagtgagacgaagatggcggtcatgcaagctctaaatttaacacaagggactttcaacgacagatatctgggcttaccagttcgctttgggcagtccaggacaaaaacttcttagtacttaaatgataatgtgacaacgtattcaaggttggaaagaaaagctgctgtcaaaagccagtaaataagtgctgataaaggccgtagcacaaggaattccaacatatgctatgggatgctttgacttaaggaagacttgtctgctcaaatcagcaatgccatattcagatattggtggagtcaacaggacatgggaaacaaagtgcattgggtgaattgggctaaaatgaaaacgctaagggcttgttcgtttcacggttagtccatgtggattggttagtccatgtggattgggtggtattgagtcggtttaaatccataacaaatcaaaatccattccaatacacttcagtccacatgaaactggaataatcgaacaaggtctaaagagttgtgatggaatggagtttagagatatcgtagtatgttcttttataaacttagtcaaaactaaacaagttcaacttcaacttataatgaaattaaatagacgaataagtacattgctaatgctggtcttcagagagtgcgatggtttgtttcatatgattcactatgatgcttgtatcatatataattaattcatgttccgcattcagtgacagattattgggatgatgccacaaactcctaatttctgttacaccggatacttctgttcccatttgtttgctgaaagacagcttgccccggttgcaattaagttcattgctttaaatctgcagaactgagggtactgtacaaaacgaggacgatgtagctgcccagttcttcg

SEQ ID NO: 33182 - DNA, 6402 bp, Zea Mays
caggccacagcctcactcatgcgttcacaatcacacctgctgtttttcttctccagttcacctcgcgcgcgtgacaactagggagcccgccgccgcccaggtcttcgtcgaaccctttgccggcaacgagaacccgccacgccagctccgtaattgtggcgatggttgctcctacgggatcttgaattcttgacacacacacacaccgatggtaatggtgatggagggaggaaggacggaaggcgacgagctgattgctgattatgtggattgccttatgtctctggacaccaacacccggcctgtccacagcgatggtctcatcctcggtgctccaggcgggggaggagggacggtcgatgccggaactgagccagatgccatgagagatatcccctcatccgaggaccccaatgagcccgtgctcggcatgacgtttgagtccgatgaggccgccaaggcattctacaacgactatgccaggcggcttggcttccccttccgcgtcggcaggtctcggcggtcgaagggcacagaggaggttgtcgtcatgaagaggttcgtttgctccagggaaggggtgtacaagaagaaacagacctcgccggatgaggcggcaaggaagcgtgagaggatgtctatgcgagagggttgcaatgctatgatggaggtggttagggaggcggaccattgggttgtctccaaacttgagaaggctcacaaccatgagctcggcacttgtagcgccaaggttgggtaccttcgtgcgagaagttctcttggtggctctgataaggccacaatggtggggcctgacgagatggcgtttcttaggcagaatgtcctgggggaaggaggagacgcccagggccttcttgattatctcaagaagatgcaagccaatgacccggcgttctgccatgctatacaggttgacaagaatggctgtgtggtgaatgttttctgggctgatgctagggccaaagcagcttatcggcatttcggggatgctataacgttcgacacgacgtacaagaagaacaagcatatgatgccctttgttactttctcgggagtcaaccatcatctgcagactgttatttttggatgtgcattgcttatggaagagactgagttctcgtttatatggctatttgaaacatggttagcggcaatgggaggtaaggcaccatgctcattggtcactgaccaaaacagggccatgaaggctgcaattgggaaggtttttccgaattcctgtcaccgtttctgtaagtggagtattctgagtagaaccaagcaaaagctgacccatacatactcagagcatccaaccctaagagatgagcttgagagctgtgtgcttgagactgaaaccatctcgacattcgaaaccacttggatgtcaatcattgatagatatgacttgagaaagaattcatggcttcaagcaatatacaatatccgccaaaaatgggttcctttgtacctgatggatacattctttgcagaaacgttccccacatggaaattggaaaccatgaatgatttctataagaaatatttcaatacaaaaacaacgcttgaagtttttcttaatcagttcgatttgagcttggcaggccgatatgaggatgaggcaaaagcagatatggatgcctacttaaataaggcaactacaaaaactgcatcgctaatagaaaaacaggcagcagggacctataccaaagcagtcttcagtaggtttcaggaggaatttacagagtctctagggtttatcattcagaaaaccgaagacggctgcataagtaaatacagcatcacaaaatatgaagatccatcagacacattctgcgtgacttataatgcttccaataagatggcaaactgtagttgcaagtactttgaattctccggtattctgtgccgccatattcttggagtatacataatagttgatccacgaacacttccaactgaatattttatgaaacgttggacaaggaaggcaagagatgatgatgctttgttagaagataataacaacaatactcatgatgaggatgcttctcagtccaccacaagccgctacaataccctatgtgctgatgccatcagatgtgctgagaaaggagctggatcggaggcagtatataaggcagcaaaagatatcttacagaaggcatatgaagagattattgcttatgaaagaaatactggccagggatctcaaagggatgttataaacatcaacgaggatgtcacgattgatgatgcaatgaatgataaatctatgccagattctggacgaaaggtgactaatctactaggccaatttgttaattccacttggtctccggtctaatccacgtttttgtcatctctttggagatgaaaatgtgatttagcagcattagcagctgtcatgatcgtcatgcaatatctattttggattgggtagcagcgaacaactcaacaacacttggacatttcaacatgaaatgatctccatgagaagaatgtccgcctgacttcagtagaccaggacaatttagtttgaagatgctggatcatttctgtgatgattaagtctttgtcacttcaataagcgtcctgtatggtgttgcctgtagccctgtatggccgaagctactaaaggtaattagggtttgataaagttaaagcaaccgagtcccaaacttttgatcttgattcgtgcaaacggggacgatgcaacacattttcaaggtattctggacctttatgaagcatgctctgggcaggtcatcaacaaagacaagtcttctgttcactaaaaatacgagaagtgagacgaagatggcggtcatgcaagctctaaatttaacacaagggactttcaacgacagatatctgggcttaccagttcgctttgggcagtccaggacaaaaacttcttagtacttaaatgataatgtgacaacgtattcaaggttggaaagaaaagctgctgtcaaaagccagtaaataagtgctgataaaggccgtagcacaaggaattccaacatatgctatgggatgctttgacttaaggaagacttgtctgctcaaatcagcaatgccatattcagatattggtggagtcaacaggacatgggaaacaaagtgcattgggtgaattgggctaaaatgaaaacgctaagggcttgttcgtttcacggttagtccatgtggattggttagtccatgtggattgggtggtattgagtcggtttaaatccataacaaatcaaaatccattccaatacacttcagtccacatgaaactggaataatcgaacaaggtctaaagagttgtgatggaatggagtttagagatatcgtagtatgttcttttataaacttagtcaaaactaaacaagttcaacttcaacttataatgaaattaaatagacgaataagtacattgctaatgctggtcttcagagagtgcgatggtttgtttcatatgattcactatgatgcttgtatcatatataattaattcatgttccgcattcagtgacagattattgggatgatgccacaaactcctaatttctgttacaccggatacttctgttcccatttgtttgctgaaagacagcttgccccggttgcaattaagttcattgctttaaatctgcagaactgagggtactgtacaaaacgaggacgatgtagctgcccagttcttcgaggacgctgatttcttacgacgaagagagaagaagaaaacgccagcaccatttgtaatctcgatccccgccgcacaagcttgatcggacggtcggacaccagacagtctgtcagagacaccaacgcccgggtccgctgccacggtgccaccgctgtttcccatgccggtcggcggtcgccgctccagttgaatttgaaggagcctgacggatcgatggcggccgcggcggaggtgtaccggcgggtgctgaaggcggtgcagaagcacgtcggtaggggcgccaccaagcagcgcttcctcgacttcggggcggccgagttccgtgcccccgtcggcacggaggccgacgctagggcgaggctgcggctcgccggggactacgcctacctcctcaccagcgtccaccaccacaaggatctgctgctctcgtacaatatagctgtggatcgatctgatgaaacgaagaagatactgaacaaatctgccgccagtaggttgatgagaaggatgtgaacctggatgctgcgttcagtgtgcatgctgggatcgcacataccaggtgggccacgcacggtgtgcctgctccaaggaacagccacccccaatcgtctggtgccggtgatgagttcttggttgtccacaatggcattatcaccaactatgaggtcttgaaagagacactaactaggcacggcttcacctttgagtctgatacagacacagaagtcatccctaagctagcaaagttcgtttttgataaatctcatgatgaacaaggtgatgtgacgtttagccaagttgttatggaagtcatgaggcagcttgaaggagcctacgcacttatctttaaaagcccgcactatcccaatgaattgattgcatgcaaacgaggcagccaactgatacttggtgtcaacgaattgagtggtcaacagaatgggaaatcatttcatgatgtcaaaaccttgacaacaaatggaaagcccaaagaattattcttctccagtgatctatgtgctattgtagagcatacgaagaactacttagctcttgaagataatgaaattgttcatattaaggatggtagtgtttcgatcctcaagtttgaccctcacaaagagaagccagcatctgtgcaacgagcattgtctgttcttgagatggaagttgagcaaataaagaaaggaagttatgatcacttcatgcaaaaagaaatccatgaacagccacattcgttgaaaacaacaatgaggggtagattgaaggatggtggggttgttctaggtggactgaaggaatatctcaagacaattaggcgctgtagaagggtggtatttattggttgtggaacaagttacaatgctgccttagctgcaagaccttttgtggaagaactgactggtattcctgtgactatggaggttgcaagtgacttgctggacagacaaggtcccatctacagagaagacactgcagtttttgttagtcaatctggggagacagcagataccctccttgctctagattatgcactagaaaatggagctctctgtgttggcataacaaatactgttggaagcacgctgtctagaaaaacacactgtggggttcatatcaatgctggttgtgagattggtgttgccagtacaaaggcttatacaagtcaaatagtagccatggcgatgatggcgttggctattgggtccgatcagatatctactcaagctaggagggacagtatcatcagtggactgaacaacctttcaagcaatgtcagcgaagttctcaagctagatgctggaatgaaggagcttgcctcttcgctgatcgactcagagtcgctcctcgtgttcggaaggggttacaactacgccaccgcgctggagggcgccctgaaggtcaaggaggtggcgctgatgcacagcgagggcatgctcgctggcgagatgaagcacgggccgctggccctcgtggacgagaacctccccatcattgtcattgcgacccgcgacgcgtgcttcagcaagcagcagtcggtgatccaacagctcctctcgcgcagggggcgcctgatagtgatgtgctctaggggagatgccgcggctgtgtgccctagcggtgggtcgtgcagagtcattgaagttccacaggttgcagactgtctccagccagtgatcaacataattccattacagttgctcgcgtaccatctgactgttctccggggattcgacgtggaccaaccaaggaatctggcgaagagcgtgaccacgcagtagggagaggtagatgagatgtttgtattgtagttaattgtccttgctcttgaggtggctagtacgtagcataaatattatggtgcgttaaacttgttgttttgtgaacgaaatgtacctctctttttttaattatggtatattggtgtcaatagcaactcggtatccctgggaattctcatgtcagaaacttcagtttcttcatgggagcgtgcacgatcaggaacttcagaaagccaccttttcagtatagtatctacataaacacgagcacaagtcaatccctctaattgatatatgcaagttttattaacagcataaattaaatggagggatggtctattagtgtatgttgctcgtaggatcgatcgaataaatgagctcagtgaaatcaatgacgtattttac

SEQ ID NO: 33183 - DNA, 4436 bp, Zea Mays
cagcctcactcatgcgttcacaatcacacctgctgtttttcttctccagttcacctcgcgcgcgtgacaactagggagcccgccgccgcccaggtcttcgtcgaaccctttgccggcaacgagaacccgccacgccagaaaaagaaaaagaaaaaacaactacagccatatctacacttatcccgctactagtttcagcagctccgtaattgtggcgatggttgctcctacgggatcttgaattcttgacacacacacacaccgatggtaatggtgatggagggaggaaggacggaaggcgacgagctgattgctgattatgtggattgccttatgtctctggacaccaacacccggcctgtccacagcgatggtctcatcctcggtgctccaggcgggggaggagggacggtcgatgccggaactgagccagatgccatgagagatatcccctcatccgaggaccccaatgagcccgtgctcggcatgacgtttgagtccgatgaggccgccaaggcattctacaacgactatgccaggcggcttggcttccccttccgcgtcggcaggtctcggcggtcgaagggcacagaggaggttgtcgtcatgaagaggttcgtttgctccagggaaggggtgtacaagaagaaacagacctcgccggatgaggcggcaaggaagcgtgagaggatgtctatgcgagagggttgcaatgctatgatggaggtggttagggaggcggaccattgggttgtctccaaacttgagaaggctcacaaccatgagctcggcacttgtagcgccaaggttgggtaccttcgtgcgagaagttctcttggtggctctgataaggccacaatggtggggcctgacgagatggcgtttcttaggcagaatgtcctgggggaaggaggagacgcccagggccttcttgattatctcaagaagatgcaagccaatgacccggcgttctgccatgctatacaggttgacaagaatggctgtgtggtgaatgttttctgggctgatgctagggccaaagcagcttatcggcatttcggggatgctataacgttcgacacgacgtacaagaagaacaagcatatgatgccctttgttactttctcgggagtcaaccatcatctgcagactgttatttttggatgtgcattgcttatggaagagactgagttctcgtttatatggctatttgaaacatggttagcggcaatgggaggtaaggcaccatgctcattggtcactgaccaaaacagggccatgaaggctgcaattgggaaggtttttccgaattcctgtcaccgtttctgtaagtggagtattctgagtagaaccaagcaaaagctgacccatacatactcagagcatccaaccctaagagatgagcttgagagctgtgtgcttgagactgaaaccatctcgacattcgaaaccacttggatgtcaatcattgatagatatgacttgagaaagaattcatggcttcaagcaatatacaatatccgccaaaaatgggttcctttgtacctgatggatacattctttgcagaaacgttccccacatggaaattggaaaccatgaatgatttctataagaaatatttcaatacaaaaacaacgcttgaagtttttcttaatcagttcgatttgagcttggcaggccgatatgaggatgaggcaaaagcagatatggatgcctacttaaataaggcaactacaaaaactgcatcgctaatagaaaaacaggcagcagggacctataccaaagcagtcttcagtaggtttcaggaggaatttacagagtctctagggtttatcattcagaaaaccgaagacggctgcataagtaaatacagcatcacaaaatatgaagatccatcagacacattctgcgtgacttataatgcttccaataagatggcaaactgtagttgcaagtactttgaattctccggtattctgtgccgccatattcttggagtatacataatagttgatccacgaacacttccaactgaatattttatgaaacgttggacaaggaaggcaagagatgatgatgctttgttagaagataataacaacaatactcatgatgaggatgcttctcagtccaccacaagccgctacaataccctatgtgctgatgccatcagatgtgctgagaaaggagctggatcggaggcagtatataaggcagcaaaagatatcttacagaaggcatatgaagagattattgcttatgaaagaaatactggccagggatctcaaagggatgttataaacatcaacgaggatgtcacgattgatgatgcaatgaatgataaatctatgccagattctggacgaaaggtgactaatctactaggccaatttgttaattccacttggtctccggtctaatccacgtttttgtcatctctttggagatgaaaatgtgatttagcagcattagcagctgtcatgatcgtcatgcaatatctattttggattgggtagcagcgaacaactcaacaacacttggacatttcaacatgaaatgatctccatgagaagaatgtccgcctgacttcagtagaccaggacaatttagtttgaagatgctggatcatttctgtgatgattaagtctttgtcacttcaataagcgtcctgtatggtgttgcctgtagccctgtatggccgaagctactaaaggtaattagggtttgataaagttaaagcaaccgagtcccaaacttttgatcttgattcgtgcaaacggggacgatgcaacacattttcaaggtattctggacctttatgaagcatgctctgggcaggtcatcaacaaagacaagtcttctgttcactaaaaatacgagaagtgagacgaagatggcggtcatgcaagctctaaatttaacacaagggactttcaacgacagatatctgggcttaccagttcgctttgggcagtccaggacaaaaacttcttagtacttaaatgataatgtgacaacgtattcaaggttggaaagaaaagctgctgtcaaaagccagtaaataagtgctgataaaggccgtagcacaaggaattccaacatatgctatgggatgctttgacttaaggaagacttgtctgctcaaatcagcaatgccatattcagatattggtggagtcaacaggacatgggaaacaaagtgcattgggtgaattgggctaaaatgaaaacgctaagggcttgttcgtttcacggttagtccatgtggattggttagtccatgtggattgggtggtattgagtcggtttaaatccataacaaatcaaaatccattccaatacacttcagtccacatgaaactggaataatcgaacaaggtctaaagagttgtgatggaatggagtttagagatatcgtagtatgttcttttataaacttagtcaaaactaaacaagttcaacttcaacttataatgaaattaaatagacgaataagtacattgctaatgctggtcttcagagagtgcgatggtttgtttcatatgattcactatgatgcttgtatcatatataattaattcatgttccgcattcagtgacagattattgggatgatgccacaaactcctaatttctgttacaccggatacttctgttcccatttgtttgctgaaagacagcttgccccggttgcaattaagttcattgctttaaatctgcagaactgagggtactgtacaaaacgaggacgatgtagctgcccagttcttcgaggacgctgatttcttgtttaacgccgatgcctccattaatccgcatcacgtcgatcataacaactctagcgagtcaaattatttgtttgtttgtttgtttgtttgatcttttattataaaagacgacgaagagagaagaagaaaacgccagcaccatttgtaatctcgatccccgccgcacaagcttgatcggacggtcggacaccagacagtctgtcagagacaccaacgcccgggtccgctgccacggtgccaccgctgtttcccatgccggtcggcggtcgccgctccagttgaatttgaaggagcctgacggatcgatggcggccgcggcggaggtgtaccggcgggtgctgaaggcggtgcagaagcacgtcggtaggggcgccaccaagcagcgcttcctcgacttcggggcggccgagttccgtgcccccgtcggcacggaggccgacgctagggcgaggctgcggctcgccggggactacgcctacctcctcaccagcgtccaccaccacaaggatctgctgctctcgtacaatatagctgtggatcgatctgatgaaacgaagaagatactgaacaaatctgccgccagttggaggtctggagctagaatctgataattcaacattcaaattgcgtactgcatagtagctggg

SEQ ID NO: 33184 - DNA, 3633 bp, Zea Mays
gcctcactcatgcgttcacaatcacacctgctgtttttcttctccagttcacctcgcgcgcgtgacaactagggagcccgccgccgcccaggtcttcgtcgaaccctttgccggcaacgagaacccgccacgccagctccgtaattgtggcgatggttgctcctacgggatcttgaattcttgacacacacacacaccgatggtaatggtgatggagggaggaaggacggaaggcgacgagctgattgctgattatgtggattgccttatgtctctggacaccaacacccggcctgtccacagcgatggtctcatcctcggtgctccaggcgggggaggagggacggtcgatgccggaactgagccagatgccatgagagatatcccctcatccgaggaccccaatgagcccgtgctcggcatgacgtttgagtccgatgaggccgccaaggcattctacaacgactatgccaggcggcttggcttccccttccgcgtcggcaggtctcggcggtcgaagggcacagaggaggttgtcgtcatgaagaggttcgtttgctccagggaaggggtgtacaagaagaaacagacctcgccggatgaggcggcaaggaagcgtgagaggatgtctatgcgagagggttgcaatgctatgatggaggtggttagggaggcggaccattgggttgtctccaaacttgagaaggctcacaaccatgagctcggcacttgtagcgccaaggttgggtaccttcgtgcgagaagttctcttggtggctctgataaggccacaatggtggggcctgacgagatggcgtttcttaggcagaatgtcctgggggaaggaggagacgcccagggccttcttgattatctcaagaagatgcaagccaatgacccggcgttctgccatgctatacaggttgacaagaatggctgtgtggtgaatgttttctgggctgatgctagggccaaagcagcttatcggcatttcggggatgctataacgttcgacacgacgtacaagaagaacaagcatatgatgccctttgttactttctcgggagtcaaccatcatctgcagactgttatttttggatgtgcattgcttatggaagagactgagttctcgtttatatggctatttgaaacatggttagcggcaatgggaggtaaggcaccatgctcattggtcactgaccaaaacagggccatgaaggctgcaattgggaaggtttttccgaattcctgtcaccgtttctgtaagtggagtattctgagtagaaccaagcaaaagctgacccatacatactcagagcatccaaccctaagagatgagcttgagagctgtgtgcttgagactgaaaccatctcgacattcgaaaccacttggatgtcaatcattgatagatatgacttgagaaagaattcatggcttcaagcaatatacaatatccgccaaaaatgggttcctttgtacctgatggatacattctttgcagaaacgttccccacatggaaattggaaaccatgaatgatttctataagaaatatttcaatacaaaaacaacgcttgaagtttttcttaatcagttcgatttgagcttggcaggccgatatgaggatgaggcaaaagcagatatggatgcctacttaaataaggcaactacaaaaactgcatcgctaatagaaaaacaggcagcagggacctataccaaagcagtcttcagtaggtttcaggaggaatttacagagtctctagggtttatcattcagaaaaccgaagacggctgcataagtaaatacagcatcacaaaatatgaagatccatcagacacattctgcgtgacttataatgcttccaataagatggcaaactgtagttgcaagtactttgaattctccggtattctgtgccgccatattcttggagtatacataatagttgatccacgaacacttccaactgaatattttatgaaacgttggacaaggaaggcaagagatgatgatgctttgttagaagataataacaacaatactcatgatgaggatgcttctcagtccaccacaagccgctacaataccctatgtgctgatgccatcagatgtgctgagaaaggagctggatcggaggcagtatataaggcagcaaaagatatcttacagaaggcatatgaagagattattgcttatgaaagaaatactggccagggatctcaaagggatgttataaacatcaacgaggatgtcacgattgatgatgcaatgaatgataaatctatgccagattctggacgaaagcattagcagctgtcatgatcgtcatgcaatatctattttggattgggtagcagcgaacaactcaacaacacttggacatttcaacatgaaatgatctccatgagaagaccaggacaatttagtttgaagatgctggatcatttctgtgatgattaagtctttgtcacttcaataagcgtcctgtatggtgttgcctgtagccctgtatggccgaagctactaaaggataaattctgacacgacaacaatgtggcgttggaacatagcaggtaattagggtttgataaagttaaagcaaccgagtcccaaacttttgatcttgattcgtgcaaacggggacgatgcaacacattttcaaggtattctggacctttatgaagcatgctctgggcaggtcatcaacaaagacaagtcttctgttcactaaaaatacgagaagtgagacgaagatggcggtcatgcaagctctaaatttaacacaagggactttcaacgacagatatctgggcttaccagttcgctttgggcagtccaggacaaaaacttcttagtacttaaatgataatgtgacaacgtattcaaggttggaaagaaaagctgctgtcaaaagccagtaaataagtgctgataaaggccgtagcacaaggaattccaacatatgctatgggatgctttgacttaaggaagacttgtctgctcaaatcagcaatgccatattcagatattggtggagtcaacaggacatgggaaacaaagtgcattgggtgaattgggctaaaatgaaaacgctaagggcttgttcgtttcacggttagtccatgtggattggttagtccatgtggattgggtggtattgagtcggtttaaatccataacaaatcaaaatccattccaatacacttcagtccacatgaaactggaataatcgaacaaggtctaaagagttgtgatggaatggagtttagagatatcgtagtatgttcttttataaacttagtcaaaactaaacaagttcaacttcaacttataatgaaattaaatagacgaataagtacattgctaatgctggtcttcagagagtgcgatggtttgtttcatatgattcactatgatgcttgtatcatatataattaattcatgttccgcattcagtgacagattattgggatgatgccacaaactcctaatttctgttacaccggatacttctgttcccatttgtttgctgaaagacagcttgccccggttgcaattaagttcattgctttaaatctgcagaactgagggtactgtacaaaacgaggacgatgtagctgcccagttcttcg

SEQ ID NO: 33185 - DNA, 6334 bp, Zea Mays
ctcactcatgcgttcacaatcacacctgctgtttttcttctccagttcacctcgcgcgcgtgacaactagggagcccgccgccgcccaggtcttcgtcgaaccctttgccggcaacgagaacccgccacgccagtttcagcagctccgtaattgtggcgatggttgctcctacgggatcttgaattcttgacacacacacacaccgatggtaatggtgatggagggaggaaggacggaaggcgacgagctgattgctgattatgtggattgccttatgtctctggacaccaacacccggcctgtccacagcgatggtctcatcctcggtgctccaggcgggggaggagggacggtcgatgccggaactgagccagatgccatgagagatatcccctcatccgaggaccccaatgagcccgtgctcggcatgacgtttgagtccgatgaggccgccaaggcattctacaacgactatgccaggcggcttggcttccccttccgcgtcggcaggtctcggcggtcgaagggcacagaggaggttgtcgtcatgaagaggttcgtttgctccagggaaggggtgtacaagaagaaacagacctcgccggatgaggcggcaaggaagcgtgagaggatgtctatgcgagagggttgcaatgctatgatggaggtggttagggaggcggaccattgggttgtctccaaacttgagaaggctcacaaccatgagctcggcacttgtagcgccaaggttgggtaccttcgtgcgagaagttctcttggtggctctgataaggccacaatggtggggcctgacgagatggcgtttcttaggcagaatgtcctgggggaaggaggagacgcccagggccttcttgattatctcaagaagatgcaagccaatgacccggcgttctgccatgctatacaggttgacaagaatggctgtgtggtgaatgttttctgggctgatgctagggccaaagcagcttatcggcatttcggggatgctataacgttcgacacgacgtacaagaagaacaagcatatgatgccctttgttactttctcgggagtcaaccatcatctgcagactgttatttttggatgtgcattgcttatggaagagactgagttctcgtttatatggctatttgaaacatggttagcggcaatgggaggtaaggcaccatgctcattggtcactgaccaaaacagggccatgaaggctgcaattgggaaggtttttccgaattcctgtcaccgtttctgtaagtggagtattctgagtagaaccaagcaaaagctgacccatacatactcagagcatccaaccctaagagatgagcttgagagctgtgtgcttgagactgaaaccatctcgacattcgaaaccacttggatgtcaatcattgatagatatgacttgagaaagaattcatggcttcaagcaatatacaatatccgccaaaaatgggttcctttgtacctgatggatacattctttgcagaaacgttccccacatggaaattggaaaccatgaatgatttctataagaaatatttcaatacaaaaacaacgcttgaagtttttcttaatcagttcgatttgagcttggcaggccgatatgaggatgaggcaaaagcagatatggatgcctacttaaataaggcaactacaaaaactgcatcgctaatagaaaaacaggcagcagggacctataccaaagcagtcttcagtaggtttcaggaggaatttacagagtctctagggtttatcattcagaaaaccgaagacggctgcataagtaaatacagcatcacaaaatatgaagatccatcagacacattctgcgtgacttataatgcttccaataagatggcaaactgtagttgcaagtactttgaattctccggtattctgtgccgccatattcttggagtatacataatagttgatccacgaacacttccaactgaatattttatgaaacgttggacaaggaaggcaagagatgatgatgctttgttagaagataataacaacaatactcatgatgaggatgcttctcagtccaccacaagccgctacaataccctatgtgctgatgccatcagatgtgctgagaaaggagctggatcggaggcagtatataaggcagcaaaagatatcttacagaaggcatatgaagagattattgcttatgaaagaaatactggccagggatctcaaagggatgttataaacatcaacgaggatgtcacgattgatgatgcaatgaatgataaatctatgccagattctggacgaaaggtgactaatctactaggccaatttgttaattccacttggtctccggtctaatccacgtttttgtcatctctttggagatgaaaatgtgatttagcagcattagcagctgtcatgatcgtcatgcaatatctattttggattgggtagcagcgaacaactcaacaacacttggacatttcaacatgaaatgatctccatgagaagaatgtccgcctgacttcagtagaccaggacaatttagtttgaagatgctggatcatttctgtgatgattaagtctttgtcacttcaataagcgtcctgtatggtgttgcctgtagccctgtatggccgaagctactaaaggtaattagggtttgataaagttaaagcaaccgagtcccaaacttttgatcttgattcgtgcaaacggggacgatgcaacacattttcaaggtattctggacctttatgaagcatgctctgggcaggtcatcaacaaagacaagtcttctgttcactaaaaatacgagaagtgagacgaagatggcggtcatgcaagctctaaatttaacacaagggactttcaacgacagatatctgggcttaccagttcgctttgggcagtccaggacaaaaacttcttagtacttaaatgataatgtgacaacgtattcaaggttggaaagaaaagctgctgtcaaaagccagtaaataagtgctgataaaggccgtagcacaaggaattccaacatatgctatgggatgctttgacttaaggaagacttgtctgctcaaatcagcaatgccatattcagatattggtggagtcaacaggacatgggaaacaaagtgcattgggtgaattgggctaaaatgaaaacgctaagggcttgttcgtttcacggttagtccatgtggattggttagtccatgtggattgggtggtattgagtcggtttaaatccataacaaatcaaaatccattccaatacacttcagtccacatgaaactggaataatcgaacaaggtctaaagagttgtgatggaatggagtttagagatatcgtagtatgttcttttataaacttagtcaaaactaaacaagttcaacttcaacttataatgaaattaaatagacgaataagtacattgctaatgctggtcttcagagagtgcgatggtttgtttcatatgattcactatgatgcttgtatcatatataattaattcatgttccgcattcagtgacagattattgggatgatgccacaaactcctaatttctgttacaccggatacttctgttcccatttgtttgctgaaagacagcttgccccggttgcaattaagttcattgctttaaatctgcagaactgagggtactgtacaaaacgaggacgatgtagctgcccagttcttcgaggacgctgatttcttgtttaacgccgatgcctccattaatccgcatcacgtcgatcataacaactctagcgagtcaaattatttgtttgtttgtttgtttgtttgatcttttattataaaagacgacgaagagagaagaagaaaacgccagcaccatttgtaatctcgatccccgccgcacaagcttgatcggacggtcggacaccagacagtctgtcagagacaccaacgcccgggtccgctgccacggtgccaccgctgtttcccatgccggtcggcggtcgccgctccagttgaatttgaaggagcctgacggatcgatggcggccgcggcggaggtgtaccggcgggtgctgaaggcggtgcagaagcacgtcggtaggggcgccaccaagcagcgcttcctcgacttcggggcggccgagttccgtgcccccgtcggcacggaggccgacgctagggcgaggctgcggctcgccggggactacgcctacctcctcaccagcgtccaccaccacaaggatctgctgctctcgtacaatatagctgtggatcgatctgatgaaacgaagaagatactgaacaaatctgccgccagtgtcttgaaagagacactaactaggcacggcttcacctttgagtctgatacagacacagaagtcatccctaagctagcaaagttcgtttttgataaatctcatgatgaacaaggtgatgtgacgtttagccaagttgttatggaagtcatgaggcagcttgaaggagcctacgcacttatctttaaaagcccgcactatcccaatgaattgattgcatgcaaacgaggcagccaactgatacttggtgtcaacgaattgagtggtcaacagaatgggaaatcatttcatgatgtcaaaaccttgacaacaaatggaaagcccaaagaattattcttctccagtgatctatgtgctattgtagagcatacgaagaactacttagctcttgaagataatgaaattgttcatattaaggatggtagtgtttcgatcctcaagtttgaccctcacaaagagaagccagcatctgtgcaacgagcattgtctgttcttgagatggaagttgagcaaataaagaaaggaagttatgatcacttcatgcaaaaagaaatccatgaacagccacattcgttgaaaacaacaatgaggggtagattgaaggatggtggggttgttctaggtggactgaaggaatatctcaagacaattaggcgctgtagaagggtggtatttattggttgtggaacaagttacaatgctgccttagctgcaagaccttttgtggaagaactgactggtattcctgtgactatggaggttgcaagtgacttgctggacagacaaggtcccatctacagagaagacactgcagtttttgttagtcaatctggggagacagcagataccctccttgctctagattatgcactagaaaatggagctctctgtgttggcataacaaatactgttggaagcacgctgtctagaaaaacacactgtggggttcatatcaatgctggttgtgagattggtgttgccagtacaaaggcttatacaagtcaaatagtagccatggcgatgatggcgttggctattgggtccgatcagatatctactcaagctaggagggacagtatcatcagtggactgaacaacctttcaagcaatgtcagcgaagttctcaagctagatgctggaatgaaggagcttgcctcttcgctgatcgactcagagtcgctcctcgtgttcggaaggggttacaactacgccaccgcgctggagggcgccctgaaggtcaaggaggtggcgctgatgcacagcgagggcatgctcgctggcgagatgaagcacgggccgctggccctcgtggacgagaacctccccatcattgtcattgcgacccgcgacgcgtgcttcagcaagcagcagtcggtgatccaacagctcctctcgcgcagggggcgcctgatagtgatgtgctctaggggagatgccgcggctgtgtgccctagcggtgggtcgtgcagagtcattgaagttccacaggttgcagactgtctccagccagtgatcaacataattccattacagttgctcgcgtaccatctgactgttctccggggattcgacgtggaccaaccaaggaatctggcgaagagcgtgaccacgcagtagggagaggtagatgagatgtttgtattgtagttaattgtccttgctcttgaggtggctagtacgtagcataaatattatggtgcgttaaacttgttgttttgtgaacgaaatgtacctctctttttttaattatggtatattggtgtcaatagcaactcggtatccctgggaattctcatgtcagaaacttcagtttcttcatgggagcgtgcacgatcaggaacttcagaaagccaccttttcagtatagtatctacataaacacgagcacaagtcaatccctctaattgatatatgcaagttttattaacagcataaattaaatggagggatggtctattagtgtatgttgctcgtaggatcgatcgaataaatgagctcagtgaaatcaatgacgtattttac

SEQ ID NO: 33186 - DNA, 5575 bp, Zea Mays
ctcactcatgcgttcacaatcacacctgctgtttttcttctccagttcacctcgcgcgcgtgacaactagggagcccgccgccgcccaggtcttcgtcgaaccctttgccggcaacgagaacccgccacgccaggtatgcccgtcccttctcttcccttcctgctgtgcgaagttcagcacccgaaccctagctcaagctatttgtattcggatctgatttaaccacaactgtatactacatgtattgtgcctactaaattcgtttttttttttgcaaaaaaaaagaaaaagaaaaagaaaaaacaactacagccatatctacacttatcccgctactagtttcagcagctccgtaattgtggcgatggttgctcctacgggatcttgaattcttgacacacacacacaccgatggtaatggtgatggagggaggaaggacggaaggcgacgagctgattgctgattatgtggattgccttatgtctctggacaccaacacccggcctgtccacagcgatggtctcatcctcggtgctccaggcgggggaggagggacggtcgatgccggaactgagccagatgccatgagagatatcccctcatccgaggaccccaatgagcccgtgctcggcatgacgtttgagtccgatgaggccgccaaggcattctacaacgactatgccaggcggcttggcttccccttccgcgtcggcaggtctcggcggtcgaagggcacagaggaggttgtcgtcatgaagaggttcgtttgctccagggaaggggtgtacaagaagaaacagacctcgccggatgaggcggcaaggaagcgtgagaggatgtctatgcgagagggttgcaatgctatgatggaggtggttagggaggcggaccattgggttgtctccaaacttgagaaggctcacaaccatgagctcggcacttgtagcgccaaggttgggtaccttcgtgcgagaagttctcttggtggctctgataaggccacaatggtggggcctgacgagatggcgtttcttaggcagaatgtcctgggggaaggaggagacgcccagggccttcttgattatctcaagaagatgcaagccaatgacccggcgttctgccatgctatacaggttgacaagaatggctgtgtggtgaatgttttctgggctgatgctagggccaaagcagcttatcggcatttcggggatgctataacgttcgacacgacgtacaagaagaacaagcatatgatgccctttgttactttctcgggagtcaaccatcatctgcagactgttatttttggatgtgcattgcttatggaagagactgagttctcgtttatatggctatttgaaacatggttagcggcaatgggaggtaaggcaccatgctcattggtcactgaccaaaacagggccatgaaggctgcaattgggaaggtttttccgaattcctgtcaccgtttctgtaagtggagtattctgagtagaaccaagcaaaagctgacccatacatactcagagcatccaaccctaagagatgagcttgagagctgtgtgcttgagactgaaaccatctcgacattcgaaaccacttggatgtcaatcattgatagatatgacttgagaaagaattcatggcttcaagcaatatacaatatccgccaaaaatgggttcctttgtacctgatggatacattctttgcagaaacgttccccacatggaaattggaaaccatgaatgatttctataagaaatatttcaatacaaaaacaacgcttgaagtttttcttaatcagttcgatttgagcttggcaggccgatatgaggatgaggcaaaagcagatatggatgcctacttaaataaggcaactacaaaaactgcatcgctaatagaaaaacaggcagcagggacctataccaaagcagtcttcagtaggtttcaggaggaatttacagagtctctagggtttatcattcagaaaaccgaagacggctgcataagtaaatacagcatcacaaaatatgaagatccatcagacacattctgcgtgacttataatgcttccaataagatggcaaactgtagttgcaagtactttgaattctccggtattctgtgccgccatattcttggagtatacataatagttgatccacgaacacttccaactgaatattttatgaaacgttggacaaggaaggcaagagatgatgatgctttgttagaagataataacaacaatactcatgatgaggatgcttctcagtccaccacaagccgctacaataccctatgtgctgatgccatcagatgtgctgagaaaggagctggatcggaggcagtatataaggcagcaaaagatatcttacagaaggcatatgaagagattattgcttatgaaagaaatactggccagggatctcaaagggatgttataaacatcaacgaggatgtcacgattgatgatgcaatgaatgataaatctatgccagattctggacgaaaggtgactaatctactaggccaatttgttaattccacttggtctccggtctaatccacgtttttgtcatctctttggagatgaaaatgtgatttagcagcattagcagctgtcatgatcgtcatgcaatatctattttggattgggtagcagcgaacaactcaacaacacttggacatttcaacatgaaatgatctccatgagaagaatgtccgcctgacttcagtagaccaggacaatttagtttgaagatgctggatcatttctgtgatgattaagtctttgtcacttcaataagcgtcctgtatggtgttgcctgtagccctgtatggccgaagctactaaaggataaattctgacacgacaacaatgtggcgttggaacatagcagaactgagggtactgtacaaaacgaggacgatgtagctgcccagttcttcgaggacgctgatttcttgtttaacgccgatgcctccattaatccgcatcacgtcgatcataacaactctagcgagtcaaattatttgtttgtttgtttgtttgtttgatcttttattataaaagacgacgaagagagaagaagaaaacgccagcaccatttgtaatctcgatccccgccgcacaagcttgatcggacggtcggacaccagacagtctgtcagagacaccaacgcccgggtccgctgccacggtgccaccgctgtttcccatgccggtcggcggtcgccgctccagttgaatttgaaggagcctgacggatcgatggcggccgcggcggaggtgtaccggcgggtgctgaaggcggtgcagaagcacgtcggtaggggcgccaccaagcagcgcttcctcgacttcggggcggccgagttccgtgcccccgtcggcacggaggccgacgctagggcgaggctgcggctcgccggggactacgcctacctcctcaccagcgtccaccaccacaaggatctgctgctctcgtacaatatagctgtggatcgatctgatgaaacgaagaagatactgaacaaatctgccgccagtgtcttgaaagagacactaactaggcacggcttcacctttgagtctgatacagacacagaagtcatccctaagctagcaaagttcgtttttgataaatctcatgatgaacaaggtgatgtgacgtttagccaagttgttatggaagtcatgaggcagcttgaaggagcctacgcacttatctttaaaagcccgcactatcccaatgaattgattgcatgcaaacgaggcagccaactgatacttggtgtcaacgaattgagtggtcaacagaatgggaaatcatttcatgatgtcaaaaccttgacaacaaatggaaagcccaaagaattattcttctccagtgatctatgtgctattgtagagcatacgaagaactacttagctcttgaagataatgaaattgttcatattaaggatggtagtgtttcgatcctcaagtttgaccctcacaaagagaagccagcatctgtgcaacgagcattgtctgttcttgagatggaagttgagcaaataaagaaaggaagttatgatcacttcatgcaaaaagaaatccatgaacagccacattcgttgaaaacaacaatgaggggtagattgaaggatggtggggttgttctaggtggactgaaggaatatctcaagacaattaggcgctgtagaagggtggtatttattggttgtggaacaagttacaatgctgccttagctgcaagaccttttgtggaagaactgactggtattcctgtgactatggaggttgcaagtgacttgctggacagacaaggtcccatctacagagaagacactgcagtttttgttagtcaatctggggagacagcagataccctccttgctctagattatgcactagaaaatggagctctctgtgttggcataacaaatactgttggaagcacgctgtctagaaaaacacactgtggggttcatatcaatgctggttgtgagattggtgttgccagtacaaaggcttatacaagtcaaatagtagccatggcgatgatggcgttggctattgggtccgatcagatatctactcaagctaggagggacagtatcatcagtggactgaacaacctttcaagcaatgtcagcgaagttctcaagctagatgctggaatgaaggagcttgcctcttcgctgatcgactcagagtcgctcctcgtgttcggaaggggttacaactacgccaccgcgctggagggcgccctgaaggtcaaggaggtggcgctgatgcacagcgagggcatgctcgctggcgagatgaagcacgggccgctggccctcgtggacgagaacctccccatcattgtcattgcgacccgcgacgcgtgcttcagcaagcagcagtcggtgatccaacagctcctctcgcgcagggggcgcctgatagtgatgtgctctaggggagatgccgcggctgtgtgccctagcggtgggtcgtgcagagtcattgaagttccacaggttgcagactgtctccagccagtgatcaacataattccattacagttgctcgcgtaccatctgactgttctccggggattcgacgtggaccaaccaaggaatctggcgaagagcgtgaccacgcagtagggagaggtagatgagatgtttgtattgtagttaattgtccttgctcttgaggtggctagtacgtagcataaatattatggtgcgttaaacttgttgttttgtgaacgaaatgtacctctctttttttaattatggtatattggtgtcaatagcaactcggtatccctgggaattctcatgtcagaaacttcagtttcttcatgggagcgtgcacgatcaggaacttcagaaagccaccttttcagtatagtatctacataaacacgagcacaagtcaatccctctaattgatatatgcaagttttattaacagcataaattaaatggagggatggtctattagtgtatgttgctcgtaggatcgatcgaataaatgagctcagtgaaatcaatgacgtattttac

SEQ ID NO: 33187 - DNA, 2354 bp, Zea Mays
aaggacaggcagcaggcagcagggagtggtggtggcaatgggcacgcaaatgcagagagaagaagctgtaccttttggttgggttgggttgggttgggtcgtgttgacaaaccatcccaattgttagacagattgatcctccgggtggtggatgcgatgccgaggttgatgagaaggatgtgaacctggatgctgcgttcagtgtgcatgctgggatcgcacataccaggtgggccacgcacggtgtgcctgctccaaggaacagccacccccaatcgtctggtgccggtgatgagttcttggttgtccacaatggcattatcaccaactatgaggtcttgaaagagacactaactaggcacggcttcacctttgagtctgatacagacacagaagtcatccctaagctagcaaagttcgtttttgataaatctcatgatgaacaaggtgatgtgacgtttagccaagttgttatggaagtcatgaggcagcttgaaggagcctacgcacttatctttaaaagcccgcactatcccaatgaattgattgcatgcaaacgaggcagccaactgatacttggtgtcaacgaattgagtggtcaacagaatgggaaatcatttcatgatgtcaaaaccttgacaacaaatggaaagcccaaagaattattcttctccagtgatctatgtgctattgtagagcatacgaagaactacttagctcttgaagataatgaaattgttcatattaaggatggtagtgtttcgatcctcaagtttgaccctcacaaagagaagccagcatctgtgcaacgagcattgtctgttcttgagatggaagttgagcaaataaagaaaggaagttatgatcacttcatgcaaaaagaaatccatgaacagccacattcgttgaaaacaacaatgaggggtagattgaaggatggtggggttgttctaggtggactgaaggaatatctcaagacaattaggcgctgtagaagggtggtatttattggttgtggaacaagttacaatgctgccttagctgcaagaccttttgtggaagaactgactggtattcctgtgactatggaggttgcaagtgacttgctggacagacaaggtcccatctacagagaagacactgcagtttttgttagtcaatctggggagacagcagataccctccttgctctagattatgcactagaaaatggagctctctgtgttggcataacaaatactgttggaagcacgctgtctagaaaaacacactgtggggttcatatcaatgctggttgtgagattggtgttgccagtacaaaggcttatacaagtcaaatagtagccatggcgatgatggcgttggctattgggtccgatcagatatctactcaagctaggagggacagtatcatcagtggactgaacaacctttcaagcaatgtcagcgaagttctcaagctagatgctggaatgaaggagcttgcctcttcgctgatcgactcagagtcgctcctcgtgttcggaaggggttacaactacgccaccgcgctggagggcgccctgaaggtcaaggaggtggcgctgatgcacagcgagggcatgctcgctggcgagatgaagcacgggccgctggccctcgtggacgagaacctccccatcattgtcattgcgacccgcgacgcgtgcttcagcaagcagcagtcggtgatccaacagctcctctcgcgcagggggcgcctgatagtgatgtgctctaggggagatgccgcggctgtgtgccctagcggtgggtcgtgcagagtcattgaagttccacaggttgcagactgtctccagccagtgatcaacataattccattacagttgctcgcgtaccatctgactgttctccggggattcgacgtggaccaaccaaggaatctggcgaagagcgtgaccacgcagtagggagaggtagatgagatgtttgtattgtagttaattgtccttgctcttgaggtggctagtacgtagcataaatattatggtgcgttaaacttgttgttttgtgaacgaaatgtacctctctttttttaattatggtatattggtgtcaatagcaactcggtatccctgggaattctcatgtcagaaacttcagtttcttcatgggagcgtgcacgatcaggaacttcagaaagccaccttttcagtatagtatctacataaacacgagcacaagtcaatccctctaattgatatatgcaagttttattaacagcataaattaaatggagggatggtctattagtgtatgttgctcgtaggatcgatcgaataaatgagctcagtgaaatcaatgacgtattttac

SEQ ID NO: 33188 - DNA, 2265 bp, Zea Mays
gtcgtgttgacaaaccatcccaattgttagacagattgatcctccgggtggtggatgcgatgccgaggttgatgagaaggatgtgaacctggatgctgcgttcagtgtgcatgctgggatcgcacataccaggtgggccacgcacggtgtgcctgctccaaggaacagccacccccaatcgtctggtgccggtgatgagttcttggttgtccacaatggcattatcaccaactatgaggtcttgaaagagacactaactaggcacggcttcacctttgagtctgatacagacacagaagtcatccctaagctagcaaagttcgtttttgataaatctcatgatgaacaaggtgatgtgacgtttagccaagttgttatggaagtcatgaggcagcttgaaggagcctacgcacttatctttaaaagcccgcactatcccaatgaattgattgcatgcaaacgaggcagccaactgatacttggtgtcaacgaattgagtggtcaacagaatgggaaatcatttcatgatgtcaaaaccttgacaacaaatggaaagcccaaagaattattcttctccagtgatctatgtgctattgtagagcatacgaagaactacttagctcttgaagataatgaaattgttcatattaagcattgcaggatggtagtgtttcgatcctcaagtttgaccctcacaaagagaagccagcatctgtgcaacgagcattgtctgttcttgagatggaagttgagcaaataaagaaaggaagttatgatcacttcatgcaaaaagaaatccatgaacagccacattcgttgaaaacaacaatgaggggtagattgaaggatggtggggttgttctaggtggactgaaggaatatctcaagacaattaggcgctgtagaagggtggtatttattggttgtggaacaagttacaatgctgccttagctgcaagaccttttgtggaagaactgactggtattcctgtgactatggaggttgcaagtgacttgctggacagacaaggtcccatctacagagaagacactgcagtttttgttagtcaatctggggagacagcagataccctccttgctctagattatgcactagaaaatggagctctctgtgttggcataacaaatactgttggaagcacgctgtctagaaaaacacactgtggggttcatatcaatgctggttgtgagattggtgttgccagtacaaaggcttatacaagtcaaatagtagccatggcgatgatggcgttggctattgggtccgatcagatatctactcaagctaggagggacagtatcatcagtggactgaacaacctttcaagcaatgtcagcgaagttctcaagctagatgctggaatgaaggagcttgcctcttcgctgatcgactcagagtcgctcctcgtgttcggaaggggttacaactacgccaccgcgctggagggcgccctgaaggtcaaggaggtggcgctgatgcacagcgagggcatgctcgctggcgagatgaagcacgggccgctggccctcgtggacgagaacctccccatcattgtcattgcgacccgcgacgcgtgcttcagcaagcagcagtcggtgatccaacagctcctctcgcgcagggggcgcctgatagtgatgtgctctaggggagatgccgcggctgtgtgccctagcggtgggtcgtgcagagtcattgaagttccacaggttgcagactgtctccagccagtgatcaacataattccattacagttgctcgcgtaccatctgactgttctccggggattcgacgtggaccaaccaaggaatctggcgaagagcgtgaccacgcagtagggagaggtagatgagatgtttgtattgtagttaattgtccttgctcttgaggtggctagtacgtagcataaatattatggtgcgttaaacttgttgttttgtgaacgaaatgtacctctctttttttaattatggtatattggtgtcaatagcaactcggtatccctgggaattctcatgtcagaaacttcagtttcttcatgggagcgtgcacgatcaggaacttcagaaagccaccttttcagtatagtatctacataaacacgagcacaagtcaatccctctaattgatatatgcaagttttattaacagcataaattaaatggagggatggtctattagtgtatgttgctcgtaggatcgatcgaataaatgagctcagtgaaatcaatgacgtattttac

SEQ ID NO: 33189 - DNA, 2507 bp, Zea Mays
ccaattgttagacagattgatcctccgggtggtggatgcgatgccgccaggaaggaaggatgtgcgggatcttcgcctacctcaactacaacgtctcgcgggagcgccgctacatcctcgaggtcctcttcaacggcctccgccgcctcgagtaccgcggctacgactccgccgggatcgcgctcgatgccgaccgccaggtcccctcccccgctcccgcttcctcttccgacgcgcggccgtacgccggggcgccgccgctcgtgttccgccaggagggcaagatcgagaacctcgtgcgatccgtctactccgaggttgatgagaaggatgtgaacctggatgctgcgttcagtgtgcatgctgggatcgcacataccaggtgggccacgcacggtgtgcctgctccaaggaacagccacccccaatcgtctggtgccggtgatgagttcttggttgtccacaatggcattatcaccaactatgaggtcttgaaagagacactaactaggcacggcttcacctttgagtctgatacagacacagaagtcatccctaagctagcaaagttcgtttttgataaatctcatgatgaacaaggtgatgtgacgtttagccaagttgttatggaagtcatgaggcagcttgaaggagcctacgcacttatctttaaaagcccgcactatcccaatgaattgattgcatgcaaacgaggcagccaactgatacttggtgtcaacgaattgagtggtcaacagaatgggaaatcatttcatgatgtcaaaaccttgacaacaaatggaaagcccaaagaattattcttctccagtgatctatgtgctattgtagagcatacgaagaactacttagctcttgaagataatgaaattgttcatattaaggatggtagtgtttcgatcctcaagtttgaccctcacaaagagaagccagcatctgtgcaacgagcattgtctgttcttgagatggaagttgagcaaataaagaaaggaagttatgatcacttcatgcaaaaagaaatccatgaacagccacattcgttgaaaacaacaatgaggggtagattgaaggatggtggggttgttctaggtggactgaaggaatatctcaagacaattaggcgctgtagaagggtggtatttattggttgtggaacaagttacaatgctgccttagctgcaagaccttttgtggaagaactgactggtattcctgtgactatggaggttgcaagtgacttgctggacagacaaggtcccatctacagagaagacactgcagtttttgttagtcaatctggggagacagcagataccctccttgctctagattatgcactagaaaatggagctctctgtgttggcataacaaatactgttggaagcacgctgtctagaaaaacacactgtggggttcatatcaatgctggttgtgagattggtgttgccagtacaaaggcttatacaagtcaaatagtagccatggcgatgatggcgttggctattgggtccgatcagatatctactcaagctaggagggacagtatcatcagtggactgaacaacctttcaagcaatgtcagcgaagttctcaagctagatgctggaatgaaggagcttgcctcttcgctgatcgactcagagtcgctcctcgtgttcggaaggggttacaactacgccaccgcgctggagggcgccctgaaggtcaaggaggtggcgctgatgcacagcgagggcatgctcgctggcgagatgaagcacgggccgctggccctcgtggacgagaacctccccatcattgtcattgcgacccgcgacgcgtgcttcagcaagcagcagtcggtgatccaacagctcctctcgcgcagggggcgcctgatagtgatgtgctctaggggagatgccgcggctgtgtgccctagcggtgggtcgtgcagagtcattgaagttccacaggttgcagactgtctccagccagtgatcaacataattccattacagttgctcgcgtaccatctgactgttctccggggattcgacgtggaccaaccaaggaatctggcgaagagcgtgaccacgcagtagggagaggtagatgagatgtttgtattgtagttaattgtccttgctcttgaggtggctagtacgtagcataaatattatggtgcgttaaacttgttgttttgtgaacgaaatgtacctctctttttttaattatggtatattggtgtcaatagcaactcggtatccctgggaattctcatgtcagaaacttcagtttcttcatgggagcgtgcacgatcaggaacttcagaaagccaccttttcagtatagtatctacataaacacgagcacaagtcaatccctctaattgatatatgcaagttttattaacagcataaattaaatggagggatggtctattagtgtatgttgctcgtaggatcgatcgaataaatgagctcagtgaaatcaatgacgtattttac

SEQ ID NO: 33190 - DNA, 2400 bp, Zea Mays
cgcgaacccaataatgcatgtggtgaggctgaggcaggcccagctgtcagctctcagctggccgtgtctgactctgacctccggacgccagccgcacaagtggagtcatgtgcgcagcccgggcaacgtgatcccgtccagccaatcgtatcgctccacctccaaccccattacctcaagtacctctcactttccaaattaggttgatgagaaggatgtgaacctggatgctgcgttcagtgtgcatgctgggatcgcacataccaggtgggccacgcacggtgtgcctgctccaaggaacagccacccccaatcgtctggtgccggtgatgagttcttggttgtccacaatggcattatcaccaactatgaggtcttgaaagagacactaactaggcacggcttcacctttgagtctgatacagacacagaagtcatccctaagctagcaaagttcgtttttgataaatctcatgatgaacaaggtgatgtgacgtttagccaagttgttatggaagtcatgaggcagcttgaaggagcctacgcacttatctttaaaagcccgcactatcccaatgaattgattgcatgcaaacgaggcagccaactgatacttggtgtcaacgaattgagtggtcaacagaatgggaaatcatttcatgatgtcaaaaccttgacaacaaatggaaagcccaaagaattattcttctccagtgatctatgtgctattgtagagcatacgaagaactacttagctcttgaagataatgaaattgttcatattaagcattgcaggatggtagtgtttcgatcctcaagtttgaccctcacaaagagaagccagcatctgtgcaacgagcattgtctgttcttgagatggaagttgagcaaataaagaaaggaagttatgatcacttcatgcaaaaagaaatccatgaacagccacattcgttgaaaacaacaatgaggggtagattgaaggatggtggggttgttctaggtggactgaaggaatatctcaagacaattaggcgctgtagaagggtggtatttattggttgtggaacaagttacaatgctgccttagctgcaagaccttttgtggaagaactgactggtattcctgtgactatggaggttgcaagtgacttgctggacagacaaggtcccatctacagagaagacactgcagtttttgttagtcaatctggggagacagcagataccctccttgctctagattatgcactagaaaatggagctctctgtgttggcataacaaatactgttggaagcacgctgtctagaaaaacacactgtggggttcatatcaatgctggttgtgagattggtgttgccagtacaaaggcttatacaagtcaaatagtagccatggcgatgatggcgttggctattgggtccgatcagatatctactcaagctaggagggacagtatcatcagtggactgaacaacctttcaagcaatgtcagcgaagttctcaagctagatgctggaatgaaggagcttgcctcttcgctgatcgactcagagtcgctcctcgtgttcggaaggggttacaactacgccaccgcgctggagggcgccctgaaggtcaaggaggtggcgctgatgcacagcgagggcatgctcgctggcgagatgaagcacgggccgctggccctcgtggacgagaacctccccatcattgtcattgcgacccgcgacgcgtgcttcagcaagcagcagtcggtgatccaacagctcctctcgcgcagggggcgcctgatagtgatgtgctctaggggagatgccgcggctgtgtgccctagcggtgggtcgtgcagagtcattgaagttccacaggttgcagactgtctccagccagtgatcaacataattccattacagttgctcgcgtaccatctgactgttctccggggattcgacgtggaccaaccaaggaatctggcgaagagcgtgaccacgcagtagggagaggtagatgagatgtttgtattgtagttaattgtccttgctcttgaggtggctagtacgtagcataaatattatggtgcgttaaacttgttgttttgtgaacgaaatgtacctctctttttttaattatggtatattggtgtcaatagcaactcggtatccctgggaattctcatgtcagaaacttcagtttcttcatgggagcgtgcacgatcaggaacttcagaaagccaccttttcagtatagtatctacataaacacgagcacaagtcaatccctctaattgatatatgcaagttttattaacagcataaattaaatggagggatggtctattagtgtatgttgctcgtaggatcgatcgaataaatgagctcagtgaaatcaatgacgtattttac

SEQ ID NO: 33191 - DNA, 2729 bp, Zea Mays
cttttgtcgtactcgtacctctgcaatccgcggcatccatggattggtttgcttgaccccgtcgccgcgtcggtcgtcggccaccatcgaagccacgcggcttcttccttctgcgtttctgcccctcctcgcacccgcactgcccgcccgttcgtccgtcgtcgtcttcgccgctccctcccggcctcccgggctggacgaaacgaaccctcgctcgccctccttataaccgaacggccgaacccagccaacccagccgtttctcttcccaggaaggaaggatgtgcgggatcttcgcctacctcaactacaacgtctcgcgggagcgccgctacatcctcgaggtcctcttcaacggcctccgccgcctcgagtaccgcggctacgactccgccgggatcgcgctcgatgccgaccgccaggtcccctcccccgctcccgcttcctcttccgacgcgcggccgtacgccggggcgccgccgctcgtgttccgccaggagggcaagatcgagaacctcgtgcgatccgtctactccgaggttgatgagaaggatgtgaacctggatgctgcgttcagtgtgcatgctgggatcgcacataccaggtgggccacgcacggtgtgcctgctccaaggaacagccacccccaatcgtctggtgccggtgatgagttcttggttgtccacaatggcattatcaccaactatgaggtcttgaaagagacactaactaggcacggcttcacctttgagtctgatacagacacagaagtcatccctaagctagcaaagttcgtttttgataaatctcatgatgaacaaggtgatgtgacgtttagccaagttgttatggaagtcatgaggcagcttgaaggagcctacgcacttatctttaaaagcccgcactatcccaatgaattgattgcatgcaaacgaggcagccaactgatacttggtgtcaacgaattgagtggtcaacagaatgggaaatcatttcatgatgtcaaaaccttgacaacaaatggaaagcccaaagaattattcttctccagtgatctatgtgctattgtagagcatacgaagaactacttagctcttgaagataatgaaattgttcatattaaggatggtagtgtttcgatcctcaagtttgaccctcacaaagagaagccagcatctgtgcaacgagcattgtctgttcttgagatggaagttgagcaaataaagaaaggaagttatgatcacttcatgcaaaaagaaatccatgaacagccacattcgttgaaaacaacaatgaggggtagattgaaggatggtggggttgttctaggtggactgaaggaatatctcaagacaattaggcgctgtagaagggtggtatttattggttgtggaacaagttacaatgctgccttagctgcaagaccttttgtggaagaactgactggtattcctgtgactatggaggttgcaagtgacttgctggacagacaaggtcccatctacagagaagacactgcagtttttgttagtcaatctggggagacagcagataccctccttgctctagattatgcactagaaaatggagctctctgtgttggcataacaaatactgttggaagcacgctgtctagaaaaacacactgtggggttcatatcaatgctggttgtgagattggtgttgccagtacaaaggcttatacaagtcaaatagtagccatggcgatgatggcgttggctattgggtccgatcagatatctactcaagctaggagggacagtatcatcagtggactgaacaacctttcaagcaatgtcagcgaagttctcaagctagatgctggaatgaaggagcttgcctcttcgctgatcgactcagagtcgctcctcgtgttcggaaggggttacaactacgccaccgcgctggagggcgccctgaaggtcaaggaggtggcgctgatgcacagcgagggcatgctcgctggcgagatgaagcacgggccgctggccctcgtggacgagaacctccccatcattgtcattgcgacccgcgacgcgtgcttcagcaagcagcagtcggtgatccaacagctcctctcgcgcagggggcgcctgatagtgatgtgctctaggggagatgccgcggctgtgtgccctagcggtgggtcgtgcagagtcattgaagttccacaggttgcagactgtctccagccagtgatcaacataattccattacagttgctcgcgtaccatctgactgttctccggggattcgacgtggaccaaccaaggaatctggcgaagagcgtgaccacgcagtagggagaggtagatgagatgtttgtattgtagttaattgtccttgctcttgaggtggctagtacgtagcataaatattatggtgcgttaaacttgttgttttgtgaacgaaatgtacctctctttttttaattatggtatattggtgtcaatagcaactcggtatccctgggaattctcatgtcagaaacttcagtttcttcatgggagcgtgcacgatcaggaacttcagaaagccaccttttcagtatagtatctacataaacacgagcacaagtcaatccctctaattgatatatgcaagttttattaacagcataaattaaatggagggatggtctattagtgtatgttgctcgtaggatcgatcgaataaatgagctcagtgaaatcaatgacgtattttac

SEQ ID NO: 33192 - DNA, 2084 bp, Zea Mays
caaaaattgatcctgtgtttatggacatttatgacactcaagtctgaaccatcatagacttcaatgtcttgaaagagacactaactaggcacggcttcacctttgagtctgatacagacacagaagtcatccctaagctagcaaagttcgtttttgataaatctcatgatgaacaaggtgatgtgacgtttagccaagttgttatggaagtcatgaggcagcttgaaggagcctacgcacttatctttaaaagcccgcactatcccaatgaattgattgcatgcaaacgaggcagccaactgatacttggtgtcaacgaattgagtggtcaacagaatgggaaatcatttcatgatgtcaaaaccttgacaacaaatggaaagcccaaagaattattcttctccagtgatctatgtgctattgtagagcatacgaagaactacttagctcttgaagataatgaaattgttcatattaaggatggtagtgtttcgatcctcaagtttgaccctcacaaagagaagccagcatctgtgcaacgagcattgtctgttcttgagatggaagttgagcaaataaagaaaggaagttatgatcacttcatgcaaaaagaaatccatgaacagccacattcgttgaaaacaacaatgaggggtagattgaaggatggtggggttgttctaggtggactgaaggaatatctcaagacaattaggcgctgtagaagggtggtatttattggttgtggaacaagttacaatgctgccttagctgcaagaccttttgtggaagaactgactggtattcctgtgactatggaggttgcaagtgacttgctggacagacaaggtcccatctacagagaagacactgcagtttttgttagtcaatctggggagacagcagataccctccttgctctagattatgcactagaaaatggagctctctgtgttggcataacaaatactgttggaagcacgctgtctagaaaaacacactgtggggttcatatcaatgctggttgtgagattggtgttgccagtacaaaggcttatacaagtcaaatagtagccatggcgatgatggcgttggctattgggtccgatcagatatctactcaagctaggagggacagtatcatcagtggactgaacaacctttcaagcaatgtcagcgaagttctcaagctagatgctggaatgaaggagcttgcctcttcgctgatcgactcagagtcgctcctcgtgttcggaaggggttacaactacgccaccgcgctggagggcgccctgaaggtcaaggaggtggcgctgatgcacagcgagggcatgctcgctggcgagatgaagcacgggccgctggccctcgtggacgagaacctccccatcattgtcattgcgacccgcgacgcgtgcttcagcaagcagcagtcggtgatccaacagctcctctcgcgcagggggcgcctgatagtgatgtgctctaggggagatgccgcggctgtgtgccctagcggtgggtcgtgcagagtcattgaagttccacaggttgcagactgtctccagccagtgatcaacataattccattacagttgctcgcgtaccatctgactgttctccggggattcgacgtggaccaaccaaggaatctggcgaagagcgtgaccacgcagtagggagaggtagatgagatgtttgtattgtagttaattgtccttgctcttgaggtggctagtacgtagcataaatattatggtgcgttaaacttgttgttttgtgaacgaaatgtacctctctttttttaattatggtatattggtgtcaatagcaactcggtatccctgggaattctcatgtcagaaacttcagtttcttcatgggagcgtgcacgatcaggaacttcagaaagccaccttttcagtatagtatctacataaacacgagcacaagtcaatccctctaattgatatatgcaagttttattaacagcataaattaaatggagggatggtctattagtgtatgttgctcgtaggatcgatcgaataaatgagctcagtgaaatcaatgacgtattttac

SEQ ID NO: 33193 - DNA, 2057 bp, Zea Mays
actcaagtctgaaccatcatagacttcaatgtcttgaaagagacactaactaggcacggcttcacctttgagtctgatacagacacagaagtcatccctaagctagcaaagttcgtttttgataaatctcatgatgaacaaggtgatgtgacgtttagccaagttgttatggaagtcatgaggcagcttgaaggagcctacgcacttatctttaaaagcccgcactatcccaatgaattgattgcatgcaaacgaggcagccaactgatacttggtgtcaacgaattgagtggtcaacagaatgggaaatcatttcatgatgtcaaaaccttgacaacaaatggaaagcccaaagaattattcttctccagtgatctatgtgctattgtagagcatacgaagaactacttagctcttgaagataatgaaattgttcatattaagcattgcaggatggtagtgtttcgatcctcaagtttgaccctcacaaagagaagccagcatctgtgcaacgagcattgtctgttcttgagatggaagttgagcaaataaagaaaggaagttatgatcacttcatgcaaaaagaaatccatgaacagccacattcgttgaaaacaacaatgaggggtagattgaaggatggtggggttgttctaggtggactgaaggaatatctcaagacaattaggcgctgtagaagggtggtatttattggttgtggaacaagttacaatgctgccttagctgcaagaccttttgtggaagaactgactggtattcctgtgactatggaggttgcaagtgacttgctggacagacaaggtcccatctacagagaagacactgcagtttttgttagtcaatctggggagacagcagataccctccttgctctagattatgcactagaaaatggagctctctgtgttggcataacaaatactgttggaagcacgctgtctagaaaaacacactgtggggttcatatcaatgctggttgtgagattggtgttgccagtacaaaggcttatacaagtcaaatagtagccatggcgatgatggcgttggctattgggtccgatcagatatctactcaagctaggagggacagtatcatcagtggactgaacaacctttcaagcaatgtcagcgaagttctcaagctagatgctggaatgaaggagcttgcctcttcgctgatcgactcagagtcgctcctcgtgttcggaaggggttacaactacgccaccgcgctggagggcgccctgaaggtcaaggaggtggcgctgatgcacagcgagggcatgctcgctggcgagatgaagcacgggccgctggccctcgtggacgagaacctccccatcattgtcattgcgacccgcgacgcgtgcttcagcaagcagcagtcggtgatccaacagctcctctcgcgcagggggcgcctgatagtgatgtgctctaggggagatgccgcggctgtgtgccctagcggtgggtcgtgcagagtcattgaagttccacaggttgcagactgtctccagccagtgatcaacataattccattacagttgctcgcgtaccatctgactgttctccggggattcgacgtggaccaaccaaggaatctggcgaagagcgtgaccacgcagtagggagaggtagatgagatgtttgtattgtagttaattgtccttgctcttgaggtggctagtacgtagcataaatattatggtgcgttaaacttgttgttttgtgaacgaaatgtacctctctttttttaattatggtatattggtgtcaatagcaactcggtatccctgggaattctcatgtcagaaacttcagtttcttcatgggagcgtgcacgatcaggaacttcagaaagccaccttttcagtatagtatctacataaacacgagcacaagtcaatccctctaattgatatatgcaagttttattaacagcataaattaaatggagggatggtctattagtgtatgttgctcgtaggatcgatcgaataaatgagctcagtgaaatcaatgacgtattttac

SEQ ID NO: 33194 - DNA, 6827 bp, Zea Mays
gtctgattatgtgatccgacactcccgaaacccagcccaggccgccgccgccgccatggcctccgacgacggcgacaaggacatcctcctcctcgtccaccaggtcccactcgacatggaggatgtgccagcgccccgcctggcgcacctcctcgccccgctccaccgcgcgcctccaccgcccccgcctccccccttccgctcgccgcccccgccccaggccgccgcttccgccgagcaccgcctctcattccgcggctggctcggcatcccccgccactgggacgactgggtcgccaagctccggcccctccacgcccgcctctggcgccgcctcggcatccacgacgccgtccttgcctccaccctccgcttcaagcgcgacgcctccgccatcctccatctcgcctccttctggtcccctgccaccgccaccttcgccttcccctggggggaggccactgtcaccctccaggacgtcgccctcctcgccggcttccccgccctcggcgccccggccacggccccgctcccgccccagtggcgccccgacgaggccgccctcaatggcgtgcgcctcggcttcaaccgcagcgcctgcaagaaggcgcaccactccgcctgggtaaaacacttcctcaccgacgataacgcggacacagtcttcgagcacgccgccttcctcgcgctctggctcacgcgcttcgtcctcccgggtcatccggagtccaccatgcgccaggccgtcttccccatcgccgtccgcctcgcgcgcggggaccgcgttgccctcgcgcccgccgtccttgcctcgatctaccgggacctccgcgagatcaaggccttcctcatcgccacgggcgccgccgccaccaccggcaacgccgatatgatctcctccttatccgtctactcgccactctacattcttcagctctggatgtgggagcgcttccctgccctcaggccagcaaaggtgaacccactcgttgatggcgatccgcttgccgctcggtggcatgatctgagcaggaagctgaacccggcgcagatacgtgaggccctcagcacaggatgcaactttgtgtggcagccttatgtcagctccatggagcacactgggtgggttcacagcagtgatctagccgaggatgatgaactggcatcgctcgcacaatttttgcacccctgtgagctcgtagggatggattgcattgagcagtacctcccgcaccgtgttgccagacagtttggactggaccaagatgtgcctgcagatgttcaccgtgccaaccaggattgggcgattgcttggcagacctaccagctggaaggtaagaatgtggctttcttcatccctcactctgagcctgggatcacaacacggtatgcacagtggtggaggcagcaacttctgccttctggcattgatgctgctacagcaagtgctccagtagagtggaagacttccaagcgcaaggtgaaaaagacaccagcggccatggaagctgaagctgagaaggagcgtaagatgaagaaggcccgggtctctcctacttatactgataaaaagcgcaaacttgaagagttgtatgatgctaagttgtcggattggcttccaactgcaaggaatgagattagtgacaccactagtgatatggaatcggaggaggccttattgcctaatgttggaactacaaatgatgatattgtgctactcatgccaaggaagcagacaacgactgcacctgtaagggcattgatggataatgacatgatcctggctctaggagagagaggaaactttatggttgatgagcctccagacatccaaagtgaacctgaagctgttgtccctgcaacgctggatgaggaaatagttaaaattcctgaggttatttctcttgatattccagataagccagaagaaggagccactgcagtaatggaggagcagaaggaagctactagtgtatctgatagatctgaagaagctagtgctctggtcataggagaggtagaagaaaaggttgccatagagggagctatttgtgttacagggatgaatccatcgggaaacaactcagcaactgtaatggaggcagatgaaagaaatgcagttccaaaagaatttggaagggctgccaaggaagtaattgaagctgtgccccagagccaacatgaagttaatgcaggtgttataaacaattctcatgatgtggtggctttacctgaggaggcccatccagttcagcccacaaataattctggtggatgtcccgtggtatcttgcataatggaagacagtaaagttgctggagattcgggcaaaattgattatgaatatttttgtgattttgttgaggaacagagggagattccttgtgtacaagagatttctggagaaaacagtcgaatgggtgagaaagagagagaagaaacctcccatgaatctcctcaactagagattgtagaatgtgtgcaagacatcgttcttagggaaacagactatgatgttaatcaaaagatagtttatccagcagtggaggatgtagcaacttccgatagtatgagtacatctcttctgggtgttcctgaaccagaaaatgcagaactcaataaacatccttatctagcaattaaagatgaggaagatatacccatggaagctgcacgaggagaagtagcagaaatggaacaaattagtacttctgcaaagggaggtgccgaggagcatggggacttttctgaacttgatcacatgggccgagcagatgctaaattgcatttacacttaaattctgaagtgcctgagaaaattgatgaaatagagtgtaaagaagtcgctggcactatgagactaactgggagatattctgatcagaagcttggagatgtgcctgaagttgggtacacagaagatgaaaacattagggggctggtagtgaacacaagtgataggaaaccttcagaagtctctcaagtcgagcctgcaaaactggaacattctaaggatctggtgaaagaggaaacagacaaatccgaaaatattcctggattagaatgtataggattggaggaaactcgtggagatttgatggaagagtgtgcaaataccaagtctgataatgttcccgaattagaaaatacaggattaggaggaactcatgggccaatagaggatactgatggtagactgaaggaaattcatgatgtcaatgcagaactggataaacacaatgtgcatgagagcgatattgatagatccgaggacatcatgcaaatcgatccactaacacaggataaagctacgtggctggcgaaggaagaaactgaagataaaactacaaaagttcaagaagtaaagtatgaacaattaagaaatgagccaccgattcaagaggattccaaggaaaagccctgtgctgatagcaaggatctatcagagaatgttgtagttcagtccaaagaggtagataaattgaaacaagcaggagagggttgccaggcgttaatggagaaagacatggagaatgctagtggtgcttttgtactagaacagacagaagatggacacagaaaatcattgatagagacaagtataaataacgatagtgaaattactctagtcgagcagttggatggacaaagtgagagtcttacgaggacagaagattcaaatgactcaaccaatgaaaaggatgtggtagaagattcaaacgaatcaatcaatgctaagatgccatgtagttcagctactgtacagttaaaagaagataagatggaagtttttcatgaaggcaagatggaggagccatgtgctcaggatgctgaactgagtaatcagagggaaccatcatctgatgcaactgctatggagattgaggcagtggctctggaacaggacagcagaatcatatgcaaaaacatggaggcaacaacagtggaaggcagccacacactggatagtggactaagttccgatctagccaaggttaatgaaactcatgctgcacgggaaattaaaaaccaggaagttttggatgtggacatgaaagtagcaatgagtgtttgtggtgaatatcaaattaactcaattggtatggaggatgtcaaatctaccaaaggatcacagaaccaagaatgtttggaccagaaagaagaccatataatggaggaaagagtggagtgtgaagtaagagaaggaagtggagtatcctatgaagaggcatgtgagctcggtggtggtagagtgaaagcctctggagttgcagtggatgttagtggtccagtgctaaacaaggaggcctgcaacacagaggagttgcaggcaagggaggataagaagcgtcatggagttgggcatgtgaatgagaagagggttttggaagaaactagtatgattgatactggtgaattgaaatctgattcgactgttatggagattagcatggctgggttaagacaaggaacactcaaccaatgtgcttcaagttcggagaaggaagaagcagtgcaggagaagcatgatcagggattggtagatgaaaacacaaacagaggttcagctgacaatgatgcacttgaatgtggtggagtgaatcctgatgtggccataacaatgtttcatgaaactattcttacaacagaagctgtcaatatagctgggtctaaaatttcgtctgagaaccagcaaaaggaagcaccctttgaagtacactctataacagaagtcgaaggttctgaatcaaatgaatcatcaagaaaggagcctgaaggagctcttgctcttccacaagagcctggcaacctggtaaaagttaaacaagaaagtttggagaatgaaaccgagatgtccatttttagggagaatgacaaagtttctggaaaagatcaggcatcagcagagtttataattgatccttcaaatacggatgaacggagggagaatgatattgggcggcccgatgaatcagcaaaaggctgtgaaaggttaacttctgattctataaacacagttcactccaaatttggcaagtctagtaatgaagaggataagagaacacagaacaccaggtctacggatccaaaagatataaaggaatcattgggtagaattcgtgccgaaccatcaaacagggtacacacaaccagtgttgggtattactctcagcatgcagctcatgatccgatttcatcttgtaaggagatcaaagtgcctttgcgagacggtgcaagggattctggaagggaccgtgcactggagttagtggttacaagtccacgagaagagactcctcgatggaggcaagaacagtacgcacttcagattttagaagacgttcaaaattcccgaattgctgagagatctaggatggagatggagatcagagtactgaaggcacaagtcagtagcatggagagacaagtgatgaacctggatcacttctctgaggtcaagtccagatctagtttgaaccaacaaatggtacatttgcacaaaccatacttctgaaactgtaatgggtttaaattttttgaaataaacacaaatccatgcaagttctctgtcccatcatcgactacctacctcctggaagtcggattgttttactcttaggttattccgaacctcctcccattatactgaatgattggatgcatgacggtgctagggcatgtctgggttatgcctgaatcctgatgacatgactaaactgcccaaggtgtcactagctcaaatcgatggtagttctgctgtctatcttttagattgacgataagctcggataatttggaacttctgtgcaccacatataaggtagaaggattttgaatcatatttctgacaagaaagcactgacatgttactattttcataggtagatcagatagtttattacttatgttcaatacatagaaatctgatttttgctgcttacggatctagttaaatttacaacattgtatggatttgttgtctaaaagttggtcgatggaagcccctcccccctgaaatataaagatttcactgttgttattctaaacactacggccttctttggaatgcaggaatcagttcatttcacagggaaatcggaaaaaaatatcagcattccaaaggggtctaggtcttggatggtcagccatttttattatgtacaaatgcagtagaagatgaggaacttcatagtatgtttatgaactcgcaactacttagaccgcatattagtgtgaagcgagtctcattttgtttctagaagtgaagttgaattccattagttgtcagcattcacctgttctataggagctgccgtccagactccaggacttgtgaaagaatataaggggtaagatcgtcaatgcacatggccatacaatggcagaagagcaatgaggacacaagattgaatttaaaatggggaactggcaacaaatcgaactactggccgtgtttttttatataaaaaactggctgttgagtgttgacggcaaacgggagaagcccaatgtttcgattggcagaacggcaaaattctggcctgctggctgatttcgacgcaccaaagccaacgttccttgcagtcttcctttcatgtagaaattctactctacctttttgaactaatctccttgtcctattttctttcttgaactctaaaaccatacattttagcctccaaattagggatggttcatgattttttattcagatgtaaaatttgtggtcttctttcttccattgtgaataaatatgatataaaagttgtcatgcaaatccatatttttgtttttagcattaaacttgttaagattcataaaaaaat

SEQ ID NO: 33195 - DNA, 6510 bp, Zea Mays
gtctgattatgtgatccgacactcccgaaacccagcccaggccgccgccgccgccatggcctccgacgacggcgacaaggacatcctcctcctcgtccaccaggtcccactcgacatggaggatgtgccagcgccccgcctggcgcacctcctcgccccgctccaccgcgcgcctccaccgcccccgcctccccccttccgctcgccgcccccgccccaggccgccgcttccgccgagcaccgcctctcattccgcggctggctcggcatcccccgccactgggacgactgggtcgccaagctccggcccctccacgcccgcctctggcgccgcctcggcatccacgacgccgtccttgcctccaccctccgcttcaagcgcgacgcctccgccatcctccatctcgcctccttctggtcccctgccaccgccaccttcgccttcccctggggggaggccactgtcaccctccaggacgtcgccctcctcgccggcttccccgccctcggcgccccggccacggccccgctcccgccccagtggcgccccgacgaggccgccctcaatggcgtgcgcctcggcttcaaccgcagcgcctgcaagaaggcgcaccactccgcctgggtaaaacacttcctcaccgacgataacgcggacacagtcttcgagcacgccgccttcctcgcgctctggctcacgcgcttcgtcctcccgggtcatccggagtccaccatgcgccaggccgtcttccccatcgccgtccgcctcgcgcgcggggaccgcgttgccctcgcgcccgccgtccttgcctcgatctaccgggacctccgcgagatcaaggccttcctcatcgccacgggcgccgccgccaccaccggcaacgccgatatgatctcctccttatccgtctactcgccactctacattcttcagctctggatgtgggagcgcttccctgccctcaggccagcaaaggtgaacccactcgttgatggcgatccgcttgccgctcggtggcatgatctgagcaggaagctgaacccggcgcagatacgtgaggccctcagcacaggatgcaactttgtgtggcagccttatgtcagctccatggagcacactgggtgggttcacagcagtgatctagccgaggatgatgaactggcatcgctcgcacaatttttgcacccctgtgagctcgtagggatggattgcattgagcagtacctcccgcaccgtgttgccagacagtttggactggaccaagatgtgcctgcagatgttcaccgtgccaaccaggattgggcgattgcttggcagacctaccagctggaaggtaagaatgtggctttcttcatccctcactctgagcctgggatcacaacacggtatgcacagtggtggaggcagcaacttctgccttctggcattgatgctgctacagcaagtgctccagtagagtggaagacttccaagcgcaaggtgaaaaagacaccagcggccatggaagctgaagctgagaaggagcgtaagatgaagaaggcccgggtctctcctacttatactgataaaaagcgcaaacttgaagagttgtatgatgctaagttgtcggattggcttccaactgcaaggaatgagattagtgacaccactagtgatatggaatcggaggaggccttattgcctaatgttggaactacaaatgatgatattgtgctactcatgccaaggaagcagacaacgactgcacctgtaagggcattgatggataatgacatgatcctggctctaggagagagaggaaactttatggttgatgagcctccagacatccaaagtgaacctgaagctgttgtccctgcaacgctggatgaggaaatagttaaaattcctgaggttatttctcttgatattccagataagccagaagaaggagccactgcagtaatggaggagcagaaggaagctactagtgtatctgatagatctgaagaagctagtgctctggtcataggagaggtagaagaaaaggttgccatagagggagctatttgtgttacagggatgaatccatcgggaaacaactcagcaactgtaatggaggcagatgaaagaaatgcagttccaaaagaatttggaagggctgccaaggaagtaattgaagctgtgccccagagccaacatgaagttaatgcaggtgttataaacaattctcatgatgtggtggctttacctgaggaggcccatccagttcagcccacaaataattctggtggatgtcccgtggtatcttgcataatggaagacagtaaagttgctggagattcgggcaaaattgattatgaatatttttgtgattttgttgaggaacagagggagattccttgtgtacaagagatttctggagaaaacagtcgaatgggtgagaaagagagagaagaaacctcccatgaatctcctcaactagagattgtagaatgtgtgcaagacatcgttcttagggaaacagactatgatgttaatcaaaagatagtttatccagcagtggaggatgtagcaacttccgatagtatgagtacatctcttctgggtgttcctgaaccagaaaatgcagaactcaataaacatccttatctagcaattaaagatgaggaagatatacccatggaagctgcacgaggagaagtagcagaaatggaacaaattagtacttctgcaaagggaggtgccgaggagcatggggacttttctgaacttgatcacatgggccgagcagatgctaaattgcatttacacttaaattctgaagtgcctgagaaaattgatgaaatagagtgtaaagaagtcgctggcactatgagactaactgggagatattctgatcagaagcttggagatgtgcctgaagttgggtacacagaagatgaaaacattagggggctggtagtgaacacaagtgataggaaaccttcagaagtctctcaagtcgagcctgcaaaactggaacattctaaggatctggtgaaagaggaaacagacaaatccgaaaatattcctggattagaatgtataggattggaggaaactcgtggagatttgatggaagagtgtgcaaataccaagtctgataatgttcccgaattagaaaatacaggattaggaggaactcatgggccaatagaggatactgatggtagactgaaggaaattcatgatgtcaatgcagaactggataaacacaatgtgcatgagagcgatattgatagatccgaggacatcatgcaaatcgatccactaacacaggataaagctacgtggctggcgaaggaagaaactgaagataaaactacaaaagttcaagaagtaaagtatgaacaattaagaaatgagccaccgattcaagaggattccaaggaaaagccctgtgctgatagcaaggatctatcagagaatgttgtagttcagtccaaagaggtagataaattgaaacaagcaggagagggttgccaggcgttaatggagaaagacatggagaatgctagtggtgcttttgtactagaacagacagaagatggacacagaaaatcattgatagagacaagtataaataacgatagtgaaattactctagtcgagcagttggatggacaaagtgagagtcttacgaggacaggtactgtggaaattcatggagaaaccattaaagcacaagacaatgagttctataaggatgtggtagaagattcaaatgactcaaccaatgaaaaggatgtggtagaagattcaaacgaatcaatcaatgctaagatgccatgtagttcagctactgtacagttaaaagaagataagatggaagtttttcatgaaggcaagatggaggagccatgtgctcaggatgctgaactgagtaatcagagggaaccatcatctgatgcaactgctatggagattgaggcagtggctctggaacaggacagcagaatcatatgcaaaaacatggaggcaacaacagtggaaggcagccacacactggatagtggactaagttccgatctagccaaggttaatgaaactcatgctgcacgggaaattaaaaaccaggaagttttggatgtggacatgaaagtagcaatgagtgtttgtggtgaatatcaaattaactcaattggtatggaggatgtcaaatctaccaaaggatcacagaaccaagaatgtttggaccagaaagaagaccatataatggaggaaagagtggagtgtgaagtaagagaaggaagtggagtatcctatgaagaggcatgtgagctcggtggtggtagagtgaaagcctctggagttgcagtggatgttagtggtccagtgctaaacaaggaggcctgcaacacagaggagttgcaggcaagggaggataagaagcgtcatggagttgggcatgtgaatgagaagagggttttggaagaaactagtatgattgatactggtgaattgaaatctgattcgactgttatggagattagcatggctgggttaagacaaggaacactcaaccaatgtgcttcaagttcggagaaggaagaagcagtgcaggagaagcatgatcagggattggtagatgaaaacacaaacagaggttcagctgacaatgatgcacttgaatgtggtggagtgaatcctgatgtggccataacaatgtttcatgaaactattcttacaacagaagctgtcaatatagctgggtctaaaatttcgtctgagaaccagcaaaaggaagcaccctttgaagtacactctataacagaagtcgaaggttctgaatcaaatgaatcatcaagaaaggagcctgaaggagctcttgctcttccacaagagcctggcaacctggtaaaagttaaacaagaaagtttggagaatgaaaccgagatgtccatttttagggagaatgacaaagtttctggaaaagatcaggcatcagcagagtttataattgatccttcaaatacggatgaacggagggagaatgatattgggcggcccgatgaatcagcaaaaggctgtgaaaggttaacttctgattctataaacacagttcactccaaatttggcaagtctagtaatgaagaggataagagaacacagaacaccaggtctacggatccaaaagatataaaggaatcattgggtagaattcgtgccgaaccatcaaacagggtacacacaaccagtgttgggtattactctcagcatgcagctcatgatccgatttcatcttgtaaggagatcaaagtgcctttgcgagacggtgcaagggattctggaagggaccgtgcactggagttagtggttacaagtccacgagaagagactcctcgatggaggcaagaacagtacgcacttcagattttagaagacgttcaaaattcccgaattgctgagagatctaggatggagatggagatcagagtactgaaggcacaagtcagtagcatggagagacaagtgatgaacctggatcacttctctgaggtcaagtccagatctagtttgaaccaacaaatggttattccgaacctcctcccattatactgaatgattggatgcatgacggtgctagggcatgtctgggttatgcctgaatcctgatgacatgactaaactgcccaaggtgtcactagctcaaatcgatggtagttctgctgtctatcttttagattgacgataagctcggataatttggaacttctgtgcaccacatataaggaatcagttcatttcacagggaaatcggaaaaaaatatcagcattccaaaggggtctaggtcttggatggtcagccatttttattatgtacaaatgcagtagaagatgaggaacttcatagtatgtttatgaactcgcaactacttagaccgcatattagtgtgaagcgagtctcattttgtttctagaagtgaagttgaattccattagttgtcagcattcacctgttctataggagctgccgtccagactccaggacttgtgaaagaatataaggggtaagatcgtcaatgcacatggccatacaatggcagaagagcaatgaggacacaagattgaatttaaaatggggaactggcaacaaatcgaactactggccgtgtttttttatataaaaaactggctgttgagtgttgacggcaaacgggagaagcccaatgtttcgattggcagaacggcaaaattctggcctgctggctgatttcgacgcaccaaagccaacgttccttgcagtcttcctttcatgtagaaattctactctacctttttgaactaatctccttgtcctattttctttcttgaactctaaaaccatacattttagcctccaaattagggatggttcatgattttttattcagatgtaaaatttgtggtcttctttcttccattgtgaataaatatgatataaaagttgtcatgcaaatccatatttttgtttttagcattaaacttgttaagattcataaaaaaat

SEQ ID NO: 33196 - DNA, 6375 bp, Zea Mays
gtctgattatgtgatccgacactcccgaaacccagcccaggccgccgccgccgccatggcctccgacgacggcgacaaggacatcctcctcctcgtccaccaggtcccactcgacatggaggatgtgccagcgccccgcctggcgcacctcctcgccccgctccaccgcgcgcctccaccgcccccgcctccccccttccgctcgccgcccccgccccaggccgccgcttccgccgagcaccgcctctcattccgcggctggctcggcatcccccgccactgggacgactgggtcgccaagctccggcccctccacgcccgcctctggcgccgcctcggcatccacgacgccgtccttgcctccaccctccgcttcaagcgcgacgcctccgccatcctccatctcgcctccttctggtcccctgccaccgccaccttcgccttcccctggggggaggccactgtcaccctccaggacgtcgccctcctcgccggcttccccgccctcggcgccccggccacggccccgctcccgccccagtggcgccccgacgaggccgccctcaatggcgtgcgcctcggcttcaaccgcagcgcctgcaagaaggcgcaccactccgcctgggtaaaacacttcctcaccgacgataacgcggacacagtcttcgagcacgccgccttcctcgcgctctggctcacgcgcttcgtcctcccgggtcatccggagtccaccatgcgccaggccgtcttccccatcgccgtccgcctcgcgcgcggggaccgcgttgccctcgcgcccgccgtccttgcctcgatctaccgggacctccgcgagatcaaggccttcctcatcgccacgggcgccgccgccaccaccggcaacgccgatatgatctcctccttatccgtctactcgccactctacattcttcagctctggatgtgggagcgcttccctgccctcaggccagcaaaggtgaacccactcgttgatggcgatccgcttgccgctcggtggcatgatctgagcaggaagctgaacccggcgcagatacgtgaggccctcagcacaggatgcaactttgtgtggcagccttatgtcagctccatggagcacactgggtgggttcacagcagtgatctagccgaggatgatgaactggcatcgctcgcacaatttttgcacccctgtgagctcgtagggatggattgcattgagcagtacctcccgcaccgtgttgccagacagtttggactggaccaagatgtgcctgcagatgttcaccgtgccaaccaggattgggcgattgcttggcagacctaccagctggaaggtaagaatgtggctttcttcatccctcactctgagcctgggatcacaacacggtatgcacagtggtggaggcagcaacttctgccttctggcattgatgctgctacagcaagtgctccagtagagtggaagacttccaagcgcaaggtgaaaaagacaccagcggccatggaagctgaagctgagaaggagcgtaagatgaagaaggcccgggtctctcctacttatactgataaaaagcgcaaacttgaagagttgtatgatgctaagttgtcggattggcttccaactgcaaggaatgagattagtgacaccactagtgatatggaatcggaggaggccttattgcctaatgttggaactacaaatgatgatattgtgctactcatgccaaggaagcagacaacgactgcacctgtaagggcattgatggataatgacatgatcctggctctaggagagagaggaaactttatggttgatgagcctccagacatccaaagtgaacctgaagctgttgtccctgcaacgctggatgaggaaatagttaaaattcctgaggttatttctcttgatattccagataagccagaagaaggagccactgcagtaatggaggagcagaaggaagctactagtgtatctgatagatctgaagaagctagtgctctggtcataggagaggtagaagaaaaggttgccatagagggagctatttgtgttacagggatgaatccatcgggaaacaactcagcaactgtaatggaggcagatgaaagaaatgcagttccaaaagaatttggaagggctgccaaggaagtaattgaagctgtgccccagagccaacatgaagttaatgcaggtgttataaacaattctcatgatgtggtggctttacctgaggaggcccatccagttcagcccacaaataattctggtggatgtcccgtggtatcttgcataatggaagacagtaaagttgctggagattcgggcaaaattgattatgaatatttttgtgattttgttgaggaacagagggagattccttgtgtacaagagatttctggagaaaacagtcgaatgggtgagaaagagagagaagaaacctcccatgaatctcctcaactagagattgtagaatgtgtgcaagacatcgttcttagggaaacagactatgatgttaatcaaaagatagtttatccagcagtggaggatgtagcaacttccgatagtatgagtacatctcttctgggtgttcctgaaccagaaaatgcagaactcaataaacatccttatctagcaattaaagatgaggaagatatacccatggaagctgcacgaggagaagtagcagaaatggaacaaattagtacttctgcaaagggaggtgccgaggagcatggggacttttctgaacttgatcacatgggccgagcagatgctaaattgcatttacacttaaattctgaagtgcctgagaaaattgatgaaatagagtgtaaagaagtcgctggcactatgagactaactgggagatattctgatcagaagcttggagatgtgcctgaagttgggtacacagaagatgaaaacattagggggctggtagtgaacacaagtgataggaaaccttcagaagtctctcaagtcgagcctgcaaaactggaacattctaaggatctggtgaaagaggaaacagacaaatccgaaaatattcctggattagaatgtataggattggaggaaactcgtggagatttgatggaagagtgtgcaaataccaagtctgataatgttcccgaattagaaaatacaggattaggaggaactcatgggccaatagaggatactgatggtagactgaaggaaattcatgatgtcaatgcagaactggataaacacaatgtgcatgagagcgatattgatagatccgaggacatcatgcaaatcgatccactaacacaggataaagctacgtggctggcgaaggaagaaactgaagataaaactacaaaagttcaagaagtaaagtatgaacaattaagaaatgagccaccgattcaagaggattccaaggaaaagccctgtgctgatagcaaggatctatcagagaatgttgtagttcagtccaaagaggtagataaattgaaacaagcaggagagggttgccaggcgttaatggagaaagacatggagaatgctagtggtgcttttgtactagaacagacagaagatggacacagaaaatcattgatagagacaagtataaataacgatagtgaaattactctagtcgagcagttggatggacaaagtgagagtcttacgaggacagaagattcaaatgactcaaccaatgaaaaggatgtggtagaagattcaaacgaatcaatcaatgctaagatgccatgtagttcagctactgtacagttaaaagaagataagatggaagtttttcatgaaggcaagatggaggagccatgtgctcaggatgctgaactgagtaatcagagggaaccatcatctgatgcaactgctatggagattgaggcagtggctctggaacaggacagcagaatcatatgcaaaaacatggaggcaacaacagtggaaggcagccacacactggatagtggactaagttccgatctagccaaggttaatgaaactcatgctgcacgggaaattaaaaaccaggaagttttggatgtggacatgaaagtagcaatgagtgtttgtggtgaatatcaaattaactcaattggtatggaggatgtcaaatctaccaaaggatcacagaaccaagaatgtttggaccagaaagaagaccatataatggaggaaagagtggagtgtgaagtaagagaaggaagtggagtatcctatgaagaggcatgtgagctcggtggtggtagagtgaaagcctctggagttgcagtggatgttagtggtccagtgctaaacaaggaggcctgcaacacagaggagttgcaggcaagggaggataagaagcgtcatggagttgggcatgtgaatgagaagagggttttggaagaaactagtatgattgatactggtgaattgaaatctgattcgactgttatggagattagcatggctgggttaagacaaggaacactcaaccaatgtgcttcaagttcggagaaggaagaagcagtgcaggagaagcatgatcagggattggtagatgaaaacacaaacagaggttcagctgacaatgatgcacttgaatgtggtggagtgaatcctgatgtggccataacaatgtttcatgaaactattcttacaacagaagctgtcaatatagctgggtctaaaatttcgtctgagaaccagcaaaaggaagcaccctttgaagtacactctataacagaagtcgaaggttctgaatcaaatgaatcatcaagaaaggagcctgaaggagctcttgctcttccacaagagcctggcaacctggtaaaagttaaacaagaaagtttggagaatgaaaccgagatgtccatttttagggagaatgacaaagtttctggaaaagatcaggcatcagcagagtttataattgatccttcaaatacggatgaacggagggagaatgatattgggcggcccgatgaatcagcaaaaggctgtgaaaggttaacttctgattctataaacacagttcactccaaatttggcaagtctagtaatgaagaggataagagaacacagaacaccaggtctacggatccaaaagatataaaggaatcattgggtagaattcgtgccgaaccatcaaacagggtacacacaaccagtgttgggtattactctcagcatgcagctcatgatccgatttcatcttgtaaggagatcaaagtgcctttgcgagacggtgcaagggattctggaagggaccgtgcactggagttagtggttacaagtccacgagaagagactcctcgatggaggcaagaacagtacgcacttcagattttagaagacgttcaaaattcccgaattgctgagagatctaggatggagatggagatcagagtactgaaggcacaagtcagtagcatggagagacaagtgatgaacctggatcacttctctgaggtcaagtccagatctagtttgaaccaacaaatggtacatttgcacaaaccatacttctgaaactgtaatgggtttaaattttttgaaataaacacaaatccatgcaagttctctgtcccatcatcgactacctacctcctggaagtcggattgttttactcttaggaatcagttcatttcacagggaaatcggaaaaaaatatcagcattccaaaggggtctaggtcttggatggtcagccatttttattatgtacaaatgcagtagaagatgaggaacttcatagtatgtttatgaactcgcaactacttagaccgcatattagtgtgaagcgagtctcattttgtttctagaagtgaagttgaattccattagttgtcagcattcacctgttctataggagctgccgtccagactccaggacttgtgaaagaatataaggggtaagatcgtcaatgcacatggccatacaatggcagaagagcaatgaggacacaagattgaatttaaaatggggaactggcaacaaatcgaactactggccgtgtttttttatataaaaaactggctgttgagtgttgacggcaaacgggagaagcccaatgtttcgattggcagaacggcaaaattctggcctgctggctgatttcgacgcaccaaagccaacgttccttgcagtcttcctttcatgtagaaattctactctacctttttgaactaatctccttgtcctattttctttcttgaactctaaaaccatacattttagcctccaaattagggatggttcatgattttttattcagatgtaaaatttgtggtcttctttcttccattgtgaataaatatgatataaaagttgtcatgcaaatccatatttttgtttttagcattaaacttgttaagattcataaaaaaat

SEQ ID NO: 33197 - DNA, 6309 bp, Zea Mays
gtctgattatgtgatccgacactcccgaaacccagcccaggccgccgccgccgccatggcctccgacgacggcgacaaggacatcctcctcctcgtccaccaggtcccactcgacatggaggatgtgccagcgccccgcctggcgcacctcctcgccccgctccaccgcgcgcctccaccgcccccgcctccccccttccgctcgccgcccccgccccaggccgccgcttccgccgagcaccgcctctcattccgcggctggctcggcatcccccgccactgggacgactgggtcgccaagctccggcccctccacgcccgcctctggcgccgcctcggcatccacgacgccgtccttgcctccaccctccgcttcaagcgcgacgcctccgccatcctccatctcgcctccttctggtcccctgccaccgccaccttcgccttcccctggggggaggccactgtcaccctccaggacgtcgccctcctcgccggcttccccgccctcggcgccccggccacggccccgctcccgccccagtggcgccccgacgaggccgccctcaatggcgtgcgcctcggcttcaaccgcagcgcctgcaagaaggcgcaccactccgcctgggtaaaacacttcctcaccgacgataacgcggacacagtcttcgagcacgccgccttcctcgcgctctggctcacgcgcttcgtcctcccgggtcatccggagtccaccatgcgccaggccgtcttccccatcgccgtccgcctcgcgcgcggggaccgcgttgccctcgcgcccgccgtccttgcctcgatctaccgggacctccgcgagatcaaggccttcctcatcgccacgggcgccgccgccaccaccggcaacgccgatatgatctcctccttatccgtctactcgccactctacattcttcagctctggatgtgggagcgcttccctgccctcaggccagcaaaggtgaacccactcgttgatggcgatccgcttgccgctcggtggcatgatctgagcaggaagctgaacccggcgcagatacgtgaggccctcagcacaggatgcaactttgtgtggcagccttatgtcagctccatggagcacactgggtgggttcacagcagtgatctagccgaggatgatgaactggcatcgctcgcacaatttttgcacccctgtgagctcgtagggatggattgcattgagcagtacctcccgcaccgtgttgccagacagtttggactggaccaagatgtgcctgcagatgttcaccgtgccaaccaggattgggcgattgcttggcagacctaccagctggaaggtaagaatgtggctttcttcatccctcactctgagcctgggatcacaacacggtatgcacagtggtggaggcagcaacttctgccttctggcattgatgctgctacagcaagtgctccagtagagtggaagacttccaagcgcaaggtgaaaaagacaccagcggccatggaagctgaagctgagaaggagcgtaagatgaagaaggcccgggtctctcctacttatactgataaaaagcgcaaacttgaagagttgtatgatgctaagttgtcggattggcttccaactgcaaggaatgagattagtgacaccactagtgatatggaatcggaggaggccttattgcctaatgttggaactacaaatgatgatattgtgctactcatgccaaggaagcagacaacgactgcacctgtaagggcattgatggataatgacatgatcctggctctaggagagagaggaaactttatggttgatgagcctccagacatccaaagtgaacctgaagctgttgtccctgcaacgctggatgaggaaatagttaaaattcctgaggttatttctcttgatattccagataagccagaagaaggagccactgcagtaatggaggagcagaaggaagctactagtgtatctgatagatctgaagaagctagtgctctggtcataggagaggtagaagaaaaggttgccatagagggagctatttgtgttacagggatgaatccatcgggaaacaactcagcaactgtaatggaggcagatgaaagaaatgcagttccaaaagaatttggaagggctgccaaggaagtaattgaagctgtgccccagagccaacatgaagttaatgcaggtgttataaacaattctcatgatgtggtggctttacctgaggaggcccatccagttcagcccacaaataattctggtggatgtcccgtggtatcttgcataatggaagacagtaaagttgctggagattcgggcaaaattgattatgaatatttttgtgattttgttgaggaacagagggagattccttgtgtacaagagatttctggagaaaacagtcgaatgggtgagaaagagagagaagaaacctcccatgaatctcctcaactagagattgtagaatgtgtgcaagacatcgttcttagggaaacagactatgatgttaatcaaaagatagtttatccagcagtggaggatgtagcaacttccgatagtatgagtacatctcttctgggtgttcctgaaccagaaaatgcagaactcaataaacatccttatctagcaattaaagatgaggaagatatacccatggaagctgcacgaggagaagtagcagaaatggaacaaattagtacttctgcaaagggaggtgccgaggagcatggggacttttctgaacttgatcacatgggccgagcagatgctaaattgcatttacacttaaattctgaagtgcctgagaaaattgatgaaatagagtgtaaagaagtcgctggcactatgagactaactgggagatattctgatcagaagcttggagatgtgcctgaagttgggtacacagaagatgaaaacattagggggctggtagtgaacacaagtgataggaaaccttcagaagtctctcaagtcgagcctgcaaaactggaacattctaaggatctggtgaaagaggaaacagacaaatccgaaaatattcctggattagaatgtataggattggaggaaactcgtggagatttgatggaagagtgtgcaaataccaagtctgataatgttcccgaattagaaaatacaggattaggaggaactcatgggccaatagaggatactgatggtagactgaaggaaattcatgatgtcaatgcagaactggataaacacaatgtgcatgagagcgatattgatagatccgaggacatcatgcaaatcgatccactaacacaggataaagctacgtggctggcgaaggaagaaactgaagataaaactacaaaagttcaagaagtaaagtatgaacaattaagaaatgagccaccgattcaagaggattccaaggaaaagccctgtgctgatagcaaggatctatcagagaatgttgtagttcagtccaaagaggtagataaattgaaacaagcaggagagggttgccaggcgttaatggagaaagacatggagaatgctagtggtgcttttgtactagaacagacagaagatggacacagaaaatcattgatagagacaagtataaataacgatagtgaaattactctagtcgagcagttggatggacaaagtgagagtcttacgaggacaggtactgtggaaattcatggagaaaccattaaagcacaagacaatgagttctataaggatgtggtagaagattcaaatgactcaaccaatgaaaaggatgtggtagaagattcaaacgaatcaatcaatgctaagatgccatgtagttcagctactgtacagttaaaagaagataagatggaagtttttcatgaaggcaagatggaggagccatgtgctcaggatgctgaactgagtaatcagagggaaccatcatctgatgcaactgctatggagattgaggcagtggctctggaacaggacagcagaatcatatgcaaaaacatggaggcaacaacagtggaaggcagccacacactggatagtggactaagttccgatctagccaaggttaatgaaactcatgctgcacgggaaattaaaaaccaggaagttttggatgtggacatgaaagtagcaatgagtgtttgtggtgaatatcaaattaactcaattggtatggaggatgtcaaatctaccaaaggatcacagaaccaagaatgtttggaccagaaagaagaccatataatggaggaaagagtggagtgtgaagtaagagaaggaagtggagtatcctatgaagaggcatgtgagctcggtggtggtagagtgaaagcctctggagttgcagtggatgttagtggtccagtgctaaacaaggaggcctgcaacacagaggagttgcaggcaagggaggataagaagcgtcatggagttgggcatgtgaatgagaagagggttttggaagaaactagtatgattgatactggtgaattgaaatctgattcgactgttatggagattagcatggctgggttaagacaaggaacactcaaccaatgtgcttcaagttcggagaaggaagaagcagtgcaggagaagcatgatcagggattggtagatgaaaacacaaacagaggttcagctgacaatgatgcacttgaatgtggtggagtgaatcctgatgtggccataacaatgtttcatgaaactattcttacaacagaagctgtcaatatagctgggtctaaaatttcgtctgagaaccagcaaaaggaagcaccctttgaagtacactctataacagaagtcgaaggttctgaatcaaatgaatcatcaagaaaggagcctgaaggagctcttgctcttccacaagagcctggcaacctggtaaaagttaaacaagaaagtttggagaatgaaaccgagatgtccatttttagggagaatgacaaagtttctggaaaagatcaggcatcagcagagtttataattgatccttcaaatacggatgaacggagggagaatgatattgggcggcccgatgaatcagcaaaaggctgtgaaaggttaacttctgattctataaacacagttcactccaaatttggcaagtctagtaatgaagaggataagagaacacagaacaccaggtctacggatccaaaagatataaaggaatcattgggtagaattcgtgccgaaccatcaaacagggtacacacaaccagtgttgggtattactctcagcatgcagctcatgatccgatttcatcttgtaaggagatcaaagtgcctttgcgagacggtgcaagggattctggaagggaccgtgcactggagttagtggttacaagtccacgagaagagactcctcgatggaggcaagaacagtacgcacttcagattttagaagacgttcaaaattcccgaattgctgagagatctaggatggagatggagatcagagtactgaaggcacaagtcagtagcatggagagacaagtgatgaacctggatcacttctctgaggtcaagtccagatctagtttgaaccaacaaatggaatcagttcatttcacagggaaatcggaaaaaaatatcagcattccaaaggggtctaggtcttggatggtcagccatttttattatgtacaaatgcagtagaagatgaggaacttcatagtatgtttatgaactcgcaactacttagaccgcatattagtgtgaagcgagtctcattttgtttctagaagtgaagttgaattccattagttgtcagcattcacctgttctataggagctgccgtccagactccaggacttgtgaaagaatataaggggtaagatcgtcaatgcacatggccatacaatggcagaagagcaatgaggacacaagattgaatttaaaatggggaactggcaacaaatcgaactactggccgtgtttttttatataaaaaactggctgttgagtgttgacggcaaacgggagaagcccaatgtttcgattggcagaacggcaaaattctggcctgctggctgatttcgacgcaccaaagccaacgttccttgcagtcttcctttcatgtagaaattctactctacctttttgaactaatctccttgtcctattttctttcttgaactctaaaaccatacattttagcctccaaattagggatggttcatgattttttattcagatgtaaaatttgtggtcttctttcttccattgtgaataaatatgatataaaagttgtcatgcaaatccatatttttgtttttagcattaaacttgttaagattcataaaaaaat

SEQ ID NO: 33198 - DNA, 6222 bp, Zea Mays
ccgacactcccgaaacccagcccaggccgccgccgccgccatggcctccgacgacggcgacaaggacatcctcctcctcgtccaccaggtcccactcgacatggaggatgtgccagcgccccgcctggcgcacctcctcgccccgctccaccgcgcgcctccaccgcccccgcctccccccttccgctcgccgcccccgccccaggccgccgcttccgccgagcaccgcctctcattccgcggctggctcggcatcccccgccactgggacgactgggtcgccaagctccggcccctccacgcccgcctctggcgccgcctcggcatccacgacgccgtccttgcctccaccctccgcttcaagcgcgacgcctccgccatcctccatctcgcctccttctggtcccctgccaccgccaccttcgccttcccctggggggaggccactgtcaccctccaggacgtcgccctcctcgccggcttccccgccctcggcgccccggccacggccccgctcccgccccagtggcgccccgacgaggccgccctcaatggcgtgcgcctcggcttcaaccgcagcgcctgcaagaaggcgcaccactccgcctgggtaaaacacttcctcaccgacgataacgcggacacagtcttcgagcacgccgccttcctcgcgctctggctcacgcgcttcgtcctcccgggtcatccggagtccaccatgcgccaggccgtcttccccatcgccgtccgcctcgcgcgcggggaccgcgttgccctcgcgcccgccgtccttgcctcgatctaccgggacctccgcgagatcaaggccttcctcatcgccacgggcgccgccgccaccaccggcaacgccgatatgatctcctccttatccgtctactcgccactctacattcttcagctctggatgtgggagcgcttccctgccctcaggccagcaaaggtgaacccactcgttgatggcgatccgcttgccgctcggtggcatgatctgagcaggaagctgaacccggcgcagatacgtgaggccctcagcacaggatgcaactttgtgtggcagccttatgtcagctccatggagcacactgggtgggttcacagcagtgatctagccgaggatgatgaactggcatcgctcgcacaatttttgcacccctgtgagctcgtagggatggattgcattgagcagtacctcccgcaccgtgttgccagacagtttggactggaccaagatgtgcctgcagatgttcaccgtgccaaccaggattgggcgattgcttggcagacctaccagctggaaggtaagaatgtggctttcttcatccctcactctgagcctgggatcacaacacggtatgcacagtggtggaggcagcaacttctgccttctggcattgatgctgctacagcaagtgctccagtagagtggaagacttccaagcgcaaggtgaaaaagacaccagcggccatggaagctgaagctgagaaggagcgtaagatgaagaaggcccgggtctctcctacttatactgataaaaagcgcaaacttgaagagttgtatgatgctaagttgtcggattggcttccaactgcaaggaatgagattagtgacaccactagtgatatggaatcggaggaggccttattgcctaatgttggaactacaaatgatgatattgtgctactcatgccaaggaagcagacaacgactgcacctgtaagggcattgatggataatgacatgatcctggctctaggagagagaggaaactttatggttgatgagcctccagacatccaaagtgaacctgaagctgttgtccctgcaacgctggatgaggaaatagttaaaattcctgaggttatttctcttgatattccagataagccagaagaaggagccactgcagtaatggaggagcagaaggaagctactagtgtatctgatagatctgaagaagctagtgctctggtcataggagaggtagaagaaaaggttgccatagagggagctatttgtgttacagggatgaatccatcgggaaacaactcagcaactgtaatggaggcagatgaaagaaatgcagttccaaaagaatttggaagggctgccaaggaagtaattgaagctgtgccccagagccaacatgaagttaatgcaggtgttataaacaattctcatgatgtggtggctttacctgaggaggcccatccagttcagcccacaaataattctggtggatgtcccgtggtatcttgcataatggaagacagtaaagttgctggagattcgggcaaaattgattatgaatatttttgtgattttgttgaggaacagagggagattccttgtgtacaagagatttctggagaaaacagtcgaatgggtgagaaagagagagaagaaacctcccatgaatctcctcaactagagattgtagaatgtgtgcaagacatcgttcttagggaaacagactatgatgttaatcaaaagatagtttatccagcagtggaggatgtagcaacttccgatagtatgagtacatctcttctgggtgttcctgaaccagaaaatgcagaactcaataaacatccttatctagcaattaaagatgaggaagatatacccatggaagctgcacgaggagaagtagcagaaatggaacaaattagtacttctgcaaagggaggtgccgaggagcatggggacttttctgaacttgatcacatgggccgagcagatgctaaattgcatttacacttaaattctgaagtgcctgagaaaattgatgaaatagagtgtaaagaagtcgctggcactatgagactaactgggagatattctgatcagaagcttggagatgtgcctgaagttgggtacacagaagatgaaaacattagggggctggtagtgaacacaagtgataggaaaccttcagaagtctctcaagtcgagcctgcaaaactggaacattctaaggatctggtgaaagaggaaacagacaaatccgaaaatattcctggattagaatgtataggattggaggaaactcgtggagatttgatggaagagtgtgcaaataccaagtctgataatgttcccgaattagaaaatacaggattaggaggaactcatgggccaatagaggatactgatggtagactgaaggaaattcatgatgtcaatgcagaactggataaacacaatgtgcatgagagcgatattgatagatccgaggacatcatgcaaatcgatccactaacacaggataaagctacgtggctggcgaaggaagaaactgaagataaaactacaaaagttcaagaagtaaagtatgaacaattaagaaatgagccaccgattcaagaggattccaaggaaaagccctgtgctgatagcaaggatctatcagagaatgttgtagttcagtccaaagaggtagataaattgaaacaagcaggagagggttgccaggcgttaatggagaaagacatggagaatgctagtggtgcttttgtactagaacagacagaagatggacacagaaaatcattgatagagacaagtataaataacgatagtgaaattactctagtcgagcagttggatggacaaagtgagagtcttacgaggacagaagattcaaatgactcaaccaatgaaaaggatgtggtagaagattcaaacgaatcaatcaatgctaagatgccatgtagttcagctactgtacagttaaaagaagataagatggaagtttttcatgaaggcaagatggaggagccatgtgctcaggatgctgaactgagtaatcagagggaaccatcatctgatgcaactgctatggagattgaggcagtggctctggaacaggacagcagaatcatatgcaaaaacatggaggcaacaacagtggaaggcagccacacactggatagtggactaagttccgatctagccaaggttaatgaaactcatgctgcacgggaaattaaaaaccaggaagttttggatgtggacatgaaagtagcaatgagtgtttgtggtgaatatcaaattaactcaattggtatggaggatgtcaaatctaccaaaggatcacagaaccaagaatgtttggaccagaaagaagaccatataatggaggaaagagtggagtgtgaagtaagagaaggaagtggagtatcctatgaagaggcatgtgagctcggtggtggtagagtgaaagcctctggagttgcagtggatgttagtggtccagtgctaaacaaggaggcctgcaacacagaggaggcaagggaggataagaagcgtcatggagttgggcatgtgaatgagaagagggttttggaagaaactagtatgattgatactggtgaattgaaatctgattcgactgttatggagattagcatggctgggttaagacaaggaacactcaaccaatgtgcttcaagttcggagaaggaagaagcagtgcaggagaagcatgatcagggattggtagatgaaaacacaaacagaggttcagctgacaatgatgcacttgaatgtggtggagtgaatcctgatgtggccataacaatgtttcatgaaactattcttacaacagaagctgtcaatatagctgggtctaaaatttcgtctgagaaccagcaaaaggaagcaccctttgaagtacactctataacagaagtcgaaggttctgaatcaaatgaatcatcaagaaaggagcctgaaggagctcttgctcttccacaagagcctggcaacctggtaaaagttaaacaagaaagtttggagaatgaaaccgagatgtccatttttagggagaatgacaaagtttctggaaaagatcaggcatcagcagagtttataattgatccttcaaatacggatgaacggagggagaatgatattgggcggcccgatgaatcagcaaaaggctgtgaaaggttaacttctgattctataaacacagttcactccaaatttggcaagtctagtaatgaagaggataagagaacacagaacaccaggtctacggatccaaaagatataaaggaatcattgggtagaattcgtgccgaaccatcaaacagggtacacacaaccagtgttgggtattactctcagcatgcagctcatgatccgatttcatcttgtaaggagatcaaagtgcctttgcgagacggtgcaagggattctggaagggaccgtgcactggagttagtggttacaagtccacgagaagagactcctcgatggaggcaagaacagtacgcacttcagattttagaagacgttcaaaattcccgaattgctgagagatctaggatggagatggagatcagagtactgaaggcacaagtcagtagcatggagagacaagtgatgaacctggatcacttctctgaggtcaagtccagatctagtttgaaccaacaaatggaatcagttcatttcacagggaaatcggaaaaaaatatcagcattccaaaggggtctaggtcttggatggtcagccatttttattatgtacaaatgcagtagaagatgaggaacttcatagtatgtttatgaactcgcaactacttagaccgcatattagtgtgaagcgagtctcattttgtttctagaagtgaagttgaattccattagttgtcagcattcacctgttctataggagctgccgtccagactccaggacttgtgaaagaatataaggggtaagatcgtcaatgcacatggccatacaatggcagaagagcaatgaggacacaagattgaatttaaaatggggaactggcaacaaatcgaactactggccgtgtttttttatataaaaaactggctgttgagtgttgacggcaaacgggagaagcccaatgtttcgattggcagaacggcaaaattctggcctgctggctgatttcgacgcaccaaagccaacgttccttgcagtcttcctttcatgtagaaattctactctacctttttgaactaatctccttgtcctattttctttcttgaactctaaaaccatacattttagcctccaaattagggatggttcatgattttttattcagatgtaaaatttgtggtcttctttcttccattgtgaataaatatgatataaaagttgtcatgcaaatccatatttttgtttttagcattaaacttgttaagattcataaaaaaat

SEQ ID NO: 33199 - DNA, 6583 bp, Zea Mays
atggcctccgacgacggcgacaaggacatcctcctcctcgtccaccaggtcccactcgacatggaggatgtgccagcgccccgcctggcgcacctcctcgccccgctccaccgcgcgcctccaccgcccccgcctccccccttccgctcgccgcccccgccccaggccgccgcttccgccgagcaccgcctctcattccgcggctggctcggcatcccccgccactgggacgactgggtcgccaagctccggcccctccacgcccgcctctggcgccgcctcggcatccacgacgccgtccttgcctccaccctccgcttcaagcgcgacgcctccgccatcctccatctcgcctccttctggtcccctgccaccgccaccttcgccttcccctggggggaggccactgtcaccctccaggacgtcgccctcctcgccggcttccccgccctcggcgccccggccacggccccgctcccgccccagtggcgccccgacgaggccgccctcaatggcgtgcgcctcggcttcaaccgcagcgcctgcaagaaggcgcaccactccgcctgggtaaaacacttcctcaccgacgataacgcggacacagtcttcgagcacgccgccttcctcgcgctctggctcacgcgcttcgtcctcccgggtcatccggagtccaccatgcgccaggccgtcttccccatcgccgtccgcctcgcgcgcggggaccgcgttgccctcgcgcccgccgtccttgcctcgatctaccgggacctccgcgagatcaaggccttcctcatcgccacgggcgccgccgccaccaccggcaacgccgatatgatctcctccttatccgtctactcgccactctacattcttcagctctggatgtgggagcgcttccctgccctcaggccagcaaaggtgaacccactcgttgatggcgatccgcttgccgctcggtggcatgatctgagcaggaagctgaacccggcgcagatacgtgaggccctcagcacaggatgcaactttgtgtggcagccttatgtcagctccatggagcacactgggtgggttcacagcagtgatctagccgaggatgatgaactggcatcgctcgcacaatttttgcacccctgtgagctcgtagggatggattgcattgagcagtacctcccgcaccgtgttgccagacagtttggactggaccaagatgtgcctgcagatgttcaccgtgccaaccaggattgggcgattgcttggcagacctaccagctggaaggtaagaatgtggctttcttcatccctcactctgagcctgggatcacaacacggtatgcacagtggtggaggcagcaacttctgccttctggcattgatgctgctacagcaagtgctccagtagagtggaagacttccaagcgcaaggtgaaaaagacaccagcggccatggaagctgaagctgagaaggagcgtaagatgaagaaggcccgggtctctcctacttatactgataaaaagcgcaaacttgaagagttgtatgatgctaagttgtcggattggcttccaactgcaaggaatgagattagtgacaccactagtgatatggaatcggaggaggccttattgcctaatgttggaactacaaatgatgatattgtgctactcatgccaaggaagcagacaacgactgcacctgtaagggcattgatggataatgacatgatcctggctctaggagagagaggaaactttatggttgatgagcctccagacatccaaagtgaacctgaagctgttgtccctgcaacgctggatgaggaaatagttaaaattcctgaggttatttctcttgatattccagataagccagaagaaggagccactgcagtaatggaggagcagaaggaagctactagtgtatctgatagatctgaagaagctagtgctctggtcataggagaggtagaagaaaaggttgccatagagggagctatttgtgttacagggatgaatccatcgggaaacaactcagcaactgtaatggaggcagatgaaagaaatgcagttccaaaagaatttggaagggctgccaaggaagtaattgaagctgtgccccagagccaacatgaagttaatgcaggtgttataaacaattctcatgatgtggtggctttacctgaggaggcccatccagttcagcccacaaataattctggtggatgtcccgtggtatcttgcataatggaagacagtaaagttgctggagattcgggcaaaattgattatgaatatttttgtgattttgttgaggaacagagggagattccttgtgtacaagagatttctggagaaaacagtcgaatgggtgagaaagagagagaagaaacctcccatgaatctcctcaactagagattgtagaatgtgtgcaagacatcgttcttagggaaacagactatgatgttaatcaaaagatagtttatccagcagtggaggatgtagcaacttccgatagtatgagtacatctcttctgggtgttcctgaaccagaaaatgcagaactcaataaacatccttatctagcaattaaagatgaggaagatatacccatggaagctgcacgaggagaagtagcagaaatggaacaaattagtacttctgcaaagggaggtgccgaggagcatggggacttttctgaacttgatcacatgggccgagcagatgctaaattgcatttacacttaaattctgaagtgcctgagaaaattgatgaaatagagtgtaaagaagtcgctggcactatgagactaactgggagatattctgatcagaagcttggagatgtgcctgaagttgggtacacagaagatgaaaacattagggggctggtagtgaacacaagtgataggaaaccttcagaagtctctcaagtcgagcctgcaaaactggaacattctaaggatctggtgaaagaggaaacagacaaatccgaaaatattcctggattagaatgtataggattggaggaaactcgtggagatttgatggaagagtgtgcaaataccaagtctgataatgttcccgaattagaaaatacaggattaggaggaactcatgggccaatagaggatactgatggtagactgaaggaaattcatgatgtcaatgcagaactggataaacacaatgtgcatgagagcgatattgatagatccgaggacatcatgcaaatcgatccactaacacaggataaagctacgtggctggcgaaggaagaaactgaagataaaactacaaaagttcaagaagtaaagtatgaacaattaagaaatgagccaccgattcaagaggattccaaggaaaagccctgtgctgatagcaaggatctatcagagaatgttgtagttcagtccaaagaggtagataaattgaaacaagcaggagagggttgccaggcgttaatggagaaagacatggagaatgctagtggtgcttttgtactagaacagacagaagatggacacagaaaatcattgatagagacaagtataaataacgatagtgaaattactctagtcgagcagttggatggacaaagtgagagtcttacgaggacaggtactgtggaaattcatggagaaaccattaaagcacaagacaatgagttctataaggatgtggtagaagattcaaatgactcaaccaatgaaaaggatgtggtagaagattcaaacgaatcaatcaatgctaagatgccatgtagttcagctactgtacagttaaaagaagataagatggaagtttttcatgaaggcaagatggaggagccatgtgctcaggatgctgaactgagtaatcagagggaaccatcatctgatgcaactgctatggagattgagtggctctggaacaggacagcagaatcatatgcaaaaacatggaggcaacaacagtggaaggcagccacacactggatagtggactaagttccgatctagccaaggttaatgaaactcatgctgcacgggaaattaaaaaccaggaagttttggatgtggacatgaaagtagcaatgagtgtttgtggtgaatatcaaattaactcaattggtatggaggatgtcaaatctaccaaaggatcacagaaccaagaatgtttggaccagaaagaagaccatataatggaggaaagagtggagtgtgaagtaagagaaggaagtggagtatcctatgaagaggcatgtgagctcggtggtggtagagtgaaagcctctggagttgcagtggatgttagtggtccagtgctaaacaaggaggcctgcaacacagaggagttgcaggcaagggaggataagaagcgtcatggagttgggcatgtgaatgagaagagggttttggaagaaactagtatgattgatactggtgaattgaaatctgattcgactgttatggagattagcatggctgggttaagacaaggaacactcaaccaatgtgcttcaagttcggagaaggaagaagcagtgcaggagaagcatgatcagggattggtagatgaaaacacaaacagaggttcagctgacaatgatgcacttgaatgtggtggagtgaatcctgatgtggccataacaatgtttcatgaaactattcttacaacagaagctgtcaatatagctgggtctaaaatttcgtctgagaaccagcaaaaggaagcaccctttgaagtacactctataacagaagtcgaaggttctgaatcaaatgaatcatcaagaaaggagcctgaaggagctcttgctcttccacaagagcctggcaacctggtaaaagttaaacaagaaagtttggagaatgaaaccgagatgtccatttttagggagaatgacaaagtttctggaaaagatcaggcatcagcagagtttataattgatccttcaaatacggatgaacggagggagaatgatattgggcggcccgatgaatcagcaaaaggctgtgaaaggttaacttctgattctataaacacagttcactccaaatttggcaagtctagtaatgaagaggataagagaacacagaacaccaggtctacggatccaaaagatataaaggaatcattgggtagaattcgtgccgaaccatcaaacagggtacacacaaccagtgttgggtattactctcagcatgcagctcatgatccgatttcatcttgtaaggagatcaaagtgcctttgcgagacggtgcaagggattctggaagggaccgtgcactggagttagtggttacaagtccacgagaagagactcctcgatggaggcaagaacagtacgcacttcagattttagaagacgttcaaaattcccgaattgctgagagatctaggatggagatggagatcagagtactgaaggcacaagtcagtagcatggagagacaagtgatgaacctggatcacttctctgaggtcaagtccagatctagtttgaaccaacaaatggtacatttgcacaaaccatacttctgaaactgtaatgggtttaaattttttgaaataaacacaaatccatgcaagttctctgtcccatcatcgactacctacctcctggaagtcggattgttttactcttaggttattccgaacctcctcccattatactgaatgattggatgcatgacggtgctagggcatgtctgggttatgcctgaatcctgatgacatgactaaactgcccaaggtgtcactagctcaaatcgatggtagttctgctgtctatcttttagattgacgataagctcggataatttggaacttctgtgcaccacatataaggaatcagttcatttcacagggaaatcggaaaaaaatatcagcattccaaaggggtctaggtcttggatggtcagccatttttattatgtacaaatgcagtagaagatgaggaacttcatagtatgtttatgaactcgcaactacttagaccgcatattagtgtgaagcgagtctcattttgtttctagaagtgaagttgaattccattagttgtcagcattcacctgttctataggagctgccgtccagactccaggacttgtgaaagaatataaggggtaagatcgtcaatgcacatggccatacaatggcagaagagcaatgaggacacaagattgaatttaaaatggggaactggcaacaaatcgaactactggccgtgtttttttatataaaaaactggctgttgagtgttgacggcaaacgggagaagcccaatgtttcgattggcagaacggcaaaattctggcctgctggctgatttcgacgcaccaaagccaacgttccttgcagtcttcctttcatgtagaaattctactctacctttttgaactaatctccttgtcctattttctttcttgaactctaaaaccatacattttagcctccaaattagggatggttcatgattttttattcagatgtaaaatttgtggtcttctttcttccattgtgaataaatatgatataaaagttgtcatgcaaatccatatttttgtttttagcattaaacttgttaagattcataaaaaaat

SEQ ID NO: 33200 - DNA, 6914 bp, Zea Mays
atggcctccgacgacggcgacaaggacatcctcctcctcgtccaccaggtcccactcgacatggaggatgtgccagcgccccgcctggcgcacctcctcgccccgctccaccgcgcgcctccaccgcccccgcctccccccttccgctcgccgcccccgccccaggccgccgcttccgccgagcaccgcctctcattccgcggctggctcggcatcccccgccactgggacgactgggtcgccaagctccggcccctccacgcccgcctctggcgccgcctcggcatccacgacgccgtccttgcctccaccctccgcttcaagcgcgacgcctccgccatcctccatctcgcctccttctggtcccctgccaccgccaccttcgccttcccctggggggaggccactgtcaccctccaggacgtcgccctcctcgccggcttccccgccctcggcgccccggccacggccccgctcccgccccagtggcgccccgacgaggccgccctcaatggcgtgcgcctcggcttcaaccgcagcgcctgcaagaaggcgcaccactccgcctgggtaaaacacttcctcaccgacgataacgcggacacagtcttcgagcacgccgccttcctcgcgctctggctcacgcgcttcgtcctcccgggtcatccggagtccaccatgcgccaggccgtcttccccatcgccgtccgcctcgcgcgcggggaccgcgttgccctcgcgcccgccgtccttgcctcgatctaccgggacctccgcgagatcaaggccttcctcatcgccacgggcgccgccgccaccaccggcaacgccgatatgatctcctccttatccgtctactcgccactctacattcttcagctctggatgtgggagcgcttccctgccctcaggccagcaaaggtgaacccactcgttgatggcgatccgcttgccgctcggtggcatgatctgagcaggaagctgaacccggcgcagatacgtgaggccctcagcacaggatgcaactttgtgtggcagccttatgtcagctccatggagcacactgggtgggttcacagcagtgatctagccgaggatgatgaactggcatcgctcgcacaatttttgcacccctgtgagctcgtagggatggattgcattgagcagtacctcccgcaccgtgttgccagacagtttggactggaccaagatgtgcctgcagatgttcaccgtgccaaccaggattgggcgattgcttggcagacctaccagctggaaggtaagaatgtggctttcttcatccctcactctgagcctgggatcacaacacggtatgcacagtggtggaggcagcaacttctgccttctggcattgatgctgctacagcaagtgctccagtagagtggaagacttccaagcgcaaggtgaaaaagacaccagcggccatggaagctgaagctgagaaggagcgtaagatgaagaaggcccgggtctctcctacttatactgataaaaagcgcaaacttgaagagttgtatgatgctaagttgtcggattggcttccaactgcaaggaatgagattagtgacaccactagtgatatggaatcggaggaggccttattgcctaatgttggaactacaaatgatgatattgtgctactcatgccaaggaagcagacaacgactgcacctgtaagggcattgatggataatgacatgatcctggctctaggagagagaggaaactttatggttgatgagcctccagacatccaaagtgaacctgaagctgttgtccctgcaacgctggatgaggaaatagttaaaattcctgaggttatttctcttgatattccagataagccagaagaaggagccactgcagtaatggaggagcagaaggaagctactagtgtatctgatagatctgaagaagctagtgctctggtcataggagaggtagaagaaaaggttgccatagagggagctatttgtgttacagggatgaatccatcgggaaacaactcagcaactgtaatggaggcagatgaaagaaatgcagttccaaaagaatttggaagggctgccaaggaagtaattgaagctgtgccccagagccaacatgaagttaatgcaggtgttataaacaattctcatgatgtggtggctttacctgaggaggcccatccagttcagcccacaaataattctggtggatgtcccgtggtatcttgcataatggaagacagtaaagttgctggagattcgggcaaaattgattatgaatatttttgtgattttgttgaggaacagagggagattccttgtgtacaagagatttctggagaaaacagtcgaatgggtgagaaagagagagaagaaacctcccatgaatctcctcaactagagattgtagaatgtgtgcaagacatcgttcttagggaaacagactatgatgttaatcaaaagatagtttatccagcagtggaggatgtagcaacttccgatagtatgagtacatctcttctgggtgttcctgaaccagaaaatgcagaactcaataaacatccttatctagcaattaaagatgaggaagatatacccatggaagctgcacgaggagaagtagcagaaatggaacaaattagtacttctgcaaagggaggtgccgaggagcatggggacttttctgaacttgatcacatgggccgagcagatgctaaattgcatttacacttaaattctgaagtgcctgagaaaattgatgaaatagagtgtaaagaagtcgctggcactatgagactaactgggagatattctgatcagaagcttggagatgtgcctgaagttgggtacacagaagatgaaaacattagggggctggtagtgaacacaagtgataggaaaccttcagaagtctctcaagtcgagcctgcaaaactggaacattctaaggatctggtgaaagaggaaacagacaaatccgaaaatattcctggattagaatgtataggattggaggaaactcgtggagatttgatggaagagtgtgcaaataccaagtctgataatgttcccgaattagaaaatacaggattaggaggaactcatgggccaatagaggatactgatggtagactgaaggaaattcatgatgtcaatgcagaactggataaacacaatgtgcatgagagcgatattgatagatccgaggacatcatgcaaatcgatccactaacacaggataaagctacgtggctggcgaaggaagaaactgaagataaaactacaaaagttcaagaagtaaagtatgaacaattaagaaatgagccaccgattcaagaggattccaaggaaaagccctgtgctgatagcaaggatctatcagagaatgttgtagttcagtccaaagaggtagataaattgaaacaagcaggagagggttgccaggcgttaatggagaaagacatggagaatgctagtggtgcttttgtactagaacagacagaagatggacacagaaaatcattgatagagacaagtataaataacgatagtgaaattactctagtcgagcagttggatggacaaagtgagagtcttacgaggacagaagattcaaatgactcaaccaatgaaaaggatgtggtagaagattcaaacgaatcaatcaatgctaagatgccatgtagttcagctactgtacagttaaaagaagataagatggaagtttttcatgaaggcaagatggaggagccatgtgctcaggatgctgaactgagtaatcagagggaaccatcatctgatgcaactgctatggagattgaggcagtggctctggaacaggacagcagaatcatatgcaaaaacatggaggcaacaacagtggaaggcagccacacactggatagtggactaagttccgatctagccaaggttaatgaaactcatgctgcacgggaaattaaaaaccaggaagttttggatgtggacatgaaagtagcaatgagtgtttgtggtgaatatcaaattaactcaattggtatggaggatgtcaaatctaccaaaggatcacagaaccaagaatgtttggaccagaaagaagaccatataatggaggaaagagtggagtgtgaagtaagagaaggaagtggagtatcctatgaagaggcatgtgagctcggtggtggtagagtgaaagcctctggagttgcagtggatgttagtggtccagtgctaaacaaggaggcctgcaacacagaggaggcaagggaggataagaagcgtcatggagttgggcatgtgaatgagaagagggttttggaagaaactagtatgattgatactggtgaattgaaatctgattcgactgttatggagattagcatggctgggttaagacaaggaacactcaaccaatgtgcttcaagttcggagaaggaagaagcagtgcaggagaagcatgatcagggattggtagatgaaaacacaaacagaggttcagctgacaatgatgcacttgaatgtggtggagtgaatcctgatgtggccataacaatgtttcatgaaactattcttacaacagaagctgtcaatatagctgggtctaaaatttcgtctgagaaccagcaaaaggaagcaccctttgaagtacactctataacagaagtcgaaggttctgaatcaaatgaatcatcaagaaaggagcctgaaggagctcttgctcttccacaagagcctggcaacctggtaaaagttaaacaagaaagtttggagaatgaaaccgagatgtccatttttagggagaatgacaaagtttctggaaaagatcaggcatcagcagagtttataattgatccttcaaatacggatgaacggagggagaatgatattgggcggcccgatgaatcagcaaaaggctgtgaaaggttaacttctgattctataaacacagttcactccaaatttggcaagtctagtaatgaagaggataagagaacacagaacaccaggtctacggatccaaaagatataaaggaatcattgggtagaattcgtgccgaaccatcaaacagggtacacacaaccagtgttgggtattactctcagcatgcagctcatgatccgatttcatcttgtaaggagatcaaagtgcctttgcgagacggtgcaagggattctggaagggaccgtgcactggagttagtggttacaagtccacgagaagagactcctcgatggaggcaagaacagtacgcacttcagattttagaagacgttcaaaattcccgaattgctgagagatctaggatggagatggagatcagagtactgaaggcacaagtcagtagcatggagagacaagtgatgaacctggatcacttctctgaggtcaagtccagatctagtttgaaccaacaaatggtacatttgcacaaaccatacttctgaaactgtaatgggtttaaattttttgaaataaacacaaatccatgcaagttctctgtcccatcatcgactacctacctcctggaagtcggattgttttactcttaggtgagttccattttaaagtttaactctagcaaagaaaggtcctgcattctatcctaactcaaataatataagcgtcttgtttatgtgtaaagcaatccagtaggaagacggcatttttggtgaatttctgatgcaaatttcagtacaggttattccgaacctcctcccattatactgaatgattggatgcatgacggtgctagggcatgtctgggttatgcctgaatcctgatgacatgactaaactgcccaaggtgtcactagctcaaatcgatggtagttctgctgtctatcttttagattgacgataagctcggataatttggaacttctgtgcaccacatataaggtagaaggattttgaatcatatttctgacaagaaagcactgacatgttactattttcataggtagatcagatagtttattacttatgttcaatacatagaaatctgatttttgctgcttacggatctagttaaatttacaacattgtatggatttgttgtctaaaagttggtcgatggaagcccctcccccctgaaatataaagatttcactgttgttattctaaacactacggccttctttggaatgcaggaatcagttcatttcacagggaaatcggaaaaaaatatcagcattccaaaggggtctaggtcttggatggtcagccatttttattatgtacaaatgcagtagaagatgaggaacttcatagtatgtttatgaactcgcaactacttagaccgcatattagtgtgaagcgagtctcattttgtttctagaagtgaagttgaattccattagttgtcagcattcacctgttctataggagctgccgtccagactccaggacttgtgaaagaatataaggggtaagatcgtcaatgcacatggccatacaatggcagaagagcaatgaggacacaagattgaatttaaaatggggaactggcaacaaatcgaactactggccgtgtttttttatataaaaaactggctgttgagtgttgacggcaaacgggagaagcccaatgtttcgattggcagaacggcaaaattctggcctgctggctgatttcgacgcaccaaagccaacgttccttgcagtcttcctttcatgtagaaattctactctacctttttgaactaatctccttgtcctattttctttcttgaactctaaaaccatacattttagcctccaaattagggatggttcatgattttttattcagatgtaaaatttgtggtcttctttcttccattgtgaataaatatgatataaaagttgtcatgcaaatccatatttttgtttttagcattaaacttgttaagattcataaaaaaat

SEQ ID NO: 33201 - DNA, 6658 bp, Zea Mays
atggcctccgacgacggcgacaaggacatcctcctcctcgtccaccaggtcccactcgacatggaggatgtgccagcgccccgcctggcgcacctcctcgccccgctccaccgcgcgcctccaccgcccccgcctccccccttccgctcgccgcccccgccccaggccgccgcttccgccgagcaccgcctctcattccgcggctggctcggcatcccccgccactgggacgactgggtcgccaagctccggcccctccacgcccgcctctggcgccgcctcggcatccacgacgccgtccttgcctccaccctccgcttcaagcgcgacgcctccgccatcctccatctcgcctccttctggtcccctgccaccgccaccttcgccttcccctggggggaggccactgtcaccctccaggacgtcgccctcctcgccggcttccccgccctcggcgccccggccacggccccgctcccgccccagtggcgccccgacgaggccgccctcaatggcgtgcgcctcggcttcaaccgcagcgcctgcaagaaggcgcaccactccgcctgggtaaaacacttcctcaccgacgataacgcggacacagtcttcgagcacgccgccttcctcgcgctctggctcacgcgcttcgtcctcccgggtcatccggagtccaccatgcgccaggccgtcttccccatcgccgtccgcctcgcgcgcggggaccgcgttgccctcgcgcccgccgtccttgcctcgatctaccgggacctccgcgagatcaaggccttcctcatcgccacgggcgccgccgccaccaccggcaacgccgatatgatctcctccttatccgtctactcgccactctacattcttcagctctggatgtgggagcgcttccctgccctcaggccagcaaaggtgaacccactcgttgatggcgatccgcttgccgctcggtggcatgatctgagcaggaagctgaacccggcgcagatacgtgaggccctcagcacaggatgcaactttgtgtggcagccttatgtcagctccatggagcacactgggtgggttcacagcagtgatctagccgaggatgatgaactggcatcgctcgcacaatttttgcacccctgtgagctcgtagggatggattgcattgagcagtacctcccgcaccgtgttgccagacagtttggactggaccaagatgtgcctgcagatgttcaccgtgccaaccaggattgggcgattgcttggcagacctaccagctggaaggtaagaatgtggctttcttcatccctcactctgagcctgggatcacaacacggtatgcacagtggtggaggcagcaacttctgccttctggcattgatgctgctacagcaagtgctccagtagagtggaagacttccaagcgcaaggtgaaaaagacaccagcggccatggaagctgaagctgagaaggagcgtaagatgaagaaggcccgggtctctcctacttatactgataaaaagcgcaaacttgaagagttgtatgatgctaagttgtcggattggcttccaactgcaaggaatgagattagtgacaccactagtgatatggaatcggaggaggccttattgcctaatgttggaactacaaatgatgatattgtgctactcatgccaaggaagcagacaacgactgcacctgtaagggcattgatggataatgacatgatcctggctctaggagagagaggaaactttatggttgatgagcctccagacatccaaagtgaacctgaagctgttgtccctgcaacgctggatgaggaaatagttaaaattcctgaggttatttctcttgatattccagataagccagaagaaggagccactgcagtaatggaggagcagaaggaagctactagtgtatctgatagatctgaagaagctagtgctctggtcataggagaggtagaagaaaaggttgccatagagggagctatttgtgttacagggatgaatccatcgggaaacaactcagcaactgtaatggaggcagatgaaagaaatgcagttccaaaagaatttggaagggctgccaaggaagtaattgaagctgtgccccagagccaacatgaagttaatgcaggtgttataaacaattctcatgatgtggtggctttacctgaggaggcccatccagttcagcccacaaataattctggtggatgtcccgtggtatcttgcataatggaagacagtaaagttgctggagattcgggcaaaattgattatgaatatttttgtgattttgttgaggaacagagggagattccttgtgtacaagagatttctggagaaaacagtcgaatgggtgagaaagagagagaagaaacctcccatgaatctcctcaactagagattgtagaatgtgtgcaagacatcgttcttagggaaacagactatgatgttaatcaaaagatagtttatccagcagtggaggatgtagcaacttccgatagtatgagtacatctcttctgggtgttcctgaaccagaaaatgcagaactcaataaacatccttatctagcaattaaagatgaggaagatatacccatggaagctgcacgaggagaagtagcagaaatggaacaaattagtacttctgcaaagggaggtgccgaggagcatggggacttttctgaacttgatcacatgggccgagcagatgctaaattgcatttacacttaaattctgaagtgcctgagaaaattgatgaaatagagtgtaaagaagtcgctggcactatgagactaactgggagatattctgatcagaagcttggagatgtgcctgaagttgggtacacagaagatgaaaacattagggggctggtagtgaacacaagtgataggaaaccttcagaagtctctcaagtcgagcctgcaaaactggaacattctaaggatctggtgaaagaggaaacagacaaatccgaaaatattcctggattagaatgtataggattggaggaaactcgtggagatttgatggaagagtgtgcaaataccaagtctgataatgttcccgaattagaaaatacaggattaggaggaactcatgggccaatagaggatactgatggtagactgaaggaaattcatgatgtcaatgcagaactggataaacacaatgtgcatgagagcgatattgatagatccgaggacatcatgcaaatcgatccactaacacaggataaagctacgtggctggcgaaggaagaaactgaagataaaactacaaaagttcaagaagtaaagtatgaacaattaagaaatgagccaccgattcaagaggattccaaggaaaagccctgtgctgatagcaaggatctatcagagaatgttgtagttcagtccaaagaggtagataaattgaaacaagcaggagagggttgccaggcgttaatggagaaagacatggagaatgctagtggtgcttttgtactagaacagacagaagatggacacagaaaatcattgatagagacaagtataaataacgatagtgaaattactctagtcgagcagttggatggacaaagtgagagtcttacgaggacaggtactgtggaaattcatggagaaaccattaaagcacaagacaatgagttctataaggatgtggtagaagattcaaatgactcaaccaatgaaaaggatgtggtagaagattcaaacgaatcaatcaatgctaagatgccatgtagttcagctactgtacagttaaaagaagataagatggaagtttttcatgaaggcaagatggaggagccatgtgctcaggatgctgaactgagtaatcagagggaaccatcatctgatgcaactgctatggagattgaggcagtggctctggaacaggacagcagaatcatatgcaaaaacatggaggcaacaacagtggaaggcagccacacactggatagtggactaagttccgatctagccaaggttaatgaaactcatgctgcacgggaaattaaaaaccaggaagttttggatgtggacatgaaagtagcaatgagtgtttgtggtgaatatcaaattaactcaattggtatggaggatgtcaaatctaccaaaggatcacagaaccaagaatgtttggaccagaaagaagaccatataatggaggaaagagtggagtgtgaagtaagagaaggaagtggagtatcctatgaagaggcatgtgagctcggtggtggtagagtgaaagcctctggagttgcagtggatgttagtggtccagtgctaaacaaggaggcctgcaacacagaggaggcaagtacattttcaggatctagatctttgcagcactgtttggcacagctcctcctagttctgactcctgctacagtaggcccctagttcattttgggggtctagctcctgctgcagtgccatttccaggaggagacggagctggcatagaacttgccaaagggggcctaactatgattcattgtgatgaacttgttctacagttgcaggcaagggaggataagaagcgtcatggagttgggcatgtgaatgagaagagggttttggaagaaactagtatgattgatactggtgaattgaaatctgattcgactgttatggagattagcatggctgggttaagacaaggaacactcaaccaatgtgcttcaagttcggagaaggaagaagcagtgcaggagaagcatgatcagggattggtagatgaaaacacaaacagaggttcagctgacaatgatgcacttgaatgtggtggagtgaatcctgatgtggccataacaatgtttcatgaaactattcttacaacagaagctgtcaatatagctgggtctaaaatttcgtctgagaaccagcaaaaggaagcaccctttgaagtacactctataacagaagtcgaaggttctgaatcaaatgaatcatcaagaaaggagcctgaaggagctcttgctcttccacaagagcctggcaacctggtaaaagttaaacaagaaagtttggagaatgaaaccgagatgtccatttttagggagaatgacaaagtttctggaaaagatcaggcatcagcagagtttataattgatccttcaaatacggatgaacggagggagaatgatattgggcggcccgatgaatcagcaaaaggctgtgaaaggttaacttctgattctataaacacagttcactccaaatttggcaagtctagtaatgaagaggataagagaacacagaacaccaggtctacggatccaaaagatataaaggaatcattgggtagaattcgtgccgaaccatcaaacagggtacacacaaccagtgttgggtattactctcagcatgcagctcatgatccgatttcatcttgtaaggagatcaaagtgcctttgcgagacggtgcaagggattctggaagggaccgtgcactggagttagtggttacaagtccacgagaagagactcctcgatggaggcaagaacagtacgcacttcagattttagaagacgttcaaaattcccgaattgctgagagatctaggatggagatggagatcagagtactgaaggcacaagtcagtagcatggagagacaagtgatgaacctggatcacttctctgaggtcaagtccagatctagtttgaaccaacaaatggttattccgaacctcctcccattatactgaatgattggatgcatgacggtgctagggcatgtctgggttatgcctgaatcctgatgacatgactaaactgcccaaggtgtcactagctcaaatcgatggtagttctgctgtctatcttttagattgacgataagctcggataatttggaacttctgtgcaccacatataaggaatcagttcatttcacagggaaatcggaaaaaaatatcagcattccaaaggggtctaggtcttggatggtcagccatttttattatgtacaaatgcagtagaagatgaggaacttcatagtatgtttatgaactcgcaactacttagaccgcatattagtgtgaagcgagtctcattttgtttctagaagtgaagttgaattccattagttgtcagcattcacctgttctataggagctgccgtccagactccaggacttgtgaaagaatataaggggtaagatcgtcaatgcacatggccatacaatggcagaagagcaatgaggacacaagattgaatttaaaatggggaactggcaacaaatcgaactactggccgtgtttttttatataaaaaactggctgttgagtgttgacggcaaacgggagaagcccaatgtttcgattggcagaacggcaaaattctggcctgctggctgatttcgacgcaccaaagccaacgttccttgcagtcttcctttcatgtagaaattctactctacctttttgaactaatctccttgtcctattttctttcttgaactctaaaaccatacattttagcctccaaattagggatggttcatgattttttattcagatgtaaaatttgtggtcttctttcttccattgtgaataaatatgatataaaagttgtcatgcaaatccatatttttgtttttagcattaaacttgttaagattcataaaaaaat

SEQ ID NO: 33202 - DNA, 6380 bp, Zea Mays
atggcctccgacgacggcgacaaggacatcctcctcctcgtccaccaggtcccactcgacatggaggatgtgccagcgccccgcctggcgcacctcctcgccccgctccaccgcgcgcctccaccgcccccgcctccccccttccgctcgccgcccccgccccaggccgccgcttccgccgagcaccgcctctcattccgcggctggctcggcatcccccgccactgggacgactgggtcgccaagctccggcccctccacgcccgcctctggcgccgcctcggcatccacgacgccgtccttgcctccaccctccgcttcaagcgcgacgcctccgccatcctccatctcgcctccttctggtcccctgccaccgccaccttcgccttcccctggggggaggccactgtcaccctccaggacgtcgccctcctcgccggcttccccgccctcggcgccccggccacggccccgctcccgccccagtggcgccccgacgaggccgccctcaatggcgtgcgcctcggcttcaaccgcagcgcctgcaagaaggcgcaccactccgcctgggtaaaacacttcctcaccgacgataacgcggacacagtcttcgagcacgccgccttcctcgcgctctggctcacgcgcttcgtcctcccgggtcatccggagtccaccatgcgccaggccgtcttccccatcgccgtccgcctcgcgcgcggggaccgcgttgccctcgcgcccgccgtccttgcctcgatctaccgggacctccgcgagatcaaggccttcctcatcgccacgggcgccgccgccaccaccggcaacgccgatatgatctcctccttatccgtctactcgccactctacattcttcagctctggatgtgggagcgcttccctgccctcaggccagcaaaggtgaacccactcgttgatggcgatccgcttgccgctcggtggcatgatctgagcaggaagctgaacccggcgcagatacgtgaggccctcagcacaggatgcaactttgtgtggcagccttatgtcagctccatggagcacactgggtgggttcacagcagtgatctagccgaggatgatgaactggcatcgctcgcacaatttttgcacccctgtgagctcgtagggatggattgcattgagcagtacctcccgcaccgtgttgccagacagtttggactggaccaagatgtgcctgcagatgttcaccgtgccaaccaggattgggcgattgcttggcagacctaccagctggaaggtaagaatgtggctttcttcatccctcactctgagcctgggatcacaacacggtatgcacagtggtggaggcagcaacttctgccttctggcattgatgctgctacagcaagtgctccagtagagtggaagacttccaagcgcaaggtgaaaaagacaccagcggccatggaagctgaagctgagaaggagcgtaagatgaagaaggcccgggtctctcctacttatactgataaaaagcgcaaacttgaagagttgtatgatgctaagttgtcggattggcttccaactgcaaggaatgagattagtgacaccactagtgatatggaatcggaggaggccttattgcctaatgttggaactacaaatgatgatattgtgctactcatgccaaggaagcagacaacgactgcacctgtaagggcattgatggataatgacatgatcctggctctaggagagagaggaaactttatggttgatgagcctccagacatccaaagtgaacctgaagctgttgtccctgcaacgctggatgaggaaatagttaaaattcctgaggttatttctcttgatattccagataagccagaagaaggagccactgcagtaatggaggagcagaaggaagctactagtgtatctgatagatctgaagaagctagtgctctggtcataggagaggtagaagaaaaggttgccatagagggagctatttgtgttacagggatgaatccatcgggaaacaactcagcaactgtaatggaggcagatgaaagaaatgcagttccaaaagaatttggaagggctgccaaggaagtaattgaagctgtgccccagagccaacatgaagttaatgcaggtgttataaacaattctcatgatgtggtggctttacctgaggaggcccatccagttcagcccacaaataattctggtggatgtcccgtggtatcttgcataatggaagacagtaaagttgctggagattcgggcaaaattgattatgaatatttttgtgattttgttgaggaacagagggagattccttgtgtacaagagatttctggagaaaacagtcgaatgggtgagaaagagagagaagaaacctcccatgaatctcctcaactagagattgtagaatgtgtgcaagacatcgttcttagggaaacagactatgatgttaatcaaaagatagtttatccagcagtggaggatgtagcaacttccgatagtatgagtacatctcttctgggtgttcctgaaccagaaaatgcagaactcaataaacatccttatctagcaattaaagatgaggaagatatacccatggaagctgcacgaggagaagtagcagaaatggaacaaattagtacttctgcaaagggaggtgccgaggagcatggggacttttctgaacttgatcacatgggccgagcagatgctaaattgcatttacacttaaattctgaagtgcctgagaaaattgatgaaatagagtgtaaagaagtcgctggcactatgagactaactgggagatattctgatcagaagcttggagatgtgcctgaagttgggtacacagaagatgaaaacattagggggctggtagtgaacacaagtgataggaaaccttcagaagtctctcaagtcgagcctgcaaaactggaacattctaaggatctggtgaaagaggaaacagacaaatccgaaaatattcctggattagaatgtataggattggaggaaactcgtggagatttgatggaagagtgtgcaaataccaagtctgataatgttcccgaattagaaaatacaggattaggaggaactcatgggccaatagaggatactgatggtagactgaaggaaattcatgatgtcaatgcagaactggataaacacaatgtgcatgagagcgatattgatagatccgaggacatcatgcaaatcgatccactaacacaggataaagctacgtggctggcgaaggaagaaactgaagataaaactacaaaagttcaagaagtaaagtatgaacaattaagaaatgagccaccgattcaagaggattccaaggaaaagccctgtgctgatagcaaggatctatcagagaatgttgtagttcagtccaaagaggtagataaattgaaacaagcaggagagggttgccaggcgttaatggagaaagacatggagaatgctagtggtgcttttgtactagaacagacagaagatggacacagaaaatcattgatagagacaagtataaataacgatagtgaaattactctagtcgagcagttggatggacaaagtgagagtcttacgaggacaggtactgtggaaattcatggagaaaccattaaagcacaagacaatgagttctataaggatgtggtagaagattcaaatgactcaaccaatgaaaaggatgtggtagaagattcaaacgaatcaatcaatgctaagatgccatgtagttcagctactgtacagttaaaagaagataagatggaagtttttcatgaaggcaagatggaggagccatgtgctcaggatgctgaactgagtaatcagagggaaccatcatctgatgcaactgctatggagattgaggcagtggctctggaacaggacagcagaatcatatgcaaaaacatggaggcaacaacagtggaaggcagccacacactggatagtggactaagttccgatctagccaaggttaatgaaactcatgctgcacgggaaattaaaaaccaggaagttttggatgtggacatgaaagtagcaatgagtgtttgtggtgaatatcaaattaactcaattggtatggaggatgtcaaatctaccaaaggatcacagaaccaagaatgtttggaccagaaagaagaccatataatggaggaaagagtggagtgtgaagtaagagaaggaagtggagtatcctatgaagaggcatgtgagctcggtggtggtagagtgaaagcctctggagttgcagtggatgttagtggtccagtgctaaacaaggaggcctgcaacacagaggaggcaagggaggataagaagcgtcatggagttgggcatgtgaatgagaagagggttttggaagaaactagtatgattgatactggtgaattgaaatctgattcgactgttatggagattagcatggctgggttaagacaaggaacactcaaccaatgtgcttcaagttcggagaaggaagaagcagtgcaggagaagcatgatcagggattggtagatgaaaacacaaacagaggttcagctgacaatgatgcacttgaatgtggtggagtgaatcctgatgtggccataacaatgtttcatgaaactattcttacaacagaagctgtcaatatagctgggtctaaaatttcgtctgagaaccagcaaaaggaagcaccctttgaagtacactctataacagaagtcgaaggttctgaatcaaatgaatcatcaagaaaggagcctgaaggagctcttgctcttccacaagagcctggcaacctggtaaaagttaaacaagaaagtttggagaatgaaaccgagatgtccatttttagggagaatgacaaagtttctggaaaagatcaggcatcagcagagtttataattgatccttcaaatacggatgaacggagggagaatgatattgggcggcccgatgaatcagcaaaaggctgtgaaaggttaacttctgattctataaacacagttcactccaaatttggcaagtctagtaatgaagaggataagagaacacagaacaccaggtctacggatccaaaagatataaaggaatcattgggtagaattcgtgccgaaccatcaaacagggtacacacaaccagtgttgggtattactctcagcatgcagctcatgatccgatttcatcttgtaaggagatcaaagtgcctttgcgagacggtgcaagggattctggaagggaccgtgcactggagttagtggttacaagtccacgagaagagactcctcgatggaggcaagaacagtacgcacttcagattttagaagacgttcaaaattcccgaattgctgagagatctaggatggagatggagatcagagtactgaaggcacaagtcagtagcatggagagacaagtgatgaacctggatcacttctctgaggtcaagtccagatctagtttgaaccaacaaatggtacatttgcacaaaccatacttctgaaactgtaatgggtttaaattttttgaaataaacacaaatccatgcaagttctctgtcccatcatcgactacctacctcctggaagtcggattgttttactcttaggaatcagttcatttcacagggaaatcggaaaaaaatatcagcattccaaaggggtctaggtcttggatggtcagccatttttattatgtacaaatgcagtagaagatgaggaacttcatagtatgtttatgaactcgcaactacttagaccgcatattagtgtgaagcgagtctcattttgtttctagaagtgaagttgaattccattagttgtcagcattcacctgttctataggagctgccgtccagactccaggacttgtgaaagaatataaggggtaagatcgtcaatgcacatggccatacaatggcagaagagcaatgaggacacaagattgaatttaaaatggggaactggcaacaaatcgaactactggccgtgtttttttatataaaaaactggctgttgagtgttgacggcaaacgggagaagcccaatgtttcgattggcagaacggcaaaattctggcctgctggctgatttcgacgcaccaaagccaacgttccttgcagtcttcctttcatgtagaaattctactctacctttttgaactaatctccttgtcctattttctttcttgaactctaaaaccatacattttagcctccaaattagggatggttcatgattttttattcagatgtaaaatttgtggtcttctttcttccattgtgaataaatatgatataaaagttgtcatgcaaatccatatttttgtttttagcattaaacttgttaagattcataaaaaaat

SEQ ID NO: 33203 - DNA, 583 bp, Zea Mays
gagatgtgccaggagtttgtattcagatgcaactgatgctaaaaccctaggagtattcaatagctctctactgatgaagtatccagcatcgctgctttaaatgaggagaaaaaaagggccatggcgaacgagctggtggcgaagctgacgtttgtctgctgggacaagtgcgtgacggggagcgtggggagcagcctgagcaggagcgagacctcgtgcctgtccaactgcgcgaaacgcttcgccgaggtgaagatgatggccctgcagcgcttcaccactaccggccgcggctgaagtcccaacggccaaccacgcgcgcaaacgcaggcatctctctctctctctctctctgcccctgcgtggacggagcaatgtgtgtgtgtggtgtgtcctctggagtgtgccattgttggtgagatggtagaaaactagaaagacatgtcaatgtatcctatgcattttttttgtttaagacggtgttagaattaagttgattctgagatgttgatgcaagaagtggctgcggctcttccgttcctgcagggattaaagaaaaagtcaaaaaaaatttaaaaaaatt

SEQ ID NO: 33204 - DNA, 518 bp, Zea Mays
tgggcgcctaggcggcaaggcaccactgtttcccaaggaggagaaaaaaagggccatggcgaacgagctggtggcgaagctgacgtttgtctgctgggacaagtgcgtgacggggagcgtggggagcagcctgagcaggagcgagacctcgtgcctgtccaactgcgcgaaacgcttcgccgaggtgaagatgatggccctgcagcgcttcaccactaccggccgcggctgaagtcccaacggccaaccacgcgcgcaaacgcaggcatctctctctctctctctctctgcccctgcgtggacggagcaatgtgtgtgtgtggtgtgtcctctggagtgtgccattgttggtgagatggtagaaaactagaaagacatgtcaatgtatcctatgcattttttttgtttaagacggtgttagaattaagttgattctgagatgttgatgcaagaagtggctgcggctcttccgttcctgcagggattaaagaaaaagtcaaaaaaaatttaaaaaaatt

SEQ ID NO: 33205 - DNA, 554 bp, Zea Mays
gttacttggtgtttaatagaatcaaattcagcatgttcagacttaaggaaatccaatgcaagcagggaggatggaggagaaaaaaagggccatggcgaacgagctggtggcgaagctgacgtttgtctgctgggacaagtgcgtgacggggagcgtggggagcagcctgagcaggagcgagacctcgtgcctgtccaactgcgcgaaacgcttcgccgaggtgaagatgatggccctgcagcgcttcaccactaccggccgcggctgaagtcccaacggccaaccacgcgcgcaaacgcaggcatctctctctctctctctctctgcccctgcgtggacggagcaatgtgtgtgtgtggtgtgtcctctggagtgtgccattgttggtgagatggtagaaaactagaaagacatgtcaatgtatcctatgcattttttttgtttaagacggtgttagaattaagttgattctgagatgttgatgcaagaagtggctgcggctcttccgttcctgcagggattaaagaaaaagtcaaaaaaaatttaaaaaaatt

SEQ ID NO: 33206 - DNA, 1376 bp, Zea Mays
atgacaagtaaattagagattgatgcacgcagtagtaattaagacaggcatcgtaatccccccttgtttttggtttagtagtaaatctgcctgctgctctaagtagtagttaaaaaaacagagaagcggggtgggctgcgtataaatagccggccggaaagggggaaacgggcaggcaaacaacaacacacactcgcgagtcgcgagcacagatcgaacaggcaggcggcctccgatctgtcgccattgtctcgttgtgttgtcccggaggagcagcagcaggagcaggagcgatcaggccaacgctttggactcctggacctaccccgatggcgccagcctcctctccgatgagacagtaatccagcgagcgcgagtgagagacaaccagcaaccatgaggccagacacggcggcctccgcctctccgactccgaagaagaaacccgacagtaaagccgcgctggacctcgcgtcgtggagcttcaacgtcaccacgtccgtcgggctcatcatggtcaacaaggctctaatggcgacgtacgggttcacgttcgccacgacgttaacggggctgcatttcgcgaccaccaccgtgatgaccctcgtgttccggtgggtcggcctcagccagccgtcgcagctgccgttaccggacctagccaagagtggcggtgtgcaccgtcactgacgtgagcgtcaacgccagaggcctggtcgcggccgtcgtggctgtctggagcacggctctgcagcagtattatgttcatttcctccagcgcaagcactctctcaactcgttcagcctgctgggccacacggcgccggcgcaggcagggtcgctgctgctggcagggccgttcgttgactacctgctgacagggcaaagggtggaccacttcagcttctcgtctctcgctctgttgttcctcgcgctgtcgtgcttcatcgcgatcggggtcaacctgagccagttcatctgcatcggccgcttctccgccgtgtccttccaggtcctgggccacatgaagaccgtgctcgtcctctccctcggcttcctcttcttcggcaaggaaggcctcagcctccaggtcgtcctcgggatggccctcgccgtcctcgggatggtgtggtacgggaacgcgtccgctaaaccgggcggcaaggagcgccgcggcaaagacctgccggtgaccctcaaacaagacaaggacgacactgacaaataatcatttgttatagttacaggtatacgtgtaatcgtttaatcacatggtgcaattgtttgccaaaacattgaacaatttcccttggtatacgtgtttttgtgtgtgtttgccaaaacattgaacgatttggtttgtaaacgcgtacaag

SEQ ID NO: 33207 - DNA, 3237 bp, Zea Mays
cgcatgaccaatcctctgatcatgctcctccttaccatcatctgcgccactttggggctaaccgctggtgcgccgcaacccctaggcggcatcgtctgcatcccatctgagagggctgctttgctgtccttcaagaagggtatcacaagggacaagaccaatcgcctcggctcatggcacggccaagattgctgccggtggagaggtgtcacctgcagcaaccgaaccggcaacgtcctcatgctcaatcttgcctacccgagctatccatatgatgactcgtacgacagagatgtatgcggcgattccagaactttgtttggcgagataagtccctctctactcttgctgagacaactagagcacatagacctaagctggaactgcttgttaggcccaaatgggcgtatgccttcattcctgggctccatgaagaacttgagatacctcaatctctctggagtaccattcaaaggtagcgtgcctcctcagttaggcaacctatctaggttgcagtaccttgatcttggcaattcatatttagcatatggcatatactcaaaggacattacttggttaacaaacctacctctgctgcagtaccttggcatgcgttatgtaaatctctcagggatagctggtgattggcctcatatactgaatatgataccatctttaagggtcattagtctctctgactgtttgcttggtagtgcaaaccaatcgctcgcattttttaatctcacaaacttgagaagcttgatctctcgttcaacgacttccatcacacatatatatcgagttggttctggagagcgacaagtctcaagcacctagttctggaggagaccggattgtttggtgaattgcctgatgcactaggaaacctgacatctcttgttgtccttgatttatcaggtaatgtgaacatgacgataacacaaggcttgaagaacctttgtggtttggaaatccttgaccttatcgacagttcgataaatatagacatagcagagttgatggacagattaccactgtgcacaagggaaaacaaaaacttacagttacaggagctccatctgggccaagttcgatagggtacttcaggagcttacgcatccttgatctcagctataacaatctcagaggaagtgtacctactgaaattggtacccttacaaatttgacctatttggatctaagcaataacaacctcggtggagtaatcacggaggagcactttgtaggtctgatgaacctaaaggaaattgacctgtctttcaataatttgagtgttgtagtggatgcagattggatccaaccattcaggctggagtctgcagggtttgcatcttgccatttgggtcccctgtttccagtttggcttcgccagcagctccttcatatcactaagctagacatttcaagcacagggttggtgggaaacattcctgattggttttggtcattttcaaaggctgcttctcttgacatgtcttacaatcaattaaatggcatcatgccacacaagattgaagccccactgctccaaacactagtcgtgtcctcaaatcaaattggtggcaccattccggagtcgatttgcgaattgaagaacctgttatttctagatttgtcgaacaatcttttggaaggtgaaattcctcagtgttctgacattgaacgcctagaattttgtctcctaggcaacaacaatttatcaggaacgttcccagcatttctgcgcaactgtacgagtatggtggtcttggaccttgcatggaataatttatctggaaggttaccttcttggatacgggagctgtatagtttacagtttctacgtctaagccacaattcattttctgggaatattccgtctggaataaccagcctttcttgtcttcaatacttggatctatcaggaaactacttttctggtgttatacctcctcatctttcaaatctaacaggtatgaccatgaagggatactgcccatttgaaattttcggcgagatgggatttaaattcgatgatatatggttagtaatgacaaaagggcaacaacttaaatatagtctgggacttgtatattttgtaagcattgatttatcaggcaacggcttaactggtgaaattcctttgggtatcacatcctttgatgccttaatgaatttgaatttgtcatcaaaccaactgggtggaaaaattcccaacaagattggtgccatgatgtcgttggaatccctagacctctccatcaacaagctttctggtgaaatcccatggagcttatcaaacctgacatctttaagctacatgaacttgtcctacaacaatctctcaggaaggataccctcaggccgccagctagacaccttaaacgcggacaacccgtcacttatgtacataggcaacagtgggctttgtggacctcctcttcaaaataattgttcaggaaatggtagtttcacacctggttattatcacagaagcaataggcaaaaaatcgagtttgcatcattttatttcagtcttgtattggggttcgtggtggggctgtggatggtgttttgtgctctgttgttcatgaacacatggagggttgcttattttgggctcctcgacgagctgtataacaagatctacgtgtttgtagctgtaaaatgggcaagtatgacaatgagtgcagctgcagaatgagagcagaacatcttgaaggaaatattgtccaggacacaaccaatacaatggaaactgttaatggaccagtcaggaagatatataaaagtgctataggccgtgtggtttcgtccaaataaagaccatgttctgatttatccttctgttacctgtaaaccataatacttctttagattcaagcactacatgtgtaactatattgtttcgacagatttatctgtttatcaatacattgttttttcatcattgatagactgaacttcaggttcagaatggccattgtatcacatagtagcaaaaaggacgcaatttttcaggttataattttgtagtttggatagcattctgaaactgataagtggaccaaggagagtaggaagcccaaaaatgttacagcaagaagccaagaactcgatctcgctgggaacgaagatgaacagaggaaaaacacatacacagcacacgcgaatggctggaacacagagagacacattcgtttggtgtggcaacaaccgcttttccgagactcttcc

SEQ ID NO: 33208 - DNA, 723 bp, Zea Mays
gtcattgctccacatgttgtagcgtaccgtcagtgttgtggtcacaatcatcctccgcctcctccgtcccccaccgtgcctcctctcccaggtccccaatcacgacattttgacgtgtggcacttgctgagagctcggcatgccgtaccagtttggccactgctcacctatcgcagcaacatatgaaggtggaacagacacatgggcaaccacaggcaagcggggaagtccatggctggctactgttgccatacgccatggcagaccctatcgtgtgcagtttctctctctacgtaccatcaacgacaccctaaaaccacgacgtccagcagaacttgaacagggagcatggagtcctcagacagaagatggaaacatccttccagttgctgtgacaggtcggtcctgctgtaagtgcaaccaggcctaaaggcatgtaaggaacgactgatggcgtaacgatgggccacgaataaggagtttcccatttttctatggcctatggtagagttatctgtaggttttaagtgtaacacacttcagaatctaggcattaagctggtgctgtcgagtgccgactagctagggacactagctaggccgacatgcaaaatggaatgaaatgtgtcgttctaattttatttgctaggaaaatggtgatttctttgtactgaaaataacttggtatttttctctatttttactgtctaccatgactttgat

SEQ ID NO: 33209 - DNA, 1336 bp, Zea Mays
tacttctcttgcacgccccgtactcccttcactttttagagaccagatctacagtcgtcctgagtcccactctcttttttttgaggttctcgccaaacaccgtccttagggctccctcgctttgccggtgatggcgttccgcaaggtcttctgacatccctccgtacgtccagaatcatcaggtgtcctgctgttgtcattgtctaatatagcacacggcgatttatcaccttcctctgaaccagtagctccgtcgttgctgtgccaagactctgtgttagcatcagatgctaaatgaggccaagactacgaccaggatttggaaagcgaacaatcaatctatgattatttccatgatcaagtggcatatcatgtcctttttcagaagttgttccagtttgagatgacttatcctgcagcaatgatcgatcaagggagacagatcttcctacagaagcttccttcaggttccctgaaacaagaccattgaaaccgttgacgctggagacgctgagcgtgtgactactcagtcctcgacaactagaaagagatcatgctcttcgcccggcaaatcaatagcgaaaaaattgttcgttgctgacgatgaggaatgaagcatcagtcaatccagtggaggtggtgttggtggatccaggtcagattgtttgagctctgattattgcaactcatgtgtttccgttagatggtatgcttcgttacattttgttttaaattcatgagctttcagctaggctaaaataacctctaaaatatagtgctgatagctactgcagacagttgtagttctttctcaggatcgtacatacctacggtagcaaatgactattctgactcatatcatcgtagtacactaagttttggactgtgcatacactatttctagccgtagctaatggcactgaatttgtcttgtctatactttacatgtattgtaagctctcaagttgggggtcgaggttttccattttttataatttgatatatcaaacatatatgcatgctgctgtttgactacaattgtgtctgctcccttttcagtgatgacaaagataattaggtgctggtgtaggaacgtggaacttttgccttcacagttgcagccatgtgtaattcagggttatcatctatttctacttttctcaagttgttgtatatgttagttggatgggggagatgtggtacatacttttgtccgcaacatcgctaacgatttgcctacacaaacctgccaaggttaactttgatcaggatgctacgcttatcacgcttttgatatgctggcggccaacgtgaatgcatctcacttaaaatcgtg

SEQ ID NO: 33210 - DNA, 2586 bp, Zea Mays
tttgagatcaaaaaatattaaagagtattgtaggggctaaaatctctttgtaactcttgaatctgctccttcgaaaatcctgtgcgaaagaggaaaaacccaaaaaaaatcataaagggctagtttaagaatctatttttataagaaatttttattttatcaagaaaaataaactaattttttagtaaaatagaaatcctttcaaaaaaaaaaaaaaaactggtttcccaaccagcgaaagggtggaggcggaagccacaaaccaaaccctcctgcgtcttccctcctgcttcgtgcttcttccactcccccttctcttctgcggcgccaagctcgagctcatcgccacggaggttagctcgatcttgggttttggtctatccgcgacgaaggtgaattagttggagactgcgtgatgtctggtgcgaaagcgggtgtagacgtggaaacaagggacggcggtgccggtggctccttcagtgaggagaggctcgttgataagctcaacaagctcaacaacacagcggcgagcattcagacactttcacaatggtgcatttttcaccgcaagagggccagaagggttgtagacacatgggaaaagcagttcagtagtgcaacaaaggataagaaaatatcattcctgtttctatcaaatgatatcttgcaaaacagcaagcgcaaaggaggtgattatgtgcatgagttctggagggttctacccagatcattgaaacatgtctacgaaaatgggggagaagatggaaagaaactggtggctagactaataggaatttgggatgaacgcaaagttttcggaacccgtattgaaagtctgaaatacagcatttttggtgacaaccctcctatattcgataacaatgggaataaaaataattcaaaccctggctctaaccccttaaattccaaagttgcaaggaaggattccagtacagtactaaaaaaactgactgttggtggtatgcctgaaaagattgtgactgcataccaatctgtgcttgatcaacattttgatgaagacacagttttgaacaaatgtaagagtactgttagtgttctggaaaagataaagaaagatatagaagatgctagtaccaaaggtgatcagcctgcctcaacaatgatttctgacctcccagaacaggaaacaatcctgaagcagtgcattgcacaacttgaaagcgtatatgtggtgaggatattgctgataaatcaattaaaagaagctctcgtcgaacaggagtcaaagtcagaagttcttcgcagccagttgcaagtcgctcgttcagaggctgaacatgccattcaacttaggcaacgatttgatggtgccgttgtctcaaatggcacaggatctaattctagcctgctaatgattaccccaacagaacagacagctgctatgatacagggttctggagtaaggctgacgtctcctcagttgcaatcactgaatccagcaacctcgcttgcccctacagtcagtgcagtgggagatgagccgaagagaacggcagcagcaatggcagacaagctgacatctttgtcggcacctgtgcaggttctgagctccattttctcatcttttgttgccgagcatggcgcctcgctatcttccaagaacagtggaccggcttctggagaactctccggggaaccgccgggcttccagattgaaaagaggcctaggcttgagaaaaccgtgcaggccagtgacatgggtgctcctccctttcctgtgcaagtaccgcagctgcaacaacagactggagcagcgcccacacagctaccaacacagatcaaccaagcaccgggtccatttgcaccgccactgccgtctcttttgccaccgtttctgcaacagttcggccaaagtactggaggaatgatgggagtgggacctttcgggatgatgtccggctctatgccacctccgcctccattgcccaacattatgccggcaggttttccaggaccaagcggtccacctccacctccgcttccaccggcccagaaccaaccccaacagcagcagcagtctcctcaggcaccacagcaatcacccacatcagcaggattcttccagtcatcagcaggcatggggttcttcccaccagtgcaggtgcaacagtctccgtctgcccaacgacaatgactcaacggtggcatggcattcatcgggctataatggcagcactttgtgctaacttctgtacattaaccaataatcacctagcgtcgagcttatacgtggctgatcctgcaagagaggcgcaggaccgttgtcacggttagaaaaaaaaactgtagaataggcttttgtgatgactctcgttttggtcagagttgtttaactcttccttgttctgtgtagtagttagatgttgtgtctctgtcccccgtttgctttgatctcctgaggcaaaagaaagtggcactggaattgttgcccactgaatcactgatcgtgctgtcattgacatgatgtaaactgcaaatacttgttctattgttgtttaaatttaattatttattatgattattttttagtacagcttccttttt

SEQ ID NO: 33211 - DNA, 2387 bp, Zea Mays
aaaatagaaatcctttcaaaaaaaaaaaaaaaactggtttcccaaccagcgaaagggtggaggcggaagccacaaaccaaaccctcctgcgtcttccctcctgcttcgtgcttcttccactcccccttctcttctgcggcgccaagctcgagctcatcgccacggagctcgatcttgggttttggtctatccgcgacgaaggtgaattagttggagactgcgtgatgtctggtgcgaaagcgggtgtagacgtggaaacaagggacggcggtgccggtggctccttcagtgaggagaggctcgttgataagctcaacaagctcaacaacacagcggcgagcattcagacactttcacaatggtgcatttttcaccgcaagagggccagaagggttgtagacacatgggaaaagcagttcagtagtgcaacaaaggataagaaaatatcattcctgtttctatcaaatgatatcttgcaaaacagcaagcgcaaaggaggtgattatgtgcatgagttctggagggttctacccagatcattgaaacatgtctacgaaaatgggggagaagatggaaagaaactggtggctagactaataggaatttgggatgaacgcaaagttttcggaacccgtattgaaagtctgaaatacagcatttttggtgacaaccctcctatattcgataacaatgggaataaaaataattcaaaccctggctctaaccccttaaattccaaagttgcaaggaaggattccagtacagtactaaaaaaactgactgttggtggtatgcctgaaaagattgtgactgcataccaatctgtgcttgatcaacattttgatgaagacacagttttgaacaaatgtaagagtactgttagtgttctggaaaagataaagaaagatatagaagatgctagtaccaaagcctgcctcaacaatgatttctgacctcccagaacaggaaacaatcctgaagcagtgcattgcacaacttgaaagcgtatatgtggtgaggatattgctgataaatcaattaaaagaagctctcgtcgaacaggagtcaaagtcagaagttcttcgcagccagttgcaagtcgctcgttcagaggctgaacatgccattcaacttaggcaacgatttgatggtgccgttgtctcaaatggcacaggatctaattctagcctgctaatgattaccccaacagaacagacagctgctatgatacagggttctggagtaaggctgacgtctcctcagttgcaatcactgaatccagcaacctcgcttgcccctacagtcagtgcagtgggagatgagccgaagagaacggcagcagcaatggcagacaagctgacatctttgtcggcacctgtgcaggttctgagctccattttctcatcttttgttgccgagcatggcgcctcgctatcttccaagaacagtggaccggcttctggagaactctccggggaaccgccgggcttccagattgaaaagaggcctaggcttgagaaaaccgtgcaggccagtgacatgggtgctcctccctttcctgtgcaagtaccgcagctgcaacaacagactggagcagcgcccacacagctaccaacacagatcaaccaagcaccgggtccatttgcaccgccactgccgtctcttttgccaccgtttctgcaacagttcggccaaagtactggaggaatgatgggagtgggacctttcgggatgatgtccggctctatgccacctccgcctccattgcccaacattatgccggcaggttttccaggaccaagcggtccacctccacctccgcttccaccggcccagaaccaaccccaacagcagcagcagtctcctcaggcaccacagcaatcacccacatcagcaggattcttccagtcatcagcaggcatggggttcttcccaccagtgcaggtgcaacagtctccgtctgcccaacgacaatgactcaacggtggcatggcattcatcgggctataatggcagcactttgtgctaacttctgtacattaaccaataatcacctagcgtcgagcttatacgtggctgatcctgcaagagaggcgcaggaccgttgtcacggttagaaaaaaaaactgtagaataggcttttgtgatgactctcgttttggtcagagttgtttaactcttccttgttctgtgtagtagttagatgttgtgtctctgtcccccgtttgctttgatctcctgaggcaaaagaaagtggcactggaattgttgcccactgaatcactgatcgtgctgtcattgacatgatgtaaactgcaaatacttgttctattgttgtttaaatttaattatttattatgattattttttagtacagcttccttttt

SEQ ID NO: 33212 - DNA, 2401 bp, Zea Mays
aaaatagaaatcctttcaaaaaaaaaaaaaaaactggtttcccaaccagcgaaagggtggaggcggaagccacaaaccaaaccctcctgcgtcttccctcctgcttcgtgcttcttccactcccccttctcttctgcggcgccaagctcgagctcatcgccacggagggttagctcgatcttgggttttggtctatccgcgacgaaggtgaattagttggagactgcgtgatgtctggtgcgaaagcgggtgtagacgtggaaacaagggacggcggtgccggtggctccttcagtgaggagaggctcgttgataagctcaacaagctcaacaacacagcggcgagcattcagacactttcacaatggtgcatttttcaccgcaagagggccagaagggttgtagacacatgggaaaagcagttcagtagtgcaacaaaggataagaaaatatcattcctgtttctatcaaatgatatcttgcaaaacagcaagcgcaaaggaggtgattatgtgcatgagttctggagggttctacccagatcattgaaacatgtctacgaaaatgggggagaagatggaaagaaactggtggctagactaataggaatttgggatgaacgcaaagttttcggaacccgtattgaaagtctgaaatacagcatttttggtgacaaccctcctatattcgataacaatgggaataaaaataattcaaaccctggctctaaccccttaaattccaaagttgcaaggaaggattccagtacagtactaaaaaaactgactgttggtggtatgcctgaaaagattgtgactgcataccaatctgtgcttgatcaacattttgatgaagacacagttttgaacaaatgtaagagtactgttagtgttctggaaaagataaagaaagatatagaagatgctagtaccaaaggtgatcagcctgcctcaacaatgatttctgacctcccagaacaggaaacaatcctgaagcagtgcattgcacaacttgaaagcgtatatgtggtgaggatattgctgataaatcaattaaaagaagctctcgtcgaacaggagtcaaagtcagaagttcttcgcagccagttgcaagtcgctcgttcagaggctgaacatgccattcaacttaggcaacgatttgatggtgccgttgtctcaaatggcacaggatctaattctagcctgctaatgattaccccaacagaacagacagctgctatgatacagggttctggagtaaggctgacgtctcctcagttgcaatcactgaatccagcaacctcgcttgcccctacagtcagtgcagtgggagatgagccgaagagaacggcagcagcaatggcagacaagctgacatctttgtcggcacctgtgcaggttctgagctccattttctcatcttttgttgccgagcatggcgcctcgctatcttccaagaacagtggaccggcttctggagaactctccggggaaccgccgggcttccagattgaaaagaggcctaggcttgagaaaaccgtgcaggccagtgacatgggtgctcctccctttcctgtgcaagtaccgcagctgcaacaacagactggagcagcgcccacacagctaccaacacagatcaaccaagcaccgggtccatttgcaccgccactgccgtctcttttgccaccgtttctgcaacagttcggccaaagtactggaggaatgatgggagtgggacctttcgggatgatgtccggctctatgccacctccgcctccattgcccaacattatgccggcaggttttccaggaccaagcggtccacctccacctccgcttccaccggcccagaaccaaccccaacagcagcagcagtctcctcaggcaccacagcaatcacccacatcagcaggattcttccagtcatcagcaggcatggggttcttcccaccagtgcaggtgcaacagtctccgtctgcccaacgacaatgactcaacggtggcatggcattcatcgggctataatggcagcactttgtgctaacttctgtacattaaccaataatcacctagcgtcgagcttatacgtggctgatcctgcaagagaggcgcaggaccgttgtcacggttagaaaaaaaaactgtagaataggcttttgtgatgactctcgttttggtcagagttgtttaactcttccttgttctgtgtagtagttagatgttgtgtctctgtcccccgtttgctttgatctcctgaggcaaaagaaagtggcactggaattgttgcccactgaatcactgatcgtgctgtcattgacatgatgtaaactgcaaatacttgttctattgttgtttaaatttaattatttattatgattattttttagtacagcttccttttt

SEQ ID NO: 33213 - DNA, 2351 bp, Zea Mays
aaaatagaaatcctttcaaaaaaaaaaaaaaaactggtttcccaaccagcgaaagggtggaggcggaagccacaaaccaaaccctcctgcgtcttccctcctgcttcgtgcttcttccactcccccttctcttctgcggcgccaagctcgagctcatcgccacggagctcgatcttgggttttggtctatccgcgacgaaggtgaattagttggagactgcgtgatgtctggtgcgaaagcgggtgtagacgtggaaacaagggacggcggtgccggtggctccttcagtgaggagaggctcgttgataagctcaacaagctcaacaacacagcggcgagcattcagacactttcacaatggtgcatttttcaccgcaagagggccagaagggttgtagacacatgggaaaagcagttcagtagtgcaacaaaggataagaaaatatcattcctgtttctatcaaatgatatcttgcaaaacagcaagcgcaaaggaggtgattatgtgcatgagttctggagggttctacccagatcattgaaacatgtctacgaaaatgggggagaagatggaaagaaactggtggctagactaataggaatttgggatgaacgcaaagttttcggaacccgtattgaaagtctgaaatacagcatttttggtgacaaccctcctatattcgataacaatgggaataaaaataattcaaaccctggctctaaccccttaaattccaaagttgcaaggaaggattccagtacagtactaaaaaaactgactgttggtggtatgcctgaaaagattgtgactgcataccaatctgtgcttgatcaacattttgatgaagacacagttttgaacaaatgtaagagtactgttagtgttctggaaaagataaagaaagatatagaagatgctagtaccaaaggaaacaatcctgaagcagtgcattgcacaacttgaaagcgtatatgtggtgaggatattgctgataaatcaattaaaagaagctctcgtcgaacaggagtcaaagtcagaagttcttcgcagccagttgcaagtcgctcgttcagaggctgaacatgccattcaacttaggcaacgatttgatggtgccgttgtctcaaatggcacaggatctaattctagcctgctaatgattaccccaacagaacagacagctgctatgatacagggttctggagtaaggctgacgtctcctcagttgcaatcactgaatccagcaacctcgcttgcccctacagtcagtgcagtgggagatgagccgaagagaacggcagcagcaatggcagacaagctgacatctttgtcggcacctgtgcaggttctgagctccattttctcatcttttgttgccgagcatggcgcctcgctatcttccaagaacagtggaccggcttctggagaactctccggggaaccgccgggcttccagattgaaaagaggcctaggcttgagaaaaccgtgcaggccagtgacatgggtgctcctccctttcctgtgcaagtaccgcagctgcaacaacagactggagcagcgcccacacagctaccaacacagatcaaccaagcaccgggtccatttgcaccgccactgccgtctcttttgccaccgtttctgcaacagttcggccaaagtactggaggaatgatgggagtgggacctttcgggatgatgtccggctctatgccacctccgcctccattgcccaacattatgccggcaggttttccaggaccaagcggtccacctccacctccgcttccaccggcccagaaccaaccccaacagcagcagcagtctcctcaggcaccacagcaatcacccacatcagcaggattcttccagtcatcagcaggcatggggttcttcccaccagtgcaggtgcaacagtctccgtctgcccaacgacaatgactcaacggtggcatggcattcatcgggctataatggcagcactttgtgctaacttctgtacattaaccaataatcacctagcgtcgagcttatacgtggctgatcctgcaagagaggcgcaggaccgttgtcacggttagaaaaaaaaactgtagaataggcttttgtgatgactctcgttttggtcagagttgtttaactcttccttgttctgtgtagtagttagatgttgtgtctctgtcccccgtttgctttgatctcctgaggcaaaagaaagtggcactggaattgttgcccactgaatcactgatcgtgctgtcattgacatgatgtaaactgcaaatacttgttctattgttgtttaaatttaattatttattatgattattttttagtacagcttccttttt

SEQ ID NO: 33214 - DNA, 2365 bp, Zea Mays
aaaatagaaatcctttcaaaaaaaaaaaaaaaactggtttcccaaccagcgaaagggtggaggcggaagccacaaaccaaaccctcctgcgtcttccctcctgcttcgtgcttcttccactcccccttctcttctgcggcgccaagctcgagctcatcgccacggagctcgatcttgggttttggtctatccgcgacgaaggtgaattagttggagactgcgtgatgtctggtgcgaaagcgggtgtagacgtggaaacaagggacggcggtgccggtggctccttcagtgaggagaggctcgttgataagctcaacaagctcaacaacacagcggcgagcattcagacactttcacaatggtgcatttttcaccgcaagagggccagaagggttgtagacacatgggaaaagcagttcagtagtgcaacaaaggataagaaaatatcattcctgtttctatcaaatgatatcttgcaaaacagcaagcgcaaaggaggtgattatgtgcatgagttctggagggttctacccagatcattgaaacatgtctacgaaaatgggggagaagatggaaagaaactggtggctagactaataggaatttgggatgaacgcaaagttttcggaacccgtattgaaagtctgaaatacagcatttttggtgacaaccctcctatattcgataacaatgggaataaaaataattcaaaccctggctctaaccccttaaattccaaagttgcaaggaaggattccagtacagtactaaaaattgtgactgcataccaatctgtgcttgatcaacattttgatgaagacacagttttgaacaaatgtaagagtactgttagtgttctggaaaagataaagaaagatatagaagatgctagtaccaaaggtgatcagcctgcctcaacaatgatttctgacctcccagaacaggaaacaatcctgaagcagtgcattgcacaacttgaaagcgtatatgtggtgaggatattgctgataaatcaattaaaagaagctctcgtcgaacaggagtcaaagtcagaagttcttcgcagccagttgcaagtcgctcgttcagaggctgaacatgccattcaacttaggcaacgatttgatggtgccgttgtctcaaatggcacaggatctaattctagcctgctaatgattaccccaacagaacagacagctgctatgatacagggttctggagtaaggctgacgtctcctcagttgcaatcactgaatccagcaacctcgcttgcccctacagtcagtgcagtgggagatgagccgaagagaacggcagcagcaatggcagacaagctgacatctttgtcggcacctgtgcaggttctgagctccattttctcatcttttgttgccgagcatggcgcctcgctatcttccaagaacagtggaccggcttctggagaactctccggggaaccgccgggcttccagattgaaaagaggcctaggcttgagaaaaccgtgcaggccagtgacatgggtgctcctccctttcctgtgcaagtaccgcagctgcaacaacagactggagcagcgcccacacagctaccaacacagatcaaccaagcaccgggtccatttgcaccgccactgccgtctcttttgccaccgtttctgcaacagttcggccaaagtactggaggaatgatgggagtgggacctttcgggatgatgtccggctctatgccacctccgcctccattgcccaacattatgccggcaggttttccaggaccaagcggtccacctccacctccgcttccaccggcccagaaccaaccccaacagcagcagcagtctcctcaggcaccacagcaatcacccacatcagcaggattcttccagtcatcagcaggcatggggttcttcccaccagtgcaggtgcaacagtctccgtctgcccaacgacaatgactcaacggtggcatggcattcatcgggctataatggcagcactttgtgctaacttctgtacattaaccaataatcacctagcgtcgagcttatacgtggctgatcctgcaagagaggcgcaggaccgttgtcacggttagaaaaaaaaactgtagaataggcttttgtgatgactctcgttttggtcagagttgtttaactcttccttgttctgtgtagtagttagatgttgtgtctctgtcccccgtttgctttgatctcctgaggcaaaagaaagtggcactggaattgttgcccactgaatcactgatcgtgctgtcattgacatgatgtaaactgcaaatacttgttctattgttgtttaaatttaattatttattatgattattttttagtacagcttccttttt

SEQ ID NO: 33215 - DNA, 2347 bp, Zea Mays
aaaatagaaatcctttcaaaaaaaaaaaaaaaactggtttcccaaccagcgaaagggtggaggcggaagccacaaaccaaaccctcctgcgtcttccctcctgcttcgtgcttcttccactcccccttctcttctgcggcgccaagctcgagctcatcgccacggagctcgatcttgggttttggtctatccgcgacgaaggtgaattagttggagactgcgtgatgtctggtgcgaaagcgggtgtagacgtggaaacaagggacggcggtgccggtggctccttcagtgaggagaggctcgttgataagctcaacaagctcaacaacacagcggcgagcattcagacactttcacaatggtgcatttttcaccgcaagagggccagaagggttgtagacacatgggaaaagcagttcagtagtgcaacaaaggataagaaaatatcattcctgtttctatcaaatgatatcttgcaaaacagcaagcgcaaaggaggtgattatgtgcatgagttctggagggttctacccagatcattgaaacatgtctacgaaaatgggggagaagatggaaagaaactggtggctagactaataggaatttgggatgaacgcaaagttttcggaacccgtattgaaagtctgaaatacagcatttttggtgacaaccctcctatattcgataacaatgggaataaaaataattcaaaccctggctctaaccccttaaattccaaagttgcaaggaaggattccagtacagtactaaaaaaactgactgttggtggtatgcctgaaaagattgtgactgcataccaatctgtgcttgatcaacattttgatgaagacacagttttgaacaaatgtaagagtactgttagtgttctggaaaagataaagaaagatatagaagatgctagtaccaaaggtgatcagcctgcctcaacaatgatttctgacctcccagaacaggaaacaatcctgaagcagtgcattgcacaacttgaaagcgtatatgtggagtcaaagtcagaagttcttcgcagccagttgcaagtcgctcgttcagaggctgaacatgccattcaacttaggcaacgatttgatggtgccgttgtctcaaatggcacaggatctaattctagcctgctaatgattaccccaacagaacagacagctgctatgatacagggttctggagtaaggctgacgtctcctcagttgcaatcactgaatccagcaacctcgcttgcccctacagtcagtgcagtgggagatgagccgaagagaacggcagcagcaatggcagacaagctgacatctttgtcggcacctgtgcaggttctgagctccattttctcatcttttgttgccgagcatggcgcctcgctatcttccaagaacagtggaccggcttctggagaactctccggggaaccgccgggcttccagattgaaaagaggcctaggcttgagaaaaccgtgcaggccagtgacatgggtgctcctccctttcctgtgcaagtaccgcagctgcaacaacagactggagcagcgcccacacagctaccaacacagatcaaccaagcaccgggtccatttgcaccgccactgccgtctcttttgccaccgtttctgcaacagttcggccaaagtactggaggaatgatgggagtgggacctttcgggatgatgtccggctctatgccacctccgcctccattgcccaacattatgccggcaggttttccaggaccaagcggtccacctccacctccgcttccaccggcccagaaccaaccccaacagcagcagcagtctcctcaggcaccacagcaatcacccacatcagcaggattcttccagtcatcagcaggcatggggttcttcccaccagtgcaggtgcaacagtctccgtctgcccaacgacaatgactcaacggtggcatggcattcatcgggctataatggcagcactttgtgctaacttctgtacattaaccaataatcacctagcgtcgagcttatacgtggctgatcctgcaagagaggcgcaggaccgttgtcacggttagaaaaaaaaactgtagaataggcttttgtgatgactctcgttttggtcagagttgtttaactcttccttgttctgtgtagtagttagatgttgtgtctctgtcccccgtttgctttgatctcctgaggcaaaagaaagtggcactggaattgttgcccactgaatcactgatcgtgctgtcattgacatgatgtaaactgcaaatacttgttctattgttgtttaaatttaattatttattatgattattttttagtacagcttccttttt

SEQ ID NO: 33216 - DNA, 2361 bp, Zea Mays
aaaatagaaatcctttcaaaaaaaaaaaaaaaactggtttcccaaccagcgaaagggtggaggcggaagccacaaaccaaaccctcctgcgtcttccctcctgcttcgtgcttcttccactcccccttctcttctgcggcgccaagctcgagctcatcgccacggaggttagctcgatcttgggttttggtctatccgcgacgaaggtgaattagttggagactgcgtgatgtctggtgcgaaagcgggtgtagacgtggaaacaagggacggcggtgccggtggctccttcagtgaggagaggctcgttgataagctcaacaagctcaacaacacagcggcgagcattcagacactttcacaatggtgcatttttcaccgcaagagggccagaagggttgtagacacatgggaaaagcagttcagtagtgcaacaaaggataagaaaatatcattcctgtttctatcaaatgatatcttgcaaaacagcaagcgcaaaggaggtgattatgtgcatgagttctggagggttctacccagatcattgaaacatgtctacgaaaatgggggagaagatggaaagaaactggtggctagactaataggaatttgggatgaacgcaaagttttcggaacccgtattgaaagtctgaaatacagcatttttggtgacaaccctcctatattcgataacaatgggaataaaaataattcaaaccctggctctaaccccttaaattccaaagttgcaaggaaggattccagtacagtactaaaaaaactgactgttggtggtatgcctgaaaagattgtgactgcataccaatctgtgcttgatcaacattttgatgaagacacagttttgaacaaatgtaagagtactgttagtgttctggaaaagataaagaaagatatagaagatgctagtaccaaagaacaggaaacaatcctgaagcagtgcattgcacaacttgaaagcgtatatgtggtgaggatattgctgataaatcaattaaaagaagctctcgtcgaacaggagtcaaagtcagaagttcttcgcagccagttgcaagtcgctcgttcagaggctgaacatgccattcaacttaggcaacgatttgatggtgccgttgtctcaaatggcacaggatctaattctagcctgctaatgattaccccaacagaacagacagctgctatgatacagggttctggagtaaggctgacgtctcctcagttgcaatcactgaatccagcaacctcgcttgcccctacagtcagtgcagtgggagatgagccgaagagaacggcagcagcaatggcagacaagctgacatctttgtcggcacctgtgcaggttctgagctccattttctcatcttttgttgccgagcatggcgcctcgctatcttccaagaacagtggaccggcttctggagaactctccggggaaccgccgggcttccagattgaaaagaggcctaggcttgagaaaaccgtgcaggccagtgacatgggtgctcctccctttcctgtgcaagtaccgcagctgcaacaacagactggagcagcgcccacacagctaccaacacagatcaaccaagcaccgggtccatttgcaccgccactgccgtctcttttgccaccgtttctgcaacagttcggccaaagtactggaggaatgatgggagtgggacctttcgggatgatgtccggctctatgccacctccgcctccattgcccaacattatgccggcaggttttccaggaccaagcggtccacctccacctccgcttccaccggcccagaaccaaccccaacagcagcagcagtctcctcaggcaccacagcaatcacccacatcagcaggattcttccagtcatcagcaggcatggggttcttcccaccagtgcaggtgcaacagtctccgtctgcccaacgacaatgactcaacggtggcatggcattcatcgggctataatggcagcactttgtgctaacttctgtacattaaccaataatcacctagcgtcgagcttatacgtggctgatcctgcaagagaggcgcaggaccgttgtcacggttagaaaaaaaaactgtagaataggcttttgtgatgactctcgttttggtcagagttgtttaactcttccttgttctgtgtagtagttagatgttgtgtctctgtcccccgtttgctttgatctcctgaggcaaaagaaagtggcactggaattgttgcccactgaatcactgatcgtgctgtcattgacatgatgtaaactgcaaatacttgttctattgttgtttaaatttaattatttattatgattattttttagtacagcttccttttt

SEQ ID NO: 33217 - DNA, 3764 bp, Zea Mays
gcactcgcaaactaccaaacaccaggctcccacgatgcaaggagccaaggatggtgcggtcagggtaaaggacacaggtcttgactattgaaggaagaggtcacatgtttaccaactcatctcagaaaacaagttgtacacattaaacattttgacagagcagtctgctccggtgcgagtatgaaacacatcagacattcttttcttctaactaaccaagacaatagagtttcttcactggtggagttagaatgtgtttcgtttgaggtcaaaataggatgagacgagagagacacactctgctcgattttttttggaccacaccggcgaggtcaaaataggatgagacgagagagacacactctgctcgatttttttggaccacaccggcactaaaaattgctctggtgttcacctcactcctgcataactctcatccaaacatcatagaaaatatgtccaccatcttccatccttccttgtatgtccaaccaaacacaccattaaaatacatagagtcgtgcctagacaccatcacaccattctgcaaggcagcaacagcaacatctttcggcttcattgaaatccacaagtcgagtagcatcagaatcacagcagcaccaaggcacctgccaggatatttgtgtaaacatacaacattaccaaggccaaaagttcagcatattatcctcctgtagctttaagccaagcacaagcttgctgctgatgcatagaagaaacacgaaaaacactaggctaggaggtgattcacctcttcattaaagaaaaacacatcttaactgaagagaaacacgagcaaacaaatcagccaccacgaaatcacattcatggtataaaactggtaaaacagaaggctacaaaatatacacttaacttttccaattcgtgaatgaccaacaaatggtttatggaataacaacaactgagctaaatggtggcaaacatcgagacctgctcatcccacaggcaccattgccaccatcggggcaacgtatttactctcaaaacaagatatgttcgagcaggcgagcagagcatatacaacacagtatgaaaagcgtgcatttcctggtcttaacaatcagctaaacatgtatggctattagctgacaaagtgaaaaaatgaagtgaatgttgggacgtgttcatcccacaggcacagcatataagccataggggcaactaaaaagtcccaaatatatggcatgtcatcaggttaaacttaaagcctaacggacacgttagaagccaacgtggttaaataagcaattatctgttccatcttaaggatcacaaaagctgcagcaagtgaataatcagtagagaaggaatattttagagatggaatatgtatgaaaacatcccaaccttaatgattagctaaaaacacaatatcagctcacagtaataataaggtagtacatgctagggacctgttcatccaaaaggcactatgcaattgccattgagccagaaataaagttccacactgcaccaaaacttacatctcgctaatccaaaatagagggtggggctcaatgccatattaatgccagacgcatgcagaatgaacactggaccaaagcttgtttatcatatcgtcctcatgatcacggaacgtggataatcatgtcaacttgttaaggaaggccgagttcctttaggggctgtttagatccataactaataactcaaaataaataaaaggttggctaagttaaatcccactaactaagaatacaaagataatcaaacttattagcttatagccctgctaataaaaagctattagctgctttttcgatgatatctaacggaaccattagttgattgatgccagtgtagcacctaatatgagcaaaagcagccaaataacatacattgtgcaaatacgcaatacatatggtgacaagtgcattctaaatgtttagccatgaggttaactaacaatgcaacagtatgaattaatttcaaataggcagaagattgcaacagattgtagaagctaaacttatcgagcaagggcaatgactattgatactgaaacagataatttaatgacagaagatgtttacatcagtaaaatatttatgcagcaccatattaatagcccttataacagagctgcacgcctgcacccgcaataacagagccacgtaaatcaagacaatgatgtgatatagaattagaccccactaagaaaacgattatgcacaaacagaagacagagccattcaacaaacaacagatatcttttttattaaaaaatacttctaatttttcgaaaagaacaaatgaaaggaaagcagagcatcgcgaattgtttgttgttttggggtgaacccgcgcggccatcatcgcgcgcgctccgaccgcgggcagtcgtcatcgctcgtcgccggcagcaaccgcgggtgccagcgccgcctctttccaacaaaccgcgccaccaacccaatgacccttggaggtcggcgggggcgacacggccaaggaggagccggctccggccgccgcggcgcagccggacggcgcgctcggataagatcaagtagtgttcgtgagggccgaaaccctagcttattcgcccttcacccgtggccttttatcacagcgacgaacacttgggcctcacaagtcaccagtttttccttccttctatggccgagcacaataggttctcaccatacaattgggcctcaacaacaacaacacaggcccagacaccataaaccagacctttcggccccacatgtcattctctgagcggcgccgatccgacaatcgtaaaaccctaactctcccaatccaagctataaaagcgttcccctcctgtctgtccgctctatacgccgccatcttcgcaagccaccgcaaccgaagcccgccttcgccgccgccgcctctgcgatccccgcaaggtcgcaaacatgtctaccgtgctccagcgcccgacccccggcacggtccagtgcttcggccgcaagaagacggctgtggccgtcgcctacaccaagccggggcgcgggctgatcaaggtgaacggcgtcccgattgagctcatcaggccggagatgctccgcctcaaggccttcgagcccatcctgctggcggggcgctccaggttcaaggacatcgacatgaggatccgcgtccgaggcggcgggaagacgtcgcagatctacgccattcgccaggccgtcgccaaggggctcgtcgcctactaccagaagtacgtcgacgaggccgccaagaaggaggtcaaggacatcttcacccggtacgaccgcacccttctcgtcgccgaccccaggcgctgcgagccgaagaagttcggtggtcgcggcgcccgcgccaggttccagaagtcctaccgttgagcgctcggctgcccgcgcttgccgtaccgatgcctgtgttgtcccaacttgccagttcgatgcctgtacccgtggcttaattttctatcatcggagctacttatgtggttctataactagatgctgttttaccttcaacttgtgctgttgtaccttcatatttggactttttaagccttgtgtcggacgcctttggcattgaaatatgagagattttgaagactatctctgaagttatgtggttctatatctagatgttgtttcagcttgttacttgtgttaatgaatttatgatatgtttgtcataaatttatgatatgtactggttgttgctattcagttttgcagcacgtatttttccta

SEQ ID NO: 33218 - DNA, 1964 bp, Zea Mays
attttaggactgagaaaatattattttaaaatattaaatttgtttgaataatttaaatatccacgttcatccgcttgcgcactgcacacgaatacacgatgcaggcttggagcgcccggactcggactcccgccgacaacggcctcggttgggcacggccatgaagcggacacgttgctaaactcagggcacagcccggcctgatccgggagacgacgagatccatcgccatcagagaatcctagcccacccagaccaggtgccccacggcggtgccggcgatggcaacccgctactggatcgtctctctccccgtgcagtctcccggcgccaccgcgacctcgctttggtcgcgcctgcaggatggcatctcccgccactccttcgacaccccgctgtaccggttcaacgtcccggacctccgcgtcggcaccctcgactccctcctcgcgctcagcgatgacctcgtcaagtcaaacgtgttcgtcgagggcgtttcgcacaagatccggaggcagatcgaagacctcgagcgcgccggaggcgtcgacagcggggccctcaccgtcgatggcgttcccgtcgacacctacctcaccaggttcgtgtgggatgagggcaagtaccccacaatgtcgtcgctcaaggagatcgtcggcagcatccagtcgcaggtcgccaagatcgaggatgacatgaaggtccgagcagcggaatataacaatgtaaggagccagcttactgcaatcaacagaaagcaaagtgggagcttagcagttcgtgatctttccaatctggtaaaaccagaggatatggtctgctcagagcatctagtaacacttcttgctattgttccaaagtactcccaaaaagactggttgtcaagctatgaatcactcgacacatttgtggtcatctaaacagctctatgaagacaatgagtacgcactctacaccataacactttttgctaaggttgttgacaactttaaggtccgtgctcgcgagaagggtttccaggttcgtgattttgagtatagtcctgaagcacaagaaagtagaaagcaggagatggagaagttactgctagagcaggaagttatgaggacctcgcttctgcaatggtgctatgccagctacagtgaggttttcagttcctggatgcacttctgcgccgtgcgcatatttgtagagagcattcttagatacggtctgccaccatcgttcctgtctgccgttcttgctccgtctacaaagggcgagaagaaagtgaggagcatcttagaggacctttgcggcaatgtccatagtatttattggaaaggcgaagatgacgtggcagttgctggtctgggaggtgaatcagaggtccatccttacgtctcattcaccataaactttgtttgagcattactggtgttacgccgtcaagtaaatcgaaacgatggaatggttctgtacattgctagtgttacggcaattctttgttgatctgtcagcttttatctgatcatgtaatttatatattggatatataagccgatcaataatgtagcttttgaggagactggaagtagatggatcacgatcaccatgtaatttgtaaaatggggctactgttactgtaataaaggcacatgtcaaatatcttcagctgcggtggcctcttgctgagctccctcggcctcctcggtactagtactgggcgcctcaaccaccaccgtcttccttacacggaacatggccaagtggatgtcaccgaagatgagtaggctgccggggtcgacggacgcggggaagcccgggttgagccggcgctcgttgatgtaggtgccgttggtgctgtccaggtccgtcaccagcaggctgccgcccttcttctccagccgggcgtgagcgcctgaaactgcatgaccaccttgtcggcgaccgtgcgtggaggatagcataatagcaacagcagc

SEQ ID NO: 33219 - DNA, 1513 bp, Zea Mays
ggcacattgaaccaaaaaagaggtcctgccaaacaaaattgttgcatcaccctagctataagtttggcaaagagtggcgtggtggagcacatcttgcctgacagcccctttgcgtcccccagcaaggcctccactcaaaatgggagcatcatcagcaatgcggcttcatccctcttccccccgcctgcatccaccatggagctgcccccgtacagctcttgcttcttccaggcgcccaggttttctcctgggcatgaagccattgggctgtgaatacagaacaaggggagggggtctgctttcctctaatctggactatcggtgaccccgtcaagtggaggcaagagttaggaagctttgattaacaaatactaggtgtatgttcagagagagggacagcaacaacagcaaccaaaaaagagagagagagacagacaagtctaggttgttttagctctaggccctaagtatatgatgatagcagtcgtataaataacagtgttttagtaagtatctcctgccgggtatgaagactcaagaacaaaggtcagatctcgcgtatgctcgtttgtagcagtgtggatctgatacaggtaattgaaacctttagatggtggtagggctagtagtgagcagtagacgacaactagtcctggcagccagttgtagtgaggtgacatggctgcatacagacatccaaccaaaggaaacagagggtgtggtgtggaaagaaggggagagtggacaaaagccagacatggctggcgctgctgctgcataggcacaggcacaggcacagggaaaggtgatgagacgagaggggtggggtggtactctgctgggaccggcgcactcacgggtgcggagaatcagcttcgcctcacgagcgatgcagcagcggagacacagacacctctcgtctgcgtactgtttcgcccatgctcttgtcttgtacgcatgcagcagcgctccttgtcctttggctccatcgatgtattacctgctcttcttttcaactaggagtttagcggacaaagaaatgaaaaagtaattagcagtcatttatcttggtcaatggagtttatgttttggttggttcttactgctctcttgtttctaaactatactccctctattctttttttatttatcgtggtttagttaaaaataaactaccgggtaacaaatatttgaaaacggactaacttctagagttcgtacaaagttattttaagtttcactggaatgttaattactggtgaaaattggtaccgatctttgtgatagtaaagagtacaacttctaccaattcacctaagaaaatgaatttttttttgctctgttctgttctagttgggctaaaagttgctagattctttacgcttgtattagattttgtgcttaggatccaaatatagctaaaggttggctacataattgatatggaatatttgatcagaatacattgcacctattaaatgctacaatttatatatgcaataggcaaacgaaa

SEQ ID NO: 33220 - DNA, 1575 bp, Zea Mays
caaaattgttgcatcaccctagctataagtttggcaaagagtggcgtggtggagcacatcttgcctgacagcccctttgcgtcccccagcaaggcctccactcaaaatgggagcatcatcagcaatgcggcttcatccctcttccccccgcctgcatccaccatggagctgcccccgtacagctcttgcttcttccaggcgcccaggtagaaacccagccacttctcttcagtccttttttttttcaatacaagagcagagtcgtttggtagtaagaagctgtttgtctttcatcaggttttctcctgggcatgaagccattgggctgtgaatacagaacaaggggagggggtctgctttcctctaatctgtgaggactatcggtgaccccgtcaagtggaggcaagagttaggaagctttgattaacaaatactaggtgtatgttcagagagagggacagcaacaacagcaaccaaaaaagagagagagagacagacaagtctaggttgttttagctctaggccctaagtatatgatgatagcagtcgtataaataacagtgttttagtaagtatctcctgccgggtatgaagactcaagaacaaaggtcagatctcgcgtatgctcgtttgtagcagtgtggatctgatacaggtaattgaaacctttagatggtggtagggctagtagtgagcagtagacgacaactagtcctggcagccagttgtagtgaggtgacatggctgcatacagacatccaaccaaaggaaacagagggtgtggtgtggaaagaaggggagagtggacaaaagccagacatggctggcgctgctgctgcataggcacaggcacaggcacagggaaaggtgatgagacgagaggggtggggtggtactctgctgggaccggcgcactcacgggtgcggagaatcagcttcgcctcacgagcgatgcagcagcggagacacagacacctctcgtctgcgtactgtttcgcccatgctcttgtcttgtacgcatgcagcagcgctccttgtcctttggctccatcgatgtattacctgctcttcttttcaactaggagtttagcggacaaagaaatgaaaaagtaattagcagtcatttatcttggtcaatggagtttatgttttggttggttcttactgctctcttgtttctaaactatactccctctattctttttttatttatcgtggtttagttaaaaataaactaccgggtaacaaatatttgaaaacggactaacttctagagttcgtacaaagttattttaagtttcactggaatgttaattactggtgaaaattggtaccgatctttgtgatagtaaagagtacaacttctaccaattcacctaagaaaatgaatttttttttgctctgttctgttctagttgggctaaaagttgctagattctttacgcttgtattagattttgtgcttaggatccaaatatagctaaaggttggctacataattgatatggaatatttgatcagaatacattgcacctattaaatgctacaatttatatatgcaataggcaaacgaaa

SEQ ID NO: 33221 - DNA, 1544 bp, Zea Mays
caagtttggttttagacaaatttctgggctttagacctaatgtccctctataaacaactgcaaaagagaagtcattgccgcatctaatgtctattgttttaagcttggcgtggtggagcacatcttgcctgacagcccctttgcgtcccccagcaaggcctccactcaaaatgggagcatcatcagcaatgcggcttcatccctcttccccccgcctgcatccaccatggagctgcccccgtacagctcttgcttcttccaggcgcccaggttttctcctgggcatgaagccattgggctgtgaatacagaacaaggggagggggtctgctttcctctaatctggactatcggtgaccccgtcaagtggaggcaagagttaggaagctttgattaacaaatactaggtgtatgttcagagagagggacagcaacaacagcaaccaaaaaagagagagagagacagacaagtctaggttgttttagctctaggccctaagtatatgatgatagcagtcgtataaataacagtgttttagtaagtatctcctgccgggtatgaagactcaagaacaaaggtcagatctcgcgtatgctcgtttgtagcagtgtggatctgatacaggtaattgaaacctttagatggtggtagggctagtagtgagcagtagacgacaactagtcctggcagccagttgtagtgaggtgacatggctgcatacagacatccaaccaaaggaaacagagggtgtggtgtggaaagaaggggagagtggacaaaagccagacatggctggcgctgctgctgcataggcacaggcacaggcacagggaaaggtgatgagacgagaggggtggggtggtactctgctgggaccggcgcactcacgggtgcggagaatcagcttcgcctcacgagcgatgcagcagcggagacacagacacctctcgtctgcgtactgtttcgcccatgctcttgtcttgtacgcatgcagcagcgctccttgtcctttggctccatcgatgtattacctgctcttcttttcaactaggagtttagcggacaaagaaatgaaaaagtaattagcagtcatttatcttggtcaatggagtttatgttttggttggttcttactgctctcttgtttctaaactatactccctctattctttttttatttatcgtggtttagttaaaaataaactaccgggtaacaaatatttgaaaacggactaacttctagagttcgtacaaagttattttaagtttcactggaatgttaattactggtgaaaattggtaccgatctttgtgatagtaaagagtacaacttctaccaattcacctaagaaaatgaatttttttttgctctgttctgttctagttgggctaaaagttgctagattctttacgcttgtattagattttgtgcttaggatccaaatatagctaaaggttggctacataattgatatggaatatttgatcagaatacattgcacctattaaatgctacaatttatatatgcaataggcaaacgaaa

SEQ ID NO: 33222 - DNA, 1470 bp, Zea Mays
cgcatctaatgtctattgttttaagcttggcgtggtggagcacatcttgcctgacagcccctttgcgtcccccagcaaggcctccactcaaaatgggagcatcatcagcaatgcggcttcatccctcttccccccgcctgcatccaccatggagctgcccccgtacagctcttgcttcttccaggcgcccaggttttctcctgggcatgaagccattgggctgtgaatacagaacaaggggagggggtctgctttcctctaatctgtgaggactatcggtgaccccgtcaagtggaggcaagagttaggaagctttgattaacaaatactaggtgtatgttcagagagagggacagcaacaacagcaaccaaaaaagagagagagagacagacaagtctaggttgttttagctctaggccctaagtatatgatgatagcagtcgtataaataacagtgttttagtaagtatctcctgccgggtatgaagactcaagaacaaaggtcagatctcgcgtatgctcgtttgtagcagtgtggatctgatacaggtaattgaaacctttagatggtggtagggctagtagtgagcagtagacgacaactagtcctggcagccagttgtagtgaggtgacatggctgcatacagacatccaaccaaaggaaacagagggtgtggtgtggaaagaaggggagagtggacaaaagccagacatggctggcgctgctgctgcataggcacaggcacaggcacagggaaaggtgatgagacgagaggggtggggtggtactctgctgggaccggcgcactcacgggtgcggagaatcagcttcgcctcacgagcgatgcagcagcggagacacagacacctctcgtctgcgtactgtttcgcccatgctcttgtcttgtacgcatgcagcagcgctccttgtcctttggctccatcgatgtattacctgctcttcttttcaactaggagtttagcggacaaagaaatgaaaaagtaattagcagtcatttatcttggtcaatggagtttatgttttggttggttcttactgctctcttgtttctaaactatactccctctattctttttttatttatcgtggtttagttaaaaataaactaccgggtaacaaatatttgaaaacggactaacttctagagttcgtacaaagttattttaagtttcactggaatgttaattactggtgaaaattggtaccgatctttgtgatagtaaagagtacaacttctaccaattcacctaagaaaatgaatttttttttgctctgttctgttctagttgggctaaaagttgctagattctttacgcttgtattagattttgtgcttaggatccaaatatagctaaaggttggctacataattgatatggaatatttgatcagaatacattgcacctattaaatgctacaatttatatatgcaataggcaaacgaaa

SEQ ID NO: 33223 - DNA, 5924 bp, Zea Mays
ccgcaatccccgcccgccatggcaggggcgcgacacgggcggtgcgctgcggttcgcgcaccgaatcctctccagccgcctcgcccccgcggtcctccccgatgagcacgcgaggtacccgagcgcgaggcccacgacgacggcgacaaacacaccgccgttgaacgacatgacggcgagcatgaacaggtagccgaggccggagttgaccccgaacatcgcggccacggccaggcgcgccggccagcgggcgcgagaagcggcgtccgcgagtcggagccggcggggtggcgggatggaggagggggctggcttggcgcctcctcccgcgacgagcttcacgcggacccgcagggcctcgaggtactggtagaaagcggcggccactgatttcctcagttctgcaagatggagaaaaaaattatcttgcctcttcgctggtgaatctgcagattgggatctgtgagctaccactgattcatccagaggtctaaaattgtggtgagttcatctcctaatttgcgcaagctcctgccgcccaccgccagctcctccgcttccacttcctcgtcctcgtcttccttctggaagaagtccctgaccgccatctcgcacctgggccgccgccgcgtcgactgcgcgttcgcgctgcacgtgcactccgtcgacggcctccccgccgcgctcgatgggtccgcggtctccgtccacttccgccggatgtccgtgtccgcctccacccgccccgtcgcggccgccctcggcgccgccgcgttcgaggaggcgctcacgctgcggtccccggtctacttctcccgcggcgccaaggccgtcgtcaagtacgagccccgcgcctttgctgtctccgtcgccgcctccactctcgacctcgcctgagtgcagtgcagtgcatattaccaaaggagtgggagggaatctactttggggggctggggagggcggtcatgtacttggacttggactgccgatttgatgtgctacggctggctcaaattctgaggaatcgtattgcagagggctgccgtaagttccactcacatactcaattttgtattcttaacttgcagtgttgtatattgaagagcctgggttcaacctaaaccttttttatatgttctagaattttatcaatctgcactgcatatcttcatagagcccctttcacatttgacaggtttagcacaccttggaaatggagaccctgaaaatgatgtcactaaagatgagtttcagtgttctcttcaaaatacactgttttctgattgtatgcagcgcttcttgtatgctcgatgttgcaaaagtcctgaattcatagatgctttgaaggtaagttttctgtgtttgcggccatatctcaggaaatcactacctggttggcatgctcatatattcctcacttgcttgagatggtgtataaataaacagaaatttatagcaactggtctaccttaaattgcttactgctaacctatagaaccattggaatttgaaaagaactggctggattatttgtggttagtatttggaaagagtatataatttcttttttctatcggccacacatgaaaatttcactgtgtgcttggaaaaggatgatatttgctagcagccaactatgttgtatgttacacatttatcatcaaacacttctgaaatcattcgtgagtttttttcctttcgttagtcttgttaaaaaattggattttactagctccaaatatgataggtgttttgagccagctgttgcaaatacttgtctgagacccccttgtgttgcaaattcttcatctggatggtggtacataattggtgttggacggttgaccgcctagcaaaacggggtctgccccactcagaggtttgccccttctgtgaccaagccaaggagtcgattaattaccttctggttggctgtgttcttccttgccaagtctggacctcaatttttcagcacctggttataacacaattagcacctgatccttcagtgggtcgtttctggatgttggagaaaattaatcactgcagtgccaaaagaaatgtgtaagggcctcagctccttgatgatcttggtggcgtgggaggtctggaaacaccgaaatgatagtgtgtttgagaatttgagtccaagtactcaggctgtgcttaggtcagtaagcatggagcagcacatgggcggggaagtggcggggctgcggcgcgggtcgatggcgcggccagtgtcagtgcaagcgccgacgcctttgcccgcgcggagcagggacgtgagggttctccacgaggtgctgcctagcttgaggtctgccaggccggtgccttcttctgttgctgacggggttcctgatgcgaggaaggaggagctggcagcaccggactgcacggaagaggggtctccggaggcaaagcactgcacatcggtagaggttaaaaagggggactcggtgcatccagatggcgattggggcacggtggagttcaatgttgtggagcatggagttgaggttgcttcagatgacccgcaaaggctcaaacatgtggaaaccagcaatgcggctggccaggaggaggattcagggttcaaaattgacgaagagggatcgttcaggcctttgcaagtaagtggtgatgtcgctgaagatcagactgttggagtgaaaactgaggtggccgtcagtgacgttgctgttcaaagggagaatatggaagacaaacaggatggaatagtcaaagctgcttcactgcctaccgctgctcttgaagcagagggtcagtttggagcagatgcggaactggaggacctggaaagtattttgaacgagctctcagttgctgagccagaggaatttgaatcaccagttgtagaagataagcattctcggcgattgagctgcacaggtgtgactgatagttacaagtctgccagtaggaagggcagatcacgcagcatggatgcttcaacagattctgttgctaatgagttcctggatatgcttggaatagagcatagcccagttgggcaaccctcagatagtgattccgagtcgccaagagaacggctttggaagcagtttgaaaaggaagccctagcatctggcaatgctattcttggcttggactttgacgatggaattgaaggacctatttgtgataatgttgtggaggattttgatctctctgcaatgatacatgaggctgagctcgagcttcagaatggaagccaacccattgataccaaatttcgagctaagtcgctggaagacgaagaaactgaggccttaatgcgtcaatttggtctaaacgagaagtccttccaatcttctccacctgaaagtagaagtggatttggtagccccattagcctcccacctgagcagtccctggagctaccgccattggctgaaggtttaggcccatttattcagaccaaagatggaggatttctgcgatcaatgaacccagccctgttcaaaaatgcaaagaacaaatgcagcttggttatgcaggcttcttctccgattgtactgccagcggagatgggatctgggattatggatatattgcatggtctggcatcaattggaattgagaagttatcaatgcaggcaaacaagcttatgcccttggaagatgttaatggtaaaatgatgcagcagattgcccgggaggctgctccagctctggagtctgctgaaagatatgatgcattggactatcatagcatcggtgctttggtagaagggtgtggaaatgctccctctggtaagaagacaggtaggtgtgctgatctttcatccttgggtggggagaatgcttcggaatatgtttcacttgaggaccttgcaccattagctatggaaaagattgaagccctgtccattgagggtttgaggatacaatctggcatgtcagaagaagatgcaccctccaatatcagtgcaaagcctattggggaattttcatctctgcaaggaaagtgtgcagagaatacttggtcccttggtttagagggaactgcaggtttgcagcttctggatgttaagcaaagcggagaagttgatggattaatgggcttgtccatcactctagatgaatggatgaggcttgattctggggtagtggacgaagaagaacagtacagtgaccggacatcgaaatataagattcgatcagatatgtgtcgatgctcatccgagcgtactcccgttgcaacgcacgggcacacacctagtaaaaggattaagggggggcacacgaataagccaacgctaagcctcacccaaaccctaatcgacagtgaggctctcatcgcctaggcgtgcgcaagtgactcgaaaggctaacctataaaggcggttgtggatctcggcaccctagcgggcccaggatccgagccaccttctctgcaggtgaatggaggaggcggcgacaactgtgatggcgatcggacttctccaccaccaccgcgccaatatgaaatcccactccccttctgtaattgtgtttacagtgataacaagactagatctactctatgttcatgacaagttcctcgggttaatgaagttggacattgttaaagaccctataaaaccatcatcaaagtctattgtgccattcacatttcctcttgcctgaccttcttcctaagttccaagcttgaatagagtagttgttctggatgatgatttgattgtccagaaagacttgtcatctctctggaacctcgatatgggtggtaaagtgactggagcagtccagttctgtggagtgagattagggcagttgaaaccttatgtagcggaccagaatgccaatgctaattcttatgcagcgtccctccatttatccagtttgcatgatcaatcagtccaaaaggtcagtacaactccctgcaagtttacttgcctttgaagatgtggtatatcctttggaagattcatgggttcagtcaggcggccttggacatgattacggaattagccgtgtcgatatagaaaaagctgctgctctgcactacaatggtgtgatgaaatcttggcttgacttggggaaacatgattataaataagagctactggaggaagtacatgactaatggagagaagttcatgacggaatgaaatattcactaattcataggacatgaaactaaccaaacactcattttttgggcatgtgaacaacagaacaacagacttcacgggctatgtttatcatgaaaataaacagaatcgcacatgtgtatctatgatgccactgatacacctaggggtggtcttaattatttttagttcaaaaccgaataggaatagagattgattttaatctgatttaattcttaaaatttatagtataaaacctagatgtcattaccacctcgacgaggcagtgccccaatgctgccgtaagagtacgatgtctgaaggatgccagcacgaaacctgagttatgttgcagaataccaagatatgatgtggattatttcactgttcgttatggtttgatgatttttttttcattatgcaacttggagttgcaaaagtgcagttccttgctgttcgtttttagtatgaaatatttggtaatattctttttgctcatcagtcactatgcaatagcaatactgagggagtccaatgctgactgcggcggcacatcatgtacatgaaacaacaaatgatgcctgaatcagcaagtatgcccttgtaaccatttttttaaaaaaatattaggttatttttgctgtccgaatctcaaaggaatgagaattcagatagttgtgtctgacatactttggattttggtcctgcaaccaagcacagcaaatgaaaaaaaaagaaggaacggtcttctttgtcacctgcaaaatttggaatatattcaagcatacttcagcatgcaag

SEQ ID NO: 33224 - DNA, 5621 bp, Zea Mays
ccgcaatccccgcccgccatggcaggggcgcgacacgggcggtgcgctgcggttcgcgcaccgaatcctctccagccgcctcgcccccgcggtcctccccgatgagcacgcgaggtacccgagcgcgaggcccacgacgacggcgacaaacacaccgccgttgaacgacatgacggcgagcatgaacaggtagccgaggccggagttgaccccgaacatcgcggccacggccaggcgcgccggccagcgggcgcgagaagcggcgtccgcgagtcggagccggcggggtggcgggatggaggagggggctggcttggcgcctcctcccgcgacgagcttcacgcggacccgcagggcctcgaggtactggtagaaagcggcggccactgatttcctcagttctgcaagatggagaaaaaaattatcttgcctcttcgctggtgaatctgcagattgggatctgtgagctaccactgattcatccagaggtctaaaattgtggtgagttcatctcctaatttgcgcaagctcctgccgcccaccgccagctcctccgcttccacttcctcgtcctcgtcttccttctggaagaagtccctgaccgccatctcgcacctgggccgccgccgcgtcgactgcgcgttcgcgctgcacgtgcactccgtcgacggcctccccgccgcgctcgatgggtccgcggtctccgtccacttccgccggatgtccgtgtccgcctccacccgccccgtcgcggccgccctcggcgccgccgcgttcgaggaggcgctcacgctgcggtccccggtctacttctcccgcggcgccaaggccgtcgtcaagtacgagccccgcgcctttgctgtctccgtcgccgcctccactctcgacctcggtttagcacaccttggaaatggagaccctgaaaatgatgtcactaaagatgagtttcagtgttctcttcaaaatacactgttttctgattgtatgcagcgcttcttgtatgctcgatgttgcaaaagtcctgaattcatagatgctttgaaggtaagttttctgtgtttgcggccatatctcaggaaatcactacctggttggcatgctcatatattcctcacttgcttgagatggtgtataaataaacagaaatttatagcaactggtctaccttaaattgcttactgctaacctatagaaccattggaatttgaaaagaactggctggattatttgtggttagtatttggaaagagtatataatttcttttttctatcggccacacatgaaaatttcactgtgtgcttggaaaaggatgatatttgctagcagccaactatgttgtatgttacacatttatcatcaaacacttctgaaatcattcgtgagtttttttcctttcgttagtcttgttaaaaaattggattttactagctccaaatatgataggtgttttgagccagctgttgcaaatacttgtctgagacccccttgtgttgcaaattcttcatctggatggtggtacataattggtgttggacggttgaccgcctagcaaaacggggtctgccccactcagaggtttgccccttctgtgaccaagccaaggagtcgattaattaccttctggttggctgtgttcttccttgccaagtctggacctcaatttttcagcacctggttataacacaattagcacctgatccttcagtgggtcgtttctggatgttggagaaaattaatcactgcagtgccaaaagaaatgtgtaagggcctcagctccttgatgatcttggtggcgtgggaggtctggaaacaccgaaatgatagtgtgtttgagaatttgagtccaagtactcaggctgtgcttaggtcagtaagcatggagcagcacatgggcggggaagtggcggggctgcggcgcgggtcgatggcgcggccagtgtcagtgcaagcgccgacgcctttgcccgcgcggagcagggacgtgagggttctccacgaggtgctgcctagcttgaggtctgccaggccggtgccttcttctgttgctgacggggttcctgatgcgaggaaggaggagctggcagcaccggactgcacggaagaggggtctccggaggcaaagcactgcacatcggtagaggttaaaaagggggactcggtgcatccagatggcgattggggcacggtggagttcaatgttgtggagcatggagttgaggttgcttcagatgacccgcaaaggctcaaacatgtggaaaccagcaatgcggctggccaggaggaggattcagggttcaaaattgacgaagagggatcgttcaggcctttgcaagtaagtggtgatgtcgctgaagatcagactgttggagtgaaaactgaggtggccgtcagtgacgttgctgttcaaagggagaatatggaagacaaacaggatggaatagtcaaagctgcttcactgcctaccgctgctcttgaagcagagggtcagtttggagcagatgcggaactggaggacctggaaagtattttgaacgagctctcagttgctgagccagaggaatttgaatcaccagttgtagaagataagcattctcggcgattgagctgcacaggtgtgactgatagttacaagtctgccagtaggaagggcagatcacgcagcatggatgcttcaacagattctgttgctaatgagttcctggatatgcttggaatagagcatagcccagttgggcaaccctcagatagtgattccgagtcgccaagagaacggctttggaagcagtttgaaaaggaagccctagcatctggcaatgctattcttggcttggactttgacgatggaattgaaggacctatttgtgataatgttgtggaggattttgatctctctgcaatgatacatgaggctgagctcgagcttcagaatggaagccaacccattgataccaaatttcgagctaagtcgctggaagacgaagaaactgaggccttaatgcgtcaatttggtctaaacgagaagtccttccaatcttctccacctgaaagtagaagtggatttggtagccccattagcctcccacctgagcagtccctggagctaccgccattggctgaaggtttaggcccatttattcagaccaaagatggaggatttctgcgatcaatgaacccagccctgttcaaaaatgcaaagaacaaatgcagcttggttatgcaggcttcttctccgattgtactgccagcggagatgggatctgggattatggatatattgcatggtctggcatcaattggaattgagaagttatcaatgcaggcaaacaagcttatgcccttggaagatgttaatggtaaaatgatgcagcagattgcccgggaggctgctccagctctggagtctgctgaaagatatgatgcattggactatcatagcatcggtgctttggtagaagggtgtggaaatgctccctctggtaagaagacaggtaggtgtgctgatctttcatccttgggtggggagaatgcttcggaatatgtttcacttgaggaccttgcaccattagctatggaaaagattgaagccctgtccattgagggtttgaggatacaatctggcatgtcagaagaagatgcaccctccaatatcagtgcaaagcctattggggaattttcatctctgcaaggaaagtgtgcagagaatacttggtcccttggtttagagggaactgcaggtttgcagcttctggatgttaagcaaagcggagaagttgatggattaatgggcttgtccatcactctagatgaatggatgaggcttgattctggggtagtggacgaagaagaacagtacagtgaccggacatcgaaatataagattcgatcagatatgtgtcgatgctcatccgagcgtactcccgttgcaacgcacgggcacacacctagtaaaaggattaagggggggcacacgaataagccaacgctaagcctcacccaaaccctaatcgacagtgaggctctcatcgcctaggcgtgcgcaagtgactcgaaaggctaacctataaaggcggttgtggatctcggcaccctagcgggcccaggatccgagccaccttctctgcaggtgaatggaggaggcggcgacaactgtgatggcgatcggacttctccaccaccaccgcgccaatatgaaatcccactccccttctgtaattgtgtttacagtgataacaagactagatctactctatgttcatgacaagttcctcgggttaatgaagttggacattgttaaagaccctataaaaccatcatcaaagtctattgtgccattcacatttcctcttgcctgaccttcttcctaagttccaagcttgaatagagtagttgttctggatgatgatttgattgtccagaaagacttgtcatctctctggaacctcgatatgggtggtaaagtgactggagcagtccagttctgtggagtgagattagggcagttgaaaccttatgtagcggaccagaatgccaatgctaattcttatgcagcgtccctccatttatccagtttgcatgatcaatcagtccaaaaggtcagtacaactccctgcaagtttacttgcctttgaagatgtggtatatcctttggaagattcatgggttcagtcaggcggccttggacatgattacggaattagccgtgtcgatatagaaaaagctgctgctctgcactacaatggtgtgatgaaatcttggcttgacttggggaaacatgattataaataagagctactggaggaagtacatgactaatggagagaagttcatgacggaatgaaatattcactaattcataggacatgaaactaaccaaacactcattttttgggcatgtgaacaacagaacaacagacttcacgggctatgtttatcatgaaaataaacagaatcgcacatgtgtatctatgatgccactgatacacctaggggtggtcttaattatttttagttcaaaaccgaataggaatagagattgattttaatctgatttaattcttaaaatttatagtataaaacctagatgtcattaccacctcgacgaggcagtgccccaatgctgccgtaagagtacgatgtctgaaggatgccagcacgaaacctgagttatgttgcagaataccaagatatgatgtggattatttcactgttcgttatggtttgatgatttttttttcattatgcaacttggagttgcaaaagtgcagttccttgctgttcgtttttagtatgaaatatttggtaatattctttttgctcatcagtcactatgcaatagcaatactgagggagtccaatgctgactgcggcggcacatcatgtacatgaaacaacaaatgatgcctgaatcagcaagtatgcccttgtaaccatttttttaaaaaaatattaggttatttttgctgtccgaatctcaaaggaatgagaattcagatagttgtgtctgacatactttggattttggtcctgcaaccaagcacagcaaatgaaaaaaaaagaaggaacggtcttctttgtcacctgcaaaatttggaatatattcaagcatacttcagcatgcaag

SEQ ID NO: 33225 - DNA, 2009 bp, Zea Mays
ccataatcgtgaccactaactgccgtaaggggaaaaataacgaaggaagcgaagcggcaacttccgccttctcttcgccagttactccacttccaatcgccgtctcataaatccgggctgccacttccgcctccatcgccgccagccgccgccttctcttcgccagttactccacttgcccgcaggccgcaccgcaccgccaccgctttcatcggacgatccactgagcaagccacgccaggcaggggctcgtacagggcgagagaaacccgcgcgctcgcccctgtcctgccgcgggatcgcagttgccgtccgcttcatccccggacccggaggtaggcaccaggcaggcggcggcaatgctaccgggctcgccggtgaagcgcctgctgcggcgggcggccaaggggcggcgggagaaggccgagctggcggggctggccgcggcggccgccgcgctgctgctgctctgcgccgcctcgctccgctgctcggccaccgcgcgcgggaggctctgggccggtggggtctccatcgcggcggcggggagtggcggcgaggaggagtgcgacctgttcgacggggactgggtctgggctggcggcggcggcgggtacccgctctacgactcccgggactgcccgttcctcgacgtcggcttccgatgcgccgagaacggccgccccgaggcgtcctacaccaagtggcgctggcagccgtcgcgctgccatcttcccagatttgatgccaaaagcatgctggagaagctacgaaacaaaagagtggtttttgttggtgattcaattggaaggaaccaatgggagtctctactttgtatgctctctagcgctgttcataacaagagctctatctacgaagttaatgggagtcccatcacaaagcacatgggtttcttgattttcaattttagagactacaattgcacggtggaatactacagatccccttttatagtccttcaaggccgtgcaccagcaggagcacctgagattgtccggtacagtattcgagtggatgcaatggattggatgtccgaccggggtaaatggaaggatgctgatgtactgatcttcaacactgggcactggtggaacaatgagaaaacaatcagggggggtgcctactttcaagtaggcgatgaggtcaaaatgggcatgagtgttgctgaggcttacagaagatcgatagagacattgtccgattggcttcgcaaagaagtcaacacgagcaagacccatgtcatctaccgcacatatgctcctgtgcatttcagagatggtgactggaagactggtgggagctgccacttggaaactcttccagacgcgatgccagtgaagtccctggacgaatgggccgacttgctccaacccgtggacgaatttctagggagcgatcttggatccgagctggctggtgtagacctgcttcgcgtgacgggaatgacggcccagagaaaagacggccacctctcggtctacctgagcccctcaggacccgtgccccgctacagacaggactgcagccactggtgtcttcctggagtccccgatgcctggaacgagcttctctacgccctcgtcatgaggaggcataagaagatggccggcactaggacaccggacgctgaagagggagatgtcttcagcagtggatcatcatcgtgacaaaacgagcttcgtagccatccatccatcctggctaggcgatgacagctgctgtttcacataggatgccggaatggcgagacacgtttttggaccatgggtgctgtttgcaagaagctgagctagacgtcagtggtagtatagctttgtgtgtggtgatggcaacttgtatggctaatggggaggtatttggaattggcagtgtaactagctagggtcgctacagcgaatgatgtacatatgtattcttttagcactcgttcgatgattcatattccatgtaggttttgatgggattaaaaagaaaattataaatttttt

SEQ ID NO: 33226 - DNA, 1928 bp, Zea Mays
aaggggaaaaataacgaaggaagcgaagcggcaacttccgccttctcttcgccagttactccacttccaatcgccgtctcataaatccgggctgccacttccgcctccatcgccgccagccgccgccttctcttcgccagttactccacttgcccgcaggccgcaccgcaccgccaccgctttcatcggacgatccactgagcaagccacgccaggcaggggctcgtacagggcgagagaaacccgcgcgctcgcccctgtcctgccgcgggatcgcagttgccgtccgcttcatccccggacccggaggtaggcaccaggcaggcggcggcaatgctaccgggctcgccggtgaagcgcctgctgcggcgggcggccaaggggcggcgggagaaggccgagctggcggggctggccgcggcggccgccgcgctgctgctgctctgcgccgcctcgctccgctgctcggccaccgcgcgcgggaggctctgggccggtggggtctccatcgcggcggcggggagtggcggcgaggaggagtgcgacctgttcgacggggactgggtctgggctggcggcggcggcgggtacccgctctacgactcccgggactgcccgttcctcgacgtcggcttccgatgcgccgagaacggccgccccgaggcgtcctacaccaagtggcgctggcagccgtcgcgctgccatcttcccagactttcaacgtccgtgcagtgtttgttcaatcttgaaccagtatttgatgccaaaagcatgctggagaagctacgaaacaaaagagtggtttttgttggtgattcaattggaaggaaccaatgggagtctctactttagactacaattgcacggtggaatactacagatccccttttatagtccttcaaggccgtgcaccagcaggagcacctgagattgtccggtacagtattcgagtggatgcaatggattggatgtccgaccggggtaaatggaaggatgctgatgtactgatcttcaacactgggcactggtggaacaatgagaaaacaatcagggggggtgcctactttcaagtaggcgatgaggtcaaaatgggcatgagtgttgctgaggcttacagaagatcgatagagacattgtccgattggcttcgcaaagaagtcaacacgagcaagacccatgtcatctaccgcacatatgctcctgtgcatttcagagatggtgactggaagactggtgggagctgccacttggaaactcttccagacgcgatgccagtgaagtccctggacgaatgggccgacttgctccaacccgtggacgaatttctagggagcgatcttggatccgagctggctggtgtagacctgcttcgcgtgacgggaatgacggcccagagaaaagacggccacctctcggtctacctgagcccctcaggacccgtgccccgctacagacaggactgcagccactggtgtcttcctggagtccccgatgcctggaacgagcttctctacgccctcgtcatgaggaggcataagaagatggccggcactaggacaccggacgctgaagagggagatgtcttcagcagtggatcatcatcgtgacaaaacgagcttcgtagccatccatccatcctggctaggcgatgacagctgctgtttcacataggatgccggaatggcgagacacgtttttggaccatgggtgctgtttgcaagaagctgagctagacgtcagtggtagtatagctttgtgtgtggtgatggcaacttgtatggctaatggggaggtatttggaattggcagtgtaactagctagggtcgctacagcgaatgatgtacatatgtattcttttagcactcgttcgatgattcatattccatgtaggttttgatgggattaaaaagaaaattataaatttttt

SEQ ID NO: 33227 - DNA, 1274 bp, Zea Mays
ccagttttgatgccaaaagcatgctggagaagctacgaaacaaaagagtggtttttgttggtgattcaattggaaggaaccaatgggagtctctactttgtatgctctctagcgctgttcataacaagagctctatctacgaagttaatgggagtcccatcacaaagcacatgggtttcttgattttcaattttagagactacaattgcacggtggaatactacagatccccttttatagtccttcaaggccgtgcaccagcaggagcacctgagattgtccggtacagtattcgagtggatgcaatggattggatgtccgaccggggtaaatggaaggatgctgatgtactgatcttcaacactgggcactggtggaacaatgagaaaacaatcagggggggtgcctactttcaagtaggcgatgaggtcaaaatgggcatgagtgttgctgaggcttacagaagatcgatagagacattgtccgattggcttcgcaaagaagtcaacacgagcaagacccatgtcatctaccgcacatatgctcctgtgcatttcagagatggtgactggaagactggtgggagctgccacttggaaactcttccagacgcgatgccagtgaagtccctggacgaatgggccgacttgctccaacccgtggacgaatttctagggagcgatcttggatccgagctggctggtgtagacctgcttcgcgtgacgggaatgacggcccagagaaaagacggccacctctcggtctacctgagcccctcaggacccgtgccccgctacagacaggactgcagccactggtgtcttcctggagtccccgatgcctggaacgagcttctctacgccctcgtcatgaggaggcataagaagatggccggcactaggacaccggacgctgaagagggagatgtcttcagcagtggatcatcatcgtgacaaaacgagcttcgtagccatccatccatcctggctaggcgatgacagctgctgtttcacataggatgccggaatggcgagacacgtttttggaccatgggtgctgtttgcaagaagctgagctagacgtcagtggtagtatagctttgtgtgtggtgatggcaacttgtatggctaatggggaggtatttggaattggcagtgtaactagctagggtcgctacagcgaatgatgtacatatgtattcttttagcactcgttcgatgattcatattccatgtaggttttgatgggattaaaaagaaaattataaatttttt

SEQ ID NO: 33228 - DNA, 2640 bp, Zea Mays
gtcctccctttcccatcatcggattccaccgacgcacgcgcgcgccaccgcggctccccggcgctgcgcaatggacgccgtcgcgttcccgccgccgcccgcgccgttcctcgacgacgacctcgatttcggggacttcaccttcgcctccgcgccgcagccgcagccgcagccgcccaccgccgccttcgacgacgactggggcgactttgtggcaagcgggctcggatccgacgcgggcgcatctgccccgacggacgcgccagccgccgctccctcctcctcgccttgggagaagccgcggggcccgctgcccctctccctgttcggcgccgatgccgacgacgacggccaggaggaggaggaagggccggccgggccgccgccgatggacacggcgccccagtgcgctccgtccgtcccgtccaacgggtcgcgccccgcggatctgaaggacctcatcgctggcctctacggatatcagccgccccacaccgccgacgcggtcccgcaggtgaaggcggaggaggatgaccaagggtttggagacgatgattgggaattcacggcggcgacggggcaacctgctgctgatcaggatggaggcggaccagggcatgcggatggatttggtaagatcgaggatatatcgaagtcattgagcaccgaccaggaagactggtcatcgtttaccagtgccgatggcaaattgaaccatgttcgtctaacaaccgatggtcttgggaatcatgagtccactggagaatttgtgagggcctccacttattcaccagctaatagttcggccatactcaacctgtacaaaggaagcaaacgggttgatgatgttgtcattgcccaaggctctgcagaaagtgtccagagttcatctgatctgttttctaataatgaaatgaactcttcacttgaaacagatgacaaccattccagtagatcaacaagtgattgcattttgattgaattctaccaaagactgagagaagagtccttgacagcaatatcccggcacgtgaaggatcttaggaagggatctacaatctctgatgaaaacaacaaagcgactgcaatgggaggggatattcaggaaatatatgacaaactaaaagattcttcattgcccgaaggctttttcacagaggaacagccttggaaggatatatatatcacagaactccttaattgtatcaaagaggaacatctgaaggattttgaacaagagtattgtttagcagaaaagatagaaggggcaacggaggacacagatattgcagttgaactttataagctcagtatttccaccctagatctattgaaactagcatccaaagaggaacagggtgattatgtcggtgcatggtacagtatgcttctgtcctgtgctcaagaattgaagcatggcgtggcactttggcaagagttttatcatgcaaatgtctgcgacagagtagtttctgaaggcggtcactactttattgctcttggggagatatatagagttgcacagattttatacttatccttgcagcgtttcaagccctgggttcttgcagatcctggaatgttgagtaaaatgttgtcttgtttggacagctgcacttatgcttggactagtggtctggaaacggctcttaagatggtcattgacagcagtcacatagattcatcccttgctaaagctctgatggagtccattaagaatattacaaaacttgaggtgcccaatctacaaaaaaatattcccaacaatgagatgcaatgtagactaactctcttgccaagtagtcttctgccaggattgaacttggtcatttggaatggtggtcactattttgttaaagtcgcaaatctgtgggcaaatcggatatctcctgatcctcctcttctgccaagcaaccccacctcttcaatgaacaatgcagcaacacacagccagtcatgctgaataacatgtcaaacatctgaggctgtgacctacactctgatggaagcatcaaatgcatgttgtgtaaaacatattcgtcaagttatcttttttatatacgtaaactgagcaagcaccgtgctgattgagggctgttcttggaagatagagatccaaggtgactgttcctttgcaggtcattcttttgtacaagttgtaatttacaacattctttccatagtgccggatgatgtcactaagtatagcaagtcgaaagggaatgacaagtttggaagtggacgtctggtataatgtgtagattatcaaagctgagaattggaatacggatcgtggaaactgtcactcttttgctaggttaatattatgggctttgctgtgttttgctagatcagttggtattcctcagctacgcattgtgatttgggactgtgtctcgataagttgctcagcccagcgttgactatttattgacttgaaacgaagatagatcttactccgttctttccacgctgatggacaatggcactagtatagcaagtcaaaaaagaatgttcagtttggaactgaacgtattgcataacgttgtaccaatttttttttaacatgatgcatttttatagattatcaacgcggaaaactagaaatacaaaacgtggaaatgaagcataggatgccag

SEQ ID NO: 33229 - DNA, 2622 bp, Zea Mays
gtcctccctttcccatcatcggattccaccgacgcacgcgcgcgccaccgcggctccccggcgctgcgcaatggacgccgtcgcgttcccgccgccgcccgcgccgttcctcgacgacgacctcgatttcggggacttcaccttcgcctccgcgccgcagccgcagccgcagccgcccaccgccgccttcgacgacgactggggcgactttgtggcaagcgggctcggatccgacgcgggcgcatctgccccgacggacgcgccagccgccgctccctcctcctcgccttgggagaagccgcggggcccgctgcccctctccctgttcggcgccgatgccgacgacgacggccaggaggaggaggaagggccggccgggccgccgccgatggacacggcgccccagtgcgctccgtccgtcccgtccaacgggtcgcgccccgcggatctgaaggacctcatcgctggcctctacggatatcagccgccccacaccgccgacgcggtcccgcaggtgaaggcggaggaggatgaccaagggtttggagacgatgattgggaattcacggcggcgacggggcaacctgctgctgatcaggatggaggcggaccagggcatgcggatggatttggtaagatcgaggatatatcgaagtcattgagcaccgaccaggaagactggtcatcgtttaccagtgccgatggcaaattgaaccatgttcgtctaacaaccgatggtcttgggaatcatgagtccactggagaatttgtgagggcctccacttattcaccagctaatagttcggccatactcaacctgtacaaaggaagcaaacgggttgatgatgttgtcattgcccaaggctctgcagaaagtgtccagagttcatctgatctgttttctaataatgaaatgatgacaaccattccagtagatcaacaagtgattgcattttgattgaattctaccaaagactgagagaagagtccttgacagcaatatcccggcacgtgaaggatcttagggaagggatctacaatctctgatgaaaacaacaaagcgactgcaatgggaggggatattcaggaaatatatgacaaactaaaagattcttcattgcccgaaggctttttcacagaggaacagccttggaaggatatatatatcacagaactccttaattgtatcaaagaggaacatctgaaggattttgaacaagagtattgtttagcagaaaagatagaaggggcaacggaggacacagatattgcagttgaactttataagctcagtatttccaccctagatctattgaaactagcatccaaagaggaacagggtgattatgtcggtgcatggtacagtatgcttctgtcctgtgctcaagaattgaagcatggcgtggcactttggcaagagttttatcatgcaaatgtctgcgacagagtagtttctgaaggcggtcactactttattgctcttggggagatatatagagttgcacagattttatacttatccttgcagcgtttcaagccctgggttcttgcagatcctggaatgttgagtaaaatgttgtcttgtttggacagctgcacttatgcttggactagtggtctggaaacggctcttaagatggtcattgacagcagtcacatagattcatcccttgctaaagctctgatggagtccattaagaatattacaaaacttgaggtgcccaatctacaaaaaaatattcccaacaatgagatgcaatgtagactaactctcttgccaagtagtcttctgccaggattgaacttggtcatttggaatggtggtcactattttgttaaagtcgcaaatctgtgggcaaatcggatatctcctgatcctcctcttctgccaagcaaccccacctcttcaatgaacaatgcagcaacacacagccagtcatgctgaataacatgtcaaacatctgaggctgtgacctacactctgatggaagcatcaaatgcatgttgtgtaaaacatattcgtcaagttatcttttttatatacgtaaactgagcaagcaccgtgctgattgagggctgttcttggaagatagagatccaaggtgactgttcctttgcaggtcattcttttgtacaagttgtaatttacaacattctttccatagtgccggatgatgtcactaagtatagcaagtcgaaagggaatgacaagtttggaagtggacgtctggtataatgtgtagattatcaaagctgagaattggaatacggatcgtggaaactgtcactcttttgctaggttaatattatgggctttgctgtgttttgctagatcagttggtattcctcagctacgcattgtgatttgggactgtgtctcgataagttgctcagcccagcgttgactatttattgacttgaaacgaagatagatcttactccgttctttccacgctgatggacaatggcactagtatagcaagtcaaaaaagaatgttcagtttggaactgaacgtattgcataacgttgtaccaatttttttttaacatgatgcatttttatagattatcaacgcggaaaactagaaatacaaaacgtggaaatgaagcataggatgccag

SEQ ID NO: 33230 - DNA, 2610 bp, Zea Mays
gtcctccctttcccatcatcggattccaccgacgcacgcgcgcgccaccgcggctccccggcgctgcgcaatggacgccgtcgcgttcccgccgccgcccgcgccgttcctcgacgacgacctcgatttcggggacttcaccttcgcctccgcgccgcagccgcagccgcagccgcccaccgccgccttcgacgacgactggggcgactttgtggcaagcgggctcggatccgacgcgggcgcatctgccccgacggacgcgccagccgccgctccctcctcctcgccttgggagaagccgcggggcccgctgcccctctccctgttcggcgccgatgccgacgacgacggccaggaggaggaggaagggccggccgggccgccgccgatggacacggcgccccagtgcgctccgtccgtcccgtccaacgggtcgcgccccgcggatctgaaggacctcatcgctggcctctacggatatcagccgccccacaccgccgacgcggtcccgcaggtgaaggcggaggaggatgaccaagggtttggagacgatgattgggaattcacggcggcgacggggcaacctgctgctgatcaggatggaggcggaccagggcatgcggatggatttggatatatcgaagtcattgagcaccgaccaggaagactggtcatcgtttaccagtgccgatggcaaattgaaccatgttcgtctaacaaccgatggtcttgggaatcatgagtccactggagaatttgtgagggcctccacttattcaccagctaatagttcggccatactcaacctgtacaaaggaagcaaacgggttgatgatgttgtcattgcccaaggctctgcagaaagtgtccagagttcatctgatctgttttctaataatgaaatgatgacaaccattccagtagatcaacaagtgattgcattttgattgaattctaccaaagactgagagaagagtccttgacagcaatatcccggcacgtgaaggatcttaggaagggatctacaatctctgatgaaaacaacaaagcgactgcaatgggaggggatattcaggaaatatatgacaaactaaaagattcttcattgcccgaaggctttttcacagaggaacagccttggaaggatatatatatcacagaactccttaattgtatcaaagaggaacatctgaaggattttgaacaagagtattgtttagcagaaaagatagaaggggcaacggaggacacagatattgcagttgaactttataagctcagtatttccaccctagatctattgaaactagcatccaaagaggaacagggtgattatgtcggtgcatggtacagtatgcttctgtcctgtgctcaagaattgaagcatggcgtggcactttggcaagagttttatcatgcaaatgtctgcgacagagtagtttctgaaggcggtcactactttattgctcttggggagatatatagagttgcacagattttatacttatccttgcagcgtttcaagccctgggttcttgcagatcctggaatgttgagtaaaatgttgtcttgtttggacagctgcacttatgcttggactagtggtctggaaacggctcttaagatggtcattgacagcagtcacatagattcatcccttgctaaagctctgatggagtccattaagaatattacaaaacttgaggtgcccaatctacaaaaaaatattcccaacaatgagatgcaatgtagactaactctcttgccaagtagtcttctgccaggattgaacttggtcatttggaatggtggtcactattttgttaaagtcgcaaatctgtgggcaaatcggatatctcctgatcctcctcttctgccaagcaaccccacctcttcaatgaacaatgcagcaacacacagccagtcatgctgaataacatgtcaaacatctgaggctgtgacctacactctgatggaagcatcaaatgcatgttgtgtaaaacatattcgtcaagttatcttttttatatacgtaaactgagcaagcaccgtgctgattgagggctgttcttggaagatagagatccaaggtgactgttcctttgcaggtcattcttttgtacaagttgtaatttacaacattctttccatagtgccggatgatgtcactaagtatagcaagtcgaaagggaatgacaagtttggaagtggacgtctggtataatgtgtagattatcaaagctgagaattggaatacggatcgtggaaactgtcactcttttgctaggttaatattatgggctttgctgtgttttgctagatcagttggtattcctcagctacgcattgtgatttgggactgtgtctcgataagttgctcagcccagcgttgactatttattgacttgaaacgaagatagatcttactccgttctttccacgctgatggacaatggcactagtatagcaagtcaaaaaagaatgttcagtttggaactgaacgtattgcataacgttgtaccaatttttttttaacatgatgcatttttatagattatcaacgcggaaaactagaaatacaaaacgtggaaatgaagcataggatgccag

SEQ ID NO: 33231 - DNA, 2638 bp, Zea Mays
gtcctccctttcccatcatcggattccaccgacgcacgcgcgcgccaccgcggctccccggcgctgcgcaatggacgccgtcgcgttcccgccgccgcccgcgccgttcctcgacgacgacctcgatttcggggacttcaccttcgcctccgcgccgcagccgcagccgcagccgcccaccgccgccttcgacgacgactggggcgactttgtggcaagcgggctcggatccgacgcgggcgcatctgccccgacggacgcgccagccgccgctccctcctcctcgccttgggagaagccgcggggcccgctgcccctctccctgttcggcgccgatgccgacgacgacggccaggaggaggaggaagggccggccgggccgccgccgatggacacggcgccccagtgcgctccgtccgtcccgtccaacgggtcgcgccccgcggatctgaaggacctcatcgctggcctctacggatatcagccgccccacaccgccgacgcggtcccgcaggtgaaggcggaggaggatgaccaagggtttggagacgatgattgggaattcacggcggcgacggggcaacctgctgctgatcaggatggaggcggaccagggcatgcggatggatttggatatatcgaagtcattgagcaccgaccaggaagactggtcatcgtttaccagtgccgatggcaaattgaaccatgttcgtctaacaaccgatggtcttgggaatcatgagtccactggagaatttgtgagggcctccacttattcaccagctaatagttcggccatactcaacctgtacaaaggaagcaaacgggttgatgatgttgtcattgcccaaggctctgcagaaagtgtccagagttcatctgatctgttttctaataatgaaatgaactcttcacttgaaacagatgacaaccattccagtagatcaacaagtgattgcattttgattgaattctaccaaagactgagagaagagtccttgacagcaatatcccggcacgtgaaggatcttaggggagcacagaagggatctacaatctctgatgaaaacaacaaagcgactgcaatgggaggggatattcaggaaatatatgacaaactaaaagattcttcattgcccgaaggctttttcacagaggaacagccttggaaggatatatatatcacagaactccttaattgtatcaaagaggaacatctgaaggattttgaacaagagtattgtttagcagaaaagatagaaggggcaacggaggacacagatattgcagttgaactttataagctcagtatttccaccctagatctattgaaactagcatccaaagaggaacagggtgattatgtcggtgcatggtacagtatgcttctgtcctgtgctcaagaattgaagcatggcgtggcactttggcaagagttttatcatgcaaatgtctgcgacagagtagtttctgaaggcggtcactactttattgctcttggggagatatatagagttgcacagattttatacttatccttgcagcgtttcaagccctgggttcttgcagatcctggaatgttgagtaaaatgttgtcttgtttggacagctgcacttatgcttggactagtggtctggaaacggctcttaagatggtcattgacagcagtcacatagattcatcccttgctaaagctctgatggagtccattaagaatattacaaaacttgaggtgcccaatctacaaaaaaatattcccaacaatgagatgcaatgtagactaactctcttgccaagtagtcttctgccaggattgaacttggtcatttggaatggtggtcactattttgttaaagtcgcaaatctgtgggcaaatcggatatctcctgatcctcctcttctgccaagcaaccccacctcttcaatgaacaatgcagcaacacacagccagtcatgctgaataacatgtcaaacatctgaggctgtgacctacactctgatggaagcatcaaatgcatgttgtgtaaaacatattcgtcaagttatcttttttatatacgtaaactgagcaagcaccgtgctgattgagggctgttcttggaagatagagatccaaggtgactgttcctttgcaggtcattcttttgtacaagttgtaatttacaacattctttccatagtgccggatgatgtcactaagtatagcaagtcgaaagggaatgacaagtttggaagtggacgtctggtataatgtgtagattatcaaagctgagaattggaatacggatcgtggaaactgtcactcttttgctaggttaatattatgggctttgctgtgttttgctagatcagttggtattcctcagctacgcattgtgatttgggactgtgtctcgataagttgctcagcccagcgttgactatttattgacttgaaacgaagatagatcttactccgttctttccacgctgatggacaatggcactagtatagcaagtcaaaaaagaatgttcagtttggaactgaacgtattgcataacgttgtaccaatttttttttaacatgatgcatttttatagattatcaacgcggaaaactagaaatacaaaacgtggaaatgaagcataggatgccag

SEQ ID NO: 33232 - DNA, 2649 bp, Zea Mays
gtcctccctttcccatcatcggattccaccgacgcacgcgcgcgccaccgcggctccccggcgctgcgcaatggacgccgtcgcgttcccgccgccgcccgcgccgttcctcgacgacgacctcgatttcggggacttcaccttcgcctccgcgccgcagccgcagccgcagccgcccaccgccgccttcgacgacgactggggcgactttgtggcaagcgggctcggatccgacgcgggcgcatctgccccgacggacgcgccagccgccgctccctcctcctcgccttgggagaagccgcggggcccgctgcccctctccctgttcggcgccgatgccgacgacgacggccaggaggaggaggaagggccggccgggccgccgccgatggacacggcgccccagtgcgctccgtccgtcccgtccaacgggtcgcgccccgcggatctgaaggacctcatcgctggcctctacggatatcagccgccccacaccgccgacgcggtcccgcaggtgaaggcggaggaggatgaccaagggtttggagacgatgattgggaattcacggcggcgacggggcaacctgctgctgatcaggatggaggcggaccagggcatgcggatggatttggtaagatcgaggatatatcgaagtcattgagcaccgaccaggaagactggtcatcgtttaccagtgccgatggcaaattgaaccatgttcgtctaacaaccgatggtcttgggaatcatgagtccactggagaatttgtgagggcctccacttattcaccagctaatagttcggccatactcaacctgtacaaaggaagcaaacgggttgatgatgttgtcattgcccaaggctctgcagaaagtgtccagagttcatctgatctgttttctaataatgaaatgaactcttcacttgaaacagatgacaaccattccagtagatcaacaagtgattgcattttgattgaattctaccaaagactgagagaagagtccttgacagcaatatcccggcacgtgaaggatcttaggggagcacagaagggatctacaatctctgatgaaaacaacaaagcgactgcaatgggaggggatattcaggaaatatatgacaaactaaaagattcttcattgcccgaaggctttttcacagaggaacagccttggaaggatatatatatcacagaactccttaattgtatcaaagaggaacatctgaaggattttgaacaagagtattgtttagcagaaaagatagaaggggcaacggaggacacagatattgcagttgaactttataagctcagtatttccaccctagatctattgaaactagcatccaaagaggaacagggtgattatgtcggtgcatggtacagtatgcttctgtcctgtgctcaagaattgaagcatggcgtggcactttggcaagagttttatcatgcaaatgtctgcgacagagtagtttctgaaggcggtcactactttattgctcttggggagatatatagagttgcacagattttatacttatccttgcagcgtttcaagccctgggttcttgcagatcctggaatgttgagtaaaatgttgtcttgtttggacagctgcacttatgcttggactagtggtctggaaacggctcttaagatggtcattgacagcagtcacatagattcatcccttgctaaagctctgatggagtccattaagaatattacaaaacttgaggtgcccaatctacaaaaaaatattcccaacaatgagatgcaatgtagactaactctcttgccaagtagtcttctgccaggattgaacttggtcatttggaatggtggtcactattttgttaaagtcgcaaatctgtgggcaaatcggatatctcctgatcctcctcttctgccaagcaaccccacctcttcaatgaacaatgcagcaacacacagccagtcatgctgaataacatgtcaaacatctgaggctgtgacctacactctgatggaagcatcaaatgcatgttgtgtaaaacatattcgtcaagttatcttttttatatacgtaaactgagcaagcaccgtgctgattgagggctgttcttggaagatagagatccaaggtgactgttcctttgcaggtcattcttttgtacaagttgtaatttacaacattctttccatagtgccggatgatgtcactaagtatagcaagtcgaaagggaatgacaagtttggaagtggacgtctggtataatgtgtagattatcaaagctgagaattggaatacggatcgtggaaactgtcactcttttgctaggttaatattatgggctttgctgtgttttgctagatcagttggtattcctcagctacgcattgtgatttgggactgtgtctcgataagttgctcagcccagcgttgactatttattgacttgaaacgaagatagatcttactccgttctttccacgctgatggacaatggcactagtatagcaagtcaaaaaagaatgttcagtttggaactgaacgtattgcataacgttgtaccaatttttttttaacatgatgcatttttatagattatcaacgcggaaaactagaaatacaaaacgtggaaatgaagcataggatgccag

SEQ ID NO: 33233 - DNA, 1480 bp, Zea Mays
ctatgtcacgcaacggaggacacagatattgcagttgaactttataagctcagtatttccaccctagatctattgaaactagcatccaaagaggaacagggtgattatgtcggtgcatggtacagtatgcttctgtcctgtgctcaagaattgaagcatggcgtggcactttggcaagagttttatcatgcaaatgtctgcgacagagtagtttctgaaggcggtcactactttattgctcttggggagatatatagagttgcacagattttatacttatccttgcagcgtttcaagccctgggttcttgcagatcctggaatgttgagtaaaatgttgtcttgtttggacagctgcacttatgcttggactagtggtctggaaacggctcttaagatggtcattgacagcagtcacatagattcatcccttgctaaagctctgatggagtccattaagaatattacaaaacttgaggtgcccaatctacaaaaaaatattcccaacaatgagatgcaatgtagactaactctcttgccaagtagtcttctgccaggattgaacttggtcatttggaatggtggtcactattttgttaaagtcgcaaatctgtgggcaaatcggatatctcctgatcctcctcttctgccaagcaaccccacctcttcaatgaacaatgcagcaacacacagccagtcatgctgaataacatgtcaaacatctgaggctgtgacctacactctgatggaagcatcaaatgcatgttgtgtaaaacatattcgtcaagttatcttttttatatacgtaaactgagcaagcaccgtgctgattgagggctgttcttggaagatagagatccaaggtgactgttcctttgcaggtcattcttttgtacaagttgtaatttacaacattctttccatagtgccggatgatgtcactaagtatagcaagtcgaaagggaatgacaagtttggaagtggacgtctggcaacgactgccaacaagtctctcgagattgcatccttccaacgactgtcaagtatcctttttgttttttttccccaattcaacggcataacagctattcgcaagattattgtgttcagaacaagtccagcgcttgaattcatggtgggtggtttctgatgtttagttgcttgtttggctattgatgagtgacgagagaaccgaaaattgtgtaggtataaataaatataaaggccaacatagcaatgcttttgtcttggtacctgtatcaaaggtcattggacattgcaaatttcaaccaaacaaaggaatgaaagtttgaaaatacaaattctcatccataacctccatgatgacaatgtgtaaacgtcgtgacttctatttatggtgatgggcttgtgttttttgaagtataggtgattgacataagaggaccgctgaggcagcagcaagtttcgttcaatgcagctgcagcttcatctatgatcat

SEQ ID NO: 33234 - DNA, 4292 bp, Zea Mays
agggagagtagtgctccctccccatctcaacaatccgaagatctccgtaccgttgaccaacaccaaccggccggcgcacgctcctcctgcgcccaccatggccggcagcgacgccgaccgcgagaagagctgctgctgcagctgctgcacgccgctcatctccctgggcgtcgtcgtgctcatgtactgggccatcttccagccgcaccagatacgcgccagggtggactacgcggagctgtccagcctcagcgtctccaacgcttcatccggctcctccccctcccccgtcacggtgtcctaccacgtggccgtgaacctgagcctctacaaccccagcaagcgcgtcggcatctactacgacaccctggacgccgcgctccggtaccgcggcgccgtgctgagcccggccgccagcgcggcgtcccccgccgagttccaccagcgccggaaggccgggcgggcggtgcgcctcgtgttcgacggggagcgcgtcgccgttccaggcgacgccgggacgcagctggacggcgaggtgagggccaaggcggagctgggcctggagctcagcgtcgaagcgcgggtgaggtacgtgttcgggatcgtaaaggtacggcagaggccggcggtctggtgcgcgctcagcatcccggtcccgccggtgcccggcggcctgggcgttcttggctccggcgaccggtgccgggtcaagtaccggtgattgattgttgggttcagttggcttgttgttcgcagtaccagtaccattattcacttgttattaggctgggccttgtgattcatccagaacagcaaatgcattccattctgtttctttcttggaataactagatctataccattaaaagattgtaactttaaatatatatatagttgatttcatatgtaattgaattatgttaacgccactatatacaattaagttaacaatgctatatatttaaagttataatcttttaatggtataaatccaatttcttcttcgatactagctctagcccaaagtttgtgcggcggttgacgtgaaatttctctagtcaacgggccggaatgtgcagggttgtttccatccaagccgtgagacgtcgacggcggcgccaggctggcagtggccagccgaccgtgtgtaggcaaccgtgtgctttcttgctgacgaaagacgacgacgaccgcggtagctgctctggagatgaaaagtgtattcatttcgttttttcttttgtcatactattagagcaggtttggaacaaagcgaatactttggcaactctatttttccgtggaattcttattttataaaaaaataatttttctttagaaaataaaaatcacttggaaaaaagctggttttgtagcacatacgcctagagtctcatgtggttagcactcaaggacctaggatttatactagtttaggcaatgtgccctgcatcaagtttggtgatgtttgttcacattcgtgagcacgagtgttccaagtttacaaataggtggggatgctacagcgtcatagggattgtgtctacttctactactactctataaggatgcaacgagagcgtccaccacggctcgcctccgtccgcgactcccccgggactcgtccgcgtccgcgtccgtgtccgcaaccccaccgcctccccgctgtaccacatctatgtcgcctcccttgctgccgcggtgcccgccgccgtcgtctccgttgactaccgcctagcgcctgagcactgcatccctgccgcctacgacgacacattcgcagccctgaaggtggtcatcgccgcgtgccgcgcggatggcgccgaggcggaggctgagccctcgctcgccgctcacggcgacgtcttccgcatcgtccttgcgggggacagcgccggcggtaacatggcgcacaacgtggcgataaggctgcgcaaggaaggcggcatcgagggttacgacgacatggtcagcggcggcgtcctcttgtacccttatttctaggggaaggagctgctgggcgcggagcccacggatcccggctaccgcgcaatattcgatcccacttgggaattcatctgcggcggaaagttcggcctcgaccaccactacgtcaacccaatggcatcgccggaggagttgaggcagctcggtacccgccgcgcgctggtgaccatggcggaccagtgctggttcgtggagagggcaagggcgtactcagagggaatcaagaagtgcggctcggaggaggagctcgagctctacgagaccaagggtgaggcgcccgtcttcttcttgcctaaacacgacaacgaaaaagccgtgaaggagctcgccctcgtggccgaattcgtccggcgctgttgagtatcagcgtcaaaatagtgttatgatcagaagagtccgctccgctgccatgcgctgtgcgccctggcgctcatcgcggcgtcccacccgcgcgatgttgtggccccgctcgtcccgcgcatcctcgccgccgctctctgccgcgttcgggaccaggactcctccgtccgcaccgcggcggtggcctcggcctcgacgtccgccgtgcttcggcccctcacggacgcgctcctccacgagcaggaccagtgcgcgcagctagcggccgcgctcgccatggccgctgccgtcgaggcgtccgccgtcactgtcgaccttgcttcctacctccacaggctccaaccgcgcctcctcaagttacttcgcagcaacgccttcaaggcgaagcccgcgcacatcaccctcatcggcgcctgcgcgaccatgggcgccgatgttgaagtcaccgcctccatctcgtgcctccgcgatgcaatcgctagcgatgactgggcaacgaggaaggctgcggcggaggcgcttgctgcattggccctagagcacacggatcttctcacgacctacaaatcctcttgcgtcaccttcttcaaggccagaaggtttgacaaggtcaaggttgtgcgagagtcgattaaccgaatgattgaggcgtggaaggagatcccgggtgctgaagaggacgagtgatcctccgctctgccaccagcgtcccagtcacaacgaagatcttctcttacatggagtgcaagtgatgggcgatatccagctgcttcactgggctcaaactcagttccttcagcaacaaggaagagcatattatctgtaagcagatcatcttcgcctgatgtgtctaccagtgtcaccaaaacaaatagtccttcatccatcaggaacaagaaactgtcaccgccttcatatcacaaagtgcgccaagcaaataattgtgattacaaggtcaacattgttgtttctccggatgctaccccaatcaaagtggtgacagaggagaagctgctgaaaggacgcggtgtgagagacagactggagtctaggaggacgctcttcaaaggcagcgaggataggtcggccaagctggctgcccacaaagcagggtcacgagttgttctgtacgaaggtggtggtaatttggaatagattttagaagttgaaggtggatcagaaaggcatgcagttcacaaagatgagagcttgtcagaaataaggacacagctccttcagattaaaaatcagcaaagcagtttaatggagcaaatgataaccagaggatgacaagcctgctacaggagttggtcctaagttatacaataagcctgatttttttacagagtacacaaatgccaggtttttcctgtttgggctagcatcacaaatggaaacaaaaaattggactcagcccatcgtgaagatatgaaggaagagcactatcccattattctgttttttcggaagaagaccatgtttctagcatgaacatgccagcatggtgccatcaacaacttctctgttagctcacggtacaccatgctccagcctgccccttggttatcactaattcagtcatctgtggtgctgattgtgttcccaagatgcactgaaatagagcaagatcaaatgaggatgaagttactgtgtagagatttttgttccccctttgtagcagcatccatggatttttatttgcgcaaaattactctcttttactggttcattcaataattcaatttgttgcttggaaaccactgtataataaatacaaatgctatggtatgattttgtgaattctgatcgctccttttcttgttagcatgagttcttgtaatttggcatgtctttttggttttgcatatatggtatggtcctgaaagaatcctgtacggatgaatgatgtagtaggctggtagctt

SEQ ID NO: 33235 - DNA, 1054 bp, Zea Mays
gccgcgctcgccatggccgctgccgtcgaggcgtccgccgtcactgtcgaccttgcttcctacctccacaggctccaaccgcgcctcctcaagttacttcgcagcaacgccttcaaggcgaagcccgcgcacatcaccctcatcggcgcctgcgcgaccatgggcgccgatgttgaagtcaccgcctccatctcgtgcctccgcgatgcaatcgctagcgatgactgggcaacgaggaaggctgcggcggaggcgcttgctgcattggccctagagcacacggatcttctcacgacctacaaatcctcttgcgtcaccttcttcaaggccagaaggtttgacaaggtcaaggttgtgcgagagtcgattaaccgaatgattgaggcgtggaaggagatcccgggtgctgaagaggacgagtgatcctccgctctgccaccagcgtcccagtcacaacgaagatcttctcttacatagtacacaaatgccaggtttttcctgtttgggctagcatcacaaatggaaacaaaaaattggactcagcccatcgtgaagatatgaaggaagagcactatcccattattctgttttttcggaagaagaccatgtttctagcatgaacatgccagcatggtgccatcaacaacttctctgttagctcacggtacaccatgctccagcctgccccttggttatcactaattcagtcatctgtggtgctgattgtgttcccaagatgcactgaaatagagcaagatcaaatgaggatgaagttactgtgtagagatttttgttccccctttgtagcagcatccatggatttttatttgcgcaaaattactctcttttactggttcattcaataattcaatttgttgcttggaaaccactgtataataaatacaaatgctatggtatgattttgtgaattctgatcgctccttttcttgttagcatgagttcttgtaatttggcatgtctttttggttttgcatatatggtatggtcctgaaagaatcctgtacggatgaatgatgtagtaggctggtagctt

SEQ ID NO: 33236 - DNA, 1668 bp, Zea Mays
gccgcgctcgccatggccgctgccgtcgaggcgtccgccgtcactgtcgaccttgcttcctacctccacaggctccaaccgcgcctcctcaagttacttcgcagcaacgccttcaaggcgaagcccgcgcacatcaccctcatcggcgcctgcgcgaccatgggcgccgatgttgaagtcaccgcctccatctcgtgcctccgcgatgcaatcgctagcgatgactgggcaacgaggaaggctgcggcggaggcgcttgctgcattggccctagagcacacggatcttctcacgacctacaaatcctcttgcgtcaccttcttcaaggccagaaggtttgacaaggtcaaggttgtgcgagagtcgattaaccgaatgattgaggcgtggaaggagatcccgggtgctgaagaggacgagtgatcctccgctctgccaccagcgtcccagtcacaacgaagatcttctcttacatgtgagggggagtgcaagtgatgggcgatatccagctgcttcactgggctcaaactcagttccttcagcaacaaggaagagcatattatctgtaagcagatcatcttcgcctgatgtgtctaccagtgtcaccaaaacaaatagtccttcatccatcaggaacaagaaactgtcaccgccttcatatcacaaagtgcgccaagcaaataattgtgattacaaggtcaacattgttgtttctccggatgctaccccaatcaaagtggtgacagaggagaagctgctgaaaggacgcggtgtgagagacagactggagtctaggaggacgctcttcaaaggcagcgaggataggtcggccaagctggctgcccacaaagcagggtcacgagttgttctgtacgaaggtggtggtaatttggaatagattttagaagttgaaggtggatcagaaaggcatgcagttcacaaagatgagagcttgtcagaaataaggacacagctccttcagattaaaaatcagcaaagcagtttaatggagcaaatgataaccagaggatgacaagcctgctacaggagttggtcctaagttatacaataagcctgatttttttacagagtacacaaatgccaggtttttcctgtttgggctagcatcacaaatggaaacaaaaaattggactcagcccatcgtgaagatatgaaggaagagcactatcccattattctgttttttcggaagaagaccatgtttctagcatgaacatgccagcatggtgccatcaacaacttctctgttagctcacggtacaccatgctccagcctgccccttggttatcactaattcagtcatctgtggtgctgattgtgttcccaagatgcactgaaatagagcaagatcaaatgaggatgaagttactgtgtagagatttttgttccccctttgtagcagcatccatggatttttatttgcgcaaaattactctcttttactggttcattcaataattcaatttgttgcttggaaaccactgtataataaatacaaatgctatggtatgattttgtgaattctgatcgctccttttcttgttagcatgagttcttgtaatttggcatgtctttttggttttgcatatatggtatggtcctgaaagaatcctgtacggatgaatgatgtagtaggctggtagctt

SEQ ID NO: 33237 - DNA, 1655 bp, Zea Mays
gcgggtgtgctctctgggctgcaaaattccggactgggctacggcccgtccgccgcacggccctttctgtccacggttcaccacttcaccgccccgcaacccgcagcgttctgtctccgacgactccgccgcccccgtcgtacgccaggtgcggaggcctttgctggtctcttcgccggcgacgaacacccaccagcaggtatatagattaacatattcagtacctgagatcttccttcaactagcaaagggaattgggattccactccccagtcctcatcaacagagcgaagtagtgcaatattattcaggaaagatggttgccagctgccctagtttgaccggagagatcaaatatgaagtggctagcagttatttggttggtatggtgattagtgtatatgccaagcttttacagataggcaagaattgacagtagcaaattcttgactagctccgccacctacaggaaaatctagaagaataaaagaaagtcagagatggcgatgtttcttggttgctgtcattagctgccgcttgacacctcggcgacgaaaaaggagccgtccactcactgagccttttgtccccctggacatgcaggtgagtggcatgtaaccaacctgaatgacaggaggatcattgtggtggcaacgccaggaggcagttggatattcaagatcatgacatgaaagactttgggaaggggagagggcaatctccatggatcaaggtgtctgcacatgatccaagcgcacaactgctcaaagcacacaagagatcgtgttgtgtgttgtgtttttgggccgtaccaggaccagagcgggcccctatagctatagctatagcagcaatgagctgggtcgtactctctccacgacaacactgaaccgtccgtgtgcgttcctgttgccgtactgaaatccacagagaggatagctgggctctgatccgggatttatgtcaggcccattggggaggtcatgtgactcagcaggtcagtgcgtttccgctcaccagctaccattgcgagatcagtaggatgtgtcactctctctctgctgctcttttggattcttggcgaggtttcagattctctccagtacccacttgcattgcagctctgatggtcgccaggtaccaagagcacgcctctgcgtaatccactgtgctaataggcacctttgaattgatgcatgcatgatctatctgctgccagtttgctccatcggcaccagcagcaacagctcgtcacgtcacacatgactaggcatatgtattgcaacagccttgttcagttcaccgcagtgagatgtactgatcccccctcacagctgaaatcctgcacacagcaaggtccccaccccactcatcataaactcatgcggtgaaatgcaatgtactcccctcgaatttttgtttttttttctctctctcactccgtgccgaaatatagttatttatagccatcttttttcgtccacatttaaataaataagaatgaatttagacatacgtatcaacaacattcttagattttactaatgaatgtatgtttagtctaaaatgaataatattttaggacggacaaagtaggtatgtaagcacatagcaaaaagcttaataatctaaaaagacaacgccttataatttag

SEQ ID NO: 33238 - DNA, 2163 bp, Zea Mays
gcgggtgtgctctctgggctgcaaaattccggactgggctacggcccgtccgccgcacggccctttctgtccacggttcaccacttcaccgccccgcaacccgcagcgttctgtctccgacgactccgccgcccccgtcgtacgccaggtgcggaggcctttgctggtctcttcgccggcgacgaacacccaccagcagctgctgtagatgtgcacattcatctccctttactgggtccgcccctggagcatatcatttgactgccgtggccacaactgcgctagttttgctttgatcatccggccttaataatccagcagatatctggtatatagattaacatattcagtacctgagatcttccttcaactagcaaagggaattgggattccactccccagtcctcatcaacagagatggcgatgtttcttggttgctgtcattagctgccgcttgacacctcggcgacgaaaaaggagccgtccactcactgagccttttgtccccctggacatgcaggtgagtggcatgtaaccaacctgaatgacaggaggatcattgtggtggcaacgccaggaggcagttggatattcaagatcatgacatgaaagactttgggaaggggagagggcaatctccatggatcaaggtgtctgcacatgatccaagcgcacaactgctcaaagcacacaagagatcgtgttgtgtgttgtgtttttgggccgtaccaggaccagagcgggcccctatagctatagctatagcagcaatgagctgggtcgtactctctccacgacaacactgaaccgtccgtgtgcgttcctgttgccgtactgaaatccacagagaggatagctgggctctgatccgggatttatgtcaggcccattggggaggtcatgtgactcagcaggcgatcctccggccaccgccgccaaagctctgtggctccccaggtggccctcctctgacatctcccaggatcaagctcagggacggaaggtaccttgcgtacaaagaggatggagtacagagagacaaggccaggtacaagatcatcacagtgcacgcatttgatagcaccaaggacttcccctcgcctgtttctaaggagctcgtggaaggactgggaatttacctccttgcttatgacagagctggatatggggaaagtgaccccaatcccaaccggcatgtcaagagcgaggcgctagatatcgaggagcttgccgaccagctgggccttggccacaagttctatgtgctaggggcctcaatgggaggatactcggtttggggatgcctccagtatatacctcacaggcttgcaggagctgcgctggttgtgccaattatcaactactggtggccttcgttcccagctgaattatccaagcaggccttcaacagactgattgtgccagagcagagaactctttggattgcacacaacataccttccttgctttacctgtggatgacccagaggtggttcccttcttctgcagcagccatgcaccaccctgaaatatttagcaagcatgacatggaggttcttcagaagatgatggcaatgccaagaaccattgagaacaaatcaaggcagcaaggcatttatgaatcgatccaccgtgatttacttgtcgcttttggaacttgggagttcgatccaatgaatgtcaccaatccatttcctcaaaatgagggctctgtgcacatctggcaaggacgcgaagataggttggtgcttgttgagctgcagaggtacattgccaagaagcttccgtggatcaagtatcatgaagtcccagaaggtggacacatgttcgtgatggtagatggatggacagaccgaattctcaaggcactcttgttaggagaagagcccctagatgtgtgacagtagttccattttcaaaatgtcaaaaactgcagctgccagctgttattttacttaattttattcccaatttgtacacttgtattcctacaacaccaagactagtctaattcataatccgatagactttccatcatgtcaactcattacaacagcagtgataccattgtactcatcccatacgcatatgcctttggtccaaaattgatgtcaacccagaaagcacgtagtcaaaacattcaaattggagagaggggtgttt

SEQ ID NO: 33239 - DNA, 2331 bp, Zea Mays
gcgggtgtgctctctgggctgcaaaattccggactgggctacggcccgtccgccgcacggccctttctgtccacggttcaccacttcaccgccccgcaacccgcagcgttctgtctccgacgactccgccgcccccgtcgtacgccaggtgcggaggcctttgctggtctcttcgccggcgacgaacacccaccagcagctgctgtagatgtgcacattcatctccctttactgggtccgcccctggagcatatcatttgactgccgtggccacaactgcgctagttttgctttgatcatccggccttaataatccagcagatatctggtatatagattaacatattcagtacctgagatcttccttcaactagcaaagggaattgggattccactccccagtcctcatcaacagagcgaagtagtgcaatattattcaggaaagatggttgccagctgccctagtttgaccggagagatcaaatatgaagtggctagcagttatttggttggtatggtgattagtgtatatgccaagcttttacagataggcaagaattgacagtagcaaattcttgactagctccgccacctacaggaaaatctagaagaataaaagaaagtcagagatggcgatgtttcttggttgctgtcattagctgccgcttgacacctcggcgacgaaaaaggagccgtccactcactgagccttttgtccccctggacatgcaggtgagtggcatgtaaccaacctgaatgacaggaggatcattgtggtggcaacgccaggaggcagttggatattcaagatcatgacatgaaagactttgggaaggggagagggcaatctccatggatcaaggtgtctgcacatgatccaagcgcacaactgctcaaagcacacaagagatcgtgttgtgtgttgtgtttttgggccgtaccaggaccagagcgggcccctatagctatagctatagcagcaatgagctgggtcgtactctctccacgacaacactgaaccgtccgtgtgcgttcctgttgccgtactgaaatccacagagaggatagctgggctctgatccgggatttatgtcaggcccattggggaggtcatgtgactcagcaggcgatcctccggccaccgccgccaaagctctgtggctccccaggtggccctcctctgacatctcccaggatcaagctcagggacggaaggtaccttgcgtacaaagaggatggagtacagagagacaaggccaggtacaagatcatcacagtgcacgcatttgatagcaccaaggacttcccctcgcctgtttctaagagctggatatggggaaagtgaccccaatcccaaccggcatgtcaagagcgaggcgctagatatcgaggagcttgccgaccagctgggccttggccacaagttctatgtgctaggggcctcaatgggaggatactcggtttggggatgcctccagtatatacctcacaggcttgcaggagctgcgctggttgtgccaattatcaactactggtggccttcgttcccagctgaattatccaagcaggccttcaacagactgattgtgccagagcagagaactctttggattgcacacaacataccttccttgctttacctgtggatgacccagaggtggttcccttcttctgcagcagccatgcaccaccctgaaatatttagcaagcatgacatggaggttcttcagaagatgatggcaatgccaagaaccattgagaacaaatcaaggcagcaaggcatttatgaatcgatccaccgtgatttacttgtcgcttttggaacttgggagttcgatccaatgaatgtcaccaatccatttcctcaaaatgagggctctgtgcacatctggcaaggacgcgaagataggttggtgcttgttgagctgcagaggtacattgccaagaagcttccgtggatcaagtatcatgaagtcccagaaggtggacacatgttcgtgatggtagatggatggacagaccgaattctcaaggcactcttgttaggagaagagcccctagatgtgtgacagtagttccattttcaaaatgtcaaaaactgcagctgccagctgttattttacttaattttattcccaatttgtacacttgtattcctacaacaccaagactagtctaattcataatccgatagactttccatcatgtcaactcattacaacagcagtgataccattgtactcatcccatacgcatatgcctttggtccaaaattgatgtcaacccagaaagcacgtagtcaaaacattcaaattggagagaggggtgttt

SEQ ID NO: 33240 - DNA, 2523 bp, Zea Mays
gcgggtgtgctctctgggctgcaaaattccggactgggctacggcccgtccgccgcacggccctttctgtccacggttcaccacttcaccgccccgcaacccgcagcgttctgtctccgacgactccgccgcccccgtcgtacgccaggtgcggaggcctttgctggtctcttcgccggcgacgaacacccaccagcaggtatatagattaacatattcagtacctgagatcttccttcaactagcaaagggaattgggattccactccccagtcctcatcaacagagcgaagtagtgcaatattattcaggaaagatggttgccagctgccctagtttgaccggagagatcaaatatgaagtggctagcagttatttggttggtatggtgattagtgtatatgccaagcttttacagataggcaagaattgacagtagcaaattcttgactagctccgccacctacaggaaaatctagaagaataaaagaaagtcagagatggcgatgtttcttggttgctgtcattagctgccgcttgacacctcggcgacgaaaaaggagccgtccactcactgagccttttgtccccctggacatgcaggtgagtggcatgtaaccaacctgaatgacaggaggatcattgtggtggcaacgccaggaggcagttggatattcaagatcatgacatgaaagactttgggaaggggagagggcaatctccatggatcaaggtgtctgcacatgatccaagcgcacaactgctcaaagcacacaagagatcgtgttgtgtgttgtgtttttgggccgtaccaggaccagagcgggcccctatagctatagctatagcagcaatgagctgggtcgtactctctccacgacaacactgaaccgtccgtgtgcgttcctgttgccgtactgaaatccacagagaggatagctgggctctgatccgggatttatgtcaggcccattggggaggtcatgtgactcagcaggtcagtgcgtttccgctcaccagctaccattgcgagatcagtaggatgtgtcactctctctctgctgctcttttggattcttggcgaggtttcagattctctccagtacccacttgcattgcagctctgatggtcgccagtttgctccatcggcaccagcagcaacagctcgtcacgtcacacatgactaggcatatgtattgcaacagccttgttcagttcaccgcagtgagatgtactgatcccccctcacagctgaaatcctgcacacagcaaggcgatcctccggccaccgccgccaaagctctgtggctccccaggtggccctcctctgacatctcccaggatcaagctcagggacggaaggtaccttgcgtacaaagaggatggagtacagagagacaaggccaggtacaagatcatcacagtgcacgcatttgatagcaccaaggacttcccctcgcctgtttctaaggagctcgtggaaggactgggaatttacctccttgcttatgacagagctggatatggggaaagtgaccccaatcccaaccggcatgtcaagagcgaggcgctagatatcgaggagcttgccgaccagctgggccttggccacaagttctatgtgctaggggcctcaatgggaggatactcggtttggggatgcctccagtatatacctcacaggcttgcaggagctgcgctggttgtgccaattatcaactactggtggccttcgttcccagctgaattatccaagcaggccttcaacagactgattgtgccagagcagagaactctttggattgcacacaacataccttccttgctttacctgtggatgacccagaggtggttcccttcttctgcagcagccatgcaccaccctgaaatatttagcaagcatgacatggaggttcttcagaagatgatggcaatgccaagaaccattgagaacaaatcaaggcagcaaggcatttatgaatcgatccaccgtgatttacttgtcgcttttggaacttgggagttcgatccaatgaatgtcaccaatccatttcctcaaaatgagggctctgtgcacatctggcaaggacgcgaagataggttggtgcttgttgagctgcagaggtacattgccaagaagcttccgtggatcaagtatcatgaagtcccagaaggtggacacatgttcgtgatggtagatggatggacagaccgaattctcaaggcactcttgttaggagaagagcccctagatgtgtgacagtagttccattttcaaaatgtcaaaaactgcagctgccagctgttattttacttaattttattcccaatttgtacacttgtattcctacaacaccaagactagtctaattcataatccgatagactttccatcatgtcaactcattacaacagcagtgataccattgtactcatcccatacgcatatgcctttggtccaaaattgatgtcaacccagaaagcacgtagtcaaaacattcaaattggagagaggggtgttt

SEQ ID NO: 33241 - DNA, 2892 bp, Zea Mays
gcgggtgtgctctctgggctgcaaaattccggactgggctacggcccgtccgccgcacggccctttctgtccacggttcaccacttcaccgccccgcaacccgcagcgttctgtctccgacgactccgccgcccccgtcgtacgccaggtgcggaggcctttgctggtctcttcgccggcgacgaacacccaccagcagctgctgtagatgtgcacattcatctccctttactgggtccgcccctggagcatatcatttgactgccgtggccacaactgcgctagttttgctttgatcatccggccttaataatccagcagatatctggtatatagattaacatattcagtacctgagatcttccttcaactagcaaagggaattgggattccactccccagtcctcatcaacagagcgaagtagtgcaatattattcaggaaagatggttgccagctgccctagtttgaccggagagatcaaatatgaagtggctagcagttatttggttggtatggtgattagtgtatatgccaagcttttacagataggcaagaattgacagtagcaaattcttgactagctccgccacctacaggaaaatctagaagaataaaagaaagtcagagatggcgatgtttcttggttgctgtcattagctgccgcttgacacctcggcgacgaaaaaggagccgtccactcactgagccttttgtccccctggacatgcaggtgagtggcatgtaaccaacctgaatgacaggaggatcattgtggtggcaacgccaggaggcagttggatattcaagatcatgacatgaaagactttgggaaggggagagggcaatctccatggatcaaggtgtctgcacatgatccaagcgcacaactgctcaaagcacacaagagatcgtgttgtgtgttgtgtttttgggccgtaccaggaccagagcgggcccctatagctatagctatagcagcaatgagctgggtcgtactctctccacgacaacactgaaccgtccgtgtgcgttcctgttgccgtactgaaatccacagagaggatagctgggctctgatccgggatttatgtcaggcccattggggaggtcatgtgactcagcaggtcagtgcgtttccgctcaccagctaccattgcgagatcagtaggatgtgtcactctctctctgctgctcttttggattcttggcgaggtttcagattctctccagtacccacttgcattgcagctctgatggtcgccaggtaccaagagcacgcctctgcgtaatccactgtgctaataggcacctttgaattgatgcatgcatgatctatctgctgccagtttgctccatcggcaccagcagcaacagctcgtcacgtcacacatgactaggcatatgtattgcaacagccttgttcagttcaccgcagtgagatgtactgatcccccctcacagctgaaatcctgcacacagcaaggccaccaccagtggaataaaggacagccaacattgcaagcgttcccagccactcaaaggctaaattcacgtttgcaccagatctcggaggaaacaaaaaagatggcccctaaattagtctttgttcttcctgttgtgctcctcgccttggcgctgcaggcgatcctccggccaccgccgccaaagctctgtggctccccaggtggccctcctctgacatctcccaggatcaagctcagggacggaaggtaccttgcgtacaaagaggatggagtacagagagacaaggccaggtacaagatcatcacagtgcacgcatttgatagcaccaaggacttcccctcgcctgtttctaaggagctcgtggaaggactgggaatttacctccttgcttatgacagagctggatatggggaaagtgaccccaatcccaaccggcatgtcaagagcgaggcgctagatatcgaggagcttgccgaccagctgggccttggccacaagttctatgtgctaggggcctcaatgggaggatactcggtttggggatgcctccagtatatacctcacaggcttgcaggagctgcgctggttgtgccaattatcaactactggtggccttcgttcccagctgaattatccaagcaggccttcaacagactgattgtgccagagcagagaactctttggattgcacacaacataccttccttgctttacctgtggatgacccagaggtggttcccttcttctgcagcagccatgcaccaccctgaaatatttagcaagcatgacatggaggttcttcagaagatgatggcaatgccaagaaccattgagaacaaatcaaggcagcaaggcatttatgaatcgatccaccgtgatttacttgtcgcttttggaacttgggagttcgatccaatgaatgtcaccaatccatttcctcaaaatgagggctctgtgcacatctggcaaggacgcgaagataggttggtgcttgttgagctgcagaggtacattgccaagaagcttccgtggatcaagtatcatgaagtcccagaaggtggacacatgttcgtgatggtagatggatggacagaccgaattctcaaggcactcttgttaggagaagagcccctagatgtgtgacagtagttccattttcaaaatgtcaaaaactgcagctgccagctgttattttacttaattttattcccaatttgtacacttgtattcctacaacaccaagactagtctaattcataatccgatagactttccatcatgtcaactcattacaacagcagtgataccattgtactcatcccatacgcatatgcctttggtccaaaattgatgtcaacccagaaagcacgtagtcaaaacattcaaattggagagaggggtgttt

SEQ ID NO: 33242 - DNA, 2690 bp, Zea Mays
gcgggtgtgctctctgggctgcaaaattccggactgggctacggcccgtccgccgcacggccctttctgtccacggttcaccacttcaccgccccgcaacccgcagcgttctgtctccgacgactccgccgcccccgtcgtacgccaggtgcggaggcctttgctggtctcttcgccggcgacgaacacccaccagcagctgctgtagatgtgcacattcatctccctttactgggtccgcccctggagcatatcatttgactgccgtggccacaactgcgctagttttgctttgatcatccggccttaataatccagcagatatctggtatatagattaacatattcagtacctgagatcttccttcaactagcaaagggaattgggattccactccccagtcctcatcaacagagcgaagtagtgcaatattattcaggaaagatggttgccagctgccctagtttgaccggagagatcaaatatgaagtggctagcagttatttggttggtatggtgattagtgtatatgccaagcttttacagataggcaagaattgacagtagcaaattcttgactagctccgccacctacaggaaaatctagaagaataaaagaaagtcagagatggcgatgtttcttggttgctgtcattagctgccgcttgacacctcggcgacgaaaaaggagccgtccactcactgagccttttgtccccctggacatgcaggtgagtggcatgtaaccaacctgaatgacaggaggatcattgtggtggcaacgccaggaggcagttggatattcaagatcatgacatgaaagactttgggaaggggagagggcaatctccatggatcaaggtgtctgcacatgatccaagcgcacaactgctcaaagcacacaagagatcgtgttgtgtgttgtgtttttgggccgtaccaggaccagagcgggcccctatagctatagctatagcagcaatgagctgggtcgtactctctccacgacaacactgaaccgtccgtgtgcgttcctgttgccgtactgaaatccacagagaggatagctgggctctgatccgggatttatgtcaggcccattggggaggtcatgtgactcagcaggtcagtgcgtttccgctcaccagctaccattgcgagatcagtaggatgtgtcactctctctctgctgctcttttggattcttggcgaggtttcagattctctccagtacccacttgcattgcagctctgatggtcgccaggtaccaagagcacgcctctgcgtaatccactgtgctaataggcacctttgaattgatgcatgcatgatctatctgctgccagtttgctccatcggcaccagcagcaacagctcgtcacgtcacacatgactaggcatatgtattgcaacagccttgttcagttcaccgcagtgagatgtactgatcccccctcacagctgaaatcctgcacacagcaaggcgatcctccggccaccgccgccaaagctctgtggctccccaggtggccctcctctgacatctcccaggatcaagctcagggacggaaggtaccttgcgtacaaagaggatggagtacagagagacaaggccaggtacaagatcatcacagtgcacgcatttgatagcaccaaggacttcccctcgcctgtttctaagagctggatatggggaaagtgaccccaatcccaaccggcatgtcaagagcgaggcgctagatatcgaggagcttgccgaccagctgggccttggccacaagttctatgtgctaggggcctcaatgggaggatactcggtttggggatgcctccagtatatacctcacaggcttgcaggagctgcgctggttgtgccaattatcaactactggtggccttcgttcccagctgaattatccaagcaggccttcaacagactgattgtgccagagcagagaactctttggattgcacacaacataccttccttgctttacctgtggatgacccagaggtggttcccttcttctgcagcagccatgcaccaccctgaaatatttagcaagcatgacatggaggttcttcagaagatgatggcaatgccaagaaccattgagaacaaatcaaggcagcaaggcatttatgaatcgatccaccgtgatttacttgtcgcttttggaacttgggagttcgatccaatgaatgtcaccaatccatttcctcaaaatgagggctctgtgcacatctggcaaggacgcgaagataggttggtgcttgttgagctgcagaggtacattgccaagaagcttccgtggatcaagtatcatgaagtcccagaaggtggacacatgttcgtgatggtagatggatggacagaccgaattctcaaggcactcttgttaggagaagagcccctagatgtgtgacagtagttccattttcaaaatgtcaaaaactgcagctgccagctgttattttacttaattttattcccaatttgtacacttgtattcctacaacaccaagactagtctaattcataatccgatagactttccatcatgtcaactcattacaacagcagtgataccattgtactcatcccatacgcatatgcctttggtccaaaattgatgtcaacccagaaagcacgtagtcaaaacattcaaattggagagaggggtgttt

SEQ ID NO: 33243 - DNA, 3486 bp, Zea Mays
gcgggtgtgctctctgggctgcaaaattccggactgggctacggcccgtccgccgcacggccctttctgtccacggttcaccacttcaccgccccgcaacccgcagcgttctgtctccgacgactccgccgcccccgtcgtacgccaggtgcggaggcctttgctggtctcttcgccggcgacgaacacccaccagcagctgctgtagatgtgcacattcatctccctttactgggtccgcccctggagcatatcatttgactgccgtggccacaactgcgctagttttgctttgatcatccggccttaataatccagcagatatctggtatatagattaacatattcagtacctgagatcttccttcaactagcaaagggaattgggattccactccccagtcctcatcaacagagcgaagtagtgcaatattattcaggaaagatggttgccagctgccctagtttgaccggagagatcaaatatgaagtggctagcagttatttggttggtatggtgattagtgtatatgccaagcttttacagataggcaagaattgacagtagcaaattcttgactagctccgccacctacaggaaaatctagaagaataaaagaaagtcagagatggcgatgtttcttggttgctgtcattagctgccgcttgacacctcggcgacgaaaaaggagccgtccactcactgagccttttgtccccctggacatgcaggtgagtggcatgtaaccaacctgaatgacaggaggatcattgtggtggcaacgccaggaggcagttggatattcaagatcatgacatgaaagactttgggaaggggagagggcaatctccatggatcaaggtgtctgcacatgatccaagcgcacaactgctcaaagcacacaagagatcgtgttgtgtgttgtgtttttgggccgtaccaggaccagagcgggcccctatagctatagctatagcagcaatgagctgggtcgtactctctccacgacaacactgaaccgtccgtgtgcgttcctgttgccgtactgaaatccacagagaggatagctgggctctgatccgggatttatgtcaggcccattggggaggtcatgtgactcagcaggtcagtgcgtttccgctcaccagctaccattgcgagatcagtaggatgtgtcactctctctctgctgctcttttggattcttggcgaggtttcagattctctccagtacccacttgcattgcagctctgatggtcgccagtttgctccatcggcaccagcagcaacagctcgtcacgtcacacatgactaggcatatgtattgcaacagccttgttcagttcaccgcagtgagatgtactgatcccccctcacagctgaaatcctgcacacagcaaggtccccaccccactcatcataaactcatgcggtgaaatgcaatgtactcccctcgaatttttgtttttttttctctctctcactccgtgccgaaatatagttatttatagccatcttttttcgtccacatttaaataaataagaatgaatttagacatacgtatcaacaacattcttagattttactaatgaatgtatgtttagtctaaaatgaataatattttaggacggacaaagtaggtatgtaagcacatagcaaaaagcttaataatctaaaaagacaacgccttataatttagaatggaggagaaaatggtaggggggggggggggggggcaacattatccccccctcccccacccaagagatacttacatggtaaagtcggaacataaagctacaatggtcgacagacaaaagttacaatgctatctatagtcagttgtcatgccagatctgtgcctcttcccacatggttccatacccacaaatccaaaatcctcaaggatggatggtaaatatatccagatctacacattgtttgcaaaaatatgaacacagatagatctgggtatcatgagcatgtgtatatatgtagtgcagtcaattaggcatcaataaaaataaataaagcatcaatagatggagggtgaggctgtccatatgttgcaatcaggccaccaccagtggaataaaggacagccaacattgcaagcgttcccagccactcaaaggctaaattcacgtttgcaccagatctcggaggaaacaaaaaagatggcccctaaattagtctttgttcttcctgttgtgctcctcgccttggcgctgcaggcgatcctccggccaccgccgccaaagctctgtggctccccaggtggccctcctctgacatctcccaggatcaagctcagggacggaaggtaccttgcgtacaaagaggatggagtacagagagacaaggccaggtacaagatcatcacagtgcacgcatttgatagcaccaaggacttcccctcgcctgtttctaaggagctcgtggaaggactgggaatttacctccttgcttatgacagagctggatatggggaaagtgaccccaatcccaaccggcatgtcaagagcgaggcgctagatatcgaggagcttgccgaccagctgggccttggccacaagttctatgtgctaggggcctcaatgggaggatactcggtttggggatgcctccagtatatacctcacaggcttgcaggagctgcgctggttgtgccaattatcaactactggtggccttcgttcccagctgaattatccaagcaggccttcaacagactgattgtgccagagcagagaactctttggattgcacacaacataccttccttgctttacctgtggatgacccagaggtggttcccttcttctgcagcagccatgcaccaccctgaaatatttagcaagcatgacatggaggttcttcagaagatgatggcaatgccaagaaccattgagaacaaatcaaggcagcaaggcatttatgaatcgatccaccgtgatttacttgtcgcttttggaacttgggagttcgatccaatgaatgtcaccaatccatttcctcaaaatgagggctctgtgcacatctggcaaggacgcgaagataggttggtgcttgttgagctgcagaggtacattgccaagaagcttccgtggatcaagtatcatgaagtcccagaaggtggacacatgttcgtgatggtagatggatggacagaccgaattctcaaggcactcttgttaggagaagagcccctagatgtgtgacagtagttccattttcaaaatgtcaaaaactgcagctgccagctgttattttacttaattttattcccaatttgtacacttgtattcctacaacaccaagactagtctaattcataatccgatagactttccatcatgtcaactcattacaacagcagtgataccattgtactcatcccatacgcatatgcctttggtccaaaattgatgtcaacccagaaagcacgtagtcaaaacattcaaattggagagaggggtgttt

SEQ ID NO: 33244 - DNA, 2746 bp, Zea Mays
cacaagatgctgcactgtcctcatggaagcctctcagccctcaaatgtttgtctttgcagatttatttgtttaggcaactctcatttagctgcccccttttcctgttaaggaaaaaagaagctttaagttcagtttctcctagaatctctcctcaaactgtgataccagctgatttactattatatctgtttattctcttctttggaatgctatggcaacaagtcaccaaagagaataaaggaacagaatgcagtgccgccaccacttcatcgtgtaggggtgctgtctagtgcagacatgtcaactcagttatgaaaagtctgtaggctctggattgaggcgttaaaaaaaatctttatagttttccataagtggtggagccaagtacagttctgtgcatccttctgttgcggtcaattgccatcatgcaggtttggcaccacgcaaaatagtggtacaagtggagtcaagtacgtcttggtgacaattttttgctcctggccaatgccatggtatttgattgaacctagctagggtagtggaacctcgtagttgttccaaccaatggtaagctcatataattgcaccattggtaggtaaatgtcaacatgtctctctctctctgcaaccttgactattagcaatatcagcgaagtagtgcaatattattcaggaaagatggttgccagctgccctagtttgaccggagagatcaaatatgaagtggctagcagttatttggttggtatggtgattagtgtatatgccaagcttttacagataggcaagaattgacagtagcaaattcttgactagctccgccacctacaggaaaatctagaagaataaaagaaagtcagagatggcgatgtttcttggttgctgtcattagctgccgcttgacacctcggcgacgaaaaaggagccgtccactcactgagccttttgtccccctggacatgcaggtgagtggcatgtaaccaacctgaatgacaggaggatcattgtggtggcaacgccaggaggcagttggatattcaagatcatgacatgaaagactttgggaaggggagagggcaatctccatggatcaaggtgtctgcacatgatccaagcgcacaactgctcaaagcacacaagagatcgtgttgtgtgttgtgtttttgggccgtaccaggaccagagcgggcccctatagctatagctatagcagcaatgagctgggtcgtactctctccacgacaacactgaaccgtccgtgtgcgttcctgttgccgtactgaaatccacagagaggatagctgggctctgatccgggatttatgtcaggcccattggggaggtcatgtgactcagcagtttgctccatcggcaccagcagcaacagctcgtcacgtcacacatgactaggcatatgtattgcaacagccttgttcagttcaccgcagtgagatgtactgatcccccctcacagctgaaatcctgcacacagcaaggcgatcctccggccaccgccgccaaagctctgtggctccccaggtggccctcctctgacatctcccaggatcaagctcagggacggaaggtaccttgcgtacaaagaggatggagtacagagagacaaggccaggtacaagatcatcacagtgcacgcatttgatagcaccaaggacttcccctcgcctgtttctaaggagctcgtggaaggactgggaatttacctccttgcttatgacagagctggatatggggaaagtgaccccaatcccaaccggcatgtcaagagcgaggcgctagatatcgaggagcttgccgaccagctgggccttggccacaagttctatgtgctaggggcctcaatgggaggatactcggtttggggatgcctccagtatatacctcacaggcttgcaggagctgcgctggttgtgccaattatcaactactggtggccttcgttcccagctgaattatccaagcaggccttcaacagactgattgtgccagagcagagaactctttggattgcacacaacataccttccttgctttacctgtggatgacccagaggtggttcccttcttctgcagcagccatgcaccaccctgaaatatttagcaagcatgacatggaggttcttcagaagatgatggcaatgccaagaaccattgagaacaaatcaaggcagcaaggcatttatgaatcgatccaccgtgatttacttgtcgcttttggaacttgggagttcgatccaatgaatgtcaccaatccatttcctcaaaatgagggctctgtgcacatctggcaaggacgcgaagataggttggtgcttgttgagctgcagaggtacattgccaagaagcttccgtggatcaagtatcatgaagtcccagaaggtggacacatgttcgtgatggtagatggatggacagaccgaattctcaaggcactcttgttaggagaagagcccctagatgtgtgacagtagttccattttcaaaatgtcaaaaactgcagctgccagctgttattttacttaattttattcccaatttgtacacttgtattcctacaacaccaagactagtctaattcataatccgatagactttccatcatgtcaactcattacaacagcagtgataccattgtactcatcccatacgcatatgcctttggtccaaaattgatgtcaacccagaaagcacgtagtcaaaacattcaaattggagagaggggtgttt

SEQ ID NO: 33245 - DNA, 2749 bp, Zea Mays
cacaagatgctgcactgtcctcatggaagcctctcagccctcaaatgtttgtctttgcagatttatttgtttaggcaactctcatttagctgcccccttttcctgttaaggaaaaaagaagctttaagttcagtttctcctagaatctctcctcaaactgtgataccagctgatttactattatatctgtttattctcttctttggaatgctatggcaacaagtcaccaaagagaataaaggaacagaatgcagtgccgccaccacttcatcgtgtaggggtgctgtctagtgcagacatgtcaactcagttatgaaaagtctgtaggctctggattgaggcgttaaaaaaaatctttatagttttccataagtggtggagccaagtacagttctgtgcatccttctgttgcggtcaattgccatcatgcaggtttggcaccacgcaaaatagtggtacaagtggagtcaagtacgtcttggtgacaattttttgctcctggccaatgccatggtatttgattgaacctagctagggtagtggaacctcgtagttgttccaaccaatggtaagctcatataattgcaccattggtaggtaaatgtcaacatgtctctctctctctgcaaccttgactattagcaatatcagcgaagtagtgcaatattattcaggaaagatggttgccagctgccctagtttgaccggagagatcaaatatgaagtggctagcagttatttggttggtatggtgattagtgtatatgccaagcttttacagataggcaagaattgacagtagcaaattcttgactagctccgccacctacaggaaaatctagaagaataaaagaaagtcagagatggcgatgtttcttggttgctgtcattagctgccgcttgacacctcggcgacgaaaaaggagccgtccactcactgagccttttgtccccctggacatgcaggtgagtggcatgtaaccaacctgaatgacaggaggatcattgtggtggcaacgccaggaggcagttggatattcaagatcatgacatgaaagactttgggaaggggagagggcaatctccatggatcaaggtgtctgcacatgatccaagcgcacaactgctcaaagcacacaagagatcgtgttgtgtgttgtgtttttgggccgtaccaggaccagagcgggcccctatagctatagctatagcagcaatgagctgggtcgtactctctccacgacaacactgaaccgtccgtgtgcgttcctgttgccgtactgaaatccacagagaggatagctgggctctgatccgggatttatgtcaggcccattggggaggtcatgtgactcagcaggtcagtgcgtttccgctcaccagctaccattgcgagatcagtaggatgtgtcactctctctctgctgctcttttggattcttggcgaggtttcagattctctccagtacccacttgcattgcagctctgatggtcgccaggcgatcctccggccaccgccgccaaagctctgtggctccccaggtggccctcctctgacatctcccaggatcaagctcagggacggaaggtaccttgcgtacaaagaggatggagtacagagagacaaggccaggtacaagatcatcacagtgcacgcatttgatagcaccaaggacttcccctcgcctgtttctaaggagctcgtggaaggactgggaatttacctccttgcttatgacagagctggatatggggaaagtgaccccaatcccaaccggcatgtcaagagcgaggcgctagatatcgaggagcttgccgaccagctgggccttggccacaagttctatgtgctaggggcctcaatgggaggatactcggtttggggatgcctccagtatatacctcacaggcttgcaggagctgcgctggttgtgccaattatcaactactggtggccttcgttcccagctgaattatccaagcaggccttcaacagactgattgtgccagagcagagaactctttggattgcacacaacataccttccttgctttacctgtggatgacccagaggtggttcccttcttctgcagcagccatgcaccaccctgaaatatttagcaagcatgacatggaggttcttcagaagatgatggcaatgccaagaaccattgagaacaaatcaaggcagcaaggcatttatgaatcgatccaccgtgatttacttgtcgcttttggaacttgggagttcgatccaatgaatgtcaccaatccatttcctcaaaatgagggctctgtgcacatctggcaaggacgcgaagataggttggtgcttgttgagctgcagaggtacattgccaagaagcttccgtggatcaagtatcatgaagtcccagaaggtggacacatgttcgtgatggtagatggatggacagaccgaattctcaaggcactcttgttaggagaagagcccctagatgtgtgacagtagttccattttcaaaatgtcaaaaactgcagctgccagctgttattttacttaattttattcccaatttgtacacttgtattcctacaacaccaagactagtctaattcataatccgatagactttccatcatgtcaactcattacaacagcagtgataccattgtactcatcccatacgcatatgcctttggtccaaaattgatgtcaacccagaaagcacgtagtcaaaacattcaaattggagagaggggtgttt

SEQ ID NO: 33246 - DNA, 2609 bp, Zea Mays
cacaagatgctgcactgtcctcatggaagcctctcagccctcaaatgtttgtctttgcagatttatttgtttaggcaactctcatttagctgcccccttttcctgttaaggaaaaaagaagctttaagttcagtttctcctagaatctctcctcaaactgtgataccagctgatttactattatatctgtttattctcttctttggaatgctatggcaacaagtcaccaaagagaataaaggaacagaatgcagtgccgccaccacttcatcgtgtaggggtgctgtctagtgcagacatgtcaactcagttatgaaaagtctgtaggctctggattgaggcgttaaaaaaaatctttatagttttccataagtggtggagccaagtacagttctgtgcatccttctgttgcggtcaattgccatcatgcaggtttggcaccacgcaaaatagtggtacaagtggagtcaagtacgtcttggtgacaattttttgctcctggccaatgccatggtatttgattgaacctagctagggtagtggaacctcgtagttgttccaaccaatggtaagctcatataattgcaccattggtaggtaaatgtcaacatgtctctctctctctgcaaccttgactattagcaatatcagcgaagtagtgcaatattattcaggaaagatggttgccagctgccctagtttgaccggagagatcaaatatgaagtggctagcagttatttggttggtatggtgattagtgtatatgccaagcttttacagataggcaagaattgacagtagcaaattcttgactagctccgccacctacaggaaaatctagaagaataaaagaaagtcagagatggcgatgtttcttggttgctgtcattagctgccgcttgacacctcggcgacgaaaaaggagccgtccactcactgagccttttgtccccctggacatgcaggtgagtggcatgtaaccaacctgaatgacaggaggatcattgtggtggcaacgccaggaggcagttggatattcaagatcatgacatgaaagactttgggaaggggagagggcaatctccatggatcaaggtgtctgcacatgatccaagcgcacaactgctcaaagcacacaagagatcgtgttgtgtgttgtgtttttgggccgtaccaggaccagagcgggcccctatagctatagctatagcagcaatgagctgggtcgtactctctccacgacaacactgaaccgtccgtgtgcgttcctgttgccgtactgaaatccacagagaggatagctgggctctgatccgggatttatgtcaggcccattggggaggtcatgtgactcagcaggcgatcctccggccaccgccgccaaagctctgtggctccccaggtggccctcctctgacatctcccaggatcaagctcagggacggaaggtaccttgcgtacaaagaggatggagtacagagagacaaggccaggtacaagatcatcacagtgcacgcatttgatagcaccaaggacttcccctcgcctgtttctaaggagctcgtggaaggactgggaatttacctccttgcttatgacagagctggatatggggaaagtgaccccaatcccaaccggcatgtcaagagcgaggcgctagatatcgaggagcttgccgaccagctgggccttggccacaagttctatgtgctaggggcctcaatgggaggatactcggtttggggatgcctccagtatatacctcacaggcttgcaggagctgcgctggttgtgccaattatcaactactggtggccttcgttcccagctgaattatccaagcaggccttcaacagactgattgtgccagagcagagaactctttggattgcacacaacataccttccttgctttacctgtggatgacccagaggtggttcccttcttctgcagcagccatgcaccaccctgaaatatttagcaagcatgacatggaggttcttcagaagatgatggcaatgccaagaaccattgagaacaaatcaaggcagcaaggcatttatgaatcgatccaccgtgatttacttgtcgcttttggaacttgggagttcgatccaatgaatgtcaccaatccatttcctcaaaatgagggctctgtgcacatctggcaaggacgcgaagataggttggtgcttgttgagctgcagaggtacattgccaagaagcttccgtggatcaagtatcatgaagtcccagaaggtggacacatgttcgtgatggtagatggatggacagaccgaattctcaaggcactcttgttaggagaagagcccctagatgtgtgacagtagttccattttcaaaatgtcaaaaactgcagctgccagctgttattttacttaattttattcccaatttgtacacttgtattcctacaacaccaagactagtctaattcataatccgatagactttccatcatgtcaactcattacaacagcagtgataccattgtactcatcccatacgcatatgcctttggtccaaaattgatgtcaacccagaaagcacgtagtcaaaacattcaaattggagagaggggtgttt

SEQ ID NO: 33247 - DNA, 2066 bp, Zea Mays
ctcctatccgccgttgctaatccttccacactcctcccccgcaaccacgggatctctcactgtcccaccccactccctcctccatttggcagtggcacatctatataggcacccggaatccccactcccccacgacgccgtccccgtccccgtcccgacgaattggaataggagaagcaaaagctagtgcttgccgctctgcatcctaaccccacggaactgccgttcgtttcccacgaatcagatgatggatctcgccgacagccagcaacagcggctcatcgccggcgcggctctgctggtcgccaccgtcgccttcttcaggttcctcctgcgctctcgctccgggggcaagcgcctgccgcccaccatcccgggggcgccggtggtcggcggcctcgtcaagttcatgcgcgggcctatcccgatgatccgggagcagtacgcccgcctcggcagcgtcttcaccgtccccatcatcagccgcaagatcacgttcctcgtcgggcccgaggtgtccgcgcacttcttcaagggcaacgaggccgagatgagccagcaggaggtgtacaggttcaacgtgcccaccttcggccccggggtcgtctttgacgtcgactactccatcaggcaggagcagttcaggttcttcaccgaggcgctccgggccaataagctgcgcagctatgtcgaccagatggttgttgaggctgaggagtacttctcaaagtggggagaaagtggcactgttgatttgaagtacgagttggagcacctcatcatactgacagctagccggtgcttgctgggaagggaggtgcgagaaaagctgttcgacgatgtttctgctctcttccatgaccttgacaacgggatgcagccaatcagtgtcctcttcccgtacctcccaatccctgcgcataagcgccgtgacagggcacgggcacgtttggcagaaatctttgccaccatcatcaagtcccgcaaggcctctggacagtctgaggaagacatgctgcagtgcttcattgattccaagtacaagaatgggcgccccaccaccgagggtgaggtaaccgggctacttatcgcagcgctctttgctggacagcataccagctcaatcacctcaacctggactggagcgtacatgcttcgcttcaagcagtactttgcagaagccgtagaggagcagaaggatatcatgagacggcatggcgacaagatcgatcatgacatcctggcagagatggatgtcctctaccggtgcatcaaggaggcccttcgtctccacccgccgctgattatgttgcttcgccaatcacacagtgacttcaccgtgacaacaaaggaaggcaaagagtacgacatccccaagggccacatcgtcgcgacatcgccatcctttgccaacaggctgccccacatctacaagaaccctgactcgtatgaccctgatcggttcggtcctggaagggaggaggacaaggctgcaggcgccttctcatacatctccttcggtggcggcaggcatgggtgcctcggtgagcccttcgcctacctgcagatcaaggcaatctggacgcacctactgaggaactttgagttcgagctggtatcgccattcccagagaacgactggaacgccatggtggttggcatcaagggcgaggtgatggttaactacaagaggcggaagcttgccgtggacaactaagattgtggccgcagtctctagatgcttgcttcttgttgattcaattgttttcacatgtttgtcagcatttgttcagtgcaagttctgctgtacgcaagccagccttgttaggggtgtttctgttgtttaggattttgaaatttgtttcactatggggccgccatgatctgcaacttctgcatgttcagcttcctggctaagcattcccctatgtcaaatctgtaacttgtagcatctataagcctgtgggtcttttgttcaaatcctgatgtttatcattgtcttagatggatgtaaacacaaacataacaaataacctaatgaataaactcaggtgttcagtgtgaat

SEQ ID NO: 33248 - DNA, 1218 bp, Zea Mays
atttaatgtatcgtatcaactacaggttctcagtcataagggatataatggcgcacttgctgatacatggtcatgtggagtaattttatatgtattgttagcaggttatcttccatttgatgaagtggacctgactaccctttatggaaagattgagagtgcagaatattcattcccagcctggttttcaggtggtgcaaaatcactgattcgtagaattcttgacccaaatccagagacacgaatcaggatagaagagatcagaagcgatgaatggtttcagaaaaattatgaacctatcaaagaaatagaaaatgaggaaagtcaatctcgatgatgtcaatgcagcttttgatgatcctgaggacgataatgaggatgctttcgaagatgaaacaggtcctctaacacttaatgcattcgacctaatcattctttcgcaaggattgaatcttgcagcgctctttgaccgcagacaggactgtgacaagcttcaaaatagattcttatcacgcaatccagcaaaggttatcttgtcaagcatggaggttgttgcgcaatcaatgggatttaagacacacattcgcaattataagatgagggtggaaggtctaaatgccgacaagactagtcatctctcagttatggttgaagttttcgaagttgctccatcaatcttcatggtagaactacaaagagcagcaggagatacttcagagtataacacgttcgtaaataactactgcggcaaattagatgatatcatctggaaatttccaactgagaagggaaaatcaaggataccccggttatcaaagtctcattcataatctagtgctgtgtgttatcaattactatggacttaagtggatatatttgcagagtgtatcgcaattggattatgatattctaagtgtagctcttcgagtagtatatgtttgtatattcagagtccccatgtacaaagaggccgttttaattgaggtttccgtacctcgattccctgtgcaaagttttcatcgatgttttagactgcacatctgtatattttgtcgagagcatcagtttcttagacaccacctatgtatcatgtgtttgttgccaactagtgtcatttttgtaagatctaacttgtgatatacttggattgagtggtatggttgaaaagagtgtgaaagtccattaaaaatgttagtgaaaatacaaacttacacaaag

SEQ ID NO: 33249 - DNA, 1961 bp, Zea Mays
atggccccacgtcaaaaaaggagcgggccgtaccaaggctgcaaggcacctacacacctactccacgaacgaaacacacctctcctcttgctgtcctgcggtccacttcttcaactagttatcccaggttctcaactcccagtagaaaacttcacctgctggctggctgcctgcctgcccacagaaattgcgcccggccgccccccattcaccttcaaaaaaggagccaggcttcccatcaacgagggtgtcggccatctgagcagctcccctgcccctcgcagcggctactctacaggtctagcgactctttcgccatccatagagggaggaggcgcggcggagatggtgggcggtggcggcggcgggccgctgcggcgggtgggcaagtacgaggtgggacgcaccatcggggaaggcaccttcgccaaggtcaagttcgcgcagaacaccgagaccggggagagcgtcgccatgaaggtgctcgaccgctcctccatcctcaagaacaagatggccgaacagattaagagagaaatatccataatgaagcttgtcaggcatcccaatgtcgttaggctacacgaggttttggcaagccggaagaagatatttataattctggagttcatcactggcggcgagctattcgataaaattattcgtcatgggagactcagtgaagcagatgcccgcagatactttcagcagcttattgatggtgttgatttttgtcacaagaaaggagtctaccatcgagacttaaaggttctcagtcataagggatataatggcgcacttgctgatacatggtcatgtggagtaattttatatgtattgttagcaggttatcttccatttgatgaagtggacctgactaccctttatggaaagattgagagtgcagaatattcattcccagcctggttttcaggtggtgcaaaatcactgattcgtagaattcttgacccaaatccagagacacgaatcaggatagaagagatcagaagcgatgaatggtttcagaaaaattatgaacctatcaaagaaatagaaaatgaggaaagtcaatctcgatgatgtcaatgcagcttttgatgatcctgaggacgataatgaggatgctttcgaagatgaaacaggtcctctaacacttaatgcattcgacctaatcattctttcgcaaggattgaatcttgcagcgctctttgaccgcagacaggactgtgacaagcttcaaaatagattcttatcacgcaatccagcaaaggttatcttgtcaagcatggaggttgttgcgcaatcaatgggatttaagacacacattcgcaattataagatgagggtggaaggtctaaatgccgacaagactagtcatctctcagttatggttgaagttttcgaagttgctccatcaatcttcatggtagaactacaaagagcagcaggagatacttcagagtataacacgttcgtaaataactactgcggcaaattagatgatatcatctggaaatttccaactgagaagggaaaatcaaggataccccggttatcaaagtctcattcataatctagtgctgtgtgttatcaattactatggacttaagtggatatatttgcagagtgtatcgcaattggattatgatattctaagtgtagctcttcgagtagtatatgtttgtatattcagagtccccatgtacaaagaggccgttttaattgaggtttccgtacctcgattccctgtgcaaagttttcatcgatgttttagactgcacatctgtatattttgtcgagagcatcagtttcttagacaccacctatgtatcatgtgtttgttgccaactagtgtcatttttgtaagatctaacttgtgatatacttggattgagtggtatggttgaaaagagtgtgaaagtccattaaaaatgttagtgaaaatacaaacttacacaaag

SEQ ID NO: 33250 - DNA, 3158 bp, Zea Mays
atggccccacgtcaaaaaaggagcgggccgtaccaaggctgcaaggcacctacacacctactccacgaacgaaacacacctctcctcttgctgtcctgcggtccacttcttcaactagttatcccaggttctcaactcccagtagaaaacttcacctgctggctggctgcctgcctgcccacagaaattgcgcccggccgccccccattcaccttcaaaaaaggagccaggcttcccatcaacgagggtgtcggccatctgagcagctcccctgcccctcgcagcggctactctacaggtctagcgactctttcgccatccatagagggaggaggcgcggcggagatggtgggcggtggcggcggcgggccgctgcggcgggtgggcaagtacgaggtgggacgcaccatcggggaaggcaccttcgccaaggtcaagttcgcgcagaacaccgagaccggggagagcgtcgccatgaaggtgctcgaccgctcctccatcctcaagaacaagatggccgaacagattaagagagaaatatccataatgaagcttgtcaggcatcccaatgtcgttaggctacacgaggttttggcaagccggaagaagatatttataattctggagttcatcactggcggcgagctattcgataaaattattcgtcatgggagactcagtgaagcagatgcccgcagatactttcagcagcttattgatggtgttgatttttgtcacaagaaaggagtctaccatcgagacttaaagcctgaaaatctcctccttgattcccaaggcaatcttaaaatttcagactttggactgagtgcatggcctgctcagggatctttccttctacgtacaacctgtgggactccgaactatgttgccccagaggttctcagtcataagggatataatggcgcacttgctgatacatggtcatgtggagtaattttatatgtattgttagcaggttatcttccatttgatgaagtggacctgactaccctttatggaaagattgagagtgcagaatattcattcccagcctggttttcaggtggtgcaaaatcactgattcgtagaattcttgacccaaatccagagacagtaagttaagctcgacaatatttagatggaagaaacttgctatgagctgtaccttatcataatataaggcatattattatgctgttaactttccccagcgattctgcagtgctctgatatatccctgcagatactaagaactttgttaagactataattgtgacatattagcatgatgccataaggcctgctcaacaagtacaagcataactactgtttgctatgtcatatgttgccaattttattcaagctggaaacttatatgagttctcatcattaatgatatgaatttgtgtactttgtaaaaggctaatatcccaaacaggaatactaaccaaattcttggatttttaatgtaatgttcttggtctgatcggcatataccaatgagcgtatgtttggtttcacccaaaccggaggggattgagggggattgaatccctttctattcaattttgactaggaagggatttaatcctctccaatccccctcaatccacttctaatcgaacaagccctgaatgggtggaattacaagcttgttacttgctggtttcttatctttgtaaatgaaatcgaatgagccgtctaatggaagtcttgctcttaatttttttttacgatagtccatgacatgaagactgacatactgtgattataaatatgtaaccatgcgggggaatgtataccctattatagcagaattaggacttatatggtcactacaacatatatttctcagtgatttacattgcttcggaaggctttgtggcaccaggcatgataagtagatgtaccatctccatttgtaagcaaatgacctagttcatcaggtcatcttgactttgttaattcatattgcttggttgattccactatgctattgtttttttcctgaatttatttaccgtaactgatggcggaggcacttaaaaagatgaatttaagttaaatggacatgaacgaccttctatataatgtacaactatacagggacatgaaatgtttgatcgtttgctacaatatgtggtgttttgttgatcaaatatgtttcctgacatggaacagcgaatcaggatagaagagatcagaagcgatgaatggtttcagaaaaattatgaacctatcaaagaaatagaaaatgaggaaagtcaatctcgatgatgtcaatgcagcttttgatgatcctgaggacgataatgaggatgctttcgaagatgaaacaggtcctctaacacttaatgcattcgacctaatcattctttcgcaaggattgaatcttgcagcgctctttgaccgcagacaggactgtgacaagcttcaaaatagattcttatcacgcaatccagcaaaggttatcttgtcaagcatggaggttgttgcgcaatcaatgggatttaagacacacattcgcaattataagatgagggtggaaggtctaaatgccgacaagactagtcatctctcagttatggttgaagttttcgaagttgctccatcaatcttcatggtagaactacaaagagcagcaggagatacttcagagtataacacgttcgtaaataactactgcggcaaattagatgatatcatctggaaatttccaactgagaagggaaaatcaaggataccccggttatcaaagtctcattcataatctagtgctgtgtgttatcaattactatggacttaagtggatatatttgcagagtgtatcgcaattggattatgatattctaagtgtagctcttcgagtagtatatgtttgtatattcagagtccccatgtacaaagaggccgttttaattgaggtttccgtacctcgattccctgtgcaaagttttcatcgatgttttagactgcacatctgtatattttgtcgagagcatcagtttcttagacaccacctatgtatcatgtgtttgttgccaactagtgtcatttttgtaagatctaacttgtgatatacttggattgagtggtatggttgaaaagagtgtgaaagtccattaaaaatgttagtgaaaatacaaacttacacaaag

SEQ ID NO: 33251 - DNA, 3593 bp, Zea Mays
atggccccacgtcaaaaaaggagcgggccgtaccaaggctgcaaggcacctacacacctactccacgaacgaaacacacctctcctcttgctgtcctgcggtccacttcttcaactagttatcccaggttctcaactcccagtagaaaacttcacctgctggctggctgcctgcctgcccacagaaattgcgcccggccgccccccattcaccttcaaaaaaggagccaggcttcccatcaacgagggtgtcggccatctgagcagctcccctgcccctcgcagcggctactctacaggtctagcgactctttcgccatccatagagggaggaggcgcggcggagatggtgggcggtggcggcggcgggccgctgcggcgggtgggcaagtacgaggtgggacgcaccatcggggaaggcaccttcgccaaggtcaagttcgcgcagaacaccgagaccggggagagcgtcgccatgaaggtgctcgaccgctcctccatcctcaagaacaagatggccgaacagattaagagagaaatatccataatgaagcttgtcaggcatcccaatgtcgttaggctacacgaggttttggcaagccggaagaagatatttataattctggagttcatcactggcggcgagctattcgataaaattattcgtcatgggagactcagtgaagcagatgcccgcagatactttcagcagcttattgatggtgttgatttttgtcacaagaaaggagtctaccatcgagacttaaagcctgaaaatctcctccttgattcccaaggcaatcttaaaatttcagactttggactgagtgcatggcctgctcagggatctttccttctacgtacaacctgtgggactccgaactatgttgccccagaggttctcagtcataagggatataatggcgcacttgctgatacatggtcatgtggagtaattttatatgtattgttagcaggttatcttccatttgatgaagtggacctgactaccctttatggaaaggtttggttcttaactacaagccaataactcttttgagattaggtacttaaaaagagaggtatatgcattattttattaatgctacagaaccaatattggtttgatactcactacttatgaaatagagaagggggaggtagtagcgcaactgcaacttggcatacatgaactcacttcttactttactttgtaacttgtgtcttgtttaaattcaaaggaaataagcattggctctttagaatagatgtttgtatataagagtgcttcttatttccttttgcttctgagctgtatatatgtatttgttgctttcaccctttgtactcaattcacatatatttactggtggttttaacaagaaattttatcttagataattgattgttcttgtggaatgaaatttctatatcttgctgccttcttttcttaatgcagattgagagtgcagaatattcattcccagcctggttttcaggtggtgcaaaatcactgattcgtagaattcttgacccaaatccagagacagtaagttaagctcgacaatatttagatggaagaaacttgctatgagctgtaccttatcataatataaggcatattattatgctgttaactttccccagcgattctgcagtgctctgatatatccctgcagatactaagaactttgttaagactataattgtgacatattagcatgatgccataaggcctgctcaacaagtacaagcataactactgtttgctatgtcatatgttgccaattttattcaagctggaaacttatatgagttctcatcattaatgatatgaatttgtgtactttgtaaaaggctaatatcccaaacaggaatactaaccaaattcttggatttttaatgtaatgttcttggtctgatcggcatataccaatgagcgtatgtttggtttcacccaaaccggaggggattgagggggattgaatccctttctattcaattttgactaggaagggatttaatcctctccaatccccctcaatccacttctaatcgaacaagccctgaatgggtggaattacaagcttgttacttgctggtttcttatctttgtaaatgaaatcgaatgagccgtctaatggaagtcttgctcttaatttttttttacgatagtccatgacatgaagactgacatactgtgattataaatatgtaaccatgcgggggaatgtataccctattatagcagaattaggacttatatggtcactacaacatatatttctcagtgatttacattgcttcggaaggctttgtggcaccaggcatgataagtagatgtaccatctccatttgtaagcaaatgacctagttcatcaggtcatcttgactttgttaattcatattgcttggttgattccactatgctattgtttttttcctgaatttatttaccgtaactgatggcggaggcacttaaaaagatgaatttaagttaaatggacatgaacgaccttctatataatgtacaactatacagggacatgaaatgtttgatcgtttgctacaatatgtggtgttttgttgatcaaatatgtttcctgacatggaacagcgaatcaggatagaagagatcagaagcgatgaatggtttcagaaaaattatgaacctatcaaagaaatagaaaatgaggaaagtcaatctcgatgatgtcaatgcagcttttgatgatcctgaggacgataatgaggatgctttcgaagatgaaacaggtcctctaacacttaatgcattcgacctaatcattctttcgcaaggattgaatcttgcagcgctctttgaccgcagacaggactgtgacaagcttcaaaatagattcttatcacgcaatccagcaaaggttatcttgtcaagcatggaggttgttgcgcaatcaatgggatttaagacacacattcgcaattataagatgagggtggaaggtctaaatgccgacaagactagtcatctctcagttatggttgaagttttcgaagttgctccatcaatcttcatggtagaactacaaagagcagcaggagatacttcagagtataacacgttcgtaaataactactgcggcaaattagatgatatcatctggaaatttccaactgagaagggaaaatcaaggataccccggttatcaaagtctcattcataatctagtgctgtgtgttatcaattactatggacttaagtggatatatttgcagagtgtatcgcaattggattatgatattctaagtgtagctcttcgagtagtatatgtttgtatattcagagtccccatgtacaaagaggccgttttaattgaggtttccgtacctcgattccctgtgcaaagttttcatcgatgttttagactgcacatctgtatattttgtcgagagcatcagtttcttagacaccacctatgtatcatgtgtttgttgccaactagtgtcatttttgtaagatctaacttgtgatatacttggattgagtggtatggttgaaaagagtgtgaaagtccattaaaaatgttagtgaaaatacaaacttacacaaag

SEQ ID NO: 33252 - DNA, 2656 bp, Zea Mays
atggccccacgtcaaaaaaggagcgggccgtaccaaggctgcaaggcacctacacacctactccacgaacgaaacacacctctcctcttgctgtcctgcggtccacttcttcaactagttatcccaggttctcaactcccagtagaaaacttcacctgctggctggctgcctgcctgcccacagaaattgcgcccggccgccccccattcaccttcaaaaaaggagccaggcttcccatcaacgagggtgtcggccatctgagcagctcccctgcccctcgcagcggctactctacaggtctagcgactctttcgccatccatagagggaggaggcgcggcggagatggtgggcggtggcggcggcgggccgctgcggcgggtgggcaagtacgaggtgggacgcaccatcggggaaggcaccttcgccaaggtcaagttcgcgcagaacaccgagaccggggagagcgtcgccatgaaggtgctcgaccgctcctccatcctcaagaacaagatggccgaacagattaagagagaaatatccataatgaagcttgtcaggcatcccaatgtcgttaggctacacgaggttttggcaagccggaagaagatatttataattctggagttcatcactggcggcgagctattcgataaaattgtagactgctttggttaactattaactgttcttttttcattcttaacttctcgatataatctaggaaaataaatattagttccatgcatttgttatttagattatatgcctgtcacattccatcttggatgttcaattgccacctttgcttttattgtaagaggggaaattcgttggacgtggaagagacacacatttctctcactccctcagagcctatatatttaatttatatgtgaaaaaaagagcatgtcactataggttccttatgtccatcaattgtggatggtatttgtggttttgattctaatttcatttgaacttgttactgttactcctacatgtatgtaccagtccaaggaatttaatttgaagacacacatagtctattatactttatcttactaaggtttggttcaaacaatacctttacatgaaaagaaaactaatgacactgaaacatacaaatttcagattcgtcatgggagactcagtgaagcagatgcccgcagatactttcagcagcttattgatggtgttgatttttgtcacaagaaaggagtctaccatcgagacttaaagcctgaaaatctcctccttgattcccaaggcaatcttaaaatttcagactttggactgagtgcatggcctgctcagggatctttccttctacgtacaacctgtgggactccgaactatgttgccccagaggttctcagtcataagggatataatggcgcacttgctgatacatggtcatgtggagtaattttatatgtattgttagcaggttatcttccatttgatgaagtggacctgactaccctttatggaaagattgagagtgcagaatattcattcccagcctggttttcaggtggtgcaaaatcactgattcgtagaattcttgacccaaatccagagacacgaatcaggatagaagagatcagaagcgatgaatggtttcagaaaaattatgaacctatcaaagaaatagaaaatgaggaaagtcaatctcgatgatgtcaatgcagcttttgatgatcctgaggacgataatgaggatgctttcgaagatgaaacaggtcctctaacacttaatgcattcgacctaatcattctttcgcaaggattgaatcttgcagcgctctttgaccgcagacaggactgtgacaagcttcaaaatagattcttatcacgcaatccagcaaaggttatcttgtcaagcatggaggttgttgcgcaatcaatgggatttaagacacacattcgcaattataagatgagggtggaaggtctaaatgccgacaagactagtcatctctcagttatggttgaagttttcgaagttgctccatcaatcttcatggtagaactacaaagagcagcaggagatacttcagagtataacacgatacatccaaagggacaaatttacattggacagtaatgcctgtaatagggtgatgctgatgcttgctgcacagattaacttctaataaaattttcgtaaataactactgcggcaaattagatgatatcatctggaaatttccaactgagaagggaaaatcaaggataccccggttatcaaagtctcattcataatctagtgctgtgtgttatcaattactatggacttaagtggatatatttgcagagtgtatcgcaattggattatgatattctaagtgtagctcttcgagtagtatatgtttgtatattcagagtccccatgtacaaagaggccgttttaattgaggtttccgtacctcgattccctgtgcaaagttttcatcgatgttttagactgcacatctgtatattttgtcgagagcatcagtttcttagacaccacctatgtatcatgtgtttgttgccaactagtgtcatttttgtaagatctaacttgtgatatacttggattgagtggtatggttgaaaagagtgtgaaagtccattaaaaatgttagtgaaaatacaaacttacacaaag

SEQ ID NO: 33253 - DNA, 444 bp, Zea Mays
catggacaaaagaacatttgaaggataaattgaagagttatggagttgaatgttttgaggacttactactggttgaggatacaaacaatcctgggatgaatcgtggctatgccttgcttgagttttctactcgacctgaggcaatggatggtttcaggatattgcagaagagggatgtagtctttggagttgatcgtagtgcaaaggtttcctttgctgattcctaccctcaagttgatgacgaaataatggcataggtgactacttattttgtacagtaattataaggccgcaccttcggattgcaggtgactacacggaaacccttttgatgcggaagagaaggatggtagttatggtagttgaagtaaaaatagtattatatgattgtggtggggtttaggaggttgatatagaggaaactggtgcgggagttggtgaaat

SEQ ID NO: 33254 - DNA, 1828 bp, Zea Mays
ccgcttcgccgcggccgccgccgccgcctccgcctccgtgtcgccgccgccccgcagaaccctaaaggccgccgccaccatgcgccgcctcccgaccctcccccggcccgcggccgccgtcgcctcgacatccaccccggacatcgtcgcggagctcggccgcgtcctctccacgcgccgctggaacaagggcagcgcctacaagcggctgtccccctccgtgacggccgcgcacgtggccgacctcttccgcgccccggtgtcccctctcgacccggccaccgctctggccttcttcgagtgggtcgcgcgccgccccgggttccgccacaccgccgcctcccacgccgcgctgctccagctcctcgcccgccgccgcgcgcccgccaactacgacaagctcgtcctctccatgattagctgctccggcaccgcagaggacgtgcgcgaggccgtcgacgcaattcaggcaatccgtcgagtgggtggttatttgaaatgatggaaaagaatggcttgacacctgatgagcaagcgtacaatgtcctaactgatgcactatgcaagtctggaagagctgaagaagcttattcatttcttgtcaggaagggagtcgtcctcacaaaggtaacatatacatctttagttgatggttttagcaaggcaggcaatactgactttgctgccgtccttatagagaagatggtcaatgagggttgtaaggcagatttgtacacatatagtgtattgttgcaggctttatgtaaacaaaaaaaactgaatgaagctttgtctatactggatcagatgaccgtaagtggagtcaagtgtaacattgttgcttatacaataattatcagtgaaatgatcaaagaagggaagcatgaccatgctaaaagcttgttcaatgaaatgatttcatcaggacataagcctagtgcaaccacatatactgtattcattagctcgtactgcaagataggtcaaatagaggaggctgagcatctaattggggaaatggaaagagacggtgtcacacctgatgtggtaacctatcatatattcattaatggttgtggtcatatgggatacatggatcgtgcattttctactctgaagcgcatggtggatgcatcatgtgagccaaattgctggacttattggcttttgctcaaacattttctaaaaatgagtttgatcaatgctcactatatagacacatctggcatgtggaactggattgaactgaacacagtttggcagcttcttgaaaggatgatgaagcatggtttaaatcctacagtagtgacatacagttctatcattgcaggattctgcaaagcaacacgactagaagaagcatgtgtgcttcttgatcatatgcttggaaaagctatatctcccaatgaagagatatacacaatgcttatcaagtgttgttgtgatatcaagctctttggaaaggatgtgtcatttgttaccgacatgatagaatttgggtttcagcctcagcttgagtcctaccactaccttattgtaggcctctgtgatgagggggactatgacagggctaaatcactgttctgtgacttacttgggatggactataatcataatgaagttgcatggaaaattttgaatgatggtttgctcaaagctggccatgtggatttttgttcacagttgctggctgctatggataatagacactgtcggattgactctgagtcatattcaatgttgactgatagcattcgtgaggcttctggcagtgtggtcagcgaactcagaggagaagctgcctgaccgatgtgcaagtgtctttgga

SEQ ID NO: 33255 - DNA, 2150 bp, Zea Mays
atcggagacacctggagtgtttcctgtggagctgttgctcgcgctgctaacaccgccgacacgccatcattcatggcgaggcgtcgcctggcggtacaagaaccataatccatgctattcaacatcccacactgcaaatcacaagctcctgtagccgccgtcgtagcagccatttccagcatccgcttctcctcctccctgccggcacttgttccgccgcctccgcccctgcacgatgagaacccgttcgctgcgctccgcggcctcccgggcctcgcgcgccagctgttccggtgggcggagactactccgtgtggcttcccccgctccgcctccgcgttcgccgccgtcctcatcccgctcgcccgagccaaccacatccgggccgcctaccctgtctccctccgcgccctgcacctcgacctcctcctccccctggtgtccctcctgtccgctcccctctctaccgctccacggtcactattgagcctcctcttacgcttgtccaccaagtactcgaaggaatgcaaagcccgcgacgccacgctcgacacctgttcgacgctgtgcttgtccgccttccgcgagatggcaagccacggcgtggcccctgacgttaaagactgcaaccatgtgctccgtgcattacgtgatgcggccaggtgggatgacatttgtgctgtgcatgaggagatgctccagcttgggattgagcccagtattgtcacgtacaatactttgttggattctttcttgaaggagggaaggaaggacaaggttgccatgctgctgaaggagatggagacccgggggagtggttgcttgccaaatgatgtcacgtacaatgtggtgattactgggttgaccaggaaaggtgacctcgaggaggcagcagagctggtcgagggaatgcggctgtccaagaaggcttcatccttcacttataacccacttatcactgggttgcttgcaaggggctgtgtcaaaaaggtatacgatttgcagttggagatggagaatgagggcattatgcctacagtggtgacgtacaatgcaatgattcatgggctgcttcaaagtgggctggtagaggctgcacaggtgaagtttgcggaaatgagggcgatgggcttgctaccggacgtgatcacctacaattcgttgctaaatgggtattgtaaggtgatttagaggaagccaggatattgaaagaggaaatgggagagcaaggttgtttgcccaatgtttgtacatatacaattctcatgaagggttcgcttaatgtgtgtagccttgctatggcaagagaattctttgatgagatgctgagcaaaggtttgcagccagattgctttgcttataatacaaggatttgtgcggagctaatcctaggggatattgccagagctttggagttgagagaggtgttgatgttggaaggcatatcttctgatacagtgacatacaatattcttattcatggactgtgcaagactggtaacctgaaagatgccaaagagctgcagatgaagatggtcagtaatggtttacagcctgactgtatcacatacacttgcttgattcatgcacattgtgaaaggggacttctaagagaagcaagaaagatctttaataacatgatctcagatggtttgctaccctcagctgtgaccttcactgttattattcatgcatattgtagaagaggaaacctttattcagcatatggttggtttcgaaagatgctggaggaaggagttgaacctaatgaaataacatataatgtcctcatacatgcattatgcaggatgggcagaactcaactggcttctcatcattttcatgagatgctagaaaggggattggtggcaaacaaatacacatatactttgttgatagatgggaactgtaaagtgggcaactgggaagatgcaatgagattctattttgaaatgcatcagaatggtattcatccagattatttaacacataaagccttggtcaagggatttgatggtcacgtgcaccatacaattgagtacttggatattgttattttgggtgaatagattgattgacctctgaaagcttgtccttttgtcctcgcttcgctgatatctccctgtcagaggtgatagatggagttcctg

SEQ ID NO: 33256 - DNA, 1809 bp, Zea Mays
cttgcaccacacccttcctcctctcctctcctctcccctctcctaaaccgctcggctggctctacacctgcagctaggcagccgacgtcggacttgggatcttgcatggacaaggcccacctcggaggaggcctgttagctctcgacgcgtcgccgcggcctctcggcttcctcaacctgctatcgccgccgacgtcgtccccgccgtttcacaggacaagaacgatggaggccgacgacgtccccgccgttccaggcaacaagggccgtaggtccatcgaggtggacttcttctccgacgacaaggacaagaagagcgctgccgctgcagctaacgacaagaaggaagacctgacgaccattaaccttcttcccggcagcaacgccaacgacgacgacgacgacgaggcggcgacccggctccggctgccgaacgaccaagacaggcagaacaggaacaccaacgagctttcggccatgcaatcagagcttgcgcgcatgaacgacgagaaccagcggctgcgcgggatgctcacccaggtcaccaccagctaccaggcgctccagatgcatctcgtggcgctcatgcaggcgcgggccgacggccagccgatgatgcctcctgcagtggcccagacactgccggtgaccgacgccgctgctgtcatgccatcgccgagacagttcctcggcctaggaccagcggcggctgccgaggagacgtcaaactcgtccacggaggtgggcagcccgcggccgtcgtcgtccgcaggcaggcggcaggaccaacagcaacaggcggcggagcgcggcgacagcccggacccggcggatccgtcgacaacagcaaggcagctagcgcagcagcaggaggccagcatgaggaaggcgcgcgtctcggtgcgcgcgcgatccgaagctcccatcatcgccgacggctgccagtggcgcaagtacgggcagaagatggccaagggcaacccatgcccgcgagcctactaccggtgcaccatggccaacggctgccccgtgcggaagcaggttcagcgctgcgccgacgaccgctccatcctcatcactacctacgagggcacccacaaccacccgctcccgcccgccgccgtggccatggcctccaccacctccgccgccgcctccatgctgctgtccggctccatgcccagcggggacaacttcctggcgcgggccgtgctgccgtgctcctccggcatggccaccatctccgcctccgcgccattccccaccgtcacgctcgacctcaccaacgggcccgcccggtgctcctcctcccgcgcgaccgccgccgcacctgcaggcggccgcgctctacagcgccacccaccaggcttcgtccaagttctccggcctgcacatgtcatcgtcatcgacatcggataatattaacaatgttggcactactaccagagtcgtcgcgcctgacgcgccgccgcacatgaacaccgtcaccgctgcggcggcggcggccatcgcctcggaccccaacttcacggtggcgctggcggcggccatcacctccatcataggcggcggaggccatccagttccgattccaattcatcatggcgggcaggggcaaggacgacagcagcagggcctgaccccgacgagtaacagcaacgccaacaacaacaatgcggtggtcacgagcagcagcaacaacactgccaccagcaacatttatgtcactgaagaatttggtcactgaatacagatctggttagagatatctggtggcaatggtccaatcaaagaattgttggacagatc

SEQ ID NO: 33257 - DNA, 2361 bp, Zea Mays
ttggtcgcctttaattttagcgccgccccgcccgcgccgccgccgacaaatatacaggcaaaatatttccggtcctcaaagctcccgcccgccctccttccctccctccctccggcgccagtccaggcacaggcaggcttcagtctccagagatggcgaggaacgagcccctagacttcgagaacgaggacgatccgctcctccccgccccgcgccccgccaagaggagcaaggtcatcggcatggatgatctcctgctggattactttcaatctggtaaaaaggacaagctcaaagttaaggctgccaagtctaagcatggccccaaaggaggatatgattcaggtgaggaagacgacagggctacacagcaagagattacagtctgcaaaatatttgaggaagttcagcaaaagggcaaagtgatggatgctagagacgatgtacccccatggggtcaacaattttttagatgccagaaccccccctcaaatcttagcaatggcggagttgagaattgtcatctcctgcaatcattctctgcaattgaagatataggttttgatctagagatgcatcaaggagaggggttcctcgaaggcatgctgttggatggatggcttctgaatttggttcgcatatgtggttttgttgaagactctgtagcatcgtggacgctgaccaacttgttgcattcacccaatgagaaattacaagtttctgcagctgacttttgggatggcattctttccttggatgaggctggtgaaccgttggtcaaccttgggtattttccaagttactctgttctaaaacgggctatgctgagctatggatatctatttgatacttcaggcactaaggcttcaatctctggaagcactgctgcaggtggccctgatgatagtctgcctcataacatcattgcttggttaagagttgtatctgcttgctgcaaaatcagttcacaagaagagcaaaaagacatactcaaacaaacaaggaacaagagtctacaacacacaacataaactatcttcagagtttctctatgcccgttgacttcaccatcttgtggtggaaattatgcaacaacttgcatagtatcaacatcacagactctagccaatcatggtccgagaatggctccattaaagcaccgcaagggagcagggtgatttactgttgtaagactattgaagggcatatagcttttcccccctgtcattgatgctaaaagtgcattccatcttctcgccttctgaggcagaagaacttcttgctattgccatttccctctttttggaccgtcgacttgaagggttgctgcttgttttgggagactgcctgaattcacttatattatacttcaatacgagtgagtgggaaactagctgtgtgatggtggctgaatcaattgctcagagggtcacactggacctcaattgtttaagggttgttgactgcatcactggtacaaataagcgcagcaaaatcctaaggagtcaggtggcacttcagctgctgaagatcagctttgggcttaaggtggcgaatgttgagaagattttgaagctagtcacatccatcaacgtgaaggagaaagaatgtgacttcttcaggctttatgtgtatctagtattgatggacaacttgctcttctcaagtgatgcatttagagataagactgggatggttgatgcttggcggaattatctgcgcaactgttccacccaaattgggtgcacggactggagattctatgctccaaaggcccgaaacaaggcttcttatcttctgcaaggttcaatcttgaaaaaaagcagtggcgatggtaaaagttgtgtccggtaatcaaaggggaccaaatgtctggtgcagcagtgcccaggttgtggttccattcgatgggcaacggcgaagtgctcatatcattccatgttttatgtacaattcttttttagttgttgtgttttagttcaaaaatgaactagcgagcgacaaatattcgagaacagagttagcagccagatttagaggggtgttgattgatgtatctgtgggggtgcttctgcttggttgattgacagaaacaaaaaggaaagagagcagcaagggatgattgggtgcagcctggagggggatgttttgtttatctcgtgttattaggttcttctccaactggctggttagctggctggccagattccgagcatcgttttcggacttgtctgctggtgtgcacatggtctggagtctggacagccaggctcaagaatctttacgttgtgttggctgtagctcaagcaagcgtaccagtatactgcgttattatctccatgatgaataaaataatgaatg

SEQ ID NO: 33258 - DNA, 1066 bp, Zea Mays
aaaaacctctgcttctgtgttcatttggtcttgagaaatatgaaaagtgcattccatcttctcgccttctgaggcagaagaacttcttgctattgccatttccctctttttggaccgtcgacttgaagggttgctgcttgttttgggagactgcctgaattcacttatattatacttcaatacgagtgagtgggaaactagctgtgtgatggtggctgaatcaattgctcagagggtcacactggacctcaattgtttaagggttgttgactgcatcactggtacaaataagcgcagcaaaatcctaaggagtcaggtggcacttcagctgctgaagatcagctttgggcttaaggtggcgaatgttgagaagattttgaagctagtcacatccatcaacgtgaaggagaaagaatgtgacttcttcaggctttatgtgtatctagtattgatggacaacttgctcttctcaagtgatgcatttagagataagactgggatggttgatgcttggcggaattatctgcgcaactgttccacccaaattgggtgcacggactggagattctatgctccaaaggcccgaaacaaggcttcttatcttctgcaaggttcaatcttgaaaaaaagcagtggcgatggtaaaagttgtgtccggtaatcaaaggggaccaaatgtctggtgcagcagtgcccaggttgtggttccattcgatgggcaacggcgaagtgctcatatcattccatgttttatgtacaattcttttttagttgttgtgttttagttcaaaaatgaactagcgagcgacaaatattcgagaacagagttagcagccagatttagaggggtgttgattgatgtatctgtgggggtgcttctgcttggttgattgacagaaacaaaaaggaaagagagcagcaagggatgattgggtgcagcctggagggggatgttttgtttatctcgtgttattaggttcttctccaactggctggttagctggctggccagattccgagcatcgttttcggacttgtctgctggtgtgcacatggtctggagtct

SEQ ID NO: 33259 - DNA, 2075 bp, Zea Mays
tacaggcaaaatatttccggtcctcaaagctcccgcccgccctccttccctccctccctccggcgccagtccaggcacaggcaggcttcagtctccagagatggcgaggaacgagcccctagacttcgagaacgaggacgatccgctcctccccgccccgcgccccgccaagaggagcaaggtcatcggcatggatgatctcctgctggattactttcaatctggtaaaaaggacaagctcaaagttaaggctgccaagtctaagcatggccccaaaggaggatatgattcaggtgaggaagacgacagggctacacagcaagagattacagtctgcaaaatatttgaggaagttcagcaaaagggcaaagtgatggatgctagagacgatgtacccccatggggtcaacaattttttagatgccagaaccccccctcaaatcttagcaatggcggagttgagaattgtcatctcctgcaatcattctctgcaattgaagatataggttttgatctagagatgcatcaaggttcattatgttcccacttcccactgtgaaatgttctattttttaaataacataaaacccaccagtgtttgaattggttcaaccttttgttctctttcactgtgttgtatgtttatatctgttagtcaatattaaaattgatcccctgttctatgtttttttgctttgtcacttgcagttaattttggcgtcttcctcatgtttttgtgtaggagaggggttcctcgaaggcatgctgttggatggatggcttctgaatttggttcgcatatgtggttttgttgaagactctgtagcatcgtggacgctgaccaacttgttgcattcacccaatgagaaattacaagtttctgcagctgacttttgggatggcattctttccttggatgaggctggtgaaccgttggtcaaccttgggtattttccaagttactctgttctaaaacgggctatgctgagctatggatatctatttgatacttcaggcactaaggcttcaatctctggaagcactgctgcagaaaagtgcattccatcttctcgccttctgaggcagaagaacttcttgctattgccatttccctctttttggaccgtcgacttgaagggttgctgcttgttttgggagactgcctgaattcacttatattatacttcaatacgagtgagtgggaaactagctgtgtgatggtggctgaatcaattgctcagagggtcacactggacctcaattgtttaagggttgttgactgcatcactggtacaaataagcgcagcaaaatcctaaggagtcaggtggcacttcagctgctgaagatcagctttgggcttaaggtggcgaatgttgagaagattttgaagctagtcacatccatcaacgtgaaggagaaagaatgtgacttcttcaggctttatgtgtatctagtattgatggacaacttgctcttctcaagtgatgcatttagagataagactgggatggttgatgcttggcggaattatctgcgcaactgttccacccaaattgggtgcacggactggagattctatgctccaaaggcccgaaacaaggcttcttatcttctgcaaggttcaatcttgaaaaaaagcagtggcgatggtaaaagttgtgtccggtaatcaaaggggaccaaatgtctggtgcagcagtgcccaggttgtggttccattcgatgggcaacggcgaagtgctcatatcattccatgttttatgtacaattcttttttagttgttgtgttttagttcaaaaatgaactagcgagcgacaaatattcgagaacagagttagcagccagatttagaggggtgttgattgatgtatctgtgggggtgcttctgcttggttgattgacagaaacaaaaaggaaagagagcagcaagggatgattgggtgcagcctggagggggatgttttgtttatctcgtgttattaggttcttctccaactggctggttagctggctggccagattccgagcatcgttttcggacttgtctgctggtgtgcacatggtctggagtct

SEQ ID NO: 33260 - DNA, 2885 bp, Zea Mays
tacaggcaaaatatttccggtcctcaaagctcccgcccgccctccttccctccctccctccggcgccagtccaggcacaggcaggcttcagtctccagagatggcgaggaacgagcccctagacttcgagaacgaggacgatccgctcctccccgccccgcgccccgccaagaggagcaaggtcatcggcatggatgatctcctgctggattactttcaatctggtaaaaaggacaagctcaaagttaaggctgccaagtctaagcatggccccaaaggaggatatgattcaggtgaggaagacgacagggctacacagcaagagattacagtctgcaaaatatttgaggaagttcagcaaaagggcaaagtgatggatgctagagacgatgtacccccatggggtcaacaattttttagatgccaggtcgactctaactttatcttctgtttaccattttcagtccaccagatgctttccctttcttgatcaccagccactaagttattcatccttacagaaccccccctcaaatcttagcaatggcggagttgagaattgtcatctcctgcaatcattctctgcaattgaagatataggttttgatctagagatgcatcaaggttcattatgttcccacttcccactgtgaaatgttctattttttaaataacataaaacccaccagtgtttgaattggttcaaccttttgttctctttcactgtgttgtatgtttatatctgttagtcaatattaaaattgatcccctgttctatgtttttttgctttgtcacttgcagttaattttggcgtcttcctcatgtttttgtgtaggagaggggttcctcgaaggcatgctgttggatggatggcttctgaatttggttcgcatatgtggttttgttgaagactctgtagcatcgtggacgctgaccaacttgttgcattcacccaatgagaaattacaagtttctgcagctgacttttgggatggcattctttccttggatgaggctggtgaaccgttggtcaaccttgggtattttccaagttactctgttctaaaacgggctatgctgagctatggatatctatttgatacttcaggcactaaggcttcaatctctggaagcactgctgcaggtggccctgatgatagtctgcctcataacatcattgcttggttaagagttgtatctgcttgctgcaaaatcaggtacaaattttttaatacactggatatttttgcttagtatctcagcttgcacacttacacaagcctaaactcatcactcattagcatagttaacatggcaacagcatatcaaacaaagctaagcgtactaacttgaaaattttatcatttttctcaacactataaaatataacagaattcttccaccccccaaatataacaacacactgctcgtaaagtaactcatgtcaaagttgcacttatactttttttggttaagtggcagtgcagtaaataacattcgtatttcaccatataatagtcttgttgaaaaaaatctcagcttttattgaaagctaatgacagtctgtgtcatacaactgtggaaaccagttcacaagaagagcaaaaagacatactcaaacaaacaaggaacaagagtctacaacacacaacataaactatcttcagagtttctctatgcccgttgacttcaccatcttgtggtggaaattatgcaacaacttgcatagtatcaacatcacagactctagccaatcatggtccgagaatggctccattaaagcaccgcaagggagcagggtgatttactgttgtaagactattgaagggcatatagcttttcccccctgtcattgatgctaaaagtgcattccatcttctcgccttctgaggcagaagaacttcttgctattgccatttccctctttttggaccgtcgacttgaagggttgctgcttgttttgggagactgcctgaattcacttatattatacttcaatacgagtgagtgggaaactagctgtgtgatggtggctgaatcaattgctcagagggtcacactggacctcaattgtttaagggttgttgactgcatcactggtacaaataagcgcagcaaaatcctaaggagtcaggtggcacttcagctgctgaagatcagctttgggcttaaggtggcgaatgttgagaagattttgaagctagtcacatccatcaacgtgaaggagaaagaatgtgacttcttcaggctttatgtgtatctagtattgatggacaacttgctcttctcaagtgatgcatttagagataagactgggatggttgatgcttggcggaattatctgcgcaactgttccacccaaattgggtgcacggactggagattctatgctccaaaggcccgaaacaaggcttcttatcttctgcaaggttcaatcttgaaaaaaagcagtggcgatggtaaaagttgtgtccggtaatcaaaggggaccaaatgtctggtgcagcagtgcccaggttgtggttccattcgatgggcaacggcgaagtgctcatatcattccatgttttatgtacaattcttttttagttgttgtgttttagttcaaaaatgaactagcgagcgacaaatattcgagaacagagttagcagccagatttagaggggtgttgattgatgtatctgtgggggtgcttctgcttggttgattgacagaaacaaaaaggaaagagagcagcaagggatgattgggtgcagcctggagggggatgttttgtttatctcgtgttattaggttcttctccaactggctggttagctggctggccagattccgagcatcgttttcggacttgtctgctggtgtgcacatggtctggagtct

SEQ ID NO: 33261 - DNA, 2104 bp, Zea Mays
tacaggcaaaatatttccggtcctcaaagctcccgcccgccctccttccctccctccctccggcgccagtccaggcacaggcaggcttcagtctccagagatggcgaggaacgagcccctagacttcgagaacgaggacgatccgctcctccccgccccgcgccccgccaagaggagcaaggtcatcggcatggatgatctcctgctggattactttcaatctggtaaaaaggacaagctcaaagttaaggctgccaagtctaagcatggccccaaaggaggatatgattcaggtgaggaagacgacagggctacacagcaagagattacagtctgcaaaatatttgaggaagttcagcaaaagggcaaagtgatggatgctagagacgatgtacccccatggggtcaacaattttttagatgccaggagaggggttcctcgaaggcatgctgttggatggatggcttctgaatttggttcgcatatgtggttttgttgaagactctgtagcatcgtggacgctgaccaacttgttgcattcacccaatgagaaattacaagtttctgcagctgacttttgggatggcattctttccttggatgaggctggtgaaccgttggtcaaccttgggtattttccaagttactctgttctaaaacgggctatgctgagctatggatatctatttgatacttcaggcactaaggcttcaatctctggaagcactgctgcaggtggccctgatgatagtctgcctcataacatcattgcttggttaagagttgtatctgcttgctgcaaaatcagttcacaagaagagcaaaaagacatactcaaacaaacaaggaacaagagtctacaacacacaacataaactatcttcagagtttctctatgcccgttgacttcaccatcttgtggtggaaattatgcaacaacttgcatagtatcaacatcacagactctagccaatcatggtccgagaatggctccattaaagcaccgcaagggagcagggtgatttactgttgtaagactattgaagggcatatagcttttcccccctgtcattgatgctaaaagtgcattccatcttctcgccttctgaggcagaagaacttcttgctattgccatttccctctttttggaccgtcgacttgaagggttgctgcttgttttgggagactgcctgaattcacttatattatacttcaatacgagtgagtgggaaactagctgtgtgatggtggctgaatcaattgctcagagggtcacactggacctcaattgtttaagggttgttgactgcatcactggtacaaataagcgcagcaaaatcctaaggagtcaggtggcacttcagctgctgaagatcagctttgggcttaaggtggcgaatgttgagaagattttgaagctagtcacatccatcaacgtgaaggagaaagaatgtgacttcttcaggctttatgtgtatctagtattgatggacaacttgctcttctcaagtgatgcatttagagataagactgggatggttgatgcttggcggaattatctgcgcaactgttccacccaaattgggtgcacggactggagattctatgctccaaaggcccgaaacaaggcttcttatcttctgcaaggttcaatcttgaaaaaaagcagtggcgatggtaaaagttgtgtccggtaatcaaaggggaccaaatgtctggtgcagcagtgcccaggttgtggttccattcgatgggcaacggcgaagtgctcatatcattccatgttttatgtacaattcttttttagttgttgtgttttagttcaaaaatgaactagcgagcgacaaatattcgagaacagagttagcagccagatttagaggggtgttgattgatgtatctgtgggggtgcttctgcttggttgattgacagaaacaaaaaggaaagagagcagcaagggatgattgggtgcagcctggagggggatgttttgtttatctcgtgttattaggttcttctccaactggctggttagctggctggccagattccgagcatcgttttcggacttgtctgctggtgtgcacatggtctggagtct

SEQ ID NO: 33262 - DNA, 1970 bp, Zea Mays
tacaggcaaaatatttccggtcctcaaagctcccgcccgccctccttccctccctccctccggcgccagtccaggcacaggcaggcttcagtctccagagatggcgaggaacgagcccctagacttcgagaacgaggacgatccgctcctccccgccccgcgccccgccaagaggagcaaggtcatcggcatggatgatctcctgctggattactttcaatctggtaaaaaggacaagctcaaagttaaggctgccaagtctaagcatggccccaaaggaggatatgattcaggtgaggaagacgacagggctacacagcaagagattacagtctgcaaaatatttgaggaagttcagcaaaagggcaaagtgatggatgctagagacgatgtacccccatggggtcaacaattttttagatgccagaaccccccctcaaatcttagcaatggcggagttgagaattgtcatctcctgcaatcattctctgcaattgaagatataggttttgatctagagatgcatcaagttaattttggcgtcttcctcatgtttttgtgtaggagaggggttcctcgaaggcatgctgttggatggatggcttctgaatttggttcgcatatgtggttttgttgaagactctgtagcatcgtggacgctgaccaacttgttgcattcacccaatgagaaattacaagtttctgcagctgacttttgggatggcattctttccttggatgaggctggtgaaccgttggtcaaccttgggtattttccaagttactctgttctaaaacgggctatgctgagctatggatatctatttgatacttcaggcactaaggcttcaatctctggaagcactgctgcaggtggccctgatgatagtctgcctcataacatcattgcttggttaagagttgtatctgcttgctgcaaaatcagaaaagtgcattccatcttctcgccttctgaggcagaagaacttcttgctattgccatttccctctttttggaccgtcgacttgaagggttgctgcttgttttgggagactgcctgaattcacttatattatacttcaatacgagtgagtgggaaactagctgtgtgatggtggctgaatcaattgctcagagggtcacactggacctcaattgtttaagggttgttgactgcatcactggtacaaataagcgcagcaaaatcctaaggagtcaggtggcacttcagctgctgaagatcagctttgggcttaaggtggcgaatgttgagaagattttgaagctagtcacatccatcaacgtgaaggagaaagaatgtgacttcttcaggctttatgtgtatctagtattgatggacaacttgctcttctcaagtgatgcatttagagataagactgggatggttgatgcttggcggaattatctgcgcaactgttccacccaaattgggtgcacggactggagattctatgctccaaaggcccgaaacaaggcttcttatcttctgcaaggttcaatcttgaaaaaaagcagtggcgatggtaaaagttgtgtccggtaatcaaaggggaccaaatgtctggtgcagcagtgcccaggttgtggttccattcgatgggcaacggcgaagtgctcatatcattccatgttttatgtacaattcttttttagttgttgtgttttagttcaaaaatgaactagcgagcgacaaatattcgagaacagagttagcagccagatttagaggggtgttgattgatgtatctgtgggggtgcttctgcttggttgattgacagaaacaaaaaggaaagagagcagcaagggatgattgggtgcagcctggagggggatgttttgtttatctcgtgttattaggttcttctccaactggctggttagctggctggccagattccgagcatcgttttcggacttgtctgctggtgtgcacatggtctggagtct

SEQ ID NO: 33263 - DNA, 1867 bp, Zea Mays
tacaggcaaaatatttccggtcctcaaagctcccgcccgccctccttccctccctccctccggcgccagtccaggcacaggcaggcttcagtctccagagatggcgaggaacgagcccctagacttcgagaacgaggacgatccgctcctccccgccccgcgccccgccaagaggagcaaggtcatcggcatggatgatctcctgctggattactttcaatctggtaaaaaggacaagctcaaagttaaggctgccaagtctaagcatggccccaaaggaggatatgattcaggtgaggaagacgacagggctacacagcaagagattacagtctgcaaaatatttgaggaagttcagcaaaagggcaaagtgatggatgctagagacgatgtacccccatggggtcaacaattttttagatgccagttaattttggcgtcttcctcatgtttttgtgtaggagaggggttcctcgaaggcatgctgttggatggatggcttctgaatttggttcgcatatgtggttttgttgaagactctgtagcatcgtggacgctgaccaacttgttgcattcacccaatgagaaattacaagtttctgcagctgacttttgggatggcattctttccttggatgaggctggtgaaccgttggtcaaccttgggtattttccaagttactctgttctaaaacgggctatgctgagctatggatatctatttgatacttcaggcactaaggcttcaatctctggaagcactgctgcaggtggccctgatgatagtctgcctcataacatcattgcttggttaagagttgtatctgcttgctgcaaaatcagaaaagtgcattccatcttctcgccttctgaggcagaagaacttcttgctattgccatttccctctttttggaccgtcgacttgaagggttgctgcttgttttgggagactgcctgaattcacttatattatacttcaatacgagtgagtgggaaactagctgtgtgatggtggctgaatcaattgctcagagggtcacactggacctcaattgtttaagggttgttgactgcatcactggtacaaataagcgcagcaaaatcctaaggagtcaggtggcacttcagctgctgaagatcagctttgggcttaaggtggcgaatgttgagaagattttgaagctagtcacatccatcaacgtgaaggagaaagaatgtgacttcttcaggctttatgtgtatctagtattgatggacaacttgctcttctcaagtgatgcatttagagataagactgggatggttgatgcttggcggaattatctgcgcaactgttccacccaaattgggtgcacggactggagattctatgctccaaaggcccgaaacaaggcttcttatcttctgcaaggttcaatcttgaaaaaaagcagtggcgatggtaaaagttgtgtccggtaatcaaaggggaccaaatgtctggtgcagcagtgcccaggttgtggttccattcgatgggcaacggcgaagtgctcatatcattccatgttttatgtacaattcttttttagttgttgtgttttagttcaaaaatgaactagcgagcgacaaatattcgagaacagagttagcagccagatttagaggggtgttgattgatgtatctgtgggggtgcttctgcttggttgattgacagaaacaaaaaggaaagagagcagcaagggatgattgggtgcagcctggagggggatgttttgtttatctcgtgttattaggttcttctccaactggctggttagctggctggccagattccgagcatcgttttcggacttgtctgctggtgtgcacatggtctggagtct

SEQ ID NO: 33264 - DNA, 2196 bp, Zea Mays
cgccctttggtcgcctttaattttagcgccgccccgcccgcgccgccgccgacaaatatacaggcaaaatatttccggtcctcaaagctcccgcccgccctccttccctccctccctccggcgccagtccaggcacaggcaggcttcagtctccagagatggcgaggaacgagcccctagacttcgagaacgaggacgatccgctcctccccgccccgcgccccgccaagaggagcaaggtcatcggcatggatgatctcctgctggattactttcaatctggtaaaaaggacaagctcaaagttaaggctgccaagtctaagcatggccccaaaggaggatatgattcaggtgaggaagacgacagggctacacagcaagagattacagtctgcaaaatatttgaggaagttcagcaaaagggcaaagtgatggatgctagagacgatgtacccccatggggtcaacaattttttagatgccagttaattttggcgtcttcctcatgtttttgtgtaggagaggggttcctcgaaggcatgctgttggatggatggcttctgaatttggttcgcatatgtggttttgttgaagactctgtagcatcgtggacgctgaccaacttgttgcattcacccaatgagaaattacaagtttctgcagctgacttttgggatggcattctttccttggatgaggctggtgaaccgttggtcaaccttgggtattttccaagttactctgttctaaaacgggctatgctgagctatggatatctatttgatacttcaggcactaaggcttcaatctctggaagcactgctgcaggtggccctgatgatagtctgcctcataacatcattgcttggttaagagttgtatctgcttgctgcaaaatcagttcacaagaagagcaaaaagacatactcaaacaaacaaggaacaagagtctacaacacacaacataaactatcttcagagtttctctatgcccgttgacttcaccatcttgtggtggaaattatgcaacaacttgcatagtatcaacatcacagactctagccaatcatggtccgagaatggctccattaaagcaccgcaagggagcagggtgatttactgttgtaagactattgaagggcatatagcttttcccccctgtcattgatgctaaaagtgcattccatcttctcgccttctgaggcagaagaacttcttgctattgccatttccctctttttggaccgtcgacttgaagggttgctgcttgttttgggagactgcctgaattcacttatattatacttcaatacgagtgagtgggaaactagctgtgtgatggtggctgaatcaattgctcagagggtcacactggacctcaattgtttaagggttgttgactgcatcactggtacaaataagcgcagcaaaatcctaaggagtcaggtggcacttcagctgctgaagatcagctttgggcttaaggtggcgaatgttgagaagattttgaagctagtcacatccatcaacgtgaaggagaaagaatgtgacttcttcaggctttatgtgtatctagtattgatggacaacttgctcttctcaagtgatgcatttagagataagactgggatggttgatgcttggcggaattatctgcgcaactgttccacccaaattgggtgcacggactggagattctatgctccaaaggcccgaaacaaggcttcttatcttctgcaaggttcaatcttgaaaaaaagcagtggcgatggtaaaagttgtgtccggtaatcaaaggggaccaaatgtctggtgcagcagtgcccaggttgtggttccattcgatgggcaacggcgaagtgctcatatcattccatgttttatgtacaattcttttttagttgttgtgttttagttcaaaaatgaactagcgagcgacaaatattcgagaacagagttagcagccagatttagaggggtgttgattgatgtatctgtgggggtgcttctgcttggttgattgacagaaacaaaaaggaaagagagcagcaagggatgattgggtgcagcctggagggggatgttttgtttatctcgtgttattaggttcttctccaactggctggttagctggctggccagattccgagcatcgttttcggacttgtctgctggtgtgcacatggtctggagtct

SEQ ID NO: 33265 - DNA, 1708 bp, Zea Mays
tacaggcaaaatatttccggtcctcaaagctcccgcccgccctccttccctccctccctccggcgccagtccaggcacaggcaggcttcagtctccagagatggcgaggaacgagcccctagacttcgagaacgaggacgatccgctcctccccgccccgcgccccgccaagaggagcaaggtcatcggcatggatgatctcctgctggattactttcaatctggtaaaaaggacaagctcaaagttaaggctgccaagtctaagcatggccccaaaggaggatatgattcaggtgaggaagacgacagggctacacagcaagagattacagtctgcaaaatatttgaggaagttcagcaaaagggcaaagtgatggatgctagagacgatgtacccccatggggtcaacaattttttagatgccaggtcgactctaactttatcttctgtttaccattttcagtccaccagatgctttccctttcttgatcaccagccactaagttattcatccttacagaaccccccctcaaatcttagcaatggcggagttgagaattgtcatctcctgcaatcattctctgcaattgaagatataggttttgatctagagatgcatcaaggttcattatgttcccacttcccactgtgaaatgttctattttttaaataacataaaacccaccagtgtttgaattggttcaaccttttgttctctttcactgtgttgtatgtttatatctgttagtcaatattaaaattgatcccctgttctatgtttttttgctttgtcacttgcagttaattttggcgtcttcctcatgtttttgtgtaggagaggggttcctcgaaggcatgctgttggatggatggcttctgaatttggttcgcatatgtggttttgttgaagactctgtagcatcgtggacgctgaccaacttgttgcattcacccaatgagaaattacaagtttctgcagctgacttttgggatggcattctttccttggatgaggctggtgaaccgttggtcaaccttgggtattttccaagttactctgttctaaaacgggctatgctgagctatggatatctatttgatacttcaggcactaaggcttcaatctctggaagcactgctgcaggtggccctgatgatagtctgcctcataacatcattgcttggttaagagttgtatctgcttgctgcaaaatcagttcacaagaagagcaaaaagacatactcaaacaaacaaggaacaagagtctacaacacacaacataaactatcttcagagtttctctatgcccgttgacttcaccatcttgtggtggaaattatgcaacaacttgcatagtatcaacatcacagactctagccaatcatggtccgagaatggctccattaaagcaccgcaagggagcagggtgatttactgttgtaagactattgaagggcatatagcttttcccccctgtcattgatgctaaaagtgcattccatcttctcgccttctgaggcagaagaacttcttgctattgccatttccctctttttggaccgtcgacttgaagggttgctgcttgttttgggagactgcctgaattcacttatattatacttcaatacgagtgagtgggaaactagctgtgtgatggtggctgaatcaattgctcagagtttatgttgatgtaaagtgaacttcat

SEQ ID NO: 33266 - DNA, 1626 bp, Zea Mays
agggattccagcttctggaaccttcctttcgctatacgacctgagttcgcttcaggcagccgccgctctctctctctcccgcgtccgtcccaccttcgcaagccagccacctccctgagaggcctgaccgtgatttcggcgtggcatccaaaggcggtcaagattcgagaggccggaggaaccaagcgtagggcctccgaccccacgtcgtcgtccgcgcgcgccgcccgccgccgcagggagatgggggccgattactacaaggtcctcggcgtcgaccgcggcgccagcgacgacgacctcaagaaggcctatcggaagctcgccatgcgatggcaccccgacaagaactccaccaataagaaggaggcagaaaccaagttcaaggagatctctgtggcatacgaggtccttagcgatcccaagaaacgtgcaatctatgatcagctaggggaagaagggctcaaggggcagccgcccccaggagcaggaggtcctggcacatctcccttcttccctggcggggctcattccaccgctcaccattttaacccgaggagcgcggacgatatatttaaagagttctttggatcccctggcatgggtggcatgagaacggaaccaggatttcaaaggtcaatgtttggcaacgatatcttctcttcgcgcttccgcgctgagggttccaccagtatgcagcagccattgcgcaaggcagctgcaattgagaatccacttccagtcggccttgcagatctctacaagggtgtgacaaaaaagatgaaaatctcaagagagactattgatgccagcgggagaatctcaaacacagaggatattctgacaatacaagtaaaggctggttggaagaagggaacaaggattacatttcctgacaagggaaatgaagctccaaatatgaaacctgctgatattgttttcatcattgatgagaagccccatgatgttttcactcgggagggaaatgatcttgtcgtgactgagaagatctcactggtggaagcactgactggctataccgcacgtgtcactacgcttgacgggcggagcctatcattgcacatcaactcaataatccatccaaagtacgaagaggtgatgcctggagagggcatgccagtgcccaaggaccccacaaagaagggaaatctgcggattaagttcaacataatgttcccctctaggctgacttctgatcagaaggccgggatcaagaggctattgggttcttaggccgccacctcaaatgacatcttctttatgatgaaagttgtttgtgaatattgccagtaatttgtttgtcacagtttagttttttaaagtggtgcccttagttttgccgatgtcctcatttttacccttagtcgtgtttttttttaagggtgaaccttcaccattttattttagtcaggcagagtgttgtgccctttgcattacggtattccattcagttacaggtgaattaataccgctgtgtaccgccaaccggatttacttaaagaagccaaatttgtatcgctgccaattccacaaacagaatttgcagacttttaatcaccagactgggaacaaacaatggaccgactgactcaagatgaaaacaaa

SEQ ID NO: 33267 - DNA, 2194 bp, Zea Mays
agggattccagcttctggaaccttcctttcgctatacgacctgagttcgcttcaggcagccgccgctctctctctctcccgcgtccgtcccaccttcgcaagccagccacctccctgagaggcctgaccgtgatttcggcgtggcatccaaaggcggtcaagattcgagaggccggaggaaccaagcgtagggcctccgaccccacgtcgtcgtccgcgcgcgccgcccgccgccgcagggagatgggggccgattactacaaggtcctcggcgtcgaccgcggcgccagcgacgacgacctcaagaaggcctatcggaagctcgccatgcgatggcaccccgacaagaactccaccaataagaaggaggcagaaaccaagttcaaggagatctctgtggcatacgaggttgcctgcccctccctctcactctccatgtgtttgtcttgccaggattattactgttccaaattcctcgcctttggggcttcgatccattcgctgtccctgtctttgtggttcatgctgacgaacaaaactgcctgtctgttataccggccagctctttggacacagtagtgaattcgatactgcaatctggaccacgcaccaatactgcaaaggatttaactttaagatgagctcgtgataataaaccaatcttagccagggagtaacaagttttagcttatcgatttgaggttctgattatctgcacagctgaattatacatttccctccatgattcgctttcctactgctactcttgcatctgttgtgttgaccaatcctgtgtgcgcctcttaggtccttagcgatcccaagaaacgtgcaatctatgatcagctaggggaagaagggctcaaggggcagccgcccccaggagcaggaggtcctggcacatctcccttcttccctggcggggctcattccaccgctcaccattttaacccgaggagcgcggacgatatatttaaagagttctttggatcccctggcatgggtggcatgagaacggaaccaggatttcaaaggtcaatgtttggcaacgatatcttctcttcgcgcttccgcgctgagggttccaccagtatgcagcagccattgcgcaaggcagctgcaattgagaatccacttccagtcggccttgcagatctctacaagggtgtgacaaaaaagatgaaaatctcaagagagactattgatgccagcggaggatattctgacaatacaagtaaaggctggttggaagaagggaacaaggattacatttcctgacaagggaaatgaagctccaaatatgaaacctgctgatattgttttcatcattgatgagaagccccatgatgttttcactcgggagggaaatgatcttgtcgtgactgagaagatctcactggtggaagcactgactggctataccgcacgtgtcactacgcttgacgggcggagcctatcattgcacatcaactcaataatccatccaaagtacgaagaggtgatgcctggagagggcatgccagtgcccaaggaccccacaaagaagggaaatctgcggattaagttcaacataatgttcccctctaggctgacttctgatcagaaggccgggatcaagaggctattgggttcttaggccgccacctcaaatgacatcttctttatgatgaaagttgtttgtgaatattgccagtaatttgtttgtcacagtttagttttttaaagtggtgcccttagttttgccgatgtcctcatttttacccttagtcgtgtttttttttctaaagttttgctcttccagtgttctatagagcagaagggtaaaactgatgaaaaaaatatgactaagggtaaaaatgaggaacctgacaaaaataagggcacgaattaaaataggttttccggtgggtgggtagttgatgaattgtaaatcccaaacaaaccggccggcccttagcaaccacaacaagggtgaaccttcaccattttattttagtcaggcagagtgttgtgccctttgcattacggtattccattcagttacaggtgaattaataccgctgtgtaccgccaaccggatttacttaaagaagccaaatttgtatcgctgccaattccacaaacagaatttgcagacttttaatcaccagactgggaacaaacaatggaccgactgactcaagatgaaaacaaa

SEQ ID NO: 33268 - DNA, 1868 bp, Zea Mays
gtactgctggtgccagaacgccgggtccaccggcgtcgggtgcgcccacggcgccaggtgccggggcggcgccaggtgacgcggccacacgggcagcatgggagtcgccgctgctgcttcagccgcggcggcgtgcggcggcgggtggccccacacgtgcagcgggcggcagaagcgcggcggcgggaacccgatggtcgtcggcaccacccacggcggcctggcggcgtccgtcgtcgtcgtcgtccttggagctggcggcgcgtacatgtggcgcttctgcgcccaggtggcggcctccgcctcccgcgccatcagctggtgatccacaggcatgcagtgcagtgcagtgcagaggcgccccacaagcaaagcaaagcaagcaagcagctagtagtggccgtagtatgtaatgtatgtaccacctctctttgcaaattaaaagggatcggaaggaatatctgcagtccaatccagtccaagaacaagaagctacatgcaacatcgggatgcatgcctgcctgcccccggcccccattgacaatttgctttgctttcttgcatcgatctctagctgcctgcctgctgctggcctcctgcctctttgctcctgcgtctgcgtgctgctaacataatgcatgcatgcatgccaccacttgtacagttgtacgtttgtttttcaaattagttaatatgcatgctttcacttttaccacacctcagaatcgatcagatcatgctggtgcttgtacagtagtacagatttgtctttgtcgttggcagcgcgcggtaaaagtaaatatgcatgcatgcttgcttgggttgtacgttgttcacatgtccaatagttacatatatatatatacatatatgttggcattcgcaagaactaactaattaacaagctaggaagattcacatgctatgcatacgtacctggaggtggctggcaatgttgtgccttgtgaggcagtccgtgcccatgatctccaggatcctggacggcacggccttgtcgatgcccagctgctccaccgcctgcacgaaccgccggtgcagctccggcgtccagtccacctgtaccttcaccttgcgcttgccgccgttggagttcttgcccgccgacttcttcttgctgctgtggccctctgccgacgccgacgacttgttggccccggacccggcaggagaagaatcctcctcctccgtcgtcgtcgtcgtcgtcgtcgtctgcagctttcttctggcggcggctactgctacacctttgtcgtcaccacatgtttgctccaacgacgacgacggcttctcttgtgctactgccgccgccggctggtcgtcggcgccgaatactgccactgccagcaggtcgtccgcaggaggggtggacgagaactcggcgaggagctccgtggtgtctacctccaggtcggggaggatgtccccgtcagcgtcgaagaagggcacgtcgcagctgaagtcgatgtagtccaggaggttgtcgtccaccatggcgaagcagtcgccggacgtcgggaacaccacatggtggtcgccgacgaagccgccgccgccgccgcagtgctgctccgccttgctgccgctgctagtagggccgcgcagcgtcgacacctcaagcatggatagggccgggtgtgtatcggtggagatcgagatatatgttcgatcgtatatatcaagattattctagactaataaagcaataataagcacgtagctagcttgtattatattgtatagtctgcgggcttgatctagctagctagctagagactggatagactgctagcagcttcgatctaatctgggacgacgacgacatagaatagaagaagagaaagatgaga

SEQ ID NO: 33269 - DNA, 1017 bp, Zea Mays
tggattgaatcaatcaattacttttatcgtacaagtacacactagagactatggtgttgtcacttttagtagcagggtgctaaagagagattgtattcctgagttcattcatttccgtctctgtaactggctatctgcttcaagtgaactcttgacattcttttcctgcatagacagccttccagtcttcatctttctaattatgcattagttcaatgacatgtttagcatgaacgaaacactatttggatgtgcttggaaaataaattttactttattattacgagtctgcacaatggggtctaggatgcagtctatggtaattggctaattgccttctgcacctaactgctagttagtggtctggaacttgtttagcatacagtaggtaacttttcagttcaattccacacacacaaacaaatatattatgttggtccgagtgaccaacagagttacagaaaagcaattccatattggtgggttatgtctcattattatatctagttaacaggtaacccaccgcttttcctaaattatagtttggttgtgaaggctgttgaatacctcaggagtcttctgtcatatacttacaaataggactccatgtagtttcagtagtgcttcttgtagccattatatgtaaatttgcaacctggtttttattaaaccactccttaagttttaggggtgctgatcaccagtgggatggtaatctttttgcaactgttggtgctcaagttgatatatgggatcctgacaggtcggagccagtaaatagcttcgagtggggtaaacatacggttctctctgttctatttgatcctggggattgtaatattttgattaaatcagtgatcggagtctaacactctatgacgacctgcccatgtcatcaccagctagaaagctaataatgaagacaagctaaggtgcaattcagtatgctggaaccccagagagcccatgaacttcactgctgtaagattcatatatgggatcctgacaggaaaggaa

SEQ ID NO: 33270 - DNA, 4325 bp, Zea Mays
gttgctcgttggttccagttccaggcacaggcagtcaggcccttcttcggcggcgggcggcgagggtttggaggagggcggtgcgcaacgcaacaccctagctctgcggcggcgtattctcttcaagtggctcgctgccttgccgaccccgcgagcgcaatgagggtgaaagtgatttcgcgccccaccgacgagttcacgcgctagcgcagtcaggacctgcaggtagggggacccccctgataagatgctcctagatttttaaccaattcggcaattaggctataccgtcctgccacttccattgagggtgtagaacctcgcattctctacaaatcaagtttctgcatcgagtgtcagtttgctgttgcagcataataaccatacgtaaatttgaaatcttcagcatgtaccatcaaatgtacacagatgtggtacatgattgtgatccttgtagtttgtcggatgctacttccagcacattagttgacgcctttcaaatatggccccattgcatgtcaaccatttaggcttcgaactttactttcctccaccactgaagttcccagtggcacttgctggtctctacagaaagtattccgcaattatgatccagcgcttcgtagtcaagagaaagctgttgaatacactcgggcacttattgctgcaaagttagagaaggcatgctacttcttctttacctgcattcatgttttgtttatattgggacaataattcttctgctctccttgtgcagatatttgctaagccatttgtcagggctatgaatggccatattgatgacatatcatgcatggcgaaaaactccaatcatttgttagcaatattttctggttccacggtgtttgacaccaaaatgagccggcggactgtccggccctgaggccggacggtccgcggtccggacggtccgcgcatgcgcagaacagattagggttccgagttttgtgctatggttgttagctaaaatcatgggataagctcggaaattagtttgtaaagggtccagcccccctcctctataaatagagaggtatacggccgatttatgatcatcaatcgaatcaatacaacttctatttcgcattttatcttaggagtagttctagtctagtttaggtttagctatccaatccccaaattctccgcctctcctcgactctacgtcgattagaggagtctaggtcggccggcccgagcctagacaccacctaggatctctcctccccgacggggtccctcccgggagcgagatccaggcgccgccggcgatcttccgccgcccctgcgcacgcgcggaccgtccggcaccagggcgcggaccgtccggacgtcaggcaggaaaacctagcctctgcgccaggtcgcggaccgtccggccccaggccgcggaccgtccgcgcctgaccagagagcaccgccgctggttctcttgagtaattggcgcctccaaaaaggtgtcaacatactttttggcgactccgctggggacaacacatatagacctatcaaatcggccctcaatggccggttcaaaagatagctctgaggtttccaccagcaatatcttcacaccgacttgggaagccttgccggctgaagaacagctcctgttcgaggagcgccaggagcagctgatccaagaagcaaaggcgaagttcctggctgacttcaaaagtggacaggaacaacaaagtcgttcggcaacgggcgacagatctggcttcgctccgacctactacgattaccccaaatgtaagtagcaccaacgaactccaatctcttaaagcttacatagacgaacagcgagaacagatgcaaaatatcataggggttatgcaaaacgattgtaggagactagtacgtgcatttgataaatctagtatagcaaattttccttcacacgaggttgaattaggagataatacatgtaatacatcggttaaaggttgtcacgaccagtcacaacccccttatgggatgccgatggacacgtaccctgagcaaacgcaaatcggcagtaaaccagccgatctacacatgtctggaccgtccgctcgcgagcgcggaccgtccgggtcagccacagtcgggcccatttttaatgagttacctagacacgcacccgagccaccacatagggcaccgaatttaaactatccagtcggacggtccgcatacaacgacggacggtccgcatataatcacggacggtccgggtacgtatccggacagtccgcgcatgagtcttttgagggggattattacctgaatcctcgcctgtcccagcaacacttcccatcacattatgcaatgcaccagcccattaattcaggatccagagcccaggaaagctttccggtcccacctagaaggccggaaagaaacgatcaaacatatgagccatatagggcaaatagaaatgcaccacgtagctcaaaccaatggggggaacgacaacatactaacatgcaaccaaccccacctatgtttgaccagagagccggtggtcttgcaccggctgccattggtatagtgagggaagaaatagccggggcgttccgagataagctcagagtaagcatgatccctggggggcaatcatatcggaagccttatgacagccgatttgatcaccacccatacccacagggaaccaggatacccgagtttgcaaagttttcgggtgaccaaggaaagagcacgcgtgagcacataggccagttcctagcacaattaggagaattggccgacaccgaagcattccgtgtgcgtttattttcattatccttaacagggactgcattcacatggtatgccacgctccctcctaattccattttgtcatggggagacttagagcaaaaatttcatgaacatttcttctctggtgattatgagctagatttagtagacttagtgaccctacgacaagaaaaggatgaatcggttagtgattatatccggagattccaggatacgagaaaccgatgctttcaaattcatttaacagataaacaactggcgggaatagcctttgatggattgcgttattatttaaaagagagattagaaggcatccagttctttactctagcacaattacatcagagagcttcggcttgtgaagccgaagcaaagaactagtcagaacggttcatcataatgtccctatagtagaacacaatcaaagtagttcagacgatgaaccaaagaaagtttacactgccgaaatagtttggcccgagcaggccaaatcttcggcttgctactccttgcagtcagttcagaaggaacgacaggaggaggttaagtttacatttaatgtcggcaaatgtgataagatattcgatgaattactaaaaaatggtaacattaaaattgattatatcgttccacctgccgacgaactaaagcgtcgcgcatactgcaagtggcacaactcattttcccatgccactaatgattgtaatgtgttccgacgacaaattcaatcggccattaatgagggacgattgaaatttcaggaggacacggagcccttcccaatgaatgtgatcgactttaatggcaaaaaggtcctaattcggcccaacacagccgataagggcaaagacaaagaagtcatcatcggcaacgcacgggaggccgatggaaacaacaaaatttcttgcaggaaagtgatggccgagaagactcctgatggaggggagacactgaaggtaactgtttgacaccaaaatgagccggcggactgtccggccctgaggccggacggtccgcggtcatcacaaactccagcgctgggggcaagcacagacaaggagatatgcgcgagaacccatactacgcatcgcggacggtccggtgtccaggcgcggacggtccgtaacatcaccggacggtccggagcgttccagcggacggtccggcaacgccgaagagccgcggcgaccacgtaccttcaaaccacgacgaccaaaaataggtacgtgaaaaactaacacgttcaaggcaactggtcggttgggtaaaatctagcccgacctttgatcaattattgtctaaatatgtgaaaaagaaggctggccccagcgaccggccaccaaagggacctcgcttacccacccaggtgcgacggcaggttaggccgattggaccaccacaccaatcggaaaggacgagaggtcataatgttcaattaagacctaacatacctgcatggacacctccaccaccatatccatctatgccatattcatacacatacatacctccaccatacgtcccaaatcaaatgtggg

SEQ ID NO: 33271 - DNA, 3037 bp, Zea Mays
cccggccttcgttggtgcgcaaacgacgacgacgacgacgtgcccagtgcgcggccggccggggattcatatcgaatcggatcggaggggaagcaggagcccgcagggggcggctagcgctgtctcaattcaaggagctgaggacgacctgtccgtccggagctgatcgagaaacggaggggcggttccagtttcagtccagctagctagctagctagaagatcccattcgctgacagatgggttcctacatccaaggagatgatgaggtccctgtacgagctggacgcgcacctggaccgcttcctccggtcggccgcggcggcgcgcgtgggcacggccccgttcccgcgcgaggcgctgcggcgcatcctgatccagatgaccgccgcctcgggctgccgcatgggctccatccgctactggctcagctccgggcccggcgacttcctgctgtcctccaggggctgcccgtcgccggcgttctacggcgtggtgatcgcgtcggagtacgagcagtgcggggtggacggcaccggggtgcgcgcggtcacggccacggtgcccatgaagccgccgcagttcgcgaccgtgaagaacgtgaactaccttcccaacgtgctgtccatcatggacgccgaggaccgcggcgccttcgcgtccgtgtgggtggacgaccaagggtacgtggccgagggccccatggtgaacgtggcgttcgtgacgcccgagcgggagctcgtgctcccggccttcgacaagatcctcagcgggtgcacggccaagaggatgctcgcgctggcgcctcgcctcgtggacgccggcctgctcgcgggcgtcagcaccagggacatcacagccgaggacgccaagcgcagcgccgagatggcgttcgtcggcagcggcctccccgtgctgcccgtcgtcgagtgggacggcaaacccatcggagacggttgggaagctgatgccggcgctgtctgatctgctgtgggaggacatgaagtccggtcccgacaggatccccgttccatacaagcagtagcctgagcgaaggcgaagccatgacatgtctctctctctctctctgtgtatgtgtttgcagtcgaatggtgattgccttgcctgaataaaaataaacctctctctgtatatctgagcgaatcgttttggaaatacgagcagattccatccaacagcatgtgactgttcaggttcagcacagcacagcagcagtactccaactgaaatttcggaatgaaaacaggtcatttccaaaacgaaaacgaaattggctggcccacgacatcggggcaatccaggcccggcccaactactcatcgtcatctttattccacacttccactccccatccccacatccaaattcccaatcccaaccccaagtcacactccacctccgcaaccaaacgcgctagggtttccgcaccgcacctctagtcctccacccaccccaccccactaccggcgatggccaccgcggcggcacagggcggtagcgacaagccggcgctccggaagcccgtcttcaccaaggtcgaccagctcaagccgggcactaacgggcacaccctcaccgtcaaggtcgtcagcgccacccccgtgccgggccgcgcgcgcccgggcgcacccgccgccgcctcgtcccgcgcgccgcgcatcgccgagtgcctcgtcggagacgagaccggcgtcatcgtattcaccgcccgcaacgaccaaggtgtgtgtatgtttgtcctgctctccccctccctctatctatctcctctgctgtggatgactagatttcatgatctgccactgctatctgacgacgctacggaggaagatgagaatataaacaagattttattatgtttacttgtgatgactatatatatagatatatataagaaaagctggggagatgaccttgtcttgtgaatttatatcacgattgtgtttggtttgtggatccagcttatcctcatcgtgagttcattccatgaatctggtaaaatcatcccattctcatggttgtactaataatcattaacttgtgtgtgaggaattagggagtggggaatcatttcattctattccacacaaaaaaaaaatactaagcactgcttagggggtcaagtgacatcaatgctttcaaatgtgccattgttaccttgattccaggtttgcatatattagtaaaaggacgaaatcatctatttgtgaactgtatgactgcaccccagagtgtgtactgtgcacgctacatacactatcagcctctcattcatcattggcttgttttcatggttgctatcatgttcaactaattgttctgactgtgattttttcttttggataactttcagtccgtgtgatgtgctatcctcctttgcagttgatttgctgaagcccgatgccacggtgatcttgcgcaatgccaaaatcgacatgttcaaaggatcaatgaggcttgcagtggacaaatgggggcggattgaggctacagagccagccagcttcacagtgaaggaagacaacaacttgtcccttgtagagtatgaattggttaacgtggctgaataaccgtcgaagcgtttctgcccccctttcttctttttcacgcacgccataagatgataagaaaacgaacagcatctcgaagctgagtttatttgttacggtggtcgataaggtcaaggcttctgctgttacacctttggatccaatccattaagatgaattacccttgcatctattgtaattgtgtggttatccaaaaagggtgcatttaatcattactatttttttgacggggtataacaataagccagcaaatgttgctgggccgctgtggcgagccgtccttccccatggcggcgagcttcttcatgatcagctcgtggagcccttccacccgccaggcgaacgtggtggtgtgcagactcctaccagcttcatgttcggtgccatcaccggcatcctcgccggtcatcgtcatgcgcgacttcaagtcgccctacctgtgtccat

SEQ ID NO: 33272 - DNA, 2278 bp, Zea Mays
aaggcaccaagggaaaagagcggtggcctgcttcttttgtcgtttggggcgtcgtcattcccatctcacgctatcacacccggccttcgttggtgcgcaaacgacgacgacgacgacgtgcccagtgcgcggccggccggggattcatatcgaatcggatcggaggggaagcaggagcccgcagggggcggctagcgctgtctcaattcaaggagctgaggacgacctgtccgtccggagctgatcgagaaacggaggggcggttccagtttcagtccagctagctagctagctagaagatcccattcgctgacagatgggttcctacatccaaggagatgatgaggtccctgtacgagctggacgcgcacctggaccgcttcctccggtcggccgcggcggcgcgcgtgggcacggccccgttcccgcgcgaggcgctgcggcgcatcctgatccagatgaccgccgcctcgggctgccgcatgggctccatccgctactggctcagctccgggcccggcgacttcctgctgtcctccaggggctgcccgtcgccggcgttctacggcgtggtgatcgcgtcggagtacgagcagtgcggggtggacggcaccggggtgcgcgcggtcacggccacggtgcccatgaagccgccgcagttcgcgaccgtgaagaacgtgaactaccttcccaacgtgctgtccatcatggacgccgaggaccgcggcgccttcgcgtccgtgtgggtggacgaccaagggtacgtggccgagggccccatggtgaacgtggcgttcgtgacgcccgagcgggagctcgtgctcccggccttcgacaagatcctcagcgggtgcacggccaagaggatgctcgcgctggcgcctcgcctcgtggacgccggcctgctcgcgggcgtcagcaccagggacatcacagccgaggacgccaagcgcagcgccgagatggcgttcgtcggcagcggcctccccgtgctgcccgtcgtcgagtgggacggcaaacccatcggagacgggaaggttgggaagctgatgccggcgctgtctgatctgctgtgggaggacatgaagtccggtcccgacaggatccccgttccatacaagcagtagcctgagcgaaggcgaagccatgacatgtctctctctctctctctgtgtatgtgtttgcagtcgaatggtgattgccttgcctgaataaaaataaacctctctctgtatatctgagcgaatcgttttggaaatacgagcagattccatccaacagcatgtgactgttcaggttcagcacagcacagcagcagtactccaactgaaatttcggaatgaaaacaggtcatttccaaaacgaaaacgaaattggctggcccacgacatcggggcaatccaggcccggcccaactactcatcgtcatctttattccacacttccactccccatccccacatccaaattcccaatcccaaccccaagtcacactccacctccgcaaccaaacgcgctagggtttccgcaccgcacctctagtcctccacccaccccaccccactaccgcgcgccgcgcatcgccgagtgcctcgtcggagacgagaccggcgtcatcgtattcaccgcccgcaacgaccaagttgatttgctgaagcccgatgccacggtgatcttgcgcaatgccaaaatcgacatgttcaaaggatcaatgaggcttgcagtggacaaatgggggcggattgaggctacagagccagccagcttcacagtgaaggaagacaacaacttgtcccttgtagagtatgaattggttaacgtggctgaataaccgtcgaagcgtttctgcccccctttcttctttttcacgcacgccataagatgataagaaaacgaacagcatctcgaagctgagtttatttgttacggtggtcgataaggtcaaggcttctgctgttacacctttggatccaatccattaagatgaattacccttgcatctattgtaattgtgtggttatccaaaaagggtgcatttaatcattactatttttttgacggggtataacaataagccagcaaatgttgctgggccgctgtggcgagccgtccttccccatggcggcgagcttcttcatgatcagctcgtggagcccttccacccgccaggcgaacgtggtggtgtgcagactcctaccagcttcatgttcggtgccatcaccggcatcctcgccggtcatcgtcatgcgcgacttcaagtcgccctacctgtgtccat

SEQ ID NO: 33273 - DNA, 2938 bp, Zea Mays
aaggcaccaagggaaaagagcggtggcctgcttcttttgtcgtttggggcgtcgtcattcccatctcacgctatcacacccggccttcgttggtgcgcaaacgacgacgacgacgacgtgcccagtgcgcggccggccggggattcatatcgaatcggatcggaggggaagcaggagcccgcagggggcggctagcgctgtctcaattcaaggagctgaggacgacctgtccgtccggagctgatcgagaaacggaggggcggttccagtttcagtccagctagctagctagctagaagatcccattcgctgacagatgggttcctacatccaaggagatgatgaggtccctgtacgagctggacgcgcacctggaccgcttcctccggtcggccgcggcggcgcgcgtgggcacggccccgttcccgcgcgaggcgctgcggcgcatcctgatccagatgaccgccgcctcgggctgccgcatgggctccatccgctactggctcagctccgggcccggcgacttcctgctgtcctccaggggctgcccgtcgccggcgttctacggcgtggtgatcgcgtcggagtacgagcagtgcggggtggacggcaccggggtgcgcgcggtcacggccacggtgcccatgaagccgccgcagttcgcgaccgtgaagaacgtgaactaccttcccaacgtgctgtccatcatggacgccgaggaccgcggcgccttcgcgtccgtgtgggtggacgaccaagggtacgtggccgagggccccatggtgaacgtggcgttcgtgacgcccgagcgggagctcgtgctcccggccttcgacaagatcctcagcgggtgcacggccaagaggatgctcgcgctggcgcctcgcctcgtggacgccggcctgctcgcgggcgtcagcaccagggacatcacagccgaggacgccaagcgcagcgccgagatggcgttcgtcggcagcggcctccccgtgctgcccgtcgtcgagtgggacggcaaacccatcggagacgggaaggttgggaagctgatgccggcgctgtctgatctgctgtgggaggacatgaagtccggtcccgacaggatccccgttccatacaagcagtagcctgagcgaaggcgaagccatgacatgtctctctctctctctctgtgtatgtgtttgcagtcgaatggtgattgccttgcctgaataaaaataaacctctctctgtatatctgagcgaatcgttttggaaatacgagcagattccatccaacagcatgtgactgttcaggttcagcacagcacagcagcagtactccaactgaaatttcggaatgaaaacaggtcatttccaaaacgaaaacgaaattggctggcccacgacatcggggcaatccaggcccggcccaactactcatcgtcatctttattccacacttccactccccatccccacatccaaattcccaatcccaaccccaagtcacactccacctccgcaaccaaacgcgctagggtttccgcaccgcacctctagtcctccacccaccccaccccactaccgcgcgccgcgcatcgccgagtgcctcgtcggagacgagaccggcgtcatcgtattcaccgcccgcaacgaccaaggtgtgtgtatgtttgtcctgctctccccctccctctatctatctcctctgctgtggatgactagatttcatgatctgccactgctatctgacgacgctacggaggaagatgagaatataaacaagattttattatgtttacttgtgatgactatatatatagatatatataagaaaagctggggagatgaccttgtcttgtgaatttatatcacgattgtgtttggtttgtggatccagcttatcctcatcgtgagttcattccatgaatctggtaaaatcatcccattctcatggttgtactaataatcattaacttgtgtgtgaggaattagggagtggggaatcatttcattctattccacacaaaaaaaaaatactaagcactgcttagggggtcaagtgacatcaatgctttcaaatgtgccattgttaccttgattccaggtttgcatatattagtaaaaggacgaaatcatctatttgtgaactgtatgactgcaccccagagtgtgtactgtgcacgctacatacactatcagcctctcattcatcattggcttgttttcatggttgctatcatgttcaactaattgttctgactgtgattttttcttttggataactttcagtccgtgtgatgtgctatcctcctttgcagttgatttgctgaagcccgatgccacggtgatcttgcgcaatgccaaaatcgacatgttcaaaggatcaatgaggcttgcagtggacaaatgggggcggattgaggctacagagccagccagcttcacagtgaaggaagacaacaacttgtcccttgtagagtatgaattggttaacgtggctgaataaccgtcgaagcgtttctgcccccctttcttctttttcacgcacgccataagatgataagaaaacgaacagcatctcgaagctgagtttatttgttacggtggtcgataaggtcaaggcttctgctgttacacctttggatccaatccattaagatgaattacccttgcatctattgtaattgtgtggttatccaaaaagggtgcatttaatcattactatttttttgacggggtataacaataagccagcaaatgttgctgggccgctgtggcgagccgtccttccccatggcggcgagcttcttcatgatcagctcgtggagcccttccacccgccaggcgaacgtggtggtgtgcagactcctaccagcttcatgttcggtgccatcaccggcatcctcgccggtcatcgtcatgcgcgacttcaagtcgccctacctgtgtccat

SEQ ID NO: 33274 - DNA, 3214 bp, Zea Mays
cgccatcgcttcctgttcctcttcttccgccgccgccgtacgatcacactagcaccgccagccgcaaggtcccatggacctcgacccggcctatcccccatcagcctgcgccgacgcctggccctttgactcgctcaccacgtccctgctcttctccccgcagctcacgccgataccggccaactcatccttctcctggctcaccccacactcgccgctctggctcttcgaggaccgccacctgctcccgctcgacgcgcccgccgtcttcgaagaggtccagcggccacgctccgtggaaagcagaaccctcggttccaattaaacacagcagcatcccgttcctcgccttacaatcctgcttctttcacccagggaattctcacacttcaagcaagccagctgaacagatcagtcacagatggcagtttcatctgtccctggacgaagatggcacagacaactccagcttgttcaaggagaagctgacacacgctcttcgctacttcaaggagtccacagatcaacatctgctggtccaagtctgggcaccagtcaagaatggagaccgctatgtgctcactacttcaggacagcctttcgtgcttgaccaccagagcattggcctacttcagtacagggctgtatccatgacctacatgttttcagttgatgcggaaaatgttggagacctgggcctacctgggcgtgtctataagcaaaaggtgcccgagtggacaccgaatgtgcagtactatagcagtggtgagtaccaacgacttaaccatgcgatcagctacaacgtccatggtacagtcgccctgcctgtttttgatccttccgctcactcgtgtatcgctgttgttgaacttataatgacatcaaagaagataaactatgcctgcgaggtcgataaagtctgcaaagcacttgaggcggtaaatcttaaaagcactgaaatacatgaccatccaaatgtccagatatgcaatgaaggccgtcaagctgcgctggtcgaaatactggagatcttgaccgtagtatgtgaagagcacaagcttcctttggcacagacctgggttccttgcaagtatagaagtgtcttggcgcatggtggtggtttaaaaaagagctgcttaagttttgatggaagttgcatgggggaggtctgcatgtcaactagtgatgtggcgtttcatgtgattgatgctcatatgtgggggtttagagatgcctgtgtcgagcatcacctacagaggggacaaggagttcctggaaaggcgtttatctcacacaaaccttgcttttcaaaagatatccgcaagttctgtaagttggcatatccccttgtacactatgctcgcatgtttgggttggctggctgctttgcaatatgcttgcaaagttcttatactggaaatgatgactacatattagagtttttcttgccgcccgattgtagtgacgaagatgaccaaaatgccttactggagtctgtattaactctgatgaagaggtgtcttcggagcctaaaggtagttggtgacagagatttgagtggggtctctcttcaccttagcaatgtgctaaaacttgagaatgaagaattcaagacagatgcacagtttgataactctgatggttccctttgccaatcacctaacggtgatagacatggaggatcccatgagtttgatggtgggaacaagaaggttttggatgtgccagagggacaattgttgactgatgacttctctcaaggcaatggtacttctgctggcagaccaaatggtagcggtgcttctgattcttctgtgcttcacaaaaccaacaaaccccctgaaaggaaacgtgggaaagccgaaaagactatcagtttagaggttcttcagcaatatttttctggaagcttgaagaacgcagctaaaagccttggtgtttgtcctacaactatgaagcgcatttgccggcagcatgggatttctcgttggccatctcgaaaaatcaataaggtcaaccgatctctctcgaaactaaagcaggtaatcgagtctgttcaaggctccgatgcggcatttaatctcacatctatcacaggtcctctccctattcctgttggcccttcattggattctctcaatgtagagaaattaactcaaagtaaagtggcagaactttcaaatatcgctgttgatggtgacagagattctttgcaaaagtcacttggaaatgatggccattttggtatagtcatgccccagcaaggatctacagaccataacaatgacacacagcttgaagctgacaaggcgtctcactcgagaagttcgtctggagaaggcagcataaattcacgcacttcggaaggctcatgccagagaagtccagcgaaccagacatttgtttgcaagccaattgcttcaacattcgcagaacctcaacttaatccagaggagttcaataaagagcctttccaagaaccacaactaccactttccaggatgctcattgaagattctggtagctccaaagatttgaagaatctcttcacttcaacatctgaccaaccatttttggcccctcccaataatttggtgccaatgaagcattcagggtctgtaacgataaaggcgagttttaaagaagatattgtgaggttccgtttctcatgctcaggcagtgttattgtattgaaagaggaggtagcgaaaaggctaaggatggatgttggcacgtttgatatcaagtatctagatgatgaccatgaatgggtaaagttgacgtgtaattcagacttggaagaatgcatggagatctcacggctttcgggtagccatgtcatcaggttatctgttagcgatattgcgacacactttggcagttcttgtggaagctccggttgatatgcctgtcagccttttgctctgatcaatgggtactcgaaagtgcttgtaccatgagttcagttccacttgaagagttgtacttttgttgctagttagcattactgcattagcgggagcattagttgcttcattgtgtttgataaatgtatcattgtatttttccgcaaaatgcatgtaattgtgcagaatgcacttgtagtcaactttgtatatgttatgtgcaagaaattctatttcaagttataaactagataattgttgtctagagtttgcacagtatattgcattggaaatgaagcagattttcc

SEQ ID NO: 33275 - DNA, 3001 bp, Zea Mays
gtccaccactaccttcccgacgggccgcattggattcctcccgtcctcctcccgtctcgccatcgcttcctgttcctcttcttccgccgccgccgtacgatcacactagcaccgccagccgcaaggtcccatggacctcgacccggcctatcccccatcagcctgcgccgacgcctggccctttgactcgctcaccacgtccctgctcttctccccgcagctcacgccgataccggccaactcatccttctcctggctcaccccacactcgccgctctggctcttcgaggaccgccacctgctcccgctcgacgcgcccgccgtcttcgaagaggtccagcggccacgctccgggaattctcacacttcaagcaagccagctgaacagatcagtcacagatggcagtttcatctgtccctggacgaagatggcacagacaactccagcttgttcaaggagaagctgacacacgctcttcgctacttcaaggagtccacagatcaacatctgctggtccaagtctgggcaccagtcaagaatggagaccgctatgtgctcactacttcaggacagcctttcgtgcttgaccaccagagcattggcctacttcagtacagggctgtatccatgacctacatgttttcagttgatgcggaaaatgttggagacctgggcctacctgggcgtgtctataagcaaaaggtgcccgagtggacaccgaatgtgcagtactatagcagtggtgagtaccaacgacttaaccatgcgatcagctacaacgtccatggtacagtcgccctgcctgtttttgatccttccgctcactcgtgtatcgctgttgttgaacttataatgacatcaaagaagataaactatgcctgcgaggtcgataaagtctgcaaagcacttgaggcggtaaatcttaaaagcactgaaatacatgaccatccaaatgtccagatatgcaatgaaggccgtcaagctgcgctggtcgaaatactggagatcttgaccgtagtatgtgaagagcacaagcttcctttggcacagacctgggttccttgcaagtatagaagtgtcttggcgcatggtggtggtttaaaaaagagctgcttaagttttgatggaagttgcatgggggaggtctgcatgtcaactagtgatgtggcgtttcatgtgattgatgctcatatgtgggggtttagagatgcctgtgtcgagcatcacctacagaggggacaaggagttcctggaaaggcgtttatctcacacaaaccttgcttttcaaaagatatccgcaagttctgtaagttggcatatccccttgtacactatgctcgcatgtttgggttggctggctgctttgcaatatgcttgcaaagttcttatactggaaatgatgactacatattagagtttttcttgccgcccgattgtagtgacgaagatgaccaaaatgccttactggagtctgtattaactctgatgaagaggtgtcttcggagcctaaaggtagttggtgacagagatttgagtggggtctctcttcaccttagcaatgtgctaaaacttgagaatgaagaattcaagacagatgcacagtttgataactctgatggttccctttgccaatcacctaacggtgatagacatggaggatcccatgagtttgatggtgggaacaagaaggttttggatgtgccagagggacaattgttgactgatgacttctctcaaggcaatggtacttctgctggcagaccaaatggtagcggtgcttctgattcttctgtgcttcacaaaaccaacaaaccccctgaaaggaaacgtgggaaagccgaaaagactatcagtttagaggttcttcagcaatatttttctggaagcttgaagaacgcagctaaaagccttggtgtttgtcctacaactatgaagcgcatttgccggcagcatgggatttctcgttggccatctcgaaaaatcaataagagattctttgcaaaagtcacttggaaatgatggccattttggtatagtcatgccccagcaaggatctacagaccataacaatgacacacagcttgaagctgacaaggcgtctcactcgagaagttcgtctggagaaggcagcataaattcacgcacttcggaaggctcatgccagagaagtccagcgaaccagacatttgtttgcaagccaattgcttcaacattcgcagaacctcaacttaatccagaggagttcaataaagagcctttccaagaaccacaactaccactttccaggatgctcattgaagattctggtagctccaaagatttgaagaatctcttcacttcaacatctgaccaaccatttttggcccctcccaataatttggtgccaatgaagcattcagggtctgtaacgataaaggcgagttttaaagaagatattgtgaggttccgtttctcatgctcaggcagtgttattgtattgaaagaggaggtagcgaaaaggctaaggatggatgttggcacgtttgatatcaagtatctagatgatgaccatgaatgggtaaagttgacgtgtaattcagacttggaagaatgcatggagatctcacggctttcgggtagccatgtcatcaggttatctgttagcgatattgcgacacactttggcagttcttgtggaagctccggttgatatgcctgtcagccttttgctctgatcaatgggtactcgaaagtgcttgtaccatgagttcagttccacttgaagagttgtacttttgttgctagttagcattactgcattagcgggagcattagttgcttcattgtgtttgataaatgtatcattgtatttttccgcaaaatgcatgtaattgtgcagaatgcacttgtagtcaactttgtatatgttatgtgcaagaaattctatttcaagttataaactagataattgttgtctagagtttgcacagtatattgcattggaaatgaagcagattttcc

SEQ ID NO: 33276 - DNA, 1152 bp, Zea Mays
ctttgcctatatatccgagtgctatttgttcgacaaaatatttaacctgccgttcttgagagtttactggtctgctagtgccagcctagaacgtgcttgctgccatctattgtcaaatttgtctctgcttggggtaaagaaaagcagatagaatccttgcccacagccacaacaaaacccccccacatggctatgcctttgtcaatgattaatgtgtctcacataggacctgaggaatctgcggtcacagctgtactcagcggcagaatattttgaagtattttacaggaacaactcgcacaaatctactgtgatgacgagtttgaaagattacacagttgaggcccttgttagcacagtggaccatctgggttttgtgtcatacaaggtggataaccttgtcagcgagaaagctgtcgaggttaaggagactgaattcctagtgtcttcagttgaacagagggtacgaatttgccaacagacaactgaccaggaggcaagatcccagcaagctcttcttatcaaggcgccaaagtatcataggcgttacatattaccaggcctggatctactggaatcttccatccacccggtttcagaacctccacggtatagcaggcagtatacaggccgcaagatgcacaagtcccagtcttccatttctactccagttcgtcggcaggctacgatgaggcgtgaaccatctcctacacctaacgatcggtcgcggtcgttatcgccttctcgtaaagcacgagctaaatctccatctcctcgaatcgtgaacacaaatactgcaagagaaacaagggcaggctccccgataccaaattccagcccgatggcacggtccgcctctacggttgcaagaagaccgccttcgaactcgaggcatttgagactagcttccatgcagttgcacagcgactgggagcagcaggagagaagctcaagcaaaggcaggaggggtttcctcaggtcgctgctcacgaggcgccggtggaggaacgacgagtcgtccttgtacagttacttggatgagtactgattgctggaatgttggaactgaaaaaagtctggtgttaactgaatcttctatagatggatgcgatgctctctgctttgccaaaaggttttggtttcccgtttcca

SEQ ID NO: 33277 - DNA, 2216 bp, Zea Mays
caattctgaactcttcttctgtttgcaacaagtggatctaccccaattacctgaaccgcccctgcaggagacgtcaaggcccgtggtgcactccttctgcaagatcctcacaccatccgacaccagtactcatggcggtttctccgttcttcggcgtcatgcaaacgaatgcctcccagcactggatatgtcgatgccgaccccgacccaagagctcatcacaaaggacctacatggatctgaatggaggttcaagcacatatacaggggccaaccccgtcggcaccttctgactactggatggagcacgtttgtcacatcaaagaagctgattgctggtgacgcgtttgtctacctgaggttaagccaaagccaatacatcgtcaggctgaacaagtacctggaatctagtaaaattggattcgatgtgggcatgaggtttaagatgagttttgaaggggatgacgtccctataaagaagttttctggaacagttgtcgataaaggagatctttctccacaatggcaaggttctgaatggaagacattgaaggtcaaatgggacgaagccacaaacttaaatggccctgagagggtttcctcctgggaaattgaaccattcgatgcatccgcacctgccatcaccatgcccgtgcaaccatcaatgaaaaacaaaaggcctagggagacagctgaaggcctggatattcatgcactggaacctgctcaagaattctggctctctggaaggcctgaacagcatgagaagacaagcgtaagctccagcgaacccaaacatcaagtcgcttggacaagtgaacgcgcaggatacagtgccatgagcagttcaatctgtcagaattctgcagtaactgggagctggttcaagggcttcaattcctccggctcacacccttccctgccagagatctcccagaaactgtttcaggtcaccagcaacgacgcgagggttcctccttggcctgggctctccgcttatcatgctgacgagccctcttccaagctgtcctgcaacactgctctgtgcagctaccagaccgaggaggtggctccaagattttccaatgccgtcgaagaggaaaagaaggagcccggcatgttccgtctgtttggcgtcaatttgattaaccatgctaggagtagtgctaccgctgacaagacgagtgtgggagcaggggaaacatcggcgcgagctgctggttcttttgaagactctgctcagctatcaagagtgacgaaggatcatacgcacatggtgaacggaagcccccgagaaatccaaagccaccagagttgcagtggaaggagtcgtatcaaggttcaaatgcatggaaatgacgtgtgcagagctgtggatttgggaaatctggatgggtacgagcagctgatgggtgaggttggagagatgtttgagatcaaagaccttggctccaaagagaaagaggaatggaaggttactttcattaacgacgagaatgagacaatggaagtcggagctgttccttggcaggagttttgccagatggtgaggaagatcgtgatccattccattggagacaggggccatatggaggcttgcccttgcctggggcaggatgggaagagggactattagaagaagggatttttttttttggctggggcagtcaggagatgggtgctgctgaaacatgatggcgtagcttgtcgatgacaaagaaggcaacagattggttgctggcgtcagttcttccttgagaaaaaaattcagtggaaggaagaagtgatgtaacataggatttgcagaaaagatttgataatgcgtcttttagaagtttggtttggtttaaagatgacaagttaatgtgtgtctagtgatctgcctaaagccttagcgacgggcaacaagcaataacaaggatggatgatgaccttaccttgggtatgttagctgtgtaaatattatgtatgtatgtatgggacattaaattggttggcatacttgactcctgatttatattgtacgtagtgtgttgcagtgctctggattcagttgtgatgtgctactattacaagtagtagaaggaatctggtttttagtccaagaatcaacatcaatatgtcaatcacaggcacactagtgtgtaattttagatctttttctgacatccatacctctctcctgttttgttagagtgtttttggttgcgggacag

SEQ ID NO: 33278 - DNA, 2990 bp, Zea Mays
ctttctctctctgcgcctgcgcctttctcttctccttctccttctccctcctctcaaccccaacaatctctgtctccccatctcctctcaacaaggcggcctcaacaaagtcccaccgcacctttctttaatggagcgagggtgagcctaacaaacactcgacacacaggaggaggtgctgcccgcttctcccctccctcagtctcactcgctccgctctcctccccgagaccaggaggccaagccaagaaccgcaaaccctcaggccgtggccatggcgcaaggagcaggacgggacccggaggagctcttcgaggagctgtggcgcgcctgcgcggggccgctcgtggagttgccccagaccaacgaaagggtcttctacttcctccagggtcacctagaacagctgcaagagccgacggacccggcgctgctggctgagcagatcaagatgttccaggtgcccaacaagatcctctgcaaggccgagacagaaacggacgagatgtacgcccagatcactctgcagccggaaccagatcaagtggatctaccccaattacctgaaccgcccctgcaggagacgtcaaggcccgtggtgcactccttctgcaagatcctcacaccatccgacaccagtactcatggcggtttctccgttcttcggcgtcatgcaaacgaatgcctcccagcactggatatgtcgatgccgaccccgacccaagagctcatcacaaaggacctacatggatctgaatggaggttcaagcacatatacaggggccaaccccgtcggcaccttctgactactggatggagcacgtttgtcacatcaaagaagctgattgctggtgacgcgtttgtctacctgaggagcgagaccggacagcagcgtgtgggagtgaggcgcctcgtgcagaagcaaagcacaatgccagcatctgttatatcaagccaaagcatgcatcttggggtgcttgcaagtgcatcacacgctattaggactcattccattttcctagtgtattatagaccaaggttaagccaaagccaatacatcgtcaggctgaacaagtacctggaatctagtaaaattggattcgatgtgggcatgaggtttaagatgagttttgaaggggatgacgtccctataaagaagttttctggaacagttgtcgataaaggagatctttctccacaatggcaaggttctgaatggaagacattgaaggtaagatcagttcgaccggcttgatttgttatcattatttgactttttagacaagatgctatacgcatcatcaattttcttggtttaggtcaaatgggacgaagccacaaacttaaatggccctgagagggtttcctcctgggaaattgaaccattcgatgcatccgcacctgccatcaccatgcccgtgcaaccatcaatgaaaaacaaaaggcctagggagacagctgaaggcctggatattcatgcactggaacctgctcaagaattctggctctctggaaggcctgaacagcatgagaagacaagcgtaagctccagcgaacccaaacatcaagtcgcttggacaagtgaacgcgcaggatacagtgccatgagcagttcaatctgtcagaattctgcagtaactgggagctggttcaagggcttcaattcctccggctcacacccttccctgccagagatctcccagaaactgtttcaggtcaccagcaacgacgcgagggttcctccttggcctgggctctccgcttatcatgctgacgagccctcttccaagctgtcctgcaacactgctctgtgcagctaccagaccgaggaggtggctccaagattttccaatgccgtcgaagaggaaaagaaggagcccggcatgttccgtctgtttggcgtcaatttgattaaccatgctaggagtagtgctaccgctgacaagacgagtgtgggagcaggggaaacatcggcgcgagctgctggttcttttgaagactctgctcagctatcaagagtgacgaaggatcatacgcacatggtgaacggaagcccccgagaaatccaaagccaccagagttgcagtggaaggagtcgtatcaaggttcaaatgcatggaaatgacgtgtgcagagctgtggatttgggaaatctggatgggtacgagcagctgatgggtgaggttggagagatgtttgagatcaaagaccttggctccaaagagaaagaggaatggaaggttactttcattaacgacgagaatgagacaatggaagtcggagctgttccttggcagtaagctaggagttttgccagatggtgaggaagatcgtgatccattccattggagacaggggccatatggaggcttgcccttgcctggggcaggatgggaagagggactattagaagaagggatttttttttttggctggggcagtcaggagatgggtgctgctgaaacatgatggcgtagcttgtcgatgacaaagaaggcaacagattggttgctggcgtcagttcttccttgagaaaaaaattcagtggaaggaagaagtgatgtaacataggatttgcagaaaagatttgataatgcgtcttttagaagtttggtttggtttaaagatgacaagttaatgtgtgtctagtgatctgcctaaagccttagcgacgggcaacaagcaataacaaggatggatgatgaccttaccttgggtatgttagctgtgtaaatattatgtatgtatgtatgggacattaaattggttggcatacttgactcctgatttatattgtacgtagtgtgttgcagtgctctggattcagttgtgatgtgctactattacaagtagtagaaggaatctggtttttagtccaagaatcaacatcaatatgtcaatcacaggcacactagtgtgtaattttagatctttttctgacatccatacctctctcctgttttgttagagtgtttttggttgcgggacag

SEQ ID NO: 33279 - DNA, 2895 bp, Zea Mays
ctttctctctctgcgcctgcgcctttctcttctccttctccttctccctcctctcaaccccaacaatctctgtctccccatctcctctcaacaaggcggcctcaacaaagtcccaccgcacctttctttaatggagcgagggtgagcctaacaaacactcgacacacaggaggaggtgctgcccgcttctcccctccctcagtctcactcgctccgctctcctccccgagaccaggaggccaagccaagaaccgcaaaccctcaggccgtggccatggcgcaaggacgggacccggaggagctcttcgaggagctgtggcgcgcctgcgcggggccgctcgtggagttgccccagaccaacgaaagggtcttctacttcctccagggtcacctagaacagctgcaagagccgacggacccggcgctgctggctgagcagatcaagatgttccaggtgcccaacaagatcctctgcaaggtcgtcaacgtcgagctcaaggccgagacagaaacggacgagatgtacgcccagatcactctgcagccggaaccagatcaagtggatctaccccaattacctgaaccgcccctgcaggagacgtcaaggcccgtggtgcactccttctgcaagatcctcacaccatccgacaccagtactcatggcggtttctccgttcttcggcgtcatgcaaacgaatgcctcccagcactggatatgtcgatgccgaccccgacccaagagctcatcacaaaggacctacatggatctgaatggaggttcaagcacatatacaggggccaaccccgtcggcaccttctgactactggatggagcacgtttgtcacatcaaagaagctgattgctggtgacgcgtttgtctacctgaggagcgagaccggacagcagcgtgtgggagtgaggcgcctcgtgcagaagcaaagcacaatgccagcatctgttatatcaagccaaagcatgcatcttggggtgcttgcaagtgcatcacacgctattaggactcattccattttcctagtgtattatagaccaaggttaagccaaagccaatacatcgtcaggctgaacaagtacctggaatctagtaaaattggattcgatgtgggcatgaggtttaagatgagttttgaaggggatgacgtccctataaagaattgtcgataaaggagatctttctccacaatggcaaggttctgaatggaagacattgaaggtcaaatgggacgaagccacaaacttaaatggccctgagagggtttcctcctgggaaattgaaccattcgatgcatccgcacctgccatcaccatgcccgtgcaaccatcaatgaaaaacaaaaggcctagggagacagctgaaggcctggatattcatgcactggaacctgctcaagaattctggctctctggaaggcctgaacagcatgagaagacaagcgtaagctccagcgaacccaaacatcaagtcgcttggacaagtgaacgcgcaggatacagtgccatgagcagttcaatctgtcagaattctgcagtaactgggagctggttcaagggcttcaattcctccggctcacacccttccctgccagagatctcccagaaactgtttcaggtcaccagcaacgacgcgagggttcctccttggcctgggctctccgcttatcatgctgacgagccctcttccaagctgtcctgcaacactgctctgtgcagctaccagaccgaggaggtggctccaagattttccaatgccgtcgaagaggaaaagaaggagcccggcatgttccgtctgtttggcgtcaatttgattaaccatgctaggagtagtgctaccgctgacaagacgagtgtgggagcaggggaaacatcggcgcgagctgctggttcttttgaagactctgctcagctatcaagagtgacgaaggatcatacgcacatggtgaacggaagcccccgagaaatccaaagccaccagagttgcagtggaaggagtcgtatcaaggttcaaatgcatggaaatgacgtgtgcagagctgtggatttgggaaatctggatgggtacgagcagctgatgggtgaggttggagagatgtttgagatcaaagaccttggctccaaagagaaagaggaatggaaggttactttcattaacgacgagaatgagacaatggaagtcggagctgttccttggcaggagttttgccagatggtgaggaagatcgtgatccattccattggagacaggggccatatggaggcttgcccttgcctggggcaggatgggaagagggactattagaagaagggatttttttttttggctggggcagtcaggagatgggtgctgctgaaacatgatggcgtagcttgtcgatgacaaagaaggcaacagattggttgctggcgtcagttcttccttgagaaaaaaattcagtggaaggaagaagtgatgtaacataggatttgcagaaaagatttgataatgcgtcttttagaagtttggtttggtttaaagatgacaagttaatgtgtgtctagtgatctgcctaaagccttagcgacgggcaacaagcaataacaaggatggatgatgaccttaccttgggtatgttagctgtgtaaatattatgtatgtatgtatgggacattaaattggttggcatacttgactcctgatttatattgtacgtagtgtgttgcagtgctctggattcagttgtgatgtgctactattacaagtagtagaaggaatctggtttttagtccaagaatcaacatcaatatgtcaatcacaggcacactagtgtgtaattttagatctttttctgacatccatacctctctcctgttttgttagagtgtttttggttgcgggacag

SEQ ID NO: 33280 - DNA, 2721 bp, Zea Mays
ctttctctctctgcgcctgcgcctttctcttctccttctccttctccctcctctcaaccccaacaatctctgtctccccatctcctctcaacaaggcggcctcaacaaagtcccaccgcacctttctttaatggagcgagggtgagcctaacaaacactcgacacacaggaggaggtgctgcccgcttctcccctccctcagtctcactcgctccgctctcctccccgagaccaggaggccaagccaagaaccgcaaaccctcaggccgtggccatggcgcaaggagcaggacgggacccggaggagctcttcgaggagctgtggcgcgcctgcgcggggccgctcgtggagttgccccagaccaacgaaagggtcttctacttcctccagggtcacctagaacagctgcaagagccgacggacccggcgctgctggctgagcagatcaagatgttccaggtgcccaacaagatcctctgcaaggtcgtcaacgtcgagctcaaggccgagacagaaacggacgagatgtacgcccagatcactctgcagccggaaccagatcaagtggatctaccccaattacctgaaccgcccctgcaggagacgtcaaggcccgtggtgcactccttctgcaagatcctcacaccatccgacaccagtactcatggcggtttctccgttcttcggcgtcatgcaaacgaatgcctcccagcactggatatgtcgatgccgaccccgacccaagagctcatcacaaaggacctacatggatctgaatggaggttcaagcacatatacaggggccaaccccgtcggcaccttctgactactggatggagcacgtttgtcacatcaaagaagctgattgctggtgacgcgtttgtctacctgaggttaagccaaagccaatacatcgtcaggctgaacaagtacctggaatctagtaaaattggattcgatgtgggcatgaggtttaagatgagttttgaaggggatgacgtccctataaagaagttttctggaacagttgtcgataaaggagatctttctccacaatggcaaggttctgaatggaagacattgaaggtcaaatgggacgaagccacaaacttaaatggccctgagagggtttcctcctgggaaattgaaccattcgatgcatccgcacctgccatcaccatgcccgtgcaaccatcaatgaaaaacaaaaggcctagggagacagctgaaggcctggatattcatgcactggaacctgctcaagaattctggctctctggaaggcctgaacagcatgagaagacaagcgtaagctccagcgaacccaaacatcaagtcgcttggacaagtgaacgcgcaggatacagtgccatgagcagttcaatctgtcagaattctgcagtaactgggagctggttcaagggcttcaattcctccggctcacacccttccctgccagagatctcccagaaactgtttcaggtcaccagcaacgacgcgagggttcctccttggcctgggctctccgcttatcatgctgacgagccctcttccaagctgtcctgcaacactgctctgtgcagctaccagaccgaggaggtggctccaagattttccaatgccgtcgaagaggaaaagaaggagcccggcatgttccgtctgtttggcgtcaatttgattaaccatgctaggagtagtgctaccgctgacaagacgagtgtgggagcaggggaaacatcggcgcgagctgctggttcttttgaagactctgctcagctatcaagagtgacgaaggatcatacgcacatggtgaacggaagcccccgagaaatccaaagccaccagagttgcagtggaaggagtcgtatcaagagctgtggatttgggaaatctggatgggtacgagcagctgatgggtgaggttggagagatgtttgagatcaaagaccttggctccaaagagaaagaggaatggaaggttactttcattaacgacgagaatgagacaatggaagtcggagctgttccttggcaggagttttgccagatggtgaggaagatcgtgatccattccattggagacaggggccatatggaggcttgcccttgcctggggcaggatgggaagagggactattagaagaagggatttttttttttggctggggcagtcaggagatgggtgctgctgaaacatgatggcgtagcttgtcgatgacaaagaaggcaacagattggttgctggcgtcagttcttccttgagaaaaaaattcagtggaaggaagaagtgatgtaacataggatttgcagaaaagatttgataatgcgtcttttagaagtttggtttggtttaaagatgacaagttaatgtgtgtctagtgatctgcctaaagccttagcgacgggcaacaagcaataacaaggatggatgatgaccttaccttgggtatgttagctgtgtaaatattatgtatgtatgtatgggacattaaattggttggcatacttgactcctgatttatattgtacgtagtgtgttgcagtgctctggattcagttgtgatgtgctactattacaagtagtagaaggaatctggtttttagtccaagaatcaacatcaatatgtcaatcacaggcacactagtgtgtaattttagatctttttctgacatccatacctctctcctgttttgttagagtgtttttggttgcgggacag

SEQ ID NO: 33281 - DNA, 2700 bp, Zea Mays
ctttctctctctgcgcctgcgcctttctcttctccttctccttctccctcctctcaaccccaacaatctctgtctccccatctcctctcaacaaggcggcctcaacaaagtcccaccgcacctttctttaatggagcgagggtgagcctaacaaacactcgacacacaggaggaggtgctgcccgcttctcccctccctcagtctcactcgctccgctctcctccccgagaccaggaggccaagccaagaaccgcaaaccctcaggccgtggccatggcgcaaggagcaggacgggacccggaggagctcttcgaggagctgtggcgcgcctgcgcggggccgctcgtggagttgccccagaccaacgaaagggtcttctacttcctccagggtcacctagaacagctgcaagagccgacggacccggcgctgctggctgagcagatcaagatgttccaggtgcccaacaagatcctctgcaaggccgagacagaaacggacgagatgtacgcccagatcactctgcagccggaaccagatcaagtggatctaccccaattacctgaaccgcccctgcaggagacgtcaaggcccgtggtgcactccttctgcaagatcctcacaccatccgacaccagtactcatggcggtttctccgttcttcggcgtcatgcaaacgaatgcctcccagcactggatatgtcgatgccgaccccgacccaagagctcatcacaaaggacctacatggatctgaatggaggttcaagcacatatacaggggccaaccccgtcggcaccttctgactactggatggagcacgtttgtcacatcaaagaagctgattgctggtgacgcgtttgtctacctgaggttaagccaaagccaatacatcgtcaggctgaacaagtacctggaatctagtaaaattggattcgatgtgggcatgaggtttaagatgagttttgaaggggatgacgtccctataaagaagttttctggaacagttgtcgataaaggagatctttctccacaatggcaaggttctgaatggaagacattgaaggtcaaatgggacgaagccacaaacttaaatggccctgagagggtttcctcctgggaaattgaaccattcgatgcatccgcacctgccatcaccatgcccgtgcaaccatcaatgaaaaacaaaaggcctagggagacagctgaaggcctggatattcatgcactggaacctgctcaagaattctggctctctggaaggcctgaacagcatgagaagacaagcgtaagctccagcgaacccaaacatcaagtcgcttggacaagtgaacgcgcaggatacagtgccatgagcagttcaatctgtcagaattctgcagtaactgggagctggttcaagggcttcaattcctccggctcacacccttccctgccagagatctcccagaaactgtttcaggtcaccagcaacgacgcgagggttcctccttggcctgggctctccgcttatcatgctgacgagccctcttccaagctgtcctgcaacactgctctgtgcagctaccagaccgaggaggtggctccaagattttccaatgccgtcgaagaggaaaagaaggagcccggcatgttccgtctgtttggcgtcaatttgattaaccatgctaggagtagtgctaccgctgacaagacgagtgtgggagcaggggaaacatcggcgcgagctgctggttcttttgaagactctgctcagctatcaagagtgacgaaggatcatacgcacatggtgaacggaagcccccgagaaatccaaagccaccagagttgcagtggaaggagtcgtatcaagagctgtggatttgggaaatctggatgggtacgagcagctgatgggtgaggttggagagatgtttgagatcaaagaccttggctccaaagagaaagaggaatggaaggttactttcattaacgacgagaatgagacaatggaagtcggagctgttccttggcaggagttttgccagatggtgaggaagatcgtgatccattccattggagacaggggccatatggaggcttgcccttgcctggggcaggatgggaagagggactattagaagaagggatttttttttttggctggggcagtcaggagatgggtgctgctgaaacatgatggcgtagcttgtcgatgacaaagaaggcaacagattggttgctggcgtcagttcttccttgagaaaaaaattcagtggaaggaagaagtgatgtaacataggatttgcagaaaagatttgataatgcgtcttttagaagtttggtttggtttaaagatgacaagttaatgtgtgtctagtgatctgcctaaagccttagcgacgggcaacaagcaataacaaggatggatgatgaccttaccttgggtatgttagctgtgtaaatattatgtatgtatgtatgggacattaaattggttggcatacttgactcctgatttatattgtacgtagtgtgttgcagtgctctggattcagttgtgatgtgctactattacaagtagtagaaggaatctggtttttagtccaagaatcaacatcaatatgtcaatcacaggcacactagtgtgtaattttagatctttttctgacatccatacctctctcctgttttgttagagtgtttttggttgcgggacag

SEQ ID NO: 33282 - DNA, 2764 bp, Zea Mays
gccgaggccactctctttctctctctgcgcctgcgcctttctcttctccttctccttctccctcctctcaaccccaacaatctctgtctccccatctcctctcaacaaggcggcctcaacaaagtcccaccgcacctttctttaatggagcgagggtgagcctaacaaacactcgacacacaggaggaggtgctgcccgcttctcccctccctcagtctcactcgctccgctctcctccccgagaccaggaggccaagccaagaaccgcaaaccctcaggccgtggccatggcgcaaggagcaggacgggacccggaggagctcttcgaggagctgtggcgcgcctgcgcggggccgctcgtggagttgccccagaccaacgaaagggtcttctacttcctccagggtcacctagaacagctgcaagagccgacggacccggcgctgctggctgagcagatcaagatgttccaggtgcccaacaagatcctctgcaaggtcgtcaacgtcgagctcaaggccgagacagaaacggacgagatgtacgcccagatcactctgcagccggaaccagatcaagtggatctaccccaattacctgaaccgcccctgcaggagacgtcaaggcccgtggtgcactccttctgcaagatcctcacaccatccgacaccagtactcatggcggtttctccgttcttcggcgtcatgcaaacgaatgcctcccagcactggatatgtcgatgccgaccccgacccaagagctcatcacaaaggacctacatggatctgaatggaggttcaagcacatatacaggggccaaccccgtcggcaccttctgactactggatggagcacgtttgtcacatcaaagaagctgattgctggtgacgcgtttgtctacctgaggttaagccaaagccaatacatcgtcaggctgaacaagtacctggaatctagtaaaattggattcgatgtgggcatgaggtttaagatgagttttgaaggggatgacgtccctataaagaagttttctggaacagttgtcgataaaggagatctttctccacaatggcaaggttctgaatggaagacattgaaggtcaaatgggacgaagccacaaacttaaatggccctgagagggtttcctcctgggaaattgaaccattcgatgcatccgcacctgccatcaccatgcccgtgcaaccatcaatgaaaaacaaaaggcctagggagacagctgaaggcctggatattcatgcactggaacctgctcaagaattctggctctctggaaggcctgaacagcatgagaagacaagcgtaagctccagcgaacccaaacatcaagtcgcttggacaagtgaacgcgcaggatacagtgccatgagcagttcaatctgtcagaattctgcagtaactgggagctggttcaagggcttcaattcctccggctcacacccttccctgccagagatctcccagaaactgtttcaggtcaccagcaacgacgcgagggttcctccttggcctgggctctccgcttatcatgctgacgagccctcttccaagctgtcctgcaacactgctctgtgcagctaccagaccgaggaggtggctccaagattttccaatgccgtcgaagaggaaaagaaggagcccggcatgttccgtctgtttggcgtcaatttgattaaccatgctaggagtagtgctaccgctgacaagacgagtgtgggagcaggggaaacatcggcgcgagctgctggttcttttgaagactctgctcagctatcaagagtgacgaaggatcatacgcacatggtgaacggaagcccccgagaaatccaaagccaccagagttgcagtggaaggagtcgtatcaaggttcaaatgcatggaaatgacgtgtgcagagctgtggatttgggaaatctggatgggtacgagcagctgatgggtgaggttggagagatgtttgagatcaaagaccttggctccaaagagaaagaggaatggaaggttactttcattaacgacgagaatgagacaatggaagtcggagctgttccttggcaggagttttgccagatggtgaggaagatcgtgatccattccattggagacaggggccatatggaggcttgcccttgcctggggcaggatgggaagagggactattagaagaagggatttttttttttggctggggcagtcaggagatgggtgctgctgaaacatgatggcgtagcttgtcgatgacaaagaaggcaacagattggttgctggcgtcagttcttccttgagaaaaaaattcagtggaaggaagaagtgatgtaacataggatttgcagaaaagatttgataatgcgtcttttagaagtttggtttggtttaaagatgacaagttaatgtgtgtctagtgatctgcctaaagccttagcgacgggcaacaagcaataacaaggatggatgatgaccttaccttgggtatgttagctgtgtaaatattatgtatgtatgtatgggacattaaattggttggcatacttgactcctgatttatattgtacgtagtgtgttgcagtgctctggattcagttgtgatgtgctactattacaagtagtagaaggaatctggtttttagtccaagaatcaacatcaatatgtcaatcacaggcacactagtgtgtaattttagatctttttctgacatccatacctctctcctgttttgttagagtgtttttggttgcgggacag

SEQ ID NO: 33283 - DNA, 2916 bp, Zea Mays
gtttccttctctttccgcttccgccgaggccactctctttctctctctgcgcctgcgcctttctcttctccttctccttctccctcctctcaaccccaacaatctctgtctccccatctcctctcaacaaggcggcctcaacaaagtcccaccgcacctttctttaatggagcgagggtgagcctaacaaacactcgacacacaggaggaggtgctgcccgcttctcccctccctcagtctcactcgctccgctctcctccccgagaccaggaggccaagccaagaaccgcaaaccctcaggccgtggccatggcgcaaggacgggacccggaggagctcttcgaggagctgtggcgcgcctgcgcggggccgctcgtggagttgccccagaccaacgaaagggtcttctacttcctccagggtcacctagaacagctgcaagagccgacggacccggcgctgctggctgagcagatcaagatgttccaggtgcccaacaagatcctctgcaaggtcgtcaacgtcgagctcaaggccgagacagaaacggacgagatgtacgcccagatcactctgcagccggaaccagatcaagtggatctaccccaattacctgaaccgcccctgcaggagacgtcaaggcccgtggtgcactccttctgcaagatcctcacaccatccgacaccagtactcatggcggtttctccgttcttcggcgtcatgcaaacgaatgcctcccagcactggatatgtcgatgccgaccccgacccaagagctcatcacaaaggacctacatggatctgaatggaggttcaagcacatatacaggggccaaccccgtcggcaccttctgactactggatggagcacgtttgtcacatcaaagaagctgattgctggtgacgcgtttgtctacctgaggagcgagaccggacagcagcgtgtgggagtgaggcgcctcgtgcagaagcaaagcacaatgccagcatctgttatatcaagccaaagcatgcatcttggggtgcttgcaagtgcatcacacgctattaggactcattccattttcctagtgtattatagaccaaggttaagccaaagccaatacatcgtcaggctgaacaagtacctggaatctagtaaaattggattcgatgtgggcatgaggtttaagatgagttttgaaggggatgacgtccctataaagaagttttctggaacagttgtcgataaaggagatctttctccacaatggcaaggttctgaatggaagacattgaaggtcaaatgggacgaagccacaaacttaaatggccctgagagggtttcctcctgggaaattgaaccattcgatgcatccgcacctgccatcaccatgcccgtgcaaccatcaatgaaaaacaaaaggcctagggagacagctgaaggcctggatattcatgcactggaacctgctcaagaattctggctctctggaaggcctgaacagcatgagaagacaagcgtaagctccagcgaacccaaacatcaagtcgcttggacaagtgaacgcgcaggatacagtgccatgagcagttcaatctgtcagaattctgcagtaactgggagctggttcaagggcttcaattcctccggctcacacccttccctgccagagatctcccagaaactgtttcaggtcaccagcaacgacgcgagggttcctccttggcctgggctctccgcttatcatgctgacgagccctcttccaagctgtcctgcaacactgctctgtgcagctaccagaccgaggaggtggctccaagattttccaatgccgtcgaagaggaaaagaaggagcccggcatgttccgtctgtttggcgtcaatttgattaaccatgctaggagtagtgctaccgctgacaagacgagtgtgggagcaggggaaacatcggcgcgagctgctggttcttttgaagactctgctcagctatcaagagtgacgaaggatcatacgcacatggtgaacggaagcccccgagaaatccaaagccaccagagttgcagtggaaggagtcgtatcaagagctgtggatttgggaaatctggatgggtacgagcagctgatgggtgaggttggagagatgtttgagatcaaagaccttggctccaaagagaaagaggaatggaaggttactttcattaacgacgagaatgagacaatggaagtcggagctgttccttggcaggagttttgccagatggtgaggaagatcgtgatccattccattggagacaggggccatatggaggcttgcccttgcctggggcaggatgggaagagggactattagaagaagggatttttttttttggctggggcagtcaggagatgggtgctgctgaaacatgatggcgtagcttgtcgatgacaaagaaggcaacagattggttgctggcgtcagttcttccttgagaaaaaaattcagtggaaggaagaagtgatgtaacataggatttgcagaaaagatttgataatgcgtcttttagaagtttggtttggtttaaagatgacaagttaatgtgtgtctagtgatctgcctaaagccttagcgacgggcaacaagcaataacaaggatggatgatgaccttaccttgggtatgttagctgtgtaaatattatgtatgtatgtatgggacattaaattggttggcatacttgactcctgatttatattgtacgtagtgtgttgcagtgctctggattcagttgtgatgtgctactattacaagtagtagaaggaatctggtttttagtccaagaatcaacatcaatatgtcaatcacaggcacactagtgtgtaattttagatctttttctgacatccatacctctctcctgttttgttagagtgtttttggttgcgggacag

SEQ ID NO: 33284 - DNA, 2945 bp, Zea Mays
gtttccttctctttccgcttccgccgaggccactctctttctctctctgcgcctgcgcctttctcttctccttctccttctccctcctctcaaccccaacaatctctgtctccccatctcctctcaacaaggcggcctcaacaaagtcccaccgcacctttctttaatggagcgagggtgagcctaacaaacactcgacacacaggaggaggtgctgcccgcttctcccctccctcagtctcactcgctccgctctcctccccgagaccaggaggccaagccaagaaccgcaaaccctcaggccgtggccatggcgcaaggacgggacccggaggagctcttcgaggagctgtggcgcgcctgcgcggggccgctcgtggagttgccccagaccaacgaaagggtcttctacttcctccagggtcacctagaacagctgcaagagccgacggacccggcgctgctggctgagcagatcaagatgttccaggtgcccaacaagatcctctgcaaggtcgtcaacgtcgagctcaaggccgagacagaaacggacgagatgtacgcccagatcactctgcagccggaaccagatcaagtggatctaccccaattacctgaaccgcccctgcaggagacgtcaaggcccgtggtgcactccttctgcaagatcctcacaccatccgacaccagtactcatggcggtttctccgttcttcggcgtcatgcaaacgaatgcctcccagcactggatatgtcgatgccgaccccgacccaagagctcatcacaaaggacctacatggatctgaatggaggttcaagcacatatacaggggccaaccccgtcggcaccttctgactactggatggagcacgtttgtcacatcaaagaagctgattgctggtgacgcgtttgtctacctgaggagcgagaccggacagcagcgtgtgggagtgaggcgcctcgtgcagaagcaaagcacaatgccagcatctgttatatcaagccaaagcatgcatcttggggtgcttgcaagtgcatcacacgctattaggactcattccattttcctagtgtattatagaccaaggttaagccaaagccaatacatcgtcaggctgaacaagtacctggaatctagtaaaattggattcgatgtgggcatgaggtttaagatgagttttgaaggggatgacgtccctataaagaagttttctggaacagttgtcgataaaggagatctttctccacaatggcaaggttctgaatggaagacattgaaggtcaaatgggacgaagccacaaacttaaatggccctgagagggtttcctcctgggaaattgaaccattcgatgcatccgcacctgccatcaccatgcccgtgcaaccatcaatgaaaaacaaaaggcctagggagacagctgaaggcctggatattcatgcactggaacctgctcaagaattctggctctctggaaggcctgaacagcatgagaagacaagcgtaagctccagcgaacccaaacatcaagtcgcttggacaagtgaacgcgcaggatacagtgccatgagcagttcaatctgtcagaattctgcagtaactgggagctggttcaagggcttcaattcctccggctcacacccttccctgccagagatctcccagaaactgtttcaggtcaccagcaacgacgcgagggttcctccttggcctgggctctccgcttatcatgctgacgagccctcttccaagctgtcctgcaacactgctctgtgcagctaccagaccgaggaggtggctccaagattttccaatgccgtcgaagaggaaaagaaggagcccggcatgttccgtctgtttggcgtcaatttgattaaccatgctaggagtagtgctaccgctgacaagacgagtgtgggagcaggggaaacatcggcgcgagctgctggttcttttgaagactctgctcagctatcaagagtgacgaaggatcatacgcacatggtgaacggaagcccccgagaaatccaaagccaccagagttgcagtggaaggagtcgtatcaaggttcaaatgcatggaaatgacgtgtgcagagctgtggatttgggaaatctggatgggtacgagcagctgatgggtgaggttggagagatgtttgagatcaaagaccttggctccaaagagaaagaggaatggaaggttactttcattaacgacgagaatgagacaatggaagtcggagctgttccttggcaggagttttgccagatggtgaggaagatcgtgatccattccattggagacaggggccatatggaggcttgcccttgcctggggcaggatgggaagagggactattagaagaagggatttttttttttggctggggcagtcaggagatgggtgctgctgaaacatgatggcgtagcttgtcgatgacaaagaaggcaacagattggttgctggcgtcagttcttccttgagaaaaaaattcagtggaaggaagaagtgatgtaacataggatttgcagaaaagatttgataatgcgtcttttagaagtttggtttggtttaaagatgacaagttaatgtgtgtctagtgatctgcctaaagccttagcgacgggcaacaagcaataacaaggatggatgatgaccttaccttgggtatgttagctgtgtaaatattatgtatgtatgtatgggacattaaattggttggcatacttgactcctgatttatattgtacgtagtgtgttgcagtgctctggattcagttgtgatgtgctactattacaagtagtagaaggaatctggtttttagtccaagaatcaacatcaatatgtcaatcacaggcacactagtgtgtaattttagatctttttctgacatccatacctctctcctgttttgttagagtgtttttggttgcgggacag

SEQ ID NO: 33285 - DNA, 2930 bp, Zea Mays
gtttccttctctttccgcttccgccgaggccactctctttctctctctgcgcctgcgcctttctcttctccttctccttctccctcctctcaaccccaacaatctctgtctccccatctcctctcaacaaggcggcctcaacaaagtcccaccgcacctttctttaatggagcgagggtgagcctaacaaacactcgacacacaggaggaggtgctgcccgcttctcccctccctcagtctcactcgctccgctctcctccccgagaccaggaggccaagccaagaaccgcaaaccctcaggccgtggccatggcgcaaggagcaggacgggacccggaggagctcttcgaggagctgtggcgcgcctgcgcggggccgctcgtggagttgccccagaccaacgaaagggtcttctacttcctccagggtcacctagaacagctgcaagagccgacggacccggcgctgctggctgagcagatcaagatgttccaggtgcccaacaagatcctctgcaaggccgagacagaaacggacgagatgtacgcccagatcactctgcagccggaaccagatcaagtggatctaccccaattacctgaaccgcccctgcaggagacgtcaaggcccgtggtgcactccttctgcaagatcctcacaccatccgacaccagtactcatggcggtttctccgttcttcggcgtcatgcaaacgaatgcctcccagcactggatatgtcgatgccgaccccgacccaagagctcatcacaaaggacctacatggatctgaatggaggttcaagcacatatacaggggccaaccccgtcggcaccttctgactactggatggagcacgtttgtcacatcaaagaagctgattgctggtgacgcgtttgtctacctgaggagcgagaccggacagcagcgtgtgggagtgaggcgcctcgtgcagaagcaaagcacaatgccagcatctgttatatcaagccaaagcatgcatcttggggtgcttgcaagtgcatcacacgctattaggactcattccattttcctagtgtattatagaccaaggttaagccaaagccaatacatcgtcaggctgaacaagtacctggaatctagtaaaattggattcgatgtgggcatgaggtttaagatgagttttgaaggggatgacgtccctataaagaagttttctggaacagttgtcgataaaggagatctttctccacaatggcaaggttctgaatggaagacattgaaggtcaaatgggacgaagccacaaacttaaatggccctgagagggtttcctcctgggaaattgaaccattcgatgcatccgcacctgccatcaccatgcccgtgcaaccatcaatgaaaaacaaaaggcctagggagacagctgaaggcctggatattcatgcactggaacctgctcaagaattctggctctctggaaggcctgaacagcatgagaagacaagcgtaagctccagcgaacccaaacatcaagtcgcttggacaagtgaacgcgcaggatacagtgccatgagcagttcaatctgtcagaattctgcagtaactgggagctggttcaagggcttcaattcctccggctcacacccttccctgccagagatctcccagaaactgtttcaggtcaccagcaacgacgcgagggttcctccttggcctgggctctccgcttatcatgctgacgagccctcttccaagctgtcctgcaacactgctctgtgcagctaccagaccgaggaggtggctccaagattttccaatgccgtcgaagaggaaaagaaggagcccggcatgttccgtctgtttggcgtcaatttgattaaccatgctaggagtagtgctaccgctgacaagacgagtgtgggagcaggggaaacatcggcgcgagctgctggttcttttgaagactctgctcagctatcaagagtgacgaaggatcatacgcacatggtgaacggaagcccccgagaaatccaaagccaccagagttgcagtggaaggagtcgtatcaaggttcaaatgcatggaaatgacgtgtgcagagctgtggatttgggaaatctggatgggtacgagcagctgatgggtgaggttggagagatgtttgagatcaaagaccttggctccaaagagaaagaggaatggaaggttactttcattaacgacgagaatgagacaatggaagtcggagctgttccttggcaggagttttgccagatggtgaggaagatcgtgatccattccattggagacaggggccatatggaggcttgcccttgcctggggcaggatgggaagagggactattagaagaagggatttttttttttggctggggcagtcaggagatgggtgctgctgaaacatgatggcgtagcttgtcgatgacaaagaaggcaacagattggttgctggcgtcagttcttccttgagaaaaaaattcagtggaaggaagaagtgatgtaacataggatttgcagaaaagatttgataatgcgtcttttagaagtttggtttggtttaaagatgacaagttaatgtgtgtctagtgatctgcctaaagccttagcgacgggcaacaagcaataacaaggatggatgatgaccttaccttgggtatgttagctgtgtaaatattatgtatgtatgtatgggacattaaattggttggcatacttgactcctgatttatattgtacgtagtgtgttgcagtgctctggattcagttgtgatgtgctactattacaagtagtagaaggaatctggtttttagtccaagaatcaacatcaatatgtcaatcacaggcacactagtgtgtaattttagatctttttctgacatccatacctctctcctgttttgttagagtgtttttggttgcgggacag

SEQ ID NO: 33286 - DNA, 1007 bp, Zea Mays
cttagttgtttttattgagaactaatattttgctctgttgagtcaaaatttgtggtcaaactggtgtaccctatatatatgcatggtaatatggatgcaataaatgtttgaggaattggattttgtgcaaagtgctaaagaaatgtcactgtgcaacttattttggaaaaaaacaatgatcctaatggatactacaatagcaatgccacagtgcttcctgaactcaacaggataagtccaagggacaaaacatcattccctatatgatagcattcctaaccatatcagggccaatgacgaagcacccatagctgtggtaatctgatcggggctatattaattttcaaagtgacctttgatcatcgttattcatgaatcttcattattctttggatcctttcttagttagcatgtctggtcttaaaataggcttttctttcatcaaccttgatttaattttgagtataatcacaccttcacacgcaccttcaccaaaattttatcacaatagcaatgttgcggcatttctacaggataagtccaaggaacaaacatcatattctatatgataggatgcctgacctgatcagtgtcaaactgccaatgaagaagcacccatagttgtggctgctgctcaatttttaagcaagaaatctggagtgcagtttgtttctcagacgaaaaagtgggtcataccaaccataactcggttgtaaggtgccaatattcgcaaggaaaggtgctttgccccccgcgcgcgcatactgttacgtctttattgtatgaatcgtgtttaaaagtgaatggcaacagtcctggtagactacataagtttgaatttgatggttttggtatggtgatctgtaaacccggtagtgcaatttttttgttcattttcctatagaaagcaaatgtcaaaattttgaccatggcagactcgggtatatgtgaatcttattgtcatgtaatatttgaatatttgccaggcatcttgttctttgttttcc

SEQ ID NO: 33287 - DNA, 444 bp, Zea Mays
cataacataggagatgtggagtttagtggccatctgaatcgatcagaggagttcagtggtgaggctgctgctcaatttttaagcaagaaatctggagtgcagtttgtttctcagacgaaaaagtgggtcataccaaccataactcggttgtaaggtgccaatattcgcaaggaaaggtgctttgccccccgcgcgcgcatactgttacgtctttattgtatgaatcgtgtttaaaagtgaatggcaacagtcctggtagactacataagtttgaatttgatggttttggtatggtgatctgtaaacccggtagtgcaatttttttgttcattttcctatagaaagcaaatgtcaaaattttgaccatggcagactcgggtatatgtgaatcttattgtcatgtaatatttgaatatttgccaggcatcttgttctttgttttcc

SEQ ID NO: 33288 - DNA, 711 bp, Zea Mays
accgtcgaggatccagaaggctgaggttgtctatcctgctggatgctgcgagtgcgagctgtgtccccacctccagcgcaaatgtgaaatgatgatgctttgtgcagaggctctccctccctcactctcttgtcctggcatccaacattccaactttccatatggaattgtgaaagaagggggccttttttttcttcttcagcttgcggcacagttggttaaggttgcttcttctgatggcaaaatggctgcatccatagctggacatgatgacagcaactgtatatgatatggttcaagtgcattagttgcttgctcaacgttccaatggctgctgctcaatttttaagcaagaaatctggagtgcagtttgtttctcagacgaaaaagtgggtcataccaaccataactcggttgtaaggtgccaatattcgcaaggaaaggtgctttgccccccgcgcgcgcatactgttacgtctttattgtatgaatcgtgtttaaaagtgaatggcaacagtcctggtagactacataagtttgaatttgatggttttggtatggtgatctgtaaacccggtagtgcaatttttttgttcattttcctatagaaagcaaatgtcaaaattttgaccatggcagactcgggtatatgtgaatcttattgtcatgtaatatttgaatatttgccaggcatcttgttctttgttttcc

SEQ ID NO: 33289 - DNA, 799 bp, Zea Mays
gccacgtgtactagccatgctgctctggcaccctcagagctcaaccatgctgtgcccttgacaagcttagtcactacccctaccctcttattcagtcaccatagggcaggttgcagtgaagttgctctcctatcctcgagcttagttgatctctcgggtgtctttgtggttgtgcctacaagcttgagtttccctcctcaaccacttagttggtcagctcctgtatcctgtggtgttttccctttgtctggtgaccacgcagccgattcacccacctcgctgtggccagagatttccagggagtcgcatgcccgattgcccgtgtaatccttgttccaagttctccaaagaacaccttgaagaagtggtgtttgaagaaggagcctgctccagtgttgttgatccattggtggagttttatctaactgattatcatagtagaagagttctagatcttctcctgcaataaggaaaggttttggacgtctttggctttattagttgcttcatgtgggggtcttgaagcttagtttgcttatgtgtatctcttatggaaaggcttcacctttccaagtattgtaattatgttatgcactttgaagactatcaggacttgtaataatccaactcttcttatattgtaaaacttgagttttggaaatgtaaagcatgtttgtaaaagtcttctgctatatctccaatgtgtgtggatcactatctccaatgtgtgtggatcaaatgtgattactgtaatgtacatgttttgtgggagatccttgggaagatgagttcaagtgga

SEQ ID NO: 33290 - DNA, 679 bp, Zea Mays
gccacgtgtactagccatgctgctctggcaccctcagagctcaaccatgctgtgcccttgacaagcttagtcactacccctaccctcttattcagtcaccatagggcaggttgcagtgaagttgctctcctatcctcgagcttagttgatctctcgggtgtctttgtggttgtgcctacaagcttgagtttccctcctcaaccacttagttggtcagctcctgtatcctgtggtgttttccctttgtctggtgaccacgcagccgattcacccacctcgctgtggccagagatttccagggagtcgcatgcccgattgcccgtgtaatccttgttccaagttctccaaaggaaaggttttggacgtctttggctttattagttgcttcatgtgggggtcttgaagcttagtttgcttatgtgtatctcttatggaaaggcttcacctttccaagtattgtaattatgttatgcactttgaagactatcaggacttgtaataatccaactcttcttatattgtaaaacttgagttttggaaatgtaaagcatgtttgtaaaagtcttctgctatatctccaatgtgtgtggatcactatctccaatgtgtgtggatcaaatgtgattactgtaatgtacatgttttgtgggagatccttgggaagatgagttcaagtgga

SEQ ID NO: 33291 - DNA, 1255 bp, Zea Mays
gccacgtgtactagccatgctgctctggcaccctcagagctcaaccatgctgtgcccttgacaagcttagtcactacccctaccctcttattcagtcaccatagggcaggttgcagtgaagttgctctcctatcctcgagcttagttgatctctcgggtgtctttgtggttgtgcctacaagcttgagtttccctcctcaaccacttagttggtcagctcctgtatcctgtggtgttttccctttgtctggtgaccacgcagccgattcacccacctcgctgtggccagagatttccagggagtcgcatgcccgattgcccgtgtaatccttgttccaagttctccaaaggtcagtgaagcttacagagttgactgttctagctctactattgtgtgctgcccggaacagtgcggcgacgccgtgaactggcgctgcagaccgcctctgcgtcgacccgttcacccgtgccgtcctcggtcggtttcacgcgcacaccgtagccttgttaggtcgttgaagctctccgcgccattggtttgagctctaccgcgtcgtggccgcggaatcaagctcgagtttccaccgccgccgttggtagctggatatatgggtctccacgggtcgattaagcgcatatacaagtctactgtggtctgcggatcatgttggtaccctcgcttttgtctatgctactacaccacggtggtcgatccggcgccggcttaccggagctcccggcagcagcggtgtcgaggacctggaattgtaaaaagggtaggaggacagatctggtgcacgtgaaagaacaccttgaagaagtggtgtttgaagaaggagcctgctccagtgttgttgatccattggtggagttttatctaactgattatcatagtagaagagttctagatcttctcctgcaataaggaaaggttttggacgtctttggctttattagttgcttcatgtgggggtcttgaagcttagtttgcttatgtgtatctcttatggaaaggcttcacctttccaagtattgtaattatgttatgcactttgaagactatcaggacttgtaataatccaactcttcttatattgtaaaacttgagttttggaaatgtaaagcatgtttgtaaaagtcttctgctatatctccaatgtgtgtggatcactatctccaatgtgtgtggatcaaatgtgattactgtaatgtacatgttttgtgggagatccttgggaagatgagttcaagtgga

SEQ ID NO: 33292 - DNA, 1135 bp, Zea Mays
gccacgtgtactagccatgctgctctggcaccctcagagctcaaccatgctgtgcccttgacaagcttagtcactacccctaccctcttattcagtcaccatagggcaggttgcagtgaagttgctctcctatcctcgagcttagttgatctctcgggtgtctttgtggttgtgcctacaagcttgagtttccctcctcaaccacttagttggtcagctcctgtatcctgtggtgttttccctttgtctggtgaccacgcagccgattcacccacctcgctgtggccagagatttccagggagtcgcatgcccgattgcccgtgtaatccttgttccaagttctccaaaggtcagtgaagcttacagagttgactgttctagctctactattgtgtgctgcccggaacagtgcggcgacgccgtgaactggcgctgcagaccgcctctgcgtcgacccgttcacccgtgccgtcctcggtcggtttcacgcgcacaccgtagccttgttaggtcgttgaagctctccgcgccattggtttgagctctaccgcgtcgtggccgcggaatcaagctcgagtttccaccgccgccgttggtagctggatatatgggtctccacgggtcgattaagcgcatatacaagtctactgtggtctgcggatcatgttggtaccctcgcttttgtctatgctactacaccacggtggtcgatccggcgccggcttaccggagctcccggcagcagcggtgtcgaggacctggaattgtaaaaagggtaggaggacagatctggtgcacgtgaaaggaaaggttttggacgtctttggctttattagttgcttcatgtgggggtcttgaagcttagtttgcttatgtgtatctcttatggaaaggcttcacctttccaagtattgtaattatgttatgcactttgaagactatcaggacttgtaataatccaactcttcttatattgtaaaacttgagttttggaaatgtaaagcatgtttgtaaaagtcttctgctatatctccaatgtgtgtggatcactatctccaatgtgtgtggatcaaatgtgattactgtaatgtacatgttttgtgggagatccttgggaagatgagttcaagtgga

SEQ ID NO: 33293 - DNA, 792 bp, Zea Mays
cacgttgggttggtccagcctcatgtcatacatgcgcccacattattagtttaacatctccatgttcatgatttgtgaaatgtagtcatcaactaatacatgtgctagtcatcgactctgactagggacatcatttagaataaccatataagtaaagaatctcacaaacaattcacataattgctaatcaatacaaggggccttccatggatattcaattaagcaatatatatatcatggatacaaagaaatatgctcatctctatgattatctctagggcatatttctaacagtaataacctaacccgtgaagtaaaacttggcttaaggatccattattagtaagcttttatgcaaaaatgagtccttgataattgataagctttttcttgagtcccaaaaagctagcatgcccttgagagtctttttcttagtcgggtaagtcttgctgagtaattacctactcagggtttcattccctatgttgttgcaggaaaggttttggacgtctttggctttattagttgcttcatgtgggggtcttgaagcttagtttgcttatgtgtatctcttatggaaaggcttcacctttccaagtattgtaattatgttatgcactttgaagactatcaggacttgtaataatccaactcttcttatattgtaaaacttgagttttggaaatgtaaagcatgtttgtaaaagtcttctgctatatctccaatgtgtgtggatcactatctccaatgtgtgtggatcaaatgtgattactgtaatgtacatgttttgtg

SEQ ID NO: 33294 - DNA, 1608 bp, Zea Mays
ctttgaacttgtttagagtctgtttgcccagaaaaccttgaaatagctaatatgggtatttaaacctataaatttagtgttaatatatatatatacatatatagaaagagttagaccatataaattgttaggtaacaaacttagtgatctcaagtatgtttagccctctggtttatctaagtacgttcagattggtcctctttatcaaatcttagactatgtagaattgtgcatttgcttgtcctatgctcaattagtgatgtgtatgtttccccacctctcctttgtgggagtttgcatttcataacattacataagcatttatgtatctgtaattgacctatagaacaccttgaagaagtggtgtttgaagaaggagcctgctccagtgttgttgatccattggtggagttttatctaactgattatcatagtagaagagttctagatcttctcctgcaataaggcaagccccgatgcatttaccactttcctcgtattacaaaattttatcacttatagttacattaggtgctcagagttgattgattaaacacttgatgcatttccattccttgaaaagattgattaccataccttgccacctgttttatgaaagctagaaatgcttaatcctgctgatagattaggaaaaatgtttttgatctatgactcataattttcaaaagaaaaatggcttgggataatgaaggcatcatctgtagtgatgaattcattatccaggcatggcccctctgtcaggtgccaaatgttttgagaaatagtataagtaaacttgaggtcggacggttggcttgcaccagaacggaatctgggtgtagtgtctctgtctgtgtcgattaaggaccataccgattgtaagcttgttgatctataggactttttagttggccacatacctcgtcatgggtaagcatgaacccaactattccatacgtgaaaagacaatcatgcactgggcatcagagatgatgggagtagcagttatcctcctggcaagaggctggatggtaagataatgtgctcctgggtagcgcgaactagttcatgtagtggaggatccatgggaatggttgacatatgcaaggttaagtgctacatatgtcgtgtggttagagatccccagctaggcattaatcaattcaaattatcgttacttctcggtcacgtagattagatcactgctctgcatcgtagttaacaagtaaaacaaagttttagttaaaagaaatctagtgtagaccaagtgaatgatctagagacatcttagtagattcaggtaattgttggattacggggaggctacactagcgcaaaacaaaattttcaaccccataataccaaaaactactgcggttataggtcatggaatttaccactagacgcgcagagcagcggaagacatctcgatgtaaacgaatgcgtcgagcatgtgccgtgcagtcgccggcgtccttcacgtccttgcacggttcgtccaagtgctccagatgcagcacctccgaggtatccacacgtacagggaggaagccccgcgtaccgaactgctaggttcgcgacggcggcttggcaagggcgagaggtgag

SEQ ID NO: 33295 - DNA, 1438 bp, Zea Mays
gccacgtgtactagccatgctgctctggcaccctcagagctcaaccatgctgtgcccttgacaagcttagtcactacccctaccctcttattcagtcaccatagggcaggttgcagtgaagttgctctcctatcctcgagcttagttgatctctcgggtgtctttgtggttgtgcctacaagcttgagtttccctcctcaaccacttagttggtcagctcctgtatcctgtggtgttttccctttgtctggtgaccacgcagccgattcacccacctcgctgtggccagagatttccagggagtcgcatgcccgattgcccgtgtaatccttgttccaagttctccaaaggtcagtgaagcttacagagttgactgttctagctctactattgtgtgctgcccggaacagtgcggcgacgccgtgaactggcgctgcagaccgcctctgcgtcgacccgttcacccgtgccgtcctcggtcggtttcacgcgcacaccgtagccttgttaggtcgttgaagctctccgcgccattggtttgagctctaccgcgtcgtggccgcggaatcaagctcgagtttccaccgccgccgttggtagctggatatatgggtctccacgggtcgattaagcgcatatacaagtctactgtggtctgcggatcatgttggtaccctcgcttttgtctatgctactacaccacggtggtcgatccggcgccggcttaccggagctcccggcagcagcggtgtcgaggacctggaattgtaaaaagggtaggaggacagatctggtgcacgtgaaaggttagtgcacatagtgcatatattaaatcatcattattcatctcagatctaacgtctctggttgatctttgtaatttacaaataacattttctatcattacagcccaccacgtcggatggtggccttagcaaatataccaaacaactacatatattagatctaaaatgagtggtgataatttaatatgtgcatcattatactagatatattctcaaaagctaaaggtcgggggtttgggatctgatcagtgagtgtagtcaatagtgccttagaacacctcctagagactgttaaaaaattgttgtcaaaaaccttacattaggggttgttgtaaaaaaactccctaaaacattccaccgccacagcagactgctaaaaccttcaccttagaatttttaaaacagccaacatgggtcatcatagactgattgtgccaggtttttgctgccccacctctagcattttgtgcgccgtcgataacaggtatgttttctttctttctaaaagtgtcaatgcaatcggtgtcggcgttccgagacagggggtcccttgggccgacgagtgagtgtcgtcgcgtgccccagcccagatgggtcgagcgcgagggcgagcgcgaagggggagaagcgag

SEQ ID NO: 33296 - DNA, 897 bp, Zea Mays
ggacatcccttccttccacgtcgccaccaagctcggcttccacagattgttccagtacctgatgggcgcaaacctcaactcttcgaggatcaggatgaccacccctgtgctcacgagtgtggttccaggtgcagggcctctgcgctcctcggcctactccgtccggctgtacctgccggcgaagttccaggcttcccctccggttcctctcccagagctgaacctgcatccagatcggtggccaggccactgcgtcgcagcgaggagcttctcgggtcgtgcacgggacaagaacgtggtcgaggaagccgagaagctcgccatgagcctgagccggtcaccatgggctaactccacagactactccagcaagagcgcttactcggttgcacagtacagcagtccattccgcatcattggccgtgtcaatgaggttgtatggcattctcaaaggttgcaagctgtgttctaatatcagaaattacatcttgcatctgcttcaaggactccttccgcgcgcacagctcatcggtcactctgctcccgggacatcgaattcgaaagccttgccaactgactcggaagaaatggaacgagggtcccacatgagaggctcgatatcagaggctcggcgagcgatctccatgaccagcatgtctagattgagcagcttctcagatccaaacgcggtgtcacgggaatctatacgtgagcccttcttctcgctctagctgctccttccgttcacgcccaaccaaaacgagttctcaaccgaaccctagccgccgcaccttgccgccgcaccacagcctccgcaccacagccgccacactcaaaacaccatggatcgaactgctcccgtcgtcgctgttgcagaggctgttgatgccgctcgtg

SEQ ID NO: 33297 - DNA, 1168 bp, Zea Mays
caccgttatcgtcgaggtacaccaccatgagggcatattcccgtggtctccccccttttgctttgcttgccgagacggcgaccatggcgaagcagcagaatcctatccccatcccgatgccgctgtcgctgtcgctgcccctcgtcctcgtcgcgctgctcctgccggccgcccgcggcgccgcggagacgccgcagtacacgacggtgcacgcggagtcggacttcgaggtgcggctgtacggcgacaccgtctggatgtccgcccccaccccggacatcccttccttccacgtcgccaccaagctcggcttccacagattgttccagtacctgatgggcgcaaacctcaactcttcgaggatcaggatgaccacccctgtgctcacgagtgtggttccaggtgcagggcctctgcgctcctcggcctactccgtccggctgtacctgccggcgaagttccaggcttcccctccggttcctctcccagagctgaacctgcatccagatcggtggccaggccactgcgtcgcagcgaggagcttctcgggtcgtgcacgggacaagaacgtggtcgaggaagccgagaagctcgccatgagcctgagccggtcaccatgggctaactccacagactactccagcaagagcgcttactcggttgcacagtacagcagtccattccgcatcattggccgtgtcaatgaggtgtggttcgacgtcaactgcagatctacatctactgctgctggtgttgagtcctactgaaaaaaaaacctgccagatgtgatggataataataatttgcatgtaaaacacaagctgtcctgctttattccatctcttactcctagcctacaaattgcctcagcaatcgttaaccgccgtcgtcatcatcagattggcacgtaatagctggaacacgacggcggcagccagcaaggccaggactgccgcggaaatgtacttccagtttaccatcgtcatcgtcgtcggctcgatagatcgcactgtgcattcgtctggaatcaccacctcatcggcttcaacctcctcttttacttgaacgggcctaagtacaccttcgcctgtggtaacattcttgcacagcaatgtgcgctcgctaacattttctttgcacttttgagccaacgccccgttctttttcg

SEQ ID NO: 33298 - DNA, 4288 bp, Zea Mays
ttgcccatcatccaccagcgaagaaacatagggaaaagggaaaaaagatggtcgtgctgccgcgccattatagccccggaatccgcggcgcgcccccgccttccgtcctctctcccgccacaaatcgccgggcgcccgcgccgccccagcctcccttctccctccctccctcatcccctccgtgtcccggagcccagggagcggaggcgggcgggccggcgggcggccatggacgtggactgcgtctcgctgcccgacgccccggcgggcgacgtggatggcggcgccgcccggccgtggcccaaggccgtgaccaacggcggcgtccacgagctgctggagtgccccgtgtgcaccaactccatgttcccgccgatccaccaggcaagagctgggcgacatcaggtgtctggcgctggagaaagtcgccgagtcgctggagctcccctgcaggtactactcgctggggtgcccggagatcatgccttactacagcaagataaagcacgaggcgcagtgcggcctgagaccgtacaactgcccctacgccggctccgagtgcggcgcggccggcgacatcccttccctcgtctcccacctgagggacgaccacaaggtggacatgcacagcggctgcaccttcaaccacagatacgtgaaatccaacccgcgggaggtggagaacgccacctggatgctgacggtgttccactgcttcggccactacttctgcctgcacttcgaggcgttccagctcgggatggcgcccgtgtacatggccttcctccgcttcatgggggacgagaacgaggccaagaactacagctacagcctcgaggtcggcgccaacgggaggaagatggtgtgggagggcaccccaaggagcgtccgcgacagccaccgcaaggtgagggacagccacgacggcctcatcatccagaggaacatggcgctcttcttctccggcggggaccggaaggagctcaagctcaggatcaccggacggatctggaaagagcagcagacaccagacggcgcatgtactccaaatctgtgcagctaattaagcaatcttcaaacaaacaacaccttgcctgtccttctttctctttctaattaatcgtggtggtggtggtggtgctcaaagggatttatttatttattactaattattaggaggatgtaggatgctcgtgtaaatgaaactgtgtatattatatggatggcatggcatccctggccttaaatcatgtcacagcacagtactgtactgtacctacgggtggccggctgatcaaaagatctttgcttgctgacaaagctgtgtctgcatcttcatgactccatgtttgcattctattcctcccacacaacagtcaccagtgggcgtgccacgtggccgctatcccatccaatggttccacacctcctctttcccaataatcccaggcgccgcgaggcaaacaatctcctcttctctccccagattcactcaccgtccgtccgtccagggagccatggcagcagcagcagcagcctgcatctgtctgcagctctctctcccaagcaaccattcttcctctgcatgtcctccagcatacaggaagcgtgtcgcgctagccccagggagaggaaaccgtcttctctgcactgcatctggcgcctcttcttcttcttctgtggtggtgaccaaggagcaggaggaaggatctcctgagcccgaaatctttagctacaaagacgaccccaacttcaggggctgcaagggctgcggcagggacgagcttcagaggggctgcaatggacaaggccggatccagggcggcatagccgccgtcccgggcttcggctggtggcccatcaaggcgtaccggccgtgccccggcttcgtcgcgtccggcggccgctaccggcgccagggccaaagcatggacgacgttgcatccggcagggggaaaaagaaaccctctcccgccaaaaaacaagcttaacccctctagctagtttatgttcatcaggtgaattcagaatctacccaagatgggagggaactgggggaagctcaagttattcaggaacagcagttttttttgggtccacaacgccaatgtatatgcactagtttggagtactgtttgcagaaacaacaattgtatcagtagcttggaacatctgactgtaccctaattgtattattgtcttcatcaagtggcgaatgcaggatcttgcactggatcttgccggacaccgacttggggatggcgtccacgaagcgcagcagccggagcttcttgtacgacgcaacgcgccccgccacgtacgccatcatgtccgcctcgctctccggcgcgccacgtcgccgcaccacgcacgacgccgggacctcgccggcctcctcgtccggcagcctgcgcccgcatacatgcatgatgacccgcaggaacacacacgcacaatctccaactgcatgccgcggtccgctcggtcgcttacccgaagacggcggcgtcctcgacggacgggtgagacagcaggatggcctccagctcggcaggggcgacttggaagcccttgtacttgatgagctccttgatgcggtccacgatgaacacgtcgccgtcgtcgtcgatgtacccgacgtcgcccgtgtggagccaccccgcggcgtcgatggtgcgctccgtctcctccttcttcctgtagtagccctgcatcacggcctggctccgcacgcagatctcccccggcgtgttcttgggcagcgaccgccccgtgtcggggtccacgaacttcacctccaggttgggcaggatgaagccgaccgacttcttcttggcgacctgcaccgccgaccccacgtcctcgccgccgccgctggcgtgcgtcagcgtgatgcagctgtgctccgtgagcccgtacgcctcctccacctgcacgcccgggaacttgcgctcgaacgccgccaggaggtccggcgcgagcggcgcggcggccgtcatgacggacctgagggccaggccggacaggtcgaactcgtcggccacggggctcttcaccatggccagcatgaccggcggcacgacgggcgcgaacatgacgcggtgcgtcagcagcgcgcccaggaacgcgcgcaggtcgaagcggtccatcaccaccaccgtgcccttgtgccgcagcgtggcgcagcagatgccggtgatgccgtagatgtggaagaagggcatcaggcccagggtgaccacctgcccgaccagctcctgcccgacggcgaacatggaggagcagaggctggacaccaggttccggtggctcagcatcacgcccttggacacccccgtcgtaccagacgagtaggggagcgcgcacaggtcggactgctgcgccggctcaagcgccaccaccggcgcgcccgcgcggtccgccatggcgaggagctcgtcccagcctatggcgccgggaagccgcgccacgtccccgatgccgatcaccggcacgccagcgtccttcaccttgtcgtaggccaccgcgtcggcgaccacgagcctggcctcggagtcctccacctgcttcttgatctcggcggcgacggcgcgcgggttcacgccggagaagaccgctccggcggacatgatcccgaggctcaccacggggtacaccgccaggttcgggagcgcgaccaccacgacgtggcccctgcggacgccgatggaccgcagcgccctggcgaaccgcgccacgagcgccgtcttgtccgcgtaggcctcggcgtccgccagcacgaactccggcacggtgacgtcgtctggtacggccacgggcgggaaccggctccggaagatgtgctcctcctcagactcatgcaaatgcacggcggcgatggccgcgtcgcccatcctcagctgctgctggtggtggtggttgtgggtatggagctgaaggaagggcgctgcgttggcatttgaagagacgaccggaggtcttggcattgggccacgcgaggaaggtgaaggcatgttggtggtggcgacacaattcttgcgtggtgtcaagaaaggtggtgtgcaggtgaggatcggttgtgtcatggcctttgacctcgtagaacttggctgggtcatgctcatgtcctttgagctcacagagcttagagccaccggtcaacagtgacacgcgtgaaagcagcgttgtcgtgttcatcatagttcgcaatagagttcagatgatataatagttggttaagtgcatgcacaaattcttcaaatgaaagaaatatcaattcgcccccata

SEQ ID NO: 33299 - DNA, 424 bp, Zea Mays
tttagctacaaagacgaccccaacttcagggacgagcttcagaggggctgcaatggacaaggccggatccagggcggcatagccgccgtcccgggcttcggctggtggcccatcaaggcgtaccggccgtgccccggcttcgtcgcgtccggcggccgctaccggcgccagggccaaagcatggacgacgttgcatccggcagggggaaaaagaaaccctctcccgccaaaaaacaagcttaacccctctagctagtttatgttcatcaggtgaattcagaatctacccaagatgggagggaactgggggaagctcaagttattcaggaacagcagttttttttgggtccacaacgccaatgtatatgcactagtttggagtactgtttgcagaaacaacaattgtatcagtagcttggaacat

SEQ ID NO: 33300 - DNA, 1647 bp, Zea Mays
ggactgagcctgcataaatcgtcagcgaataggccgcccgcacgacttctcttcccaattcccatagatcgatcgccgacccctcgagcaacgcgatcgcccgccgacccgacggcggcatggacaccgagtccttgcagcaggggagctcctcgtcgtggcacacgacgggcgccgtgtcgtgtggagccgcgcagcagcagaagcgccagcggtgccagggttcttccagcgatcaagctggttccagctcaagtagttctctgcaaatatcagaaccagaaccccaacaaatccaagaagaagaggattactatatggaggatgattgtgatgatgattttgatggctacgacgaagatgattatgacttcgatgaagctgactttaaccagcaccttgctgataaatttgatgatttggatcttcctccaggcgtggaggccaccgtaccttggttgcagaaaactacacccaaggaagatgtcaaagagccacctaaatcaaatactgcagatgagaatgcaaataaatatacgcagttcaagcagtttgatactgttcagaatttctctgaccattactacgctaagaattctcatggagagccaaacagagcctggtcaaagagagttcaacatgactggaaacttctggagaaggatctaccagcgtatatttttgtccgggttgctgaagatagaatggaccttcttagggctgcgattattgggcccaagggaacaccttaccatgatgggcttttcttctttgatattcacattccctctgcttatccttgtgctcccccgctggtatattaccactctggaggacttcggattaatccaaacttgtataacaatgggaaagtgtgtcttagcctgttgggtacctgggatggtagaggttgtgagaagtggaatccagctcaatcgacaatgctgcaagttcttgtctccattcaagctctgattttgaatgacaagccatattacaacgagccaggatatgagtcctatgccaacactccgaatggagagcggttggctttggactataatgacaacacctttctgcactcatgcaagactatgttatactcacttcggaggcctccagagcactttgcagatcttgtcgctggccactttcgggtgcatgggcacacgattctcgcggcatgcaagcactacatggcgggtaatgatattgggtcagtggtgccagaggaggaggaggaggaggaggaggaagagtcatcagaacacaagagcggtgatgctggagcatcgggtagtgcaccagagctaggagtgatcaaggcaatccctacgaagagacgcagctcattcaatccaagcttgaaggtgctgtacgaagatctgctgatggaattcaatgtgaagggtgccgacacaaggaaattcatcgatgagaagttgaagaagaacaaacctgcagccgcctgaggaacatgcttgcaggcaaagcttttgtaggtataactggtcttggtggtgatatctaggacctggaacttgcttgctcacatgcttgtagctagctaggttcatctgaagtagctccggcctgcagatgattcgatcgtggtacagaccttgttgaaggacttcaagaagcctg

SEQ ID NO: 33301 - DNA, 1639 bp, Zea Mays
ccgacccctcgagcaacgcgatcgcccgccgacccgacggcggcatggacaccgaggttcttccagcgatcaagctggttccagctcaagtagttctctgcaaatatcagaaccagaaccccaacaaatccaagaagaagaggattactatatggaggatgattgtgatgatgattttgatggctacgacgaagatgattatgacttcgatgaagctgactttaaccagcaccttgctgataaatttgatgatttggatcttcctccaggcgtggaggccaccgtaccttggttgcagaaaactacacccaaggaagatgtcaaagagccacctaaatcaaatactgcagatgagaatgcaaataaatatacgcagttcaagcagtttgatactgttcagaatttctctgaccattactacgctaagaattctcatggagagccaaacagagcctggtcaaagagagttcaacatgactggaaacttctggagaaggatctaccagcgtatatttttgtccgggttgctgaagatagaatggaccttcttagggctgcgattattgggcccaagggaacaccttaccatgatgggcttttcttctttgatattcacattccctctgcttatccttgtgctcccccgctggtatattaccactctggaggacttcggattaatccaaacttgtataacaatgggaaagtgtgtcttagcctgttgggtacctgggatggtagaggttgtgagaagtggaatccagctcaatcgacaatgctgcaagttcttgtctccattcaagctctgattttgaatgacaagccatattacaacgagccaggatatgagtcctatgccaacactccgaatggagagcggttggctttggactataatgacaacacctttctgcactcatgcaagactatgttatactcacttcggaggcctccagagcactttgcagatcttgtcgctggccactttcgggtgcatgggcacacgattctcgcggcatgcaagcactacatggcgggtaatgatattgggtcagtggtgccagaggaggaggaggaggaggaggaggaagagtcatcagaacacaagagcggtgatgctggagcatcgggtagtgcaccagagctaggagtgatcaaggcaatccctacgaagagacgcagctcattcaatccaagcttgaaggtgctgtacgaagatctgctgatggaattcaatgtgaagggtgccgacacaaggaaattcatcgatgagaagttgaagaagaacaaacctgcagccgcctgaggaacatgcttgcaggcaaagcttttgtaggtataactggtcttggtggtgatatctaggacctggaacttgcttgctcacatgtagtagagagtatggtttaggggtggagtgctgagagagttctctctcggcactatttatcgccaatctaaatctaatgataggtttaccgcatcataaatatatatgtaacggctatatcgtctttcgctgattgttctggcatatcatgataggtttacccaaggacgaaagctaagtaccaattggtttggaactgtattacggtctacttgtttttatatatttgacgccatatagttcaattct

SEQ ID NO: 33302 - DNA, 1790 bp, Zea Mays
gagcctgcataaatcgtcagcgaataggccgcccgcacgacttctcttcccaattcccatagatcgatcgccgacccctcgagcaacgcgatcgcccgccgacccgacggcggcatggacaccgagtccttgcagcaggggagctcctcgtcgtggcacacgacgggcgccgtgtcgtgtggagccgcgcagcagcagaagcgccagcggtgccagggttcttccagcgatcaagctggttccagctcaagtagttctctgcaaatatcagaaccagaaccccaacaaatccaagaagaagaggattactatatggaggatgattgtgatgatgattttgatggctacgacgaagatgattatgacttcgatgaagctgactttaaccagcaccttgctgataaatttgatgatttggatcttcctccaggcgtggaggccaccgtaccttggttgcagaaaactacacccaaggaagatgtcaaagagccacctaaatcaaatactgcagatgagaatgcaaataaatatacgcagttcaagcagtttgatactgttcagaatttctctgaccattactacgctaagaattctcatggagagccaaacagagcctggtcaaagagagttcaacatgactggaaacttctggagaaggatctaccagcgtatatttttgtccgggttgctgaagatagaatggaccttcttagggctgcgattattgggcccaagggaacaccttaccatgatgggcttttcttctttgatattcacattccctctgcttatccttgtgctcccccgctggtatattaccactctggaggacttcggattaatccaaacttgtataacaatgggaaagtgtgtcttagcctgttgggtacctgggatggtagaggttgtgagaagtggaatccagctcaatcgacaatgctgcaagttcttgtctccattcaagctctgattttgaatgacaagccatattacaacgagccaggatatgagtcctatgccaacactccgaatggagagcggttggctttggactataatgacaacacctttctgcactcatgcaagactatgttatactcacttcggaggcctccagagatcttgtcgctggccactttcgggtgcatgggcacacgattctcgcggcatgcaagcactacatggcgggtaatgatattgggtcagtggtgccagaggaggaggaggaggaggaggaggaagagtcatcagaacacaagagcggtgatgctggagcatcgggtagtgcaccagagctaggagtgatcaaggcaatccctacgaagagacgcagctcattcaatccaagcttgaaggtgctgtacgaagatctgctgatggaattcaatgtgaagggtgccgacacaaggaaattcatcgatgagaagttgaagaagaacaaacctgcagccgcctgaggaacatgcttgcaggcaaagcttttgtaggtataactggtcttggtggtgatatctaggacctggaacttgcttgctcacatgtagtagagagtatggtttaggggtggagtgctgagagagttctctctcggcactatttatcgccaatctaaatctaatgataggtttaccgcatcataaatatatatgtaacggctatatcgtctttcgctgattgttctggcatatcatgataggtttacccaaggacgaaagctaagtaccaattggtttggaactgtattacggtctacttgtttttatatatttgacgccatatagttcaattct

SEQ ID NO: 33303 - DNA, 1800 bp, Zea Mays
gagcctgcataaatcgtcagcgaataggccgcccgcacgacttctcttcccaattcccatagatcgatcgccgacccctcgagcaacgcgatcgcccgccgacccgacggcggcatggacaccgagtccttgcagcaggggagctcctcgtcgtggcacacgacgggcgccgtgtcgtgtggagccgcgcagcagcagaagcgccagcggtgccagggttcttccagcgatcaagctggttccagctcaagtagttctctgcaaatatcagaaccagaaccccaacaaatccaagaagaagaggattactatatggaggatgattgtgatgatgattttgatggctacgacgaagatgattatgacttcgatgaagctgactttaaccagcaccttgctgataaatttgatgatttggatcttcctccaggcgtggaggccaccgtaccttggttgcagaaaactacacccaaggaagatgtcaaagagccacctaaatcaaatactgcagatgagaatgcaaataaatatacgcagttcaagcagtttgatactgttcagaatttctctgaccattactacgctaagaattctcatggagagccaaacagagcctggtcaaagagagttcaacatgactggaaacttctggagaaggatctaccagcgtatatttttgtccgggttgctgaagatagaatggaccttcttagggctgcgattattgggcccaagggaacaccttaccatgatgggcttttcttctttgatattcacattccctctgcttatccttgtgctcccccgctggtatattaccactctggaggacttcggattaatccaaacttgtataacaatgggaaagtgtgtcttagcctgttgggtacctgggatggtagaggttgtgagaagtggaatccagctcaatcgacaatgctgcaagttcttgtctccattcaagctctgattttgaatgacaagccatattacaacgagccaggatatgagtcctatgccaacactccgaatggagagcggttggctttggactataatgacaacacctttctgcactcatgcaagactatgttatactcacttcggaggcctccagagcactttgcagatcttgtcgctggccactttcgggtgcatgggcacacgattctcgcggcatgcaagcactacatggcgggtaatgatattgggtcagtggtgccagaggaggaggaggaggaggaggaggaagagtcatcagaacacaagagcggtgatgctggagcatcgggtagtgcaccagagctaggagtgatcaaggcaatccctacgaagagacgcagctcattcaatccaagcttgaaggtgctgtacgaagatctgctgatggaattcaatgtgaagggtgccgacacaaggaaattcatcgatgagaagttgaagaagaacaaacctgcagccgcctgaggaacatgcttgcaggcaaagcttttgtaggtataactggtcttggtggtgatatctaggacctggaacttgcttgctcacatgtagtagagagtatggtttaggggtggagtgctgagagagttctctctcggcactatttatcgccaatctaaatctaatgataggtttaccgcatcataaatatatatgtaacggctatatcgtctttcgctgattgttctggcatatcatgataggtttacccaaggacgaaagctaagtaccaattggtttggaactgtattacggtctacttgtttttatatatttgacgccatatagttcaattct

SEQ ID NO: 33304 - DNA, 639 bp, Zea Mays
gccgacccctcgagcaacgcgatcgcccgccgacccgacggcggcatggacaccgagtccttgcagcaggggagctcctcgtcgtggcacacgacgggcgccgtgtcgtgtggagccgcgcagcagcagaagcgccagcggtgccagggttcttccagcgatcaagctggttccagctcaagtagttctctgcaaatatcagaaccagaaccccaacaaatccaagaagaagaggattactatatggaggatgattgtgatgatgattttgatggctacgacgaagatgattatgacttcgatgaagctgactttaaccagcaccttgctgataaatttgatgatttggatcttcctccaggcgtggaggccaccgtaccttggttgcagaaaactacacccaaggaagatgtcaaagagccacctaaatcaaatactgcagatgagaatgcaaataaatatacgcagttcaagcagtttgatactgttcagaatttctctgaccattactacgctaagaattctcatggagagccaaacagagcctggtcaaagagagttcaacatgactggaaacttctggagaaggatctaccagggccatgtctactgctgtaagaaggtacaaatcatcctgaa

SEQ ID NO: 33305 - DNA, 2484 bp, Zea Mays
ggcaaagcaaagggcaatgggcaggcagacccgcgcggccatcctcctctagaaccttccacggccccacctcctccttcgttcctccgctcaccccaaccctcctcggctcctccctccaccgccttgacaacaagagccccctcgtcaagcagaaggctttaaggttgatcaaatacgcagttggaaaatctggtactgatttcaagagggagatgcaaaggcactcagcggctatgcgccaactagttcattacaaaggccaccctgatcccttaagaggggatgcccttaataaggctgttcgcgaaactgcgaatgaggctatagctgcaattttctccacagaggaccctaaacctgctgttgcaaccgaaagtcttggcaagcgcatacagggctttggaaatactaattacgagccatctagagatgacaagaagtctttccttagcgagcttagcgaggtagtgggtattggaagtgcatccattaagcaggggttgagcaactttgctgcagcgcatgcaatgatgacaaatgacaatggtagcacatacaggagccctaatctccgtagatctttgaccacggaatctgaaagatatggtcggtatgatccaagtgaaattcaacgtgagagccgagcctcatctgatgcttcaaagaatgcaccttctggtccttggggtccaacttccagttctacaccaactgatgaaactagctcaagtcaaccagggattaagactcgtgaagaaagacttctagagacaattgttactgcaagtggtgtgcgattgcaaccaacgcgagatgctctgcaaatttttttcgcagaagcttccaaattggatgcagttgccttgagccgtgcacttgagagcaaactgaattctccattatggcaggttcgcatgaaggctatttgtgtgttagaagccattgtaaggaaacaggatactgatccttactctatcatcgcttcatatttcactgagaacacagcttctgttgttaaatgctctgagctgccacaggtttctctcagagagaaagcctcaaaggtcttgaatatgctgattggggaacaacctaccggaaccgcagcaacaaaagctgcgatgcccacacctgttcagatgcctgatttgatcgatacaggtgatcaagatgatctggcaacaagttctggacatgcaagcattgaacagaattctgggaacagtgcatatgtttcttcagttgatgatttgcttggtggtgaacctatttctgatacaagtgtcactgctgatagtaatggaagcgacccatttgcagatgtatcattccatgaggcagagactaaggagactaatgatctgttctcagggttgacagtagaagagaaatcatcaactaccatgcatgatagttcttcggacaaaaatgaattaccagatatctttggcagctcccctgattctttcaaccagggtagtgttactgaccaaggaactgtcaatgatttgattgctggcttgaaccttaatggaacaggccatgctcagtctgcagttaaagcagaacccaatagcaacagtggttcacagttctttgatacaaaaaatgagtccggccatgtgccaagtgctgcaacattgaatgacattcttggtcaaaactcgctttaccaacagcagcagactccattgcagtacagctttcctcaacatatgatgctcaatcaatcatttcctggacaacaattaaattatggtgccatggggattcttcttgctcagcagcagcagttactgcaaagttttggaaatttcaatgctggacttgggaattcttctttcaattcgatgaacggtgggaatacatctgtgcttccagatattttcaattcaagtaatcaacctcaaaatcatgttgcagtgatgagcagttcgaagaaagatgacaataaagcttttgattttgtttcgcagcacgtggttcaagaaagtgaaacaggaagcaatgaacatgtccagatgctggaaagagctcaagtatttgatggacacaatagctgggaattccaaaaactgcatctcgtcacagcctcgcagattggatgcgtgattcacacggctggtttggcattgtttgaacacatgagaaggaagggttgttccatacggttggaagacgagatgttgcgttgtgtactatgtatttagacgaagactgttcttttttacgctgaaaaataaattgcatcttccgtctttctttgtgttgtgctccttttctctatcctttttcttttctagaaaaaaaaagagtgagacactatacgtgtttgttacctgcaggttttatgtttcttttctgtacaagtatatggaggatttttttggtggcaattgtaaagctttggaacgtgaataagagggtgcagtatgatatgtgctgctacatgatcctggcaatgctgcctcgtgatattgc

SEQ ID NO: 33306 - DNA, 1444 bp, Zea Mays
gatcctaacaaactatctatctataatcttgtccgtatagcgatggatagataacaataactcaacaaacttatctctaatataaatactcctctcctcgcttcctacccggcgcatcctcgtactagcgaatcctctcttcgtccaggctagtcggctcactcggcctgcgattccaagcgccgccggttcgccgcttcgttacctccaccagggatcatattgtcgaaataagttggcctcattcgtgatggaaggggcgcaaggatcaagcattgtgacaaaacacaataaaaggcagtctcctgtgcagagatggaggccagtttcaacagaagcagttccccagcatcaccaagatgacattattgagacatcaaattctggaagcaagaaaattatagaggattgcatagcttctagtgagaatttgccaccagatggaacaaccaatgttgttgaagttaccgccaatgatgcttcatcgtcaaaaaataatttaagttttgggtacagttcaactaaagtagttatagaagaccatgcggagttatctggcttcaataaggatctagctgggtccaatgtcttcgggacacattcctcctctgttgaggcggttcaaagtcgacagcttgactactctcatttcatatcacttccattggctttacacccagatcttgtcaacaaactgaactacttccagagttcgatccttggggaagaaaacagtaacaaagatgggagccaaagtgaaggttctattggtgaaatggactatgaccacaagcaagcggaagcaaaaatgggtgccaaaggctcccaatcagattttggcattgacaagtcaatatttatcaaacccgaaacgtttcacctgacggttcttatgttgaagttgtggaacaaggaacgtatagataaggcctcggatgtgctccagtcagtatctacccaagtaaatgaagctttggaaaatcgacctatttccatacagcttaggggtctgacatgcatgaaaggctttccagctaaggctcgggtggtatatgttccagtgctggaagttggtagcgaagggcgcctagctcatgcttgcaaagtcataactgacgcgtttatcaaggcaggcctagtttttgaaagggacgtgagagaactgaagttgcacgcgaccgtaatgaacgtgcggcacaggaagagaaataaacggaacacatggacggattcgtttgatgcccggggcatattcgggagatttgggaaggcggagtggggtgcatatcccatccatgagatccacctttctcagaggttcaagtttgacagaagtgggtactactattgctgctcgtcgatccccttgcctgcggagatgcacacggagtgagtcagttcctactcactgtctgtctccctctctggacgagacgagaaggcg

SEQ ID NO: 33307 - DNA, 1496 bp, Zea Mays
ctcacttccatcctccacacccctcccatcctccctctatcattactgacacttcttcgtctcacaaacttttttagagaatcaactctcggagttagagaattatggagcggagctctaccaaacgagctctaacttgacactttatttagagtctgcagtcgccgagccgcgtgtccgccgggccggcggttaccaagctcaccaaaaatctttccaggttcgaggccgcccatgttcgcctgcaggtctctcctcgcaagggatcatattgtcgaaataagttggcctcattcgtgatggaaggggcgcaaggatcaagcattgtgacaaaacacaataaaaggcagtctcctgtgcagagatggaggccagtttcaacagaagcagttccccagcatcaccaagatgacattattgagacatcaaattctggaagcaagaaaattatagaggattgcatagcttctagtgagaatttgccaccagatggaacaaccaatgttgttgaagttaccgccaatgatgcttcatcgtcaaaaaataatttaagttttgggtacagttcaactaaagtagttatagaagaccatgcggagttatctggcttcaataaggatctagctgggtccaatgtcttcgggacacattcctcctctgttgaggcggttcaaagtcgacagcttgactactctcatttcatatcacttccattggctttacacccagatcttgtcaacaaactgaactacttccagagttcgatccttggggaagaaaacagtaacaaagatgggagccaaagtgaaggttctattggtgaaatggactatgaccacaagcaagcggaagcaaaaatgggtgccaaaggctcccaatcagattttggcattgacaagtcaatatttatcaaacccgaaacgtttcacctgacggttcttatgttgaagttgtggaacaaggaacgtatagataaggcctcggatgtgctccagtcagtatctacccaagtaaatgaagctttggaaaatcgacctatttccatacagcttaggggtctgacatgcatgaaaggctttccagctaaggctcgggtggtatatgttccagtgctggaagttggtagcgaagggcgcctagctcatgcttgcaaagtcataactgacgcgtttatcaaggcaggcctagtttttgaaagggacgtgagagaactgaagttgcacgcgaccgtaatgaacgtgcggcacaggaagagcagaaataaacggaacacatggacggattcgtttgatgcccggggcatattcgggagatttgggaaggcggagtggggtgcatatcccatccatgagatccacctttctcagaggttcaagtttgacagaagtgggtactactattgctgctcgtcgatccccttgcctgcggagatgcacacggagtgagtcagttcctactcactgtctgtctccctctctggacgagacgagaaggcg

SEQ ID NO: 33308 - DNA, 1758 bp, Zea Mays
agaatcaactctcggagttagagaattatggagcggagctctaccaaacgagctctaacttgacactttatttagagtctatcggtaacccgcttcagctagcgagcattgagcagtctgcagtcgccgagccgcgtgtccgccgggccggcggttaccaagctcaccaaaaatctttccaggttcgaggccgcccatgttcgcctgcaggtctctcctcgcaagggctagtcggctcactcggcctgcgattccaagcgccgccggttcgccgcttcgttacctccaccagggatcatattgtcgaaataagttggcctcattcgtgatggaaggggcgcaaggatcaagcattgtgacaaaacacaataaaaggcagtctcctgtgcagagatggaggccagtttcaacagaagcagttccccagcatcaccaagatgacattattgagacatcaaattctggaagcaagaaaattatagaggattgcatagcttctagtgagaatttgccaccagatggaacaaccaatgttgttgaagttaccgccaatgatgcttcatcgtcaaaaaataatttaagttttgggtacagttcaactaaagtagttatagaagaccatgcggagttatctggcttcaataaggatctagctgggtccaatgtcttcgggacacattcctcctctgttgagatcttgtcaacaaactgaactacttccagagttcgatccttggggaagaaaacagtaacaaagatgggagccaaagtgaaggttctattggtgaaatggactatgaccacaagcaagcggaagcaaaaatgggtgccaaaggctcccaatcagattttggcattgacaagtcaatatttatcaaacccgaaacgtttcacctgacggttcttatgttgaagttgtggaacaaggaacgtatagataaggcctcggatgtgctccagtcagtatctacccaagtaaatgaagctttggaaaatcgacctatttccatacagcttaggggtctgacatgcatgaaaggctttccagctaaggctcgggtggtatatgttccagtgctggaagttggtagcgaagggcgcctagctcatgcttgcaaagtcataactgacgcgtttatcaaggcaggcctagtttttgaaagggacgtgagagaactgaagttgcacgcgaccgtaatgaacgtgcggcacaggaagagcagaaataaacggaacacatggacggattcgtttgatgcccggggcatattcgggagatttgggaaggcggagtggggtgcatatcccatccatgagatccacctttctcagaggttcaagtttgacagaagtgggtactactattgctgctcgtcgatccccttgcctgcggagatgcacacggagtgaggtgtgtagctgtgatcatgttgtaggtttttaaggggcgtttatagcatatacatatatatattttaccgcagttcatgaggcgtttaaccttgttattagcgttggcccttaggggccaggtgttaccatgtatctatctatcggtttgaatcaccgatgggcaggtgttaccgtgcatctagtgttttgaatctgaatcgccgatttgagccgttgttggatgctgttgtatgttacaagcaatggcaggcactggtagtgggttccctgttgtaaagttgtagttggtgttgaactgttggttgttattgcctttccatatggcccattccattgtgcagtcaa

SEQ ID NO: 33309 - DNA, 1783 bp, Zea Mays
agaatcaactctcggagttagagaattatggagcggagctctaccaaacgagctctaacttgacactttatttagagtctgcagtcgccgagccgcgtgtccgccgggccggcggttaccaagctcaccaaaaatctttccaggttcgaggccgcccatgttcgcctgcaggtctctcctcgcaagggctagtcggctcactcggcctgcgattccaagcgccgccggttcgccgcttcgttacctccaccagggatcatattgtcgaaataagttggcctcattcgtgatggaaggggcgcaaggatcaagcattgtgacaaaacacaataaaaggcagtctcctgtgcagagatggaggccagtttcaacagaagcagttccccagcatcaccaagatgacattattgagacatcaaattctggaagcaagaaaattatagaggattgcatagcttctagtgagaatttgccaccagatggaacaaccaatgttgttgaagttaccgccaatgatgcttcatcgtcaaaaaataatttaagttttgggtacagttcaactaaagtagttatagaagaccatgcggagttatctggcttcaataaggatctagctgggtccaatgtcttcgggacacattcctcctctgttgaggcggttcaaagtcgacagcttgactactctcatttcatatcacttccattggctttacacccagatcttgtcaacaaactgaactacttccagagttcgatccttggggaagaaaacagtaacaaagatgggagccaaagtgaaggttctattggtgaaatggactatgaccacaagcaagcggaagcaaaaatgggtgccaaaggctcccaatcagattttggcattgacaagtcaatatttatcaaacccgaaacgtttcacctgacggttcttatgttgaagttgtggaacaaggaacgtatagataaggcctcggatgtgctccagtcagtatctacccaagtaaatgaagctttggaaaatcgacctatttccatacagcttaggggtctgacatgcatgaaaggctttccagctaaggctcgggtggtatatgttccagtgctggaagttggtagcgaagggcgcctagctcatgcttgcaaagtcataactgacgcgtttatcaaggcaggcctagtttttgaaagggacgtgagagaactgaagttgcacgcgaccgtaatgaacgtgcggcacaggaagagcagaaataaacggaacacatggacggattcgtttgatgcccggggcatattcgggagatttgggaaggcggagtggggtgcatatcccatccatgagatccacctttctcagaggttcaagtttgacagaagtgggtactactattgctgctcgtcgatccccttgcctgcggagatgcacacggagtgaggtgtgtagctgtgatcatgttgtaggtttttaaggggcgtttatagcatatacatatatatattttaccgcagttcatgaggcgtttaaccttgttattagcgttggcccttaggggccaggtgttaccatgtatctatctatcggtttgaatcaccgatgggcaggtgttaccgtgcatctagtgttttgaatctgaatcgccgatttgagccgttgttggatgctgttgtatgttacaagcaatggcaggcactggtagtgggttccctgttgtaaagttgtagttggtgttgaactgttggttgttattgcctttccatatggcccattccattgtgcagtcaa

SEQ ID NO: 33310 - DNA, 3144 bp, Zea Mays
ggaatttgtgtgggtcccgctccaagtgaagtctgggcctggaactcggaactcacgtaactcccacccgacccgactcaaagtcacccgatccgcggccgcgtctgccgtctggtggcaccagaattgaaccccacccgcggccgccgccgcagcaacgtcggcaatccgagacgccggaggcctcctcctctcctaataccgccccccctcgggaccgggagggagtccgccgcggtgcggatcgcggccacggccacggaaaacaccggggcgcggctcatggaccgcatcgtcggcggcaagttcaagctcggccggaagatcggatgcggctccttcggcgagatctacctcgccacgcacgtggacacctacgagatcgtcgccgtgaagatcgagagcagcaagacgaagcatccacagctgttctatgaggcgaagctgtacaataccctccaaggaggaagtggcattgccaacgtcaagtggtgcggtgtggatggagaagagaatgttctcgtcattgatttgctggggccgagtttggaggacctgttttgttattgtggccgaaaattcacgctgaagactgtcctgatgttggctgaccagatgattacaagaatagagttcatgcattccaaagggtacttacacagagacatcaaacctgacaactttctgatgggtcttggtcggaaagcaaaccaggtatatataattgattttggtcttgcaaaaagataccgtgattccactacgaatcgccatattccttacagagaaaataagagcttgactggtacagcgcgctatgcaagttgcaacacccaccttggaatagaacaaagccgcagagatgatttggtatctctaggctatgtgcttttgtattttctccgaggaagcctcccttggcagggactaaaagccgcaacaaaggcacagaagtatgacaagatatgtgagaaaaagatatcgactcctatcgaggtcttatgcaaatcctgtccggtccagttttcatcttacttccattattgccattcattggcatttgatcagcgacctgactatgcatttgtgaagcgacttttccgtgacttgtttatcagccaagattatgagtttgattatgtcttcgactggacagttttgaaatacaaacaaggccacaaacaaaagcaaagtcctggggcacctattgctcgacctattcaagcacatggaccgaaacaagcaggtgtaaatggtgttattaatcataacgaagcccaggagcatgtagagacaagtcgtccaacagggcaagctgcatggtcgcaagacaaacaggcaaccaacaatgatcggaatcctgacgtgcggcataccgtgaaccttagacaagacatggctgctggaaaagcacagctgacaacatctgtggctcttcctagttcccagtggaaaaattatagtgattcaagacataaaggacaatttgatgctgttcaccacaatcagggtattgtaaacataactagctcatctaacagttggcttcctacattccagcacaatgccccaggaaaatgacagatcatatctggtggagcaaagaggaagtgctttgagagttagaggaggcccctgttcatctgagttggttcagaaaatctactggatatcttctgctgaaatgctgtgttggaatcattcaagtaggccaaaaaggggggaaaaggtacgaagggaggtgtagtaagtgaagtcatggaaggtgctataaccttttgttggtcttgctctgacgatgtttcccttttcatcgttatgctggccaagtccagccatgggagttgtcatgaagtcactttacctggttgtgtatattggctatggatctttgatcccaaagttgagaatgaagtcttgcatttcgaagcaaacaaggacaagtcggtgaacttttcatgtaaatcaagacgtaacctcgtggaaagctgggagatgcaacgagtcgaggtatgtaaaatttcaagattttcttggcctagctagctagtgataaggacagtgttttagtgttccctaaataatacattgctggctagtaagtgcctatgcgaggttatcatttgaatttggcaaggcagcactatgtacggatgatgatgtacactcacttctactctcacgtatacttgtcatatgctcctcttacttgtatgcatgccatttcctggactaaaaatcgatcgcagctttggttcttttttgctttcctgtgctaatgatggatgcagtctacttgagacgtcggtaatgctgcctgctttggttgggcatcgggagttggtgccccccagatttagggtcttgtcgagcgaatgaacaggactaggaggatgatggaaagcagaggaacaaagcttgtcaaatgaaggctggcccccgtctcatgccacttgttcttgacatcagaaagcactacggacaagaacactgcacagattgtacttatatcagtatccacacaaggatcgatcctcagattcagttccatacaagaactgcttatcaaaaagattcttcgcactagctgcgggaaacacggattggaggccgcatcattctctccattctccaacatgagaattaaaggaagcaaagaaaggaggaggaactaaatgaagccctgtcactcagtttgagccatcattctctttccgtaagcatccaatcatatgggccattaaagcaggcaaaggagagagagagagagagaagctcagtcaggatattccatgaaaaacgcaaaagaaagcacctgcaatcatcaccagcttcatcactcatcaggctgctaatgctaatggcggggtatattccccatcctggctctcccctgtcgggcgggtttcctgtgaatctgtgattcaatttgctgctcaccaggtggtgccaaacgcttgtctccctccctctaaaaaaacacttgtctcacagcttctagataccgtgcagagttgcggacacgcacttagctcgatgtcatagacagtagtgcacttgtatatttgattccctttgttttgttggtaactaatgattcagatgaagcgcacgtaaccacatcatcacacggctgcataaatt

SEQ ID NO: 33311 - DNA, 1757 bp, Zea Mays
caaggaatttgtgtgggtcccgctccaagtgaagtctgggcctggaactcggaactcacgtaactcccacccgacccgactcaaagtcacccgatccgcggccgcgtctgccgtctggtggcaccagaattgaaccccacccgcggccgccgccgcagcaacgtcggcaatccgagacgccggaggcctcctcctctcctaataccgccccccctcgggaccgggagggagtccgccgcggtgcggatcgcggccacggccacggaaaacaccggggcgcggctcatggaccgcatcgtcggcggcaagttcaagctcggccggaagatcggatgcggctccttcggcgagatctacctcgccacgcacgtggacacctacgagatcgtcgccgtgaagatcgagagcagcaagacgaagcatccacagctgttctatgaggcgaagctgtacaataccctccaaggaggaagtggcattgccaacgtcaagtggtgcggtgtggatggagaagagaatgttctcgtcattgatttgctggggccgagtttggaggacctgttttgttattgtggccgaaaattcacgctgaagactgtcctgatgttggctgaccagatgattacaagaatagagttcatgcattccaaagggtacttacacagagacatcaaacctgacaactttctgatgggtcttggtcggaaagcaaaccaggtatatataattgattttggtcttgcaaaaagataccgtgattccactacgaatcgccatattccttacagagaaaataagagcttgactggtacagcgcgctatgcaagttgcaacacccaccttggaatagaacaaagccgcagagatgatttggtatctctaggctatgtgcttttgtattttctccgaggaagcctcccttggcagggactaaaagccgcaacaaaggcacagaagtatgacaagatatgtgagaaaaagatatcgactcctatcgaggtcttatgcaaatcctgtccggtccagttttcatcttacttccattattgccattcattggcatttgatcagcgacctgactatgcatttgtgaagcgacttttccgtgacttgtttatcagccaagattatgagtttgattatgtcttcgactggacagttttgaaatacaaacaaggccacaaacaaaagcaaagtcctggggcacctattgctcgacctattcaagcacatggaccgaaacaagcaggtgtaaatggtgttattaatcataacgaagcccaggagcatgtagagacaagtcgtccaacagggcaagctgcatggtcgcaagacaaacaggcaaccaacaatgatcggaatcctgacgtgcggcataccgtgaaccttagacaagacatggctgctggaaaagcacagctgacaacatctgtggctcttcctagttcccagtggaaaaattatagtgattcaagacataaaggacaatttgatgctgttcaccacaatcagggtattgtaaacataactagctcatctaacagttggcttcctacattccagcacaatgccccaggaaaatgacagatcatatctggtggagcaaagaggaagtgctttgagagttagaggaggcccctgttcatctgagttggttcagagttaagcattgcacaatctgtagacttgatgtctcatgtattgttactgagaaatctactggatatcttctgctgaaatgctgtgttggaatcatt

SEQ ID NO: 33312 - DNA, 1456 bp, Zea Mays
gtgtgggtcccgctccaagtgaagtctgggcctggaactcggaactcacgtaactcccacccgacccgactcaaagtcacccgatccgcggccgcgtctgccgtctggtggcaccagaattgaaccccacccgcggccgccgccgcagcaacgtcggcaatccgagacgccggaggcctcctcctctcctaataccgccccccctcgggaccgggagggagtccgccgcggtgcggatcgcggccacggccacggaaaacaccggggcgcggctcatggaccgcatcgtcggcggcaagttcaagctcggccggaagatcggatgcggctccttcggcgagatctacctcgccacgcacgtggacacctacgagatcgtcgccgtgaagatcgagagcagcaagacgaagcatccacagctgttctatgaggcgaagctgtacaataccctccaaggaggaagtggcattgccaacgtcaagtggtgcggtgtggatggagaagagaatgttctcgtcattgatttgctggggccgagtttggaggacctgttttgttattgtggccgaaaattcacgctgaagactgtcctgatgttggctgaccagatgattacaagaatagagttcatgcattccaaagggtacttacacagagacatcaaacctgacaactttctgatgggtcttggtcggaaagcaaaccaggtatatataattgattttggtcttgcaaaaagataccgtgattccactacgaatcgccatattccttacagagaaaataagagcttgactggtacagcgcgctatgcaagttgcaacacccaccttggaatagaacaaagccgcagagatgatttggtatctctaggctatgtgcttttgtattttctccgaggaagcctcccttggcagggactaaaagccgcaacaaaggcacagaagtatgacaagatatgtgagaaaaagatatcgactcctatcgaggtcttatgcaaatcctgtccggtccagttttcatcttacttccattattgccattcattggcatttgatcagcgacctgactatgcatttgtgaagcgacttttccgtgacttgtttatcagccaagattatgagtttgattatgtcttcgactggacagttttgaaatacaaacaaggccacaaacaaaagcaaagtcctggggcacctattgctcgacctattcaagcacatggaccgaaacaagcaggtgtaaatggtgttattaatcataacgaagcccaggagcatgtagagacaagtcgtccaacagggcaagctgcatggtcgcaagacaaacaggcaaccaacaatgatcggaatcctgacgtgcggcataccgtgaaccttgcccagttgttccgcggtgtcttttgggttttcgattgaccactgttggatataagaacaaaaagtttgaagttgac

SEQ ID NO: 33313 - DNA, 699 bp, Zea Mays
atgctatatttattcgatcgatcgtgggctcgtggaaaattaagtaaaaacttggaggacgaaaacacgcattgtgttgtgtcggtggcacgcatgcaggtgcacttcgtctcagcgtcgtggtcgtggatctgtatccgatcccgccttacattacatgtcggcggcgtgctcctgttcgccaccgcggcgcgcgatgaggggcacgaacttgagcatgacgtccacggcgttctgcgccgcgatgtcgaggaacgtggctgcctcgttgctgatggaggagccgccgccggcgaggtcggagagggagcggatggtgatgaaggggacgccgtgctggtgcgcgacgagggccacggcggcgctctccatctccacgggggtgcacccgaagtgggagcggatgaactggcggtagctggcgttgtcggtgtagatgttggcgctgcagcccctgggcacccgcgtcacccggggcgcgcggggcaggcacgtcgtcgcgttcacgcacgccggcagctccagcccctccagcttcccggcgagcgcgtagtagcgcttgttcacgggcaccagaacgcgtgctgccgctcctccggcgtgccggagatggggaagatctcctccggctggtaccacacgctgttgagcgtgttcgccgccagctccgggttgccggcgtcctgccccaccgtgtag

SEQ ID NO: 33314 - DNA, 3583 bp, Zea Mays
tccctcccacgagagcaccgacgtccggactccggttcggtggacgcgcacggacgaacccctctggaaagagagaggattcctccgccgcttccgcgttggacgcactggacagctcacgcacgccgctgctttcgcagccagccagttggttccaacggaacatttccatccacgcccgccaccgcgcaccggcatctccatctccatctctatctctgatccgctgcagcccgcaggcacgttctccatcagtccggccgaccggcgcgcggcaggcagcgagcgggccactgtgtgcgcgcgcagcgcagctaccgaattttcgctgcacaaaaccagagggaggagaggggagggtgggggcaaaaagggaacgaaaagaaagggagggacagaggtgcagggccaacctgcgtggtgcgggtggtttcgagcacgggcaagcgccaccccgctcgctgccgatcccaatccggctacagcagcggccgccggccgccccgcctgcggggcctccctccgaccgttccccccgccctccatggcaggctccatggtggaccgcgccaccagcgacatgctcatcagcccggactgggctaagaacatggagatctgcgacatatgcaaccgcgaccctgggcaatcgaaagatgtcgtcaaggcactgaagaaacggattggccacaagaatccaaaagttcaacttcttgcgctaactttgttggaaactgttattaaaaactgtggggatatacttcacatgcatgtcgcagagagagatatattgcatgagatggtgaagatagtgaagaaaaagtctgatcctcgtgttaaagagaaagtattggtgctgatagatacatggcaagaagcatttgggggaccacgtgcaagatatccacaatactatgcagcataccatgagttggtgcgtgctggagctgaattccccaagagaccagagaaacctgcacctttgtttaatggtcagtctcaagcagcaaggaatatgcgtagtcctgaccaacaggatgctgcagaatcttctactgccaatgatttccctgctttgagcatgtcagagattcagaatgctcgtggtattatggatgtacttgccgagatgctgaatgctttaggccctggaaacagagagggattaaggcaggaggtaattgtggaactcgtggaccaatgccgcacttacaagcagagagtagtgcagctagttaattctaccacggatgaggaacttatgtcgcaggggctcgcactgaatgatgatttgcagagtgttctagcaaaacatgatgcaatagcagcaggcattgcagttcgagtggagaaaaaaccaaagtctttgcaatcacttgtagagactgaggattcggcaaaccaggactccaaaaaggagcagggactcatagatattgaggatcccacaagccaagatgctgcaaaagagccaaatcaaagtacaagtgaccaatctccttttgagcaattagctcttccagcaccaccagtgtcaaatggcgcagcaacaaaatctgaccttggcattgatcttctgagctgggatgatacccctgctacagcacaaaatccactagctcttgttcctgtcacagatcctcttgctgactcgacttcatcgaatcaaaatgcactagcaattgtggacacattttcacagaacagcaccgttaacagcaacactcaagctgctgacccctttggtctcaatccaagttctgctattccaggatctcaggcatacaacactccaactcagcagcatttccagtcgcaacaggcgacactgtatccgaacgggggtgctggaacgtcctatgatcaggcatcccagtttaataatgttaattcagggtggaatgatcaagctgccaaccttccagcagagcaagcactgaattacgatgatcaaagtggaaaccttccgccacctccttgggaggctcagccagcggcaagcaacgaaatgccaaatggtgaattgggaggcgtgcaacctctccctgggacagctgggcagttcggcggcatgcagcaggcattgcaaccacaagttaaccacatgggagttccacaaaggcagccaatgtacagcaaccagtcagggattggggtggcgccaacactgatgcaggcaggcttggggaaccagcagttgggttcgacatccatgatgggcatgcctccacagatgtatggcggcggatcgcaggcagccatgatgtacccgcaacaaatgccagtggcgccgcagcagccgatgtatggtggtggtggtggtcgtctggcagggtacatgcagcatcctgctgtggccgctgcgcactactacagcaacctggggacggcgggaatgtatgggtaccccggcgcgaacgggctgtcccagagcatgtatggcctctcggtgcaggataactcgtcgtaccagactaagacggcgccaccctctgcggtgatgaagcccgaagacaagcttttcggcgacctcctgagcattgccaagaccaagaaagcttcatgagacgagcacgagcaggagcaggagctttgtcgtttgatcttttacacttgtgtaacattcattgtctggctgtcgtataagctttttggggtcctcttttttttttaaaaaacattatttgttcccacgatcccattggattcgttataccgtacgtaaatgatgattcaataaagggtgtgcagtacgtacttacgatattgtacatacggtgcagaaatgttttcagtattcatatatgtataaggaaccgatgacggcggagatccggcgagctgtgtacagacccaaaggctctcctcatctgaagcatccgtggctttccttggagatgtaacctgccttttctgtttttaatcaatcatctctgtactctgttctgcctgcgtcgctttcggctgcatcgctagcactagcagcggggtggggtgggggtcgtagtcgtgctaagcaagcagcgatccgcaccagaatccatccaatcgcgcggccatgggcgacggcgagacgcggctggtggccgccgcgacggcgaggaagtggctggaggacccgcgcgtggggtacgacggcggcgtcggcagccaggcgctgagctgcgtggcgatcgccggcgcgcgggtctccgtcgccgagcgcggccgcgtcgtctgctcgctccgcgtgcgcgcccccgtcgccgacgcggaggggaggtggcacgccggagcgatcgcggcggcggtggactgcgtgtgctcggcggtggcgtacacggtggaggccgcgcccacggctaccgtccactacagcttgtcctacttctcgccggccgatcgcgacgcacgagctcggactcggtctttggggccggccgggatcagaatcagacgcgggtacgagcggtgccgcggcattgtctggatcttgcactggggaacgcatcgcatcgtgggccgttagggtatgtacagtggtgtttaatgtgcaggctcttaaggtgttttaggggttatttgcaaaaaaatcttagagccg

SEQ ID NO: 33315 - DNA, 2764 bp, Zea Mays
gaggaccactggtccgacccggcgttcaaccaaaggaaattggacacccgaagaggatgctatattgtcccgtgcggttcagacataccaagggaaaaactggaaaaagatagcggaaagttttccagacagaaccgatgtacaatgtttgcacaggtggcaaaaggttctaaaccctgaattggtcaaagggccatggtccaaagaagtggcacaatcatcttaacccagccataaacaaggaggcatggacgcaagaagaggagattactcttattcatgctcataggatgtatggaaataaatgggccgaacttacgaaatttttacctggaaggacggacaatgcaattaaaaatcactggaacagttcagtgaagaaaaaggtcgattcgtacatatcttctggtttactttcacaagtcccatgcctctctctgattgaatgtcctgcacaatgtgactctttatcggctatggaccaacaaaacaacggaggtactgattgcaatgaccagaacactagcgtggtcttaagctctgatttacaagtaaatgtggatgccaacaagaaagaagcacatgactctcactcgtccttgtgtcaaggggtatgctatccttccacagagactgtaggatctgttttgcctgatgacctggagatggatatggatgaaggatcaggaaactctatttttgcagacgatcaaactctttgtagcacatcaaatcaagaacaatctatggtgccatttgttgttgcacaggaaatgcctgtctctgtgctatcaagtgtttctagcgctgagcagaaacggcacttaatctctgatgccaaaagcttgaaatccgaactttggaaagatgtttgtttgcaaactcttattacaggagatacagatgaccctgatgcttcttcaagattaaataacccagattcttctaaaatggacaccaattttttgaaagaggcctacccattacacacaccaaatccatccagtgtgattgaaactgtatatgaaccgatggcgttggtgacaatctctcccccttttatatgttcagatggtttgtctttcgcacccgaaaatagatctaagccaggagaaatgtcagactgtgaagcagagatggtcacatgctcaaacaatttttttggtaatgccgagcaatctgctaaacttgccagcagtgatgacaggccagaggctttcacaatgactgagagcactacaaactgtgggggtgaacaattgacagatgccaaagaacctgtggccagtacagcaaaagaacggttatcgaaagacatcgagactatgccagataaaaagaagggtgagggggctctattctatgaacctcctcgattccctggtttggatgtcccgtttatcagttgcgatcttgtaacttctgctgatctgcaagaatttagtccccttggaattaggcagtggatgcggtcgaccatgaatgtcccaactcctttaagattatggggctctccaacacatgatgaaagcccagatgcactaaaaactgctgctgaaagcttcccatgcacaagttcaataatgaaaaaaagacagagaagtctattgtcccctactccagatgaaagaattgagaagaaatctgggattgcaaagggggtgacggacatctcctatatgataacggccacatgttccatgaatgcaaccaatgatgaagacattgttactgaatcagctgtgtgtgctaagcaaccttctttgaaacatctagacaagaagcttgagttctctgacattaacaaggaaaactctgatggagcatctgaacaggccaaagatgcacaaaacacacaactcgtggatgagcaacattcctcaccaaatgttgtgaatcctaacactgatctacaagacaatatacaacctgtacagattcttgtagagcaaagcagcaataaccttatttcctctgatcatggtgcaaagccatcctgtaaggaagtgattagttcaaaatcaaagcctacaaaactacttgttgaaaaatcatcaccatgtatcaacgtggattacgaatatgtgaatttattggctgataccccaggtatcaaaagaggactcgaatctccatctgcatggaagtctccttggtatatcgatatgcacatgcactttcagggttttgtcagcccagcagacagaacttatgacgcgttaggattagtgaatcgtttaagcaagcacagtgctgctgctgcagtggaggcctgtgagatgctagcaagtggcaacacgacttctgataaggaaaacaaggataatacggatggcaaggaactagtgacaagaaaatcacagattaagatcatggccgaggcgcgagtcctggatttcgacgaatctcccgcacctgcaagaacagcagataagaaacttggcagctgtcaccggagatctgttagctcacccattcttccttcccccaaccttagaagtttccgataggtacaccatatatggcatcatcgtacattacccacctgcatgtattggtgaactctattgttattatgtctccttagagcgcgttgttgaaactattggagcgtttcctttctttcgttactctattgttattactattattatgtctctcagcccggaaacaggcatcagtaccagtgaactgttgaaactaccctaatcattcaaattaaattattatattgcccgatgcatgtagcttcttgtgacaacaa

SEQ ID NO: 33316 - DNA, 2639 bp, Zea Mays
atgccgagtgataaagcaaaagctccaaagaagaagggcgaagaggatcctggaatcccgccagctccctgtgaaggagaaattagccatgagccacatagacaacggtcactcaatgggtggcaaaaggttctaaaccctgaattggtcaaagggccatggtccaaagaagaagacgaaatcatagttcagatggtaaacaaatacgggccaaagaaatggtcggccatcgctcaagctttgcctggacgcataggaaagcaatgccgggagcggtggcacaatcatcttaacccagccataaacaaggaggcatggacgcaagaagaggagattactcttattcatgctcataggatgtatggaaataaatgggccgaacttacgaaatttttacctggaaggacggacaatgcaattaaaaatcactggaacagttcagtgaagaaaaaggtcgattcgtacatatcttctggtttactttcacaagtcccatgcctctctctgattgaatgtcctgcacaatgtgactctttatcggctatggaccaacaaaacaacggaggtactgattgcaatgaccagaacactagcgtggtcttaagctctgatttacaagtaaatgtggatgccaacaagaaagaagcacatgactctcactcgtccttgtgtcaaggggtatgctatccttccacagagactgtaggatctgttttgcctgatgacctggagatggatatggatgaaggatcaggaaactctatttttgcagacgatcaaactctttgtagcacatcaaatcaagaacaatctatggtgccatttgttgttgcacaggaaatgcctgtctctgtgctatcaagtgtttctagcgctgagcagaaacggcacttaatctctgatgccaaaagcttgaaatccgaactttggaaagatgtttgtttgcaaactcttattacaggagatacagatgaccctgatgcttcttcaagattaaataacccagattcttctaaaatggacaccaattttttgaaagaggcctacccattacacacaccaaatccatccagtgtgattgaaactgtatatgaaccgatggcgttggtgacaatctctcccccttttatatgttcagatggtttgtctttcgcacccgaaaatagatctaagccaggagaaatgtcagactgtgaagcagagatggtcacatgctcaaacaatttttttggtaatgccgagcaatctgctaaacttgccagcagtgatgacaggccagaggctttcacaatgactgagagcactacaaactgtgggggtgaacaattgacagatgccaaagaacctgtggccagtacagcaaaagaacggttatcgaaagacatcgagactatgccagataaaaagaagggtgagggggctctattctatgaacctcctcgattccctggtttggatgtcccgtttatcagttgcgatcttgtaacttctgctgatctgcaagaatttagtccccttggaattaggcagtggatgcggtcgaccatgaatgtcccaactcctttaagattatggggctctccaacacatgatgaaagcccagatgcactaaaaactgctgctgaaagcttcccatgcacaagttcaataatgaaaaaaagacagagaagtctattgtcccctactccagatgaaagaattgagaagaaatctgggattgcaaagggggtgacggacatctcctatatgataacggccacatgttccatgaatgcaaccaatgatgaagacattgttactgaatcagctgtgtgtgctaagcaaccttctttgaaacatctagacaagaagcttgagttctctgacattaacaaggaaaactctgatggagcatctgaacaggccaaagatgcacaaaacacacaactcgtggatgagcaacattcctcaccaaatgttgtgaatcctaacactgatctacaagacaatatacaacctgtacagattcttgtagagcaaagcagcaataaccttatttcctctgatcatggtgcaaagccatcctgtaaggaagtgattagttcaaaatcaaagcctacaaaactacttgttgaaaaatcatcaccatgtatcaacgtggattacgaatatgtgaatttattggctgataccccaggtatcaaaagaggactcgaatctccatctgcatggaagtctccttggtatatcgatatgcacatgcactttcaggccgaggcgcgagtcctggatttcgacgaatctcccgcacctgcaagaacagcagataagaaacttggcagctgtcaccggagatctgttagctcacccattcttccttcccccaaccttagaagtttccgataggtacaccatatatggcatcatcgtacattacccacctgcatgtattggtgaactctattgttattatgtctccttagagcgcgttgttgaaactattggagcgtttcctttctttcgttactctattgttattactattattatgtctctcagcccggaaacaggcatcagtaccagtgaactgttgaaactaccctaatcattcaaattaaattattatattgcccgatgcatgtagcttcttgtgacaacaa

SEQ ID NO: 33317 - DNA, 2996 bp, Zea Mays
gtggtaatcatgccgagtgataaagcaaaagctccaaagaagaagggcgaagaggatcctggaatcccgccagctccctgtgaaggagaaattagccatgagccacatagacaacggtcactcaatgggaggaccactggtccgacccggcgttcaaccaaaggaaattggacacccgaagaggatgctatattgtcccgtgcggttcagacataccaagggaaaaactggaaaaagatagcggaaagttttccagacagaaccgatgtacaatgtttgcacaggtggcaaaaggttctaaaccctgaattggtcaaagggccatggtccaaagaagaagacgaaatcatagttcagatggtaaacaaatacgggccaaagaaatggtcggccatcgctcaagctttgcctggacgcataggaaagcaatgccgggagcggtggcacaatcatcttaacccagccataaacaaggaggcatggacgcaagaagaggagattactcttattcatgctcataggatgtatggaaataaatgggccgaacttacgaaatttttacctggaaggacggacaatgcaattaaaaatcactggaacagttcagtgaagaaaaaggtcgattcgtacatatcttctggtttactttcacaagtcccatgcctctctctgattgaatgtcctgcacaatgtgactctttatcggctatggaccaacaaaacaacggaggtactgattgcaatgaccagaacactagcgtggtcttaagctctgatttacaagtaaatgtggatgccaacaagaaagaagcacatgactctcactcgtccttgtgtcaaggggtatgctatccttccacagagactgtaggatctgttttgcctgatgacctggagatggatatggatgaaggatcaggaaactctatttttgcagacgatcaaactctttgtagcacatcaaatcaagaacaatctatggtgccatttgttgttgcacaggaaatgcctgtctctgtgctatcaagtgtttctagcgctgagcagaaacggcacttaatctctgatgccaaaagcttgaaatccgaactttggaaagatgtttgtttgcaaactcttattacaggagatacagatgaccctgatgcttcttcaagattaaataacccagattcttctaaaatggacaccaattttttgaaagaggcctacccattacacacaccaaatccatccagtgtgattgaaactgtatatgaaccgatggcgttggtgacaatctctcccccttttatatgttcagatggtttgtctttcgcacccgaaaatagatctaagccaggagaaatgtcagactgtgaagcagagatggtcacatgctcaaacaatttttttggtaatgccgagcaatctgctaaacttgccagcagtgatgacaggccagaggctttcacaatgactgagagcactacaaactgtgggggtgaacaattgacagatgccaaagaacctgtggccagtacagcaaaagaacggttatcgaaagacatcgagactatgccagataaaaagaagggtgagggggctctattctatgaacctcctcgattccctggtttggatgtcccgtttatcagttgcgatcttgtaacttctgctgatctgcaagaatttagtccccttggaattaggcagtggatgcggtcgaccatgaatgtcccaactcctttaagattatggggctctccaacacatgatgaaagcccagatgcactaaaaactgctgctgaaagcttcccatgcacaagttcaataatgaaaaaaagacagagaagtctattgtcccctactccagatgaaagaattgagaagaaatctgggattgcaaagggggtgacggacatctcctatatgataacggccacatgttccatgaatgcaaccaatgatgaagacattgttactgaatcagctgtgtgtgctaagcaaccttctttgaaacatctagacaagaagcttgagttctctgacattaacaaggaaaactctgatggagcatctgaacaggccaaagatgcacaaaacacacaactcgtggatgagcaacattcctcaccaaatgttgtgaatcctaacactgatctacaagacaatatacaacctgtacagattcttgtagagcaaagcagcaataaccttatttcctctgatcatggtgcaaagccatcctgtaaggaagtgattagttcaaaatcaaagcctacaaaactacttgttgaaaaatcatcaccatgtatcaacgtggattacgaatatgtgaatttattggctgataccccaggtatcaaaagaggactcgaatctccatctgcatggaagtctccttggtatatcgatatgcacatgcactttcagggttttgtcagcccagcagacagaacttatgacgcgttaggattagtgaatcgtttaagcaagcacagtgctgctgctgcagtggaggcctgtgagatgctagcaagtggcaacacgacttctgataaggaaaacaaggataatacggatggcaaggaactagtgacaagaaaatcacagattaagatcatggccgaggcgcgagtcctggatttcgacgaatctcccgcacctgcaagaacagcagataagaaacttggcagctgtcaccggagatctgttagctcacccattcttccttcccccaaccttagaagtttccgataggtacaccatatatggcatcatcgtacattacccacctgcatgtattggtgaactctattgttattatgtctccttagagcgcgttgttgaaactattggagcgtttcctttctttcgttactctattgttattactattattatgtctctcagcccggaaacaggcatcagtaccagtgaactgttgaaactaccctaatcattcaaattaaattattatattgcccgatgcatgtagcttcttgtgacaacaa

SEQ ID NO: 33318 - DNA, 3116 bp, Zea Mays
caggcaatagcaaagcaagcggaagcatccattccatcccctctcaatcgcctccgcggctccgcctccccctcccccaaatttgaaacctccgaggcggacgcgaggcgaagccgtgcgtcggtcatcgagacggccggctgggcgaccgcgccgccgcctctctcctctcgttgcgtgccgcgggggttgcccgcacttgggcgcgcgctcgggcgcggggttggatgcagctccgccgacgtaggtgctcgtcgatcgcgtcggccacaccgggacgtaatcatgccgagtgataaagcaaaagctccaaagaagaagggcgaagaggatcctggaatcccgccagctccctgtgaaggagaaattagccatgagccacatagacaacggtcactcaatgggtggcaaaaggttctaaaccctgaattggtcaaagggccatggtccaaagaagaagacgaaatcatagttcagatggtaaacaaatacgggccaaagaaatggtcggccatcgctcaagctttgcctggacgcataggaaagcaatgccgggagcggtggcacaatcatcttaacccagccataaacaaggaggcatggacgcaagaagaggagattactcttattcatgctcataggatgtatggaaataaatgggccgaacttacgaaatttttacctggaaggacggacaatgcaattaaaaatcactggaacagttcagtgaagaaaaaggtcgattcgtacatatcttctggtttactttcacaagtcccatgcctctctctgattgaatgtcctgcacaatgtgactctttatcggctatggaccaacaaaacaacggaggtactgattgcaatgaccagaacactagcgtggtcttaagctctgatttacaagtaaatgtggatgccaacaagaaagaagcacatgactctcactcgtccttgtgtcaaggggtatgctatccttccacagagactgtaggatctgttttgcctgatgacctggagatggatatggatgaaggatcaggaaactctatttttgcagacgatcaaactctttgtagcacatcaaatcaagaacaatctatggtgccatttgttgttgcacaggaaatgcctgtctctgtgctatcaagtgtttctagcgctgagcagaaacggcacttaatctctgatgccaaaagcttgaaatccgaactttggaaagatgtttgtttgcaaactcttattacaggagatacagatgaccctgatgcttcttcaagattaaataacccagattcttctaaaatggacaccaattttttgaaagaggcctacccattacacacaccaaatccatccagtgtgattgaaactgtatatgaaccgatggcgttggtgacaatctctcccccttttatatgttcagatggtttgtctttcgcacccgaaaatagatctaagccaggagaaatgtcagactgtgaagcagagatggtcacatgctcaaacaatttttttggtaatgccgagcaatctgctaaacttgccagcagtgatgacaggccagaggctttcacaatgactgagagcactacaaactgtgggggtgaacaattgacagatgccaaagaacctgtggccagtacagcaaaagaacggttatcgaaagacatcgagactatgccagataaaaagaagggtgagggggctctattctatgaacctcctcgattccctggtttggatgtcccgtttatcagttgcgatcttgtaacttctgctgatctgcaagaatttagtccccttggaattaggcagtggatgcggtcgaccatgaatgtcccaactcctttaagattatggggctctccaacacatgatgaaagcccagatgcactaaaaactgctgctgaaagcttcccatgcacaagttcaataatgaaaaaaagacagagaagtctattgtcccctactccagatgaaagaattgagaagaaatctgggattgcaaagggggtgacggacatctcctatatgataacggccacatgttccatgaatgcaaccaatgatgaagacattgttactgaatcagctgtgtgtgctaagcaaccttctttgaaacatctagacaagaagcttgagttctctgacattaacaaggaaaactctgatggagcatctgaacaggccaaagatgcacaaaacacacaactcgtggatgagcaacattcctcaccaaatgttgtgaatcctaacactgatctacaagacaatatacaacctgtacagattcttgtagagcaaagcagcaataaccttatttcctctgatcatggtgcaaagccatcctgtaaggaagtgattagttcaaaatcaaagcctacaaaactacttgttgaaaaatcatcaccatgtatcaacgtggattacgaatatgtgaatttattggctgataccccaggtatcaaaagaggactcgaatctccatctgcatggaagtctccttggtatatcgatatgcacatgcactttcagggttttgtcagcccagcagacagaacttatgacgcgttaggattagtgaatcgtttaagcaagcacagtgctgctgctgcagtggaggcctgtgagatgctagcaagtggcaacacgacttctgataaggaaaacaaggataatacggatggcaaggaactagtgacaagaaaatcacagattaagatcatggccgaggcgcgagtcctggatttcgacgaatctcccgcacctgcaagaacagcagataagaaacttggcagctgtcaccggagatctgttagctcacccattcttccttcccccaaccttagaagtttccgataggtacaccatatatggcatcatcgtacattacccacctgcatgtattggtgaactctattgttattatgtctccttagagcgcgttgttgaaactattggagcgtttcctttctttcgttactctattgttattactattattatgtctctcagcccggaaacaggcatcagtaccagtgaactgttgaaactaccctaatcattcaaattaaattattatattgcccgatgcatgtagcttcttgtgacaacaa

SEQ ID NO: 33319 - DNA, 3272 bp, Zea Mays
caggcaatagcaaagcaagcggaagcatccattccatcccctctcaatcgcctccgcggctccgcctccccctcccccaaatttgaaacctccgaggcggacgcgaggcgaagccgtgcgtcggtcatcgagacggccggctgggcgaccgcgccgccgcctctctcctctcgttgcgtgccgcgggggttgcccgcacttgggcgcgcgctcgggcgcggggttggatgcagctccgccgacgtaggtgctcgtcgatcgcgtcggccacaccgggacgtaatcatgccgagtgataaagcaaaagctccaaagaagaagggcgaagaggatcctggaatcccgccagctccctgtgaaggagaaattagccatgagccacatagacaacggtcactcaatgggaggaccactggtccgacccggcgttcaaccaaaggaaattggacacccgaagaggatgctatattgtcccgtgcggttcagacataccaagggaaaaactggaaaaagatagcggaaagttttccagacagaaccgatgtacaatgtttgcacaggtggcaaaaggttctaaaccctgaattggtcaaagggccatggtccaaagaagaagacgaaatcatagttcagatggtaaacaaatacgggccaaagaaatggtcggccatcgctcaagctttgcctggacgcataggaaagcaatgccgggagcggtggcacaatcatcttaacccagccataaacaaggaggcatggacgcaagaagaggagattactcttattcatgctcataggatgtatggaaataaatgggccgaacttacgaaatttttacctggaaggacggacaatgcaattaaaaatcactggaacagttcagtgaagaaaaaggtcgattcgtacatatcttctggtttactttcacaagtcccatgcctctctctgattgaatgtcctgcacaatgtgactctttatcggctatggaccaacaaaacaacggaggtactgattgcaatgaccagaacactagcgtggtcttaagctctgatttacaagtaaatgtggatgccaacaagaaagaagcacatgactctcactcgtccttgtgtcaaggggtatgctatccttccacagagactgtaggatctgttttgcctgatgacctggagatggatatggatgaaggatcaggaaactctatttttgcagacgatcaaactctttgtagcacatcaaatcaagaacaatctatggtgccatttgttgttgcacaggaaatgcctgtctctgtgctatcaagtgtttctagcgctgagcagaaacggcacttaatctctgatgccaaaagcttgaaatccgaactttggaaagatgtttgtttgcaaactcttattacaggagatacagatgaccctgatgcttcttcaagattaaataacccagattcttctaaaatggacaccaattttttgaaagaggcctacccattacacacaccaaatccatccagtgtgattgaaactgtatatgaaccgatggcgttggtgacaatctctcccccttttatatgttcagatggtttgtctttcgcacccgaaaatagatctaagccaggagaaatgtcagactgtgaagcagagatggtcacatgctcaaacaatttttttggtaatgccgagcaatctgctaaacttgccagcagtgatgacaggccagaggctttcacaatgactgagagcactacaaactgtgggggtgaacaattgacagatgccaaagaacctgtggccagtacagcaaaagaacggttatcgaaagacatcgagactatgccagataaaaagaagggtgagggggctctattctatgaacctcctcgattccctggtttggatgtcccgtttatcagttgcgatcttgtaacttctgctgatctgcaagaatttagtccccttggaattaggcagtggatgcggtcgaccatgaatgtcccaactcctttaagattatggggctctccaacacatgatgaaagcccagatgcactaaaaactgctgctgaaagcttcccatgcacaagttcaataatgaaaaaaagacagagaagtctattgtcccctactccagatgaaagaattgagaagaaatctgggattgcaaagggggtgacggacatctcctatatgataacggccacatgttccatgaatgcaaccaatgatgaagacattgttactgaatcagctgtgtgtgctaagcaaccttctttgaaacatctagacaagaagcttgagttctctgacattaacaaggaaaactctgatggagcatctgaacaggccaaagatgcacaaaacacacaactcgtggatgagcaacattcctcaccaaatgttgtgaatcctaacactgatctacaagacaatatacaacctgtacagattcttgtagagcaaagcagcaataaccttatttcctctgatcatggtgcaaagccatcctgtaaggaagtgattagttcaaaatcaaagcctacaaaactacttgttgaaaaatcatcaccatgtatcaacgtggattacgaatatgtgaatttattggctgataccccaggtatcaaaagaggactcgaatctccatctgcatggaagtctccttggtatatcgatatgcacatgcactttcagggttttgtcagcccagcagacagaacttatgacgcgttaggattagtgaatcgtttaagcaagcacagtgctgctgctgcagtggaggcctgtgagatgctagcaagtggcaacacgacttctgataaggaaaacaaggataatacggatggcaaggaactagtgacaagaaaatcacagattaagatcatggccgaggcgcgagtcctggatttcgacgaatctcccgcacctgcaagaacagcagataagaaacttggcagctgtcaccggagatctgttagctcacccattcttccttcccccaaccttagaagtttccgataggtacaccatatatggcatcatcgtacattacccacctgcatgtattggtgaactctattgttattatgtctccttagagcgcgttgttgaaactattggagcgtttcctttctttcgttactctattgttattactattattatgtctctcagcccggaaacaggcatcagtaccagtgaactgttgaaactaccctaatcattcaaattaaattattatattgcccgatgcatgtagcttcttgtgacaacaa

SEQ ID NO: 33320 - DNA, 1589 bp, Zea Mays
gatacccttcttcagatcccgcacaatgctggaagtgtacgacactgggaagaggcagaccaaccttggattggccaacaagactaaaaattgctttgggttctgcgaagggattggcatatcttcatgaagattgtcatcctaagattattcatcgtgacataaaggcctcaaatattcttctcgatctaagatttgaagctaaggtggcagattttggacttgcaaaattcacttctgatgcaaacacccacgtttcaaccagagtgatgggcacatttgggtatctagcacctgagtatgctgcttctggcaagctcactgagaaatcagatgtcttctcttttggagtaatgcttcttgagctaataactgggcggcgccctgtaaattcaagacaagcggacgacaacctggttgactgggtaagctgtgcatggagaagtaaactgaatcttcagtacatagtactgcggctaacagggtcaactcattccttccacttatcctataaaaaagggtctttcatctgacaatacttactgtgattcttgtgactagatatcattgttattatcgactattgaggtctgtatttaacagctgcatgctttacctttcatacagataaaaaaaaatatacatcttatttatcctagatacaatgatgtcctctgtttctttttgattgggttgtatggatttcctagacttctttaactattcatctcgtgatgtccacaatgatcgtgtaaactacagaggaagaatccctcctctcgccattttactctaaacttgtgccccttcctttcactatattgatctgtttctccggcaggcaaggcctctgatgataaaagcatttgaggatggtaatcatgatgctctagtggacccccggctgggaagtgagtacaatgataatgagatggcgaggatgatagcctgcgcagctgcatgcgtccggcattcttcacggcggcggccacggatgggtcaggtcgtccgggcgctggaaggcgacgtatctctggacgacctgaacgagggcgtgcggcccgggcacagccggttcgtggggtcgtacggcagttcgacgtccgactacgacaccagccagtacaaggaggacctgaagaagttccggaagatggcgctgggcggcagcgggctccagagcagcagcgcgcagacgccgacgagcgagcacggggagaacccgtcggtgtcggtgtcgagcagcgacggcgacggcggcggaggaaccggcgaggagcgtgaagacagacggcaggcagcgtcgtgaggcgtgaggcgtgcccagcctacggcccccgcgcatgcatctgtagatcctagtcctctcgacatcgctacgtacatgtctaattgatagctgacctgtggccgggaggcgggactactgagagattcatgattgctttcttttcttttgtgtgtgtgattctcttggtgggtacactggtctcatgcatgcgatctctgtataaattcaccgactctttaggaactgattactattggctattcgtatattatgagtatactcagtgttgcacgaaatc

SEQ ID NO: 33321 - DNA, 2797 bp, Zea Mays
cacacactggctggcactggcagcaggtgcagccgtgcgagcgctcctactccaacaatccccttctcctctcgcggcccgggccggcacgggtcgcattccttcccgtccgaccgagcaagcaggcgcaggcgcaggcctcccaattcccctccccacccccaccagccaccaaaaaaagcgagcagcgcaccactagctcgccgagcaccgtacgagtacgatacgagtgcgcagcgaggaagcacgcgcgggaccggccgcgatgtcgacgtcgccgccgccggccacttccccgcccggcgcgccgcccaacggtacggcctcgcccactgccgcgccgccgccgccgctgccgccagcaccgtccaactcctcctccccgacgcccgcgacgccgacaggcgctccccccaccgctcccgcgccgccctccaccgactctccggcgccgccagggacgccgcccgccccagtgtccccgaacgcggccgcgctccccgcgcccggaagggcgacgccggcctcggcctcgccgccgacgccctcctcctctgggtcggggcttaccacgtccgtcgttgtggggatcgcggtcggcggcttcgccgtgctgctcctcggctgcctgttctgcctctgcctcttcaggagcaacaagaggagccggaggcggcaccgccaccacccgccaccgccgccgccgccccacctcttgcactactacggccacccgccgccgccgccgccgcctccgcacaaaggggatcagcaccaaagctggcagcataacgcccctccaccaccccctgatcatgttatcaagatcaattcacatcctacccttccgccgcctccgcataacgtacatagcagtggttccgcttcgaaccactcgggtggtgagagccgccctgcgctgtcgcctggcactgcccttagcttttcaaggagcacattcacttacgagcagctgatgacagcaacgaatgggttttctgacgctaatctgctggggcaaggaggttttgggtttgttcacaaaggagtgctaccagatggcacagaggttgccgttaagcagttaagagatggcagtggccagggagagcgcgagttccaggctgaagttgagattatcagcagagtacatcacaagcatcttgtatccttggttggctattgcatttctggagcccacaggttgctcgtctacgagtttgttccaaacaatacattggaattccacttacatggaagaggcagaccaaccttggattggccaacaagactaaaaattgctttgggttctgcgaagggattggcatatcttcatgaagattgtcatcctaagattattcatcgtgacataaaggcctcaaatattcttctcgatctaagatttgaagctaaggtggcagattttggacttgcaaaattcacttctgatgcaaacacccacgtttcaaccagagtgatgggcacatttgggtatctagcacctgagtatgctgcttctggcaagctcactgagaaatcagatgtcttctcttttggagtaatgcttcttgagctaataactgggcggcgccctgtaaattcaagacaagcggacgacaacctggttgactgggtaagctgtgcatggagaagtaaactgaatcttcagtacatagtactgcggctaacagggtcaactcattccttccacttatcctataaaaaagggtctttcatctgacaatacttactgtgattcttgtgactagatatcattgttattatcgactattgaggtctgtatttaacagctgcatgctttacctttcatacagataaaaaaaaatatacatcttatttatcctagatacaatgatgtcctctgtttctttttgattgggttgtatggatttcctagacttctttaactattcatctcgtgatgtccacaatgatcgtgtaaactacagaggaagaatccctcctctcgccattttactctaaacttgtgccccttcctttcactatattgatctgtttctccggcaggcaaggcctctgatgataaaagcatttgaggatggtaatcatgatgctctagtggacccccggctgggaagtgagtacaatgataatgagatggcgaggatgatagcctgcgcagctgcatgcgtccggcattcttcacggcggcggccacggatgggtcaggtcgtccgggcgctggaaggcgacgtatctctggacgacctgaacgagggcgtgcggcccgggcacagccggttcgtggggtcgtacggcagttcgacgtccgactacgacaccagccagtacaaggaggacctgaagaagttccggaagatggcgctgggcggcagcgggctccagagcagcagcgcgcagacgccgacgagcgagcacggggagaacccgtcggtgtcggtgtcgagcagcgacggcgacggcggcggaggaaccggcgaggagcgtgaagacagacggcaggcagcgtcgtgaggcgtgaggcgtgcccagcctacggcccccgcgcatgcatctgtagatcctagtcctctcgacatcgctacgtacatgtctaattgatagctgacctgtggccgggaggcgggactactgagagattcatgattgctttcttttcttttgtgtgtgtgattctcttggtgggtacactggtctcatgcatgcgatctctgtataaattcaccgactctttaggaactgattactattggctattcgtatattatgagtatactcagtgttgcacgaaatc

SEQ ID NO: 33322 - DNA, 3212 bp, Zea Mays
cacacactggctggcactggcagcaggtgcagccgtgcgagcgctcctactccaacaatccccttctcctctcgcggcccgggccggcacgggtcgcattccttcccgtccgaccgagcaagcaggcgcaggcgcaggcctcccaattcccctccccacccccaccagccaccaaaaaaagcgagcagcgcaccactagctcgccgagcaccgtacgagtacgatacgagtgcgcagcgaggaagcacgcgcgggaccggccgcgatgtcgacgtcgccgccgccggccacttccccgcccggcgcgccgcccaacggtacggcctcgcccactgccgcgccgccgccgccgctgccgccagcaccgtccaactcctcctccccgacgcccgcgacgccgacaggcgctccccccaccgctcccgcgccgccctccaccgactctccggcgccgccagggacgccgcccgccccagtgtccccgaacgcggccgcgctccccgcgcccggaagggcgacgccggcctcggcctcgccgccgacgccctcctcctctgggtcggggcttaccacgtccgtcgttgtggggatcgcggtcggcggcttcgccgtgctgctcctcggctgcctgttctgcctctgcctcttcaggagcaacaagaggagccggaggcggcaccgccaccacccgccaccgccgccgccgccccacctcttgcactactacggccacccgccgccgccgccgccgcctccgcacaaaggggatcagcaccaaagctggcagcataacgcccctccaccaccccctgatcatgttatcaagatcaattcacatcctacccttccgccgcctccgcataacgtacatagcagtggttccgcttcgaaccactcgggtggtgagagccgccctgcgctgtcgcctggcactgcccttagcttttcaaggagcacattcacttacgagcagctgatgacagcaacgaatgggttttctgacgctaatctgctggggcaaggaggttttgggtttgttcacaaaggagtgctaccagatggcacagaggttgccgttaagcagttaagagatggcagtggccagggagagcgcgagttccaggctgaagttgagattatcagcagagtacatcacaagcatcttgtatccttggttggctattgcatttctggagcccacaggttgctcgtctacgagtttgttccaaacaatacattggaattccacttacatggtatgttctcttcctgtttctgcaccgtaattacttcctctcattcataacgctttgtatagtctctcaaaggcaccttagaaattattcctatgtaatactgttttctatatttagcagccacttttgtcgtagctagtacatgtaccgtcatacactactaaagcatcctagtaaaatacagatggtttgcaatggaaaactttggaaattaaggtacacatatacaagatttttttttccaaaattatcgttccatttcacttcaccagaggaacacaagatgtatgctagggatatatttttgcttgctcagaataattaagtactataagaactggtgcagcggtagagcctaccgtctattatgcgggtaagacttggcgtttaaagatacccttcttcagatcccgcacaatgctggaagtgtacgacactgggtatgccttttttttataggaattttgatttttgaagttcattatagccacatgcttctcctatatattcaaaaacttcgtcaagccataacagtagccacaaataaacccattcatggaagctattaattttaatgctactcttttcttcagtctgaattatgccatattttcatccagtttctgaaattgttaagagtattagaagaggcaaaaagatgtcccattcaacgcaatggctgagctcatgctaaagatggaatatgatttcagaccctgatagtttgtcgatcacttttgatataaatactgaacattttgtttggacgcacatgcatcttgtttgttttttgttccttgatcactttctgagggttatcttctcttctgtttcaggaagaggcagaccaaccttggattggccaacaagactaaaaattgctttgggttctgcgaagggattggcatatcttcatgaagattgtcatcctaagattattcatcgtgacataaaggcctcaaatattcttctcgatctaagatttgaagctaaggtggcagattttggacttgcaaaattcacttctgatgcaaacacccacgtttcaaccagagtgatgggcacatttgggtatctagcacctgagtatgctgcttctggcaagctcactgagaaatcagatgtcttctcttttggagtaatgcttcttgagctaataactgggcggcgccctgtaaattcaagacaagcggacgacaacctggttgactgggcctctgatgataaaagcatttgaggatggtaatcatgatgctctagtggacccccggctgggaagtgagtacaatgataatgagatggcgaggatgatagcctgcgcagctgcatgcgtccggcattcttcacggcggcggccacggatgggtcaggtcgtccgggcgctggaaggcgacgtatctctggacgacctgaacgagggcgtgcggcccgggcacagccggttcgtggggtcgtacggcagttcgacgtccgactacgacaccagccagtacaaggaggacctgaagaagttccggaagatggcgctgggcggcagcgggctccagagcagcagcgcgcagacgccgacgagcgagcacggggagaacccgtcggtgtcggtgtcgagcagcgacggcgacggcggcggaggaaccggcgaggagcgtgaagacagacggcaggcagcgtcgtgaggcgtgaggcgtgcccagcctacggcccccgcgcatgcatctgtagatcctagtcctctcgacatcgctacgtacatgtctaattgatagctgacctgtggccgggaggcgggactactgagagattcatgattgctttcttttcttttgtgtgtgtgattctcttggtgggtacactggtctcatgcatgcgatctctgtataaattcaccgactctttaggaactgattactattggctattcgtatattatgagtatactcagtgttgcacgaaatc

SEQ ID NO: 33323 - DNA, 3217 bp, Zea Mays
cacacactggctggcactggcagcaggtgcagccgtgcgagcgctcctactccaacaatccccttctcctctcgcggcccgggccggcacgggtcgcattccttcccgtccgaccgagcaagcaggcgcaggcgcaggcctcccaattcccctccccacccccaccagccaccaaaaaaagcgagcagcgcaccactagctcgccgagcaccgtacgagtacgatacgagtgcgcagcgaggaagcacgcgcgggaccggccgcgatgtcgacgtcgccgccgccggccacttccccgcccggcgcgccgcccaacggtacggcctcgcccactgccgcgccgccgccgccgctgccgccagcaccgtccaactcctcctccccgacgcccgcgacgccgacaggcgctccccccaccgctcccgcgccgccctccaccgactctccggcgccgccagggacgccgcccgccccagtgtccccgaacgcggccgcgctccccgcgcccggaagggcgacgccggcctcggcctcgccgccgacgccctcctcctctgggtcggggcttaccacgtccgtcgttgtggggatcgcggtcggcggcttcgccgtgctgctcctcggctgcctgttctgcctctgcctcttcaggagcaacaagaggagccggaggcggcaccgccaccacccgccaccgccgccgccgccccacctcttgcactactacggccacccgccgccgccgccgccgcctccgcacaaaggggatcagcaccaaagctggcagcataacgcccctccaccaccccctgatcatgttatcaagatcaattcacatcctacccttccgccgcctccgcataacgtacatagcagtggttccgcttcgaaccactcgggtggtgagagccgccctgcgctgtcgcctggcactgcccttagcttttcaaggagcacattcacttacgagcagctgatgacagcaacgaatgggttttctgacgctaatctgctggggcaaggaggttttgggtttgttcacaaaggagtgctaccagatggcacagaggttgccgttaagcagttaagagatggcagtggccagggagagcgcgagttccaggctgaagttgagattatcagcagagtacatcacaagcatcttgtatccttggttggctattgcatttctggagcccacaggttgctcgtctacgagtttgttccaaacaatacattggaattccacttacatggtatgttctcttcctgtttctgcaccgtaattacttcctctcattcataacgctttgtatagtctctcaaaggcaccttagaaattattcctatgtaatactgttttctatatttagcagccacttttgtcgtagctagtacatgtaccgtcatacactactaaagcatcctagtaaaatacagatggtttgcaatggaaaactttggaaattaaggtacacatatacaagatttttttttccaaaattatcgttccatttcacttcaccagaggaacacaagatgtatgctagggatatatttttgcttgctcagaataattaagtactataagaactggtgcagcggtagagcctaccgtctattatgcgggtaagacttggcgtttaaagatacccttcttcagatcccgcacaatgctggaagtgtacgacactgggtatgccttttttttataggaattttgatttttgaagttcattatagccacatgcttctcctatatattcaaaaacttcgtcaagccataacagtagccacaaataaacccattcatggaagctattaattttaatgctactcttttcttcagtctgaattatgccatattttcatccagtttctgaaattgttaagagtattagaagaggcaaaaagatgtcccattcaacgcaatggctgagctcatgctaaagatggaatatgatttcagaccctgatagtttgtcgatcacttttgatataaatactgaacattttgtttggacgcacatgcatcttgtttgttttttgttccttgatcactttctgagggttatcttctcttctgtttcaggaagaggcagaccaaccttggattggccaacaagactaaaaattgctttgggttctgcgaagggattggcatatcttcatgaagattgtcatcctaagattattcatcgtgacataaaggcctcaaatattcttctcgatctaagatttgaagctaaggtggcagattttggacttgcaaaattcacttctgatgcaaacacccacgtttcaaccagagtgatgggcacatttgggtatctagcacctgagtatgctgcttctggcaagctcactgagaaatcagatgtcttctcttttggagtaatgcttcttgagctaataactgggcggcgccctgtaaattcaagacaagcggacgacaacctggttgactgggcaaggcctctgatgataaaagcatttgaggatggtaatcatgatgctctagtggacccccggctgggaagtgagtacaatgataatgagatggcgaggatgatagcctgcgcagctgcatgcgtccggcattcttcacggcggcggccacggatgggtcaggtcgtccgggcgctggaaggcgacgtatctctggacgacctgaacgagggcgtgcggcccgggcacagccggttcgtggggtcgtacggcagttcgacgtccgactacgacaccagccagtacaaggaggacctgaagaagttccggaagatggcgctgggcggcagcgggctccagagcagcagcgcgcagacgccgacgagcgagcacggggagaacccgtcggtgtcggtgtcgagcagcgacggcgacggcggcggaggaaccggcgaggagcgtgaagacagacggcaggcagcgtcgtgaggcgtgaggcgtgcccagcctacggcccccgcgcatgcatctgtagatcctagtcctctcgacatcgctacgtacatgtctaattgatagctgacctgtggccgggaggcgggactactgagagattcatgattgctttcttttcttttgtgtgtgtgattctcttggtgggtacactggtctcatgcatgcgatctctgtataaattcaccgactctttaggaactgattactattggctattcgtatattatgagtatactcagtgttgcacgaaatc

SEQ ID NO: 33324 - DNA, 2373 bp, Zea Mays
cacacactggctggcactggcagcaggtgcagccgtgcgagcgctcctactccaacaatccccttctcctctcgcggcccgggccggcacgggtcgcattccttcccgtccgaccgagcaagcaggcgcaggcgcaggcctcccaattcccctccccacccccaccagccaccaaaaaaagcgagcagcgcaccactagctcgccgagcaccgtacgagtacgatacgagtgcgcagcgaggaagcacgcgcgggaccggccgcgatgtcgacgtcgccgccgccggccacttccccgcccggcgcgccgcccaacggtacggcctcgcccactgccgcgccgccgccgccgctgccgccagcaccgtccaactcctcctccccgacgcccgcgacgccgacaggcgctccccccaccgctcccgcgccgccctccaccgactctccggcgccgccagggacgccgcccgccccagtgtccccgaacgcggccgcgctccccgcgcccggaagggcgacgccggcctcggcctcgccgccgacgccctcctcctctgggtcggggcttaccacgtccgtcgttgtggggatcgcggtcggcggcttcgccgtgctgctcctcggctgcctgttctgcctctgcctcttcaggagcaacaagaggagccggaggcggcaccgccaccacccgccaccgccgccgccgccccacctcttgcactactacggccacccgccgccgccgccgccgcctccgcacaaagcaccaaagctggcagcataacgcccctccaccaccccctgatcatgttatcaagatcaattcacatcctacccttccgccgcctccgcataacgtacatagcagtggttccgcttcgaaccactcgggtggtgagagccgccctgcgctgtcgcctggcactgcccttagcttttcaaggagcacattcacttacgagcagctgatgacagcaacgaatgggttttctgacgctaatctgctggggcaaggaggttttgggtttgttcacaaaggagtgctaccagatggcacagaggttgccgttaagcagttaagagatggcagtggccagggagagcgcgagttccaggctgaagttgagattatcagcagagtacatcacaagcatcttgtatccttggttggctattgcatttctggagcccacaggttgctcgtctacgagtttgttccaaacaatacattggaattccacttacatggaagaggcagaccaaccttggattggccaacaagactaaaaattgctttgggttctgcgaagggattggcatatcttcatgaagattgtcatcctaagattattcatcgtgacataaaggcctcaaatattcttctcgatctaagatttgaagctaaggtggcagattttggacttgcaaaattcacttctgatgcaaacacccacgtttcaaccagagtgatgggcacatttgggtatctagcacctgagtatgctgcttctggcaagctcactgagaaatcagatgtcttctcttttggagtaatgcttcttgagctaataactgggcggcgccctgtaaattcaagacaagcggacgacaacctggttgactgggcaaggcctctgatgataaaagcatttgaggatggtaatcatgatgctctagtggacccccggctgggaagtgagtacaatgataatgagatggcgaggatgatagcctgcgcagctgcatgcgtccggcattcttcacggcggcggccacggatgggtcaggtcgtccgggcgctggaaggcgacgtatctctggacgacctgaacgagggcgtgcggcccgggcacagccggttcgtggggtcgtacggcagttcgacgtccgactacgacaccagccagtacaaggaggacctgaagaagttccggaagatggcgctgggcggcagcgggctccagagcagcagcgcgcagacgccgacgagcgagcacggggagaacccgtcggtgtcggtgtcgagcagcgacggcgacggcggcggaggaaccggcgaggagcgtgaagacagacggcaggcagcgtcgtgaggcgtgaggcgtgcccagcctacggcccccgcgcatgcatctgtagatcctagtcctctcgacatcgctacgtacatgtctaattgatagctgacctgtggccgggaggcgggactactgagagattcatgattgctttcttttcttttgtgtgtgtgattctcttggtgggtacactggtctcatgcatgcgatctctgtataaattcaccgactctttaggaactgattactattggctattcgtatattatgagtatactcagtgttgcacgaaatc

SEQ ID NO: 33325 - DNA, 2239 bp, Zea Mays
cacacactggctggcactggcagcaggtgcagccgtgcgagcgctcctactccaacaatccccttctcctctcgcggcccgggccggcacgggtcgcattccttcccgtccgaccgagcaagcaggcgcaggcgcaggcctcccaattcccctccccacccccaccagccaccaaaaaaagcgagcagcgcaccactagctcgccgagcaccgtacgagtacgatacgagtgcgcagcgaggaagcacgcgcgggaccggccgcgatgtcgacgtcgccgccgccggccacttccccgcccggcgcgccgcccaacggtacggcctcgcccactgccgcgccgccgccgccgctgccgccagcaccgtccaactcctcctccccgacgcccgcgacgccgacaggcgctccccccaccgctcccgcgccgccctccaccgactctccggcgccgccagggacgccgcccgccccagtgtccccgaacgcggccgcgctccccgcgcccggaagggcgacgccggcctcggcctcgccgccgacgccctcctcctctgggtcggggcttaccacgtccgtcgttgtggggatcgcggtcggcggcttcgccgtgctgctcctcggctgcctgttctgcctctgcctcttcaggagcaacaagaggagccggaggcggcaccgccaccacccgccaccgccgccgccgccccacctcttgcactactacggccacccgccgccgccgccgccgcctccgcacaaaggggatcagcaccaaagctggcagcataacgcccctccaccaccccctgatcatgttatcaagatcaattcacatcctacccttccgccgcctccgcataacgtacatagcagtggttccgcttcgaaccactcgggtggtgagagccgccctgcgctgtcgcctggcactgcccttagcttttcaaggagcacattcacttacgagcagctgatgacagcaacgaatgggttttctgacgctaatctgctggggcaaggaggttttgggtttgttcacaaaggagtgctaccagatggcacagaggttgccgttaagcagttaagagatggcagtggccagggagagcgcgagttccaggctgaagttgagattatcagcagagtacatcacaagcatcttgtatccttggttggctattgcatttctggagcccacaggttgctcgtctacgagtttgttccaaacaatacattggaattccacttacatggaagaggcagaccaaccttggattggccaacaagactaaaaattgctttgggttctgcgaagggattggcatatcttcatgaagattgtcatcctaagattattcatcgtgacataaaggcctcaaatattcttctcgatctaagatttgaagctaaggtggcagattttggacttgcaaaattcacttctgatgcaaacacccacgtttcaaccagagtgatgggcacatttgggcaaggcctctgatgataaaagcatttgaggatggtaatcatgatgctctagtggacccccggctgggaagtgagtacaatgataatgagatggcgaggatgatagcctgcgcagctgcatgcgtccggcattcttcacggcggcggccacggatgggtcaggtcgtccgggcgctggaaggcgacgtatctctggacgacctgaacgagggcgtgcggcccgggcacagccggttcgtggggtcgtacggcagttcgacgtccgactacgacaccagccagtacaaggaggacctgaagaagttccggaagatggcgctgggcggcagcgggctccagagcagcagcgcgcagacgccgacgagcgagcacggggagaacccgtcggtgtcggtgtcgagcagcgacggcgacggcggcggaggaaccggcgaggagcgtgaagacagacggcaggcagcgtcgtgaggcgtgaggcgtgcccagcctacggcccccgcgcatgcatctgtagatcctagtcctctcgacatcgctacgtacatgtctaattgatagctgacctgtggccgggaggcgggactactgagagattcatgattgctttcttttcttttgtgtgtgtgattctcttggtgggtacactggtctcatgcatgcgatctctgtataaattcaccgactctttaggaactgattactattggctattcgtatattatgagtatactcagtgttgcacgaaatc

SEQ ID NO: 33326 - DNA, 2420 bp, Zea Mays
gattattatatttattcactggtaaagcccagtggagagcacacgcctcttctccccccccaaaaaatccagcagcagcagcaagccccacgcaacattagcagcaggagaccaccccaatcccccacggacattcgccgcgaacccttatctgcacgccgcgccatggccgccgccgccgccgccgcggtcgcccacctctccatccacggccgcctccgccgctcaccggagcatcggccgtccatcaccaccaccaccacctcctcctcttcctcgtccgctcaccgcccgtccctgctgcggtgccgcgcgttcaagcaggaggccggcgacggcgacccggctgaggccgacgcgcggaagcgcaggaagggcccgctgtacaagctcaaggcggcgatccagggcctcgcgggatcccgctccgccgccgccgaggtgtacgggggagagtaccagtaccagcgcgccgtcgagaaggcggaggagatattcttctcggttactactcagctaggcagatatgttatcactatgatgagcagcggtgttgtacttggggttggattccagctgtcaggtggagacagccaaatgaacgaactaatttggtatagctggcttggtggggtgattatcggcacaatgataggtgcaaacagtgtcctagaggaacactgcaaagctggacctcgcaatgtcgtcataactggaagcacaagagggttaggaaaagcgcttgctcgtgagtttcttctttctggagaccgtgttgtaattacttcacgaagtcctgaatcagtccttcagactataaaagaacttgaagagaacatacaggaagggttatctgttgccaaaaagaagcagaggaatattctatcgcatgccaaggttgttggtacagattgtgatgtctgtaaacctgaagatgtgaaggagttagtgaattttgctattaatgagcttggttcagttgatatttgggtaggtaattcattacagttttgtagcttaaatctatatcttatttggtctaccttttgttttgctaaagaaatatttaagtaaagttggattatacagagtttataacatttacatcagttgtgaaatgtactttatatatatgatgacattaagatagattttgtggtgcccacttttatgcttttctgtatggttctatggctacatcaaagaagaatattatttaccacttcttctccaaccttgtgtgcagataaataacgctggcacaaataaaggttttaggccattggtaaccttttcagatgatgacatcactcagatcgtctcaacaaacctagttggttctctactgtgcaccagagaagccatgaatgtcatgcaataccaagagaagggaggccatatattcaacatggatggagcaggttctggaggatcaagcacaccactaacagctgtctatggttcaactaaatgtggactaaagcagttccaaggatcacttctgaacgaaagcagaagatcaaaagttggagtgcatactgcttcacctggtatggtcctcacagaccttctgttaagtggttcatcgctcagaaataaacagatgttcaatttaatatgtgaacttccagaaacagtagccagaactttggttccaaggatgagagttgtaaaaggaagtggaaaggcaatcaactacttaacaccaccaaggatcttgcttgctctggttactgcatgggttcgacggggtcgatggtttgacgacgagggaagagcggtgtatgcagctgaagctgatagaattcgcaactgggctgaaagtcgagcacgcttctcgttcaccgacgccatggagatgtacacggaaaacacatgggtttccgtattctcgctctcggtggtctgtgcgttcataatcctctctagctccggtggacctcttccaggcacatgatttccagagctgtcaaactactagtagacggccatgcatatgctcattttttaccccaccaaaggcattctactaccagaagccatttgatacagcacttaatgaatggggaagaagagaaccccccacagatgtagatatataggtgcaacggagattagcagctgcctcctcgcaccatttaaagtttggctagctaacctatgtgctcatagaagggtaaatagaatttattgcgtgggcattccactgccgtacgtaagctggactatgatccgtgacttttttaaggacatgtatgcaaagttaggtgagcaggatcagagtcgacattgcctcgtgtacatgcatgtagttgtcattataatcactgtaacttctggtatcgcttgtacccttcaaaattcgaagacattatattgtgaagcgaagtggcacacaccatgtgcatatggtttatcta

SEQ ID NO: 33327 - DNA, 2658 bp, Zea Mays
gattattatatttattcactggtaaagcccagtggagagcacacgcctcttctccccccccaaaaaatccagcagcagcagcaagccccacgcaacattagcagcaggagaccaccccaatcccccacggacattcgccgcgaacccttatctgcacgccgcgccatggccgccgccgccgccgccgcggtcgcccacctctccatccacggccgcctccgccgctcaccggagcatcggccgtccatcaccaccaccaccacctcctcctcttcctcgtccgctcaccgcccgtccctgctgcggtgccgcgcgttcaagcaggaggccggcgacggcgacccggctgaggccgacgcgcggaagcgcaggaagggcccgctgtacaagctcaaggcggcgatccagggcctcgcgggatcccgctccgccgccgccgaggtgtacgggggagagtaccagtaccagcgcgccgtcgagaaggcggaggagatattcttctcggttactactcagctaggcagatatgttatcactatgatgagcagcggtgttgtacttggggttggattccagctgtcaggtggagacagccaaatgaacgaactaatttggtatagctggcttggtggggtgattatcggcacaatgataggtgcaaacagtgtcctagaggaacactgcaaagctggacctcgcaatgtcgtcataactggaagtcctgaatcagtccttcagactataaaagaacttgaagagaacatacaggaagggttatctgttgccaaaaagaagcagaggaatattctatcgcatgccaaggttgttggtacagattgtgatgtctgtaaacctgaagatgtgaaggagttagtgaattttgctattaatgagcttggttcagttgatatttggataaataacgctggcacaaataaaggttttaggccattggtaaccttttcagatgatgacatcactcagatcgtctcaacaaacctagttggttctctactgtgcaccagagaagccatgaatgtcatgcaataccaagagaagggaggccatatattcaacatggatggagcaggttctggaggatcaagcacaccactaacagctgtctatggttcaactaaatgtggactaaagcagttccaaggatcacttctgaacgaaagcagaagatcaaaagttggagtgcatactgcttcacctggtatggtcctcacagaccttctgttaaggtaagctctccatacttatcagttgtcattatatgatttgtaaaggtcgctgtgaacttcatatacgttgactgtctgatataagaataatattgcatttgacttggcccaaatgttcataatttctaaactgcagagtatcgtgtaacaattaacaatttgaggacacggtttgactttgtgcttctttgcatacatatgcataacacatcaaatgtcaagctgtgtagatgtttctgagattaccttggcacaaatcggcatagtctggtgctgtagaatactagaatatatattccatagctatgtgaattagttgtttctctatatatgaaattaattagtgagacatgttttagctatgagtctacaacatgcttaaataagtaaataactatgataacagaaagaccaaacatagccttagtagttcttgtctagttttgctatatgtgtaaatgtgaattacttcttttgcagactactcacctatgatctgatgaaccctcttactgtgacatgttggaatcatgattcttcttctttactgactacctgtttctttgcagtggttcatcgctcagaaataaacagatgttcaatttaatatgtgaacttccagaaacagtagccagaactttggttccaaggatgagagttgtaaaaggaagtggaaaggcaatcaactacttaacaccaccaaggatcttgcttgctctggttactgcatgggttcgacggggtcgatggtttgacgacgagggaagagcggtgtatgcagctgaagctgatagaattcgcaactgggctgaaagtcgagcacgcttctcgttcaccgacgccatggagatgtacacggaaaacacatgggtttccgtattctcgctctcggtggtctgtgcgttcataatcctctctagctccggtggacctcttccaggcacatgatttccagagctgtcaaactactagtagacggccatgcatatgctcattttttaccccaccaaaggcattctactaccagaagccatttgatacagcacttaatgaatggggaagaagagaaccccccacagatgtagatatataggtgcaacggagattagcagctgcctcctcgcaccatttaaagtttggctagctaacctatgtgctcatagaagggtaaatagaatttattgcgtgggcattccactgccgtacgtaagctggactatgatccgtgacttttttaaggacatgtatgcaaagttaggtgagcaggatcagagtcgacattgcctcgtgtacatgcatgtagttgtcattataatcactgtaacttctggtatcgcttgtacccttcaaaattcgaagacattatattgtgaagcgaagtggcacacaccatgtgcatatggtttatcta

SEQ ID NO: 33328 - DNA, 2083 bp, Zea Mays
gattattatatttattcactggtaaagcccagtggagagcacacgcctcttctccccccccaaaaaatccagcagcagcagcaagccccacgcaacattagcagcaggagaccaccccaatcccccacggacattcgccgcgaacccttatctgcacgccgcgccatggccgccgccgccgccgccgcggtcgcccacctctccatccacggccgcctccgccgctcaccggagcatcggccgtccatcaccaccaccaccacctcctcctcttcctcgtccgctcaccgcccgtccctgctgcggtgccgcgcgttcaagcaggaggccggcgacggcgacccggctgaggccgacgcgcggaagcgcaggaagggcccgctgtacaagctcaaggcggcgatccagggcctcgcgggatcccgctccgccgccgccgaggtgtacgggggagagtaccagtaccagcgcgccgtcgagaaggcggaggagatattcttctcggttactactcagctaggcagatatgttatcactatgatgagcagcggtgttgtacttggggttggattccagctgtcaggtggagacagccaaatgaacgaactaatttggtatagctggcttggtggggtgattatcggcacaatgataggtgcaaacagtgtcctagaggaacactgcaaagctggacctcgcaatgtcgtcataactggaagcacaagagggttaggaaaagcgcttgctcgtgagtttcttctttctggagaccgtgttgtaattacttcacgaagtcctgaatcagtccttcagactataaaagaacttgaagagaacatacaggaagggttatctgttgccaaaaagaagcagaggaatattctatcgcatgccaaggttgttggtacagattgtgatgtctgtaaacctgaagatgtgaaggagttagtgaattttgctattaatgagcttggttcagttgatatttggataaataacgctggcacaaataaaggttttaggccattggtaaccttttcagatgatgacatcactcagatcgtctcaacaaacctagttggttctctactgtgcaccagagaagccatgaatgtcatgcaataccaagagaagggaggccatatattcaacatggatggagcaggttctggaggatcaagcacaccactaacagctgtctatggttcaactaaatgtggactaaagcagttccaaggatcacttctgaacgaaagcagaagatcaaaagttggagtgcatactgcttcacctgaaacagtagccagaactttggttccaaggatgagagttgtaaaaggaagtggaaaggcaatcaactacttaacaccaccaaggatcttgcttgctctggttactgcatgggttcgacggggtcgatggtttgacgacgagggaagagcggtgtatgcagctgaagctgatagaattcgcaactgggctgaaagtcgagcacgcttctcgttcaccgacgccatggagatgtacacggaaaacacatgggtttccgtattctcgctctcggtggtctgtgcgttcataatcctctctagctccggtggacctcttccaggcacatgatttccagagctgtcaaactactagtagacggccatgcatatgctcattttttaccccaccaaaggcattctactaccagaagccatttgatacagcacttaatgaatggggaagaagagaaccccccacagatgtagatatataggtgcaacggagattagcagctgcctcctcgcaccatttaaagtttggctagctaacctatgtgctcatagaagggtaaatagaatttattgcgtgggcattccactgccgtacgtaagctggactatgatccgtgacttttttaaggacatgtatgcaaagttaggtgagcaggatcagagtcgacattgcctcgtgtacatgcatgtagttgtcattataatcactgtaacttctggtatcgcttgtacccttcaaaattcgaagacattatattgtgaagcgaagtggcacacaccatgtgcatatggtttatcta

SEQ ID NO: 33329 - DNA, 2149 bp, Zea Mays
gattattatatttattcactggtaaagcccagtggagagcacacgcctcttctccccccccaaaaaatccagcagcagcagcaagccccacgcaacattagcagcaggagaccaccccaatcccccacggacattcgccgcgaacccttatctgcacgccgcgccatggccgccgccgccgccgccgcggtcgcccacctctccatccacggccgcctccgccgctcaccggagcatcggccgtccatcaccaccaccaccacctcctcctcttcctcgtccgctcaccgcccgtccctgctgcggtgccgcgcgttcaagcaggaggccggcgacggcgacccggctgaggccgacgcgcggaagcgcaggaagggcccgctgtacaagctcaaggcggcgatccagggcctcgcgggatcccgctccgccgccgccgaggtgtacgggggagagtaccagtaccagcgcgccgtcgagaaggcggaggagatattcttctcggttactactcagctaggcagatatgttatcactatgatgagcagcggtgttgtacttggggttggattccagctgtcaggtggagacagccaaatgaacgaactaatttggtatagctggcttggtggggtgattatcggcacaatgataggtgcaaacagtgtcctagaggaacactgcaaagctggacctcgcaatgtcgtcataactggaagcacaagagggttaggaaaagcgcttgctcgtgagtttcttctttctggagaccgtgttgtaattacttcacgaagtcctgaatcagtccttcagactataaaagaacttgaagagaacatacaggaagggttatctgttgccaaaaagaagcagaggaatattctatcgcatgccaaggttgttggtacagattgtgatgtctgtaaacctgaagatgtgaaggagttagtgaattttgctattaatgagcttggttcagttgatatttggataaataacgctggcacaaataaaggttttaggccattggtaaccttttcagatgatgacatcactcagatcgtctcaacaaacctagttggttctctactgtgcaccagagaagccatgaatgtcatgcaataccaagagaagggaggccatatattcaacatggatggagcaggttctggaggatcaagcacaccactaacagctgtctatggttcaactaaatgtggactaaagcagttccaaggatcacttctgaacgaaagcagaagatcaaaagttggagtgcatactgcttcacctggtatggtcctcacagaccttctgttaagaaataaacagatgttcaatttaatatgtgaacttccagaaacagtagccagaactttggttccaaggatgagagttgtaaaaggaagtggaaaggcaatcaactacttaacaccaccaaggatcttgcttgctctggttactgcatgggttcgacggggtcgatggtttgacgacgagggaagagcggtgtatgcagctgaagctgatagaattcgcaactgggctgaaagtcgagcacgcttctcgttcaccgacgccatggagatgtacacggaaaacacatgggtttccgtattctcgctctcggtggtctgtgcgttcataatcctctctagctccggtggacctcttccaggcacatgatttccagagctgtcaaactactagtagacggccatgcatatgctcattttttaccccaccaaaggcattctactaccagaagccatttgatacagcacttaatgaatggggaagaagagaaccccccacagatgtagatatataggtgcaacggagattagcagctgcctcctcgcaccatttaaagtttggctagctaacctatgtgctcatagaagggtaaatagaatttattgcgtgggcattccactgccgtacgtaagctggactatgatccgtgacttttttaaggacatgtatgcaaagttaggtgagcaggatcagagtcgacattgcctcgtgtacatgcatgtagttgtcattataatcactgtaacttctggtatcgcttgtacccttcaaaattcgaagacattatattgtgaagcgaagtggcacacaccatgtgcatatggtttatcta

SEQ ID NO: 33330 - DNA, 2645 bp, Zea Mays
gttacaacaagtagcttgcacttgactacgtcgatcgtaggcggcgacgaccacgacgacaatggcgcggtgctctacgtgcgatcgtttctcgaggttcatggagacgacggacgagttcgcggtgccgccacgtcccgcgctcgtgcacccggacgccgacggcgttcgaaccccgtcggccctcggcccgctctcccccgaggacccgccacccgcgttcatggagcgagattggcgacacggcggcgataacacggccgcgtatccagggtgctcgccgttccagccgtccgcggccgggcgcccggtctcgatcagcctgccggcgtcgccgacaggcgggttcgacatctccagcaggacggaggcggagctgcagcgggatgccgccgccgtcacggacgcgccgccgccgaggatgatgatgctgccgccgttcgccccggcgccggccatggctctcgagcagcctggcaaggtggtgttccggtcccagccgatccccgctgcgccgccggtaggtgacgggggccacgacgacgagttcggccgcagcgcgccggcggccatggccctcgagcagcctggcaaggtggtgttccggtcccagccgatcatccccggtgcgcctccggagggcgacggcgccgcccggggccacgacgacttcggccggagcgcgccggcggccaagacgcgcagggacagccgggacaccagctacgactcgttcaagacgtggtcgggcaagctggagaagcagatcgccacgcacctgctcggcagcagcctgcagcagcaaccggagcacggggaggagccggaggaagacgacgcggcgagcgaccgccgcaactcctccatgcccaaagtgcagcgcttcttcgccgcgctggaaggccccgagctcgacaagctgaggtcctcggaggagctgatcctgccgtccgacaagacgtggccgttcctgctccgtttcccggtgtcggcgttcggcatgtgcctgggcatgagcagccaggcgatcctgtggaagcggatcgccatctcggcgtcgacgcggttcctgcacatcacggtgaagatcaacctggtgctgtggtgcgcctcggtggcgctgatggcggccgtgtcggcgctgtacggctgcaagctggtgttgtacttcgaggcggtgcggcgggagtactaccacccgatccgcgtgaacttcttcttcgcgccgtggatcgcgtgcctgttcctggcgatcggcgtgccggacgtggtggcggccacgctcccgcactggctgtggtacgtgctgatggcgccgatcgtgtgcctggagctgaagatctacgggcagtggatctcgggcgggcagcggcggctgtcccgcgtggcgaacccgtcgaaccacctgtccatcgtgggcaacttcgtgggcgcgctgctgggcggcatcatggggctgaaggagggtcccatgttcttcttctccgtggggctggcgcactacatggtgctgttcgtgacgctgtaccagcggctgccgacgagcgagacgctgccccgcgacctgcacccggtgttcttcctgttcgtggcggcgcccagcgtggcgtgcctggcgtgggcgcgcatcaccggcgagttcggctacggctcccgcgtcgcctacttcatcgccatgttcctgtacgcgtcgctggccgtgcgcatcaacctgttcagagggttcagcttctcgctggcgtggtgggcctacacgttccccatgaccagcgcggcgatcgcctccatccgctactcgtccgaggtgaagaacgccttcacgcagtgcatgtgcatcgggctggccgcggcggccacgctggccgtggcggcgctcttcctcgccacgctgctgcacgcggtggtgtaccgggacctcttccccaacgacatctccatcgccatcacggagcgccggcgcagcaagcccctcgtcggggaaaagatgctgctccgcctgcgcagcggcaagaaggtgcagcaggcgctctccaccgcccccgccgacgccgccgcggacctggaggccgcgcgcgccgccacgacgacgtcgtacacgtagacggggggtgacggatgaaccgggcgggggattgatagctccagcgtttgcttggtgcagttattgttcgtattatattggctgggctgccgtatggggcaggcagctcgtgcgctctcggcagccggcactcaaatcggcaggaggcaaaacaagatacgtggctggattctggatgatacgaatacgattgcaaggtccatctacggggtgaccatatacgtacgtacgtacagatacatatgcgagagttgtttatactgcagggttccttttctcatgaaaagaaaaaaaacatcagacgtgaactacagtgagaatgtatgcatattacgtagagaaatgacatctacaaagataaatgctctggctcttgttatcccgttgtttggcaacgcgtggaactggaacgcaatttgtgctcaatttggcccattacctcttctaagtaatccattgcaggtttctcggctgctgggccgacagtgttttttttttctgttagtcaaaccactgcgctgtggtgggcttggtggtcttggcc

SEQ ID NO: 33331 - DNA, 2895 bp, Zea Mays
gttacaacaagtagcttgcacttgactacgtcgatcgtaggcggcgacgaccacgacgacaatggcgcggtgctctacgtgcgatcgcaatgtgttccgcccgtggtgcttcttctttgaacccccgctgacggtttcaccgtatccggccaggtttctcgaggttcatggagacgacggacgagttcgcggtgccgccacgtcccgcgctcgtgcacccggacgccgacggcgttcgaaccccgtcggccctcggcccgctctcccccgaggacccgccacccgcgttcatggagcgagattggcgacacggcggcgataacacggccgcgtatccagggtgctcgccgttccagccgtccgcggccgggcgcccggtctcgatcagcctgccggcgtcgccgacaggcgggttcgacatctccagcaggacggaggcggagctgcagcgggatgccgccgccgtcacggacgcgccgccgccgaggatgatgatgctgccgccgttcgccccggcgccggccatggctctcgagcagcctggcaaggtggtgttccggtcccagccgatccccgctgcgccgccggtaggtgacgggggccacgacgacgagttcggccgcagcgcgccggcggccatggccctcgagcagcctggcaaggtggtgttccggtcccagccgatcatccccggtgcgcctccggagggcgacggcgccgcccggggccacgacgacttcggccggagcgcgccggcggccaagacgcgcagggacagccgggacaccagctacgactcgttcaagacgtggtcgggcaagctggagaagcagatcgccacgcacctgctcggcagcagcctgcagcagcaaccggagcacggggaggagccggaggaagacgacgcggcgagcgaccgccgcaactcctccatgcccaaagtgcagcgcttcttcgccgcgctggaaggccccgagctcgacaagctgagggtactgacgccgatgacaccatccatacgttatactagtactactagtgctgttgacgcgaacgccaggtggcgtgcgtttgttagcttcgtcgccgccgtgctgctgtggccggcgcacgtgcctttagctgtcgctgatgccgatgaagaagctgacgtcgttttgtcgtactggtggcagtcctcggaggagctgatcctgccgtccgacaagacgtggccgttcctgctccgtttcccggtgtcggcgttcggcatgtgcctgggcatgagcagccaggcgatcctgtggaagcggatcgccatctcggcgtcgacgcggttcctgcacatcacggtgaagatcaacctggtgctgtggtgcgcctcggtggcgctgatggcggccgtgtcggcgctgtacggctgcaagctggtgttgtacttcgaggcggtgcggcgggagtactaccacccgatccgcgtgaacttcttcttcgcgccgtggatcgcgtgcctgttcctggcgatcggcgtgccggacgtggtggcggccacgctcccgcactggctgtggtacgtgctgatggcgccgatcgtgtgcctggagctgaagatctacgggcagtggatctcgggcgggcagcggcggctgtcccgcgtggcgaacccgtcgaaccacctgtccatcgtgggcaacttcgtgggcgcgctgctgggcggcatcatggggctgaaggagggtcccatgttcttcttctccgtggggctggcgcactacatggtgctgttcgtgacgctgtaccagcggctgccgacgagcgagacgctgccccgcgacctgcacccggtgttcttcctgttcgtggcggcgcccagcgtggcgtgcctggcgtgggcgcgcatcaccggcgagttcggctacggctcccgcgtcgcctacttcatcgccatgttcctgtacgcgtcgctggccgtgcgcatcaacctgttcagagggttcagcttctcgctggcgtggtgggcctacacgttccccatgaccagcgcggcgatcgcctccatccgctactcgtccgaggtgaagaacgccttcacgcagtgcatgtgcatcgggctggccgcggcggccacgctggccgtggcggcgctcttcctcgccacgctgctgcacgcggtggtgtaccgggacctcttccccaacgacatctccatcgccatcacggagcgccggcgcagcaagcccctcgtcggggaaaagatgctgctccgcctgcgcagcggcaagaaggtgcagcaggcgctctccaccgcccccgccgacgccgccgcggacctggaggccgcgcgcgccgccacgacgacgtcgtacacgtagacggggggtgacggatgaaccgggcgggggattgatagctccagcgtttgcttggtgcagttattgttcgtattatattggctgggctgccgtatggggcaggcagctcgtgcgctctcggcagccggcactcaaatcggcaggaggcaaaacaagatacgtggctggattctggatgatacgaatacgattgcaaggtccatctacggggtgaccatatacgtacgtacgtacagatacatatgcgagagttgtttatactgcagggttccttttctcatgaaaagaaaaaaaacatcagacgtgaactacagtgagaatgtatgcatattacgtagagaaatgacatctacaaagataaatgctctggctcttgttatcccgttgtttggcaacgcgtggaactggaacgcaatttgtgctcaatttggcccattacctcttctaagtaatccattgcaggtttctcggctgctgggccgacagtgttttttttttctgttagtcaaaccactgcgctgtggtgggcttggtggtcttggcc

SEQ ID NO: 33332 - DNA, 793 bp, Zea Mays
cgcctataaaattcccagcgcacaaggggaagaccagatctcccccatttctcctccacgccgccccctccgcatttcccgtgctcctctcgttccggcatggcggagcagacgcagccacaaggggaaggcggcgctagccccaagcacgagtccctgatggagaagctcgccgacaagctccacgtcggcggcggcaaggccgactcctcctcctcctcggactccgacagtgacgagcggccccgcccctcggcaccgcctgccgacgagctcaagcagccctccttctccgacgccgccgccacggcggccgccgaggccaaagccaaggtgttccgccttttcggccgcgagcagcccatccacaaggccctcggtggcggcaagcctgctgatgtgttcttgtggaggaacaagaacatctctgctggagtacttggtggtgccacagcaatctggatcttatttgaattgcttggctaccatctccttacttttgtttgccatggtctcatattcgccctgggtgttctctttctctggtccaatgcttcatcgtttatccacaaggctccaccaaagatcccagaggtgatcattcctgaagatttagttgtcaacattgcgctatccactcgttacgagatcaacagagcctttgccaatctccgccagattgctcttggccgggacctaaagaagttcctaatgggcttaagaagaccacctttgaagaggtcaggtcgtctcagaggcagcatgacaagctcatgaagggattctttgatat

SEQ ID NO: 33333 - DNA, 753 bp, Zea Mays
ttcccagcgcacaaggggaagaccagatctcccccatttctcctccacgccgccccctccgcatttcccgtgctcctctcgttccggcatggcggagcagacgcagccacaaggggaaggcggcgctagccccaagcacgagtccctgatggagaagctcgccgacaagctccacgtcggcggcggcaaggccgactcctcctcctcctcggactccgacagtgacgagcggccccgcccctcggcaccgcctgccgacgagctcaagcagccctccttctccgacgccgccgccacggcggccgccgaggccaaagccaaggtgttccgccttttcggccgcgagcagcccatccacaaggccctcggtggcggcaagcctgctgatgtgttcttgtggaggaacaagaacatctctgctggagtacttggtggtgccacagcaatctggatcttatttgaattgcttggctaccatctccttacttttgtttgccatggtctcatattcgccctgggtgttctctttctctggtccaatgcttcatcgtttatccacaaggctccaccaaagatcccagaggtgatcattcctgaagatttagttgtcaacattgcgctatccactcgttacgagatcaacagagcctttgccaatctccgccagattgctcttggccgggacctaaagaagttcctaatggttctgttaaagaagaattcaggatcgagcagaattgatctctactttag

SEQ ID NO: 33334 - DNA, 2323 bp, Zea Mays
ttcccagcgcacaaggggaagaccagatctcccccatttctcctccacgccgccccctccgcatttcccgtgctcctctcgttccggcatggcggagcagacgcagccacaaggggaaggcggcgctagccccaagcacgagtccctgatggagaagctcgccgacaagctccacgtcggcggcggcaaggccgactcctcctcctcctcggactccgacagtgacgagcggccccgcccctcggcaccgcctgccgacgagctcaagcagccctccttctccgacgccgccgccacggcggccgccgaggccaaagccaaggtgttccgccttttcggccgcgagcagcccatccacaaggccctcggtggcggcaagcgtatggttctgtttcccacgctcccgatgctgcttgctattaggcttgagatttctagatcggatctgggtgggcctcggtgctcgggttgcgggctactagatctgactgctggagtacgttttatggaatgcgctagctagggtgttaagaacgaactggccgtttggatcacagattgggatcttgcctgctttgacaaatggaggcgactagtatgcttgatcactctaacgcttgcttcaaatttgatcaatccaagtcagtgcacttgggtacttatctgaactgtatgctgctaatatttctcaatgttaagcttgtccgaactgaggcacgcaacatttttacagtgtctggtctgccagacgaatactgatgccgtttcggtaacagtcatactgctactgactgcttgagtaacctttaaacaatactgcaaaccacttgaattcatgtggtctgtcggtgtttaacatggttggaaccaattgcttatccgcttagggatgctttgtcgtgactgcaagcacatttcaggggtgttatgtatttttgtatcagatcaatgctgaagggcccttatggttgttttgtgctaagattatgaaaatataaagttttaaaatttatttgtaaaagaaacatctagtagacttcatgttatgtttctctcaataaatggcatttcattggagctgtttggtactacattatctacactgaaatggaaggtctttctttggagaaattgtgatgcttgggttgtgtttttgtgcctgattatacatgtctttaatgtaaacaaatgacaaccagcacactataacctcattggtttgtgtctacagctggtactcttgtcttaaaactgatgattgataaacttgatcgatgtaatgagaattgtgagacctaaataccttatcgtctgtcattgtacccacaatactcattaccgttctctattttgtagctgctgatgtgttcttgtggaggaacaagaacatctctgctggagtacttggtggtgccacagcaatctggatcttatttgaattgcttggctaccatctccttacttttgtttgccatggtctcatattcgccctgggtgttctctttctctggtccaatgcttcatcgtttatccacaaggctccaccaaagatcccagaggtgatcattcctgaagatttagttgtcaacattgcgctatccactcgttacgagatcaacagagcctttgccaatctccgccagattgctcttggccgggacctaaagaagttcctaatggttattgctgggttttggttgctttctgttcttggaagctgctgcaacttcttgaccttagtttacattgtctttgtggtgctgcacacagtacctgtcctgtacgagaagtacgaggatcagattgactcgtatggcgagaaggggtgggttgaaattaagaagcagtatgccgtgttcgatgagaaggttctgagcaaagtacccaggggtcctgcgaaagacaagaagcactagatgcaagtgattcgaggtccctgttagtagggaatgctagcaaaaccggttcgagtttctccggaggggggcagcacttgtgggtgtgagcaccagtttgccacctgtgcattacgttgcgtatggctgcttagttgtttggtcttgatgggagtaagccgaattgctagctttgcgcttcatccagtgatgcagacgcagcatacgaatttctgtagtgctgtttgagtttgatctgtgttgtatgatgtgtgcagactgtgcttgcgacacttttttggtacttatatattgatgcattttggaatttgatgatttttatggttttttttttgctgagcttagacaacacatacacgggctgttaaacattgttgctttgcccacccgactgctggagtcggcct

SEQ ID NO: 33335 - DNA, 1737 bp, Zea Mays
gttgcttattgacctattgggcagtatcctatgtaaagcgactaaatgtgccaagcggcatggtgggggcttgtcgccttgatgtagcatatgaacatttcaaggaaaagcctcacatgttccagtttgttccaaatgaaaagcaggtccaggctgccaataagctattgaagtcacttccacaaaggggcagaaggaaaaaacttgatggggttcctgtttttagtgcgcaaaacttgaatattgcagtggcaacaaatgatggaattagatggtacacaccatacttttttgataaaaacttgttggacaatatccttgaagcttctatggatcaacatttccattcgataatgcaaaatcgccatacacgtcgtagaagggatattgtcgatgatagtttaacatcagaaataattgaagaaagtgctgaaagcttgcttgagcccccagaggttcaagaattaatgaatgagattggcccagctggtataccattaaatgttgtaacgaaagctgcagagattcagtttcttgatgttgttgataaagtccttctaggaaataagtggttaaggaaagcttctggcatacaaccaaagttcccttatgttgttgattcatttgaagaaaggactgctgtttcaattgccaatattgctactaccagcagtttaactgcttcaaacgacgacagcagttgccagaataatcaagaaactcaatcttccgagccaagtggtgataacagcagctacagaaatcacaataatgaagatcataatcactttccgtttagcaatctgcttccaaatatatggccagggcatgacagaaagttcaaatcacaagagagtgacaataagtttagcagatatgatgccgacgtgaagaatgagcaaagccaacttaaagaagacaatggaagacttgacaaaagagttggagcaaacgagtgaagaaaatatgttcggtgatgaaaaagacccactttttgttgccaacgttggtgactactcaaggataacaaagattagctctgcatgaggctcgttgaccaacaggcgacagcaagggtgttgtactgaactgctaacgaagtctacagtccatgatactgatcttagagggctctactgatataatgatgcaaatcggaggtcatcagatcatatggacattcgactgtcgaccgttctgactttagaggctatccaacgtcaacagttacaagccaatctaaattttcggatatgatttgccaaaaggatgattgtaaatagaaaagtttgcagaatgtccaccatgcagttaggcgtgaagatctgaagcaacatgttgttggatttctaagatcttagctcgtaacagctgtagagtatggtggtatatagcttcaggattgagatgggggtcacaggagtctgtcaggtgagcagagtcgaataaattgatgtgggtagcatttttcttcactagctgcgtatcggatctgagtgtgtatggcgagagttacggtaaatgttggttcgcatataggtccttggattatttattgtacgcgatatggtgaaaggaggttgtagctaacatgttgtgtctccgatcatcatactgacattattgtctctcatgatcttatacttgcttataaatagaacttaaaactttattttgagttgacagcatgagcgacaattgagagttgggtgcaatatgagcatgctggtgttaagg

SEQ ID NO: 33336 - DNA, 2066 bp, Zea Mays
acaaaaaggcacgccccacccagtccagtccccaccaagcaggcgccacccgttcggtccgtacaggaggggtccaccatgccgtgctcctcttcgtcgtccaaccccttccactccctcgcctccgccttccccttcctctcctccacatccccacccccatccccacccgcctcgcccgcgcccgccgctccccacctcgccgtcccgctcctcctccccgtctcctcggcttccgagtcccgccgcggggcgcagccgctgccgggcacgcggatggtcggcgcgggcgcgaccggcgggggtaacatggccagcggtggtggggggcccgcgttcgtgggccaggtgttcaccatgctcgacccatccgggaacgggctcatggccgttaccacacgcttcgagctcccgcgcttcctcaccaacaggactcctatgtggttcaaaaggatgctatcaccgtcgaagaagactgaaaatagtccagtatttaggttttttatggatctgaatgatgcagtatcctatgtaaagcgactaaatgtgccaagcggcatggtgggggcttgtcgccttgatgtagcatatgaacatttcaaggtacacaccatacttttttgataaaaacttgttggacaatatccttgaagcttctatggatcaacatttccattcgataatgcaaaatcgccatacacgtcgtagaagggatattgtcgatgatagtttaacatcagaaataattgaagaaagtgctgaaagcttgcttgagcccccagaggttcaagaattaatgaatgagattggcccagctggtataccattaaatgttgtaacgaaagctgcagagattcagtttcttgatgttgttgataaagtccttctaggaaataagtggttaaggaaagcttctggcatacaaccaaagttcccttatgttgttgattcatttgaagaaaggactgctgtttcaattgccaatattgctactaccagcagtttaactgcttcaaacgacgacagcagttgccagaataatcaagaaactcaatcttccgagccaagtggtgataacagcagctacagaaatcacaataatgaagatcataatcactttccgtttagcaatctgcttccaaatatatggccagggcatgacagaaagttcaaatcacaagagagtgacaataagtttagcagatatgatgccgacgtgaagaatgagcaaagccaacttaaagaagacaatggaagacttgacaaaagagttggagcaaacgagtgaagaaaatatgttcggtgatgaaaaagacccactttttgttgccaacgttggtgactactcaaggataacaaagattagctctgcatgaggctcgttgaccaacaggcgacagcaagggtgttgtactgaactgctaacgaagtctacagtccatgatactgatcttagagggctctactgatataatgatgcaaatcggaggtcatcagatcatatggacattcgactgtcgaccgttctgactttagaggctatccaacgtcaacagttacaagccaatctaaattttcggatatgatttgccaaaaggatgattgtaaatagaaaagtttgcagaatgtccaccatgcagttaggcgtgaagatctgaagcaacatgttgttggatttctaagatcttagctcgtaacagctgtagagtatggtggtatatagcttcaggattgagatgggggtcacaggagtctgtcaggtgagcagagtcgaataaattgatgtgggtagcatttttcttcactagctgcgtatcggatctgagtgtgtatggcgagagttacggtaaatgttggttcgcatataggtccttggattatttattgtacgcgatatggtgaaaggaggttgtagctaacatgttgtgtctccgatcatcatactgacattattgtctctcatgatcttatacttgcttataaatagaacttaaaactttattttgagttgacagcatgagcgacaattgagagttgggtgcaatatgagcatgctggtgttaagg

SEQ ID NO: 33337 - DNA, 3696 bp, Zea Mays
atggcggcagccgttgccgttcttcgcgccgccctccgccggggccgtccggcagctgcgtcgctactgcaccgccttcccaacccctctgctcggagcctcccgccaccgcctcctctcggtcgagcgcttcgtcccctctcgcggcttggtttctccgccggattcgggcactcctcctccaccgaggattttggcttcggctactcccccgccaccgaggattcagcggccgccgcgaagcccaagaccaagaccaaggccaggaagcaccccatgaagcagtcgcgcttcgacttcaccaaggtggacgccgcgcttctccccaccgtcatcctcgtcggccgccccaacgtcggcaagtcagccctcttcaacagatttatacggaggagggaggcgttggtgtacaatactcctggggaccatgtcactcgtgacatccgtgaaggagttgccaagcttggggatctccgtttccgtgtgcttgactcagctggacttgagactgcagcaacatctgggagcattctcgctcggacagcagacatgacagggaatgtattggctaggtctcaatttgccattttcttgattgatgtgagatgacctcaaccaagatgatcctatctcggaggttgaaactgaggcccatgatggtgatgagagcaagttacctttgcagttggcaattgtgggacgtcctaatgttgggaagtccacccttttaaataccttgttgcaagaacagagagttcttgttggtccagaggcaggcctaacaagggactcgattcgggctcagtttcaatttgatagtcgaaccgtgtatttagtggatactgctggttggatggaaagatcagggaaggagaaagggccagcatctttgagtgttgtgcagtctaggaagaacttaatgagagctcacattgttgctcttgtgctggatgctgaaaagattgctaagtccaaaagtagcatgaatcatccagaaatcgtgatagcacggcaagcaatagaagagggccgtggactagttgtgattgtcaataaaatggatctccttagagataaccaaacactgtttaacaaggttatggacgctgttcctagagaaatccagacagtcattcctcaggtgacaggaataccagctgttttcgtgtcagcgctggaggggagggggcggattgctgtgatgcgccaggttatagatacctatgagaagtggtgtttaagattgtcaacatcacggctcaaccgttggttgcgtaaggttatgagcagacattcctggaaagattcagctactcagccaaaagtcaagtacttcactcaagtgaaggcacgaccaccaacatttgttgccttcatgagtgggaagactcagctttctgatacagatactaggttcttgacaaagtccctcaaggaagatttcgacatcgggggaataccgatacggatcatacaacgttctgttccaagaaaagcttatgctaagcgcaacaacacaaggaacactggccctagggttgtcaggatgaaaacagacaaacggacagcggtatctgacccagccctgtcatagagggtgagcaccagtatcagccgcctaacctgaagaagggaggtcatgtttcgcgtttgagctatatatatatgcttctcatggggaaacgggaagtgaatgtttttctgactcgggaagttatacaaagctatgagctagccggtccggctgcctgcaccgcatgctcaagaagaagaatgactgtaagaaacaagcccagcaattcgaaggacagcatcacttctcaacattgggtgcaaggtggtattgatgagcgtcaagcactcaagttcaccccagaactccagatcagatgaagaggactcctatgtggttcaaaaggatgctatcaccgtcgaagaagactgaaaatagtccagtatttaggttttttatggatctgaatgatgcagtatcctatgtaaagcgactaaatgtgccaagcggcatggtgggggcttgtcgccttgatgtagcatatgaacatttcaaggaaaagcctcacatgttccagtttgttccaaatgaaaagcaggctgccaataagctattgaagtcacttccacaaaggggcagaaggaaaaaacttgatggggttcctgtttttagtgcgcaaaacttgaatattgcagtggcaacaaatgatggaattagatggtacacaccatacttttttgataaaaacttgttggacaatatccttgaagcttctatggatcaacatttccattcgataatgcaaaatcgccatacacgtcgtagaagggatattgtcgatgatagtttaacatcagaaataattgaagaaagtgctgaaagcttgcttgagcccccagaggttcaagaattaatgaatgagattggcccagctggtataccattaaatgttgtaacgaaagctgcagagattcagtttcttgatgttgttgataaagtccttctaggaaataagtggttaaggaaagcttctggcatacaaccaaagttcccttatgttgttgattcatttgaagaaaggactgctgtttcaattgccaatattgctactaccagcagtttaactgcttcaaacgacgacagcagttgccagaataatcaagaaactcaatcttccgagccaagtggtgataacagcagctacagaaatcacaataatgaagatcataatcactttccgtttagcaatctgcttccaaatatatggccagggcatgacagaaagttcaaatcacaagagagtgacaataagtttagcagatatgatgccgacgtgaagaatgagcaaagccaacttaaagaagacaatggaagacttgacaaaagagttggagcaaacgagtgaagaaaatatgttcggtgatgaaaaagacccactttttgttgccaacgttggtgactactcaaggataacaaagattagctctgcatgaggctcgttgaccaacaggcgacagcaagggtgttgtactgaactgctaacgaagtctacagtccatgatactgatcttagagggctctactgatataatgatgcaaatcggaggtcatcagatcatatggacattcgactgtcgaccgttctgactttagaggctatccaacgtcaacagttacaagccaatctaaattttcggatatgatttgccaaaaggatgattgtaaatagaaaagtttgcagaatgtccaccatgcagttaggcgtgaagatctgaagcaacatgttgttggatttctaagatcttagctcgtaacagctgtagagtatggtggtatatagcttcaggattgagatgggggtcacaggagtctgtcaggtgagcagagtcgaataaattgatgtgggtagcatttttcttcactagctgcgtatcggatctgagtgtgtatggcgagagttacggtaaatgttggttcgcatataggtccttggattatttattgtacgcgatatggtgaaaggaggttgtagctaacatgttgtgtctccgatcatcatactgacattattgtctctcatgatcttatacttgcttataaatagaacttaaaactttattttgagttgacagcatgagcgacaattgagagttgggtgcaatatgagcatgctggtgttaagg

SEQ ID NO: 33338 - DNA, 3959 bp, Zea Mays
atggcggcagccgttgccgttcttcgcgccgccctccgccggggccgtccggcagctgcgtcgctactgcaccgccttcccaacccctctgctcggagcctcccgccaccgcctcctctcggtcgagcgcttcgtcccctctcgcggcttggtttctccgccggattcgggcactcctcctccaccgaggattttggcttcggctactcccccgccaccgaggattcagcggccgccgcgaagcccaagaccaagaccaaggccaggaagcaccccatgaagcagtcgcgcttcgacttcaccaaggtggacgccgcgcttctccccaccgtcatcctcgtcggccgccccaacgtcggcaagtcagccctcttcaacagatttatacggaggagggaggcgttggtgtacaatactcctggggaccatgtcactcgtgacatccgtgaaggagttgccaagcttggggatctccgtttccgtgtgcttgactcagctggacttgagactgcagcaacatctgggagcattctcgctcggacagcagacatgacagggaatgtattggctaggtctcaatttgccattttcttgattgatgtgagggatggtcttcagccgctggatcttgaggttgggcaatggctgcgcaagcatgcatctggtatacatacgcttgttgcaatgaacaagtccgagtcacttgatgagcatggatttctgactgctgctgctggagaagcacacaagttggggtttggtgaccctgttgcaatatccgcagagacaggcctggggatggcagaactctatgagatactcaggccattgtttgaagaatacatgtttcagcttcgaaataatgacctcaaccaagatgatcctatctcggaggttgaaactgaggcccatgatggtgatgagagcaagttacctttgcagttggcaattgtgggacgtcctaatgttgggaagtccacccttttaaataccttgttgcaagaacagagagttcttgttggtccagaggcaggcctaacaagggactcgattcgggctcagtttcaatttgatagtcgaaccgtgtatttagtggatactgctggttggatggaaagatcagggaaggagaaagggccagcatctttgagtgttgtgcagtctaggaagaacttaatgagagctcacattgttgctcttgtgctggatgctgaaaagattgctaagtccaaaagtagcatgaatcatccagaaatcgtgatagcacggcaagcaatagaagagggccgtggactagttgtgattgtcaataaaatggatctccttagagataaccaaacactgtttaacaaggttatggacgctgttcctagagaaatccagacagtcattcctcaggtgacaggaataccagctgttttcgtgtcagcgctggaggggagggggcggattgctgtgatgcgccaggttatagatacctatgagaagtggtgtttaagattgtcaacatcacggctcaaccgttggttgcgtaaggttatgagcagacattcctggaaagattcagctactcagccaaaagtcaagtacttcactcaagtgaaggcacgaccaccaacatttgttgccttcatgagtgggaagactcagctttctgatacagatactaggttcttgacaaagtccctcaaggaagatttcgacatcgggggaataccgatacggatcatacaacgttctgttccaagaaaagcttatgctaagcgcaacaacacaaggaacactggccctagggttgtcaggatgaaaacagacaaacggacagcggtatctgacccagccctgtcatagagggtgagcaccagtatcagccgcctaacctgaagaagggaggtcatgtttcgcgtttgagctatatatatatgcttctcatggggaaacgggaagtgaatgtttttctgactcgggaagttatacaaagctatgagctagccggtccggctgcctgcaccgcatgctcaagaagaagaatgactgtaagaaacaagcccagcaattcgaaggacagcatcacttctcaacattgggtgcaaggtggtattgatgagcgtcaagcactcaagttcaccccagaactccagatcagatgaagaggactcctatgtggttcaaaaggatgctatcaccgtcgaagaagactgaaaatagtccagtatttaggttttttatggatctgaatgatgcagtatcctatgtaaagcgactaaatgtgccaagcggcatggtgggggcttgtcgccttgatgtagcatatgaacatttcaaggaaaagcctcacatgttccagtttgttccaaatgaaaagcaggtccaggctgccaataagctattgaagtcacttccacaaaggggcagaaggaaaaaacttgatggggttcctgtttttagtgcgcaaaacttgaatattgcagtggcaacaaatgatggaattagatggtacacaccatacttttttgataaaaacttgttggacaatatccttgaagcttctatggatcaacatttccattcgataatgcaaaatcgccatacacgtcgtagaagggatattgtcgatgatagtttaacatcagaaataattgaagaaagtgctgaaagcttgcttgagcccccagaggttcaagaattaatgaatgagattggcccagctggtataccattaaatgttgtaacgaaagctgcagagattcagtttcttgatgttgttgataaagtccttctaggaaataagtggttaaggaaagcttctggcatacaaccaaagttcccttatgttgttgattcatttgaagaaaggactgctgtttcaattgccaatattgctactaccagcagtttaactgcttcaaacgacgacagcagttgccagaataatcaagaaactcaatcttccgagccaagtggtgataacagcagctacagaaatcacaataatgaagatcataatcactttccgtttagcaatctgcttccaaatatatggccagggcatgacagaaagttcaaatcacaagagagtgacaataagtttagcagatatgatgccgacgtgaagaatgagcaaagccaacttaaagaagacaatggaagacttgacaaaagagttggagcaaacgagtgaagaaaatatgttcggtgatgaaaaagacccactttttgttgccaacgttggtgactactcaaggataacaaagattagctctgcatgaggctcgttgaccaacaggcgacagcaagggtgttgtactgaactgctaacgaagtctacagtccatgatactgatcttagagggctctactgatataatgatgcaaatcggaggtcatcagatcatatggacattcgactgtcgaccgttctgactttagaggctatccaacgtcaacagttacaagccaatctaaattttcggatatgatttgccaaaaggatgattgtaaatagaaaagtttgcagaatgtccaccatgcagttaggcgtgaagatctgaagcaacatgttgttggatttctaagatcttagctcgtaacagctgtagagtatggtggtatatagcttcaggattgagatgggggtcacaggagtctgtcaggtgagcagagtcgaataaattgatgtgggtagcatttttcttcactagctgcgtatcggatctgagtgtgtatggcgagagttacggtaaatgttggttcgcatataggtccttggattatttattgtacgcgatatggtgaaaggaggttgtagctaacatgttgtgtctccgatcatcatactgacattattgtctctcatgatcttatacttgcttataaatagaacttaaaactttattttgagttgacagcatgagcgacaattgagagttgggtgcaatatgagcatgctggtgttaagg

SEQ ID NO: 33339 - DNA, 4882 bp, Zea Mays
atggcggcagccgttgccgttcttcgcgccgccctccgccggggccgtccggcagctgcgtcgctactgcaccgccttcccaacccctctgctcggagcctcccgccaccgcctcctctcggtcgagcgcttcgtcccctctcgcggcttggtttctccgccggattcgggcactcctcctccaccgaggattttggcttcggctactcccccgccaccgaggattcagcggccgccgcgaagcccaagaccaagaccaaggccaggaagcaccccatgaagcagtcgcgcttcgacttcaccaaggtggacgccgcgcttctccccaccgtcatcctcgtcggccgccccaacgtcggcaagtcagccctcttcaacagatttatacggaggagggaggcgttggtgtacaatactcctggggaccatgtcactcgtgacatccgtgaaggagttgccaagcttggggatctccgtttccgtgtgcttgactcagctggacttgagactgcagcaacatctgggagcattctcgctcggacagcagacatgacagggaatgtattggctaggtctcaatttgccattttcttgattgatgtgagggatggtcttcagccgctggatcttgaggttgggcaatggctgcgcaagcatgcatctggtatacatacgcttgttgcaatgaacaagtccgagtcacttgatgagcatggatttctgactgctgctgctggagaagcacacaagttggggtttggtgaccctgttgcaatatccgcagagacaggcctggggatggcagaactctatgagatactcaggccattgtttgaagaatacatgtttcagcttcgaaataatgacctcaaccaagatgatcctatctcggaggttgaaactgaggcccatgatggtgatgagagcaagttacctttgcagttggcaattgtgggacgtcctaatgttgggaagtccacccttttaaataccttgttgcaagaacagagagttcttgttggtccagaggcaggcctaacaagggactcgattcgggctcagtttcaatttgatagtcgaaccgtgtatttagtggatactgctggttggatggaaagatcagggaaggagaaagggccagcatctttgagtgttgtgcagtctaggaagaacttaatgagagctcacattgttgctcttgtgctggatgctgaaaagattgctaagtccaaaagtagcatgaatcatccagaaatcgtgatagcacggcaagcaatagaagagggccgtggactagttgtgattgtcaataaaatggatctccttagagataaccaaacactgtttaacaaggttatggacgctgttcctagagaaatccagacagtcattcctcaggtgacaggaataccagctgttttcgtgtcagcgctggaggggagggggcggattgctgtgatgcgccaggttatagatacctatgagaagtggtgtttaagattgtcaacatcacggctcaaccgttggttgcgtaaggttatgagcagacattcctggaaagattcagctactcagccaaaagtcaagtacttcactcaagtgaaggcacgaccaccaacatttgttgccttcatgagtgggaagactcagctttctgatacagatactaggttcttgacaaagtccctcaaggaagatttcgacatcgggggaataccgatacggatcatacaacgttctgttccaagaaaagcttatgctaagcgcaacaacacaaggaacactggccctagggttgtcaggatgaaaacagacaaacggacagcggtatctgacccagccctgtcatagagggtgagcaccagtatcagccgcctaacctgaagaagggaggtcatgtttcgcgtttgagctatatatatatgcttctcatggggaaacgggaagtgaatgtttttctgactcgggaagttatacaaagctatgagctagccggtccggctgcctgcaccgcatgctcaagaagaagaatgactgtaagaaacaagcccagcaattcgaaggacagcatcacttctcaacattgggtgcaaggtggtattgatgagcgtcaagcactcaagttcaccccagaactccagatcagatgaagaggtcagagagcaactgcaagcctacacgacacaggagcccctttatttttctttcctcttaaggcaaggcaactcctgtttgtaggggaatcgttatggttctgcttctgattgctcctagttcttccatcattttcgtgttcaaagagaaggctcccagaaaataaaataacgattgctatgaaaaaaaagagaaggctcgcagctgctctacctgaatagtttcacctgaagcatttgccggtcaattttgtccgttgatgtcggatagccgatcggatattcaggtgtttcatcgacacgcaaatcgggcaatggtggtggaatcggataagcgcgcgtgcgcggtggagcattgccggcgtggcccatccccgtgcactgcacggtgagcacggtagcagaagtccctcgcatagggaacgcacccgggcccgggcctccctcccacaggttgcaaagctcagatcccatcccccaccaccaaaacctaacaaaaaggcacgccccacccagtccagtccccaccaagcaggcgccacccgttcggtccgtacaggaggggtccaccatgccgtgctcctcttcgtcgtccaaccccttccactccctcgcctccgccttccccttcctctcctccacatccccacccccatccccacccgcctcgcccgcgcccgccgctccccacctcgccgtcccgctcctcctccccgtctcctcggcttccgagtcccgccgcggggcgcagccgctgccgggcacgcggatggtcggcgcgggcgcgaccggcgggggtaacatggccagcggtggtggggggcccgcgttcgtgggccaggtgttcaccatgctcgacccatccgggaacgggctcatggccgttaccacacgcttcgagctcccgcgcttcctcaccaacaggactcctatgtggttcaaaaggatgctatcaccgtcgaagaagactgaaaatagtccagtatttaggttttttatggatctgaatgatgcagtatcctatgtaaagcgactaaatgtgccaagcggcatggtgggggcttgtcgccttgatgtagcatatgaacatttcaaggaaaagcctcacatgttccagtttgttccaaatgaaaagcaggtccaggctgccaataagctattgaagtcacttccacaaaggggcagaaggaaaaaacttgatggggttcctgtttttagtgcgcaaaacttgaatattgcagtggcaacaaatgatggaattagatggtacacaccatacttttttgataaaaacttgttggacaatatccttgaagcttctatggatcaacatttccattcgataatgcaaaatcgccatacacgtcgtagaagggatattgtcgatgatagtttaacatcagaaataattgaagaaagtgctgaaagcttgcttgagcccccagaggttcaagaattaatgaatgagattggcccagctggtataccattaaatgttgtaacgaaagctgcagagattcagtttcttgatgttgttgataaagtccttctaggaaataagtggttaaggaaagcttctggcatacaaccaaagttcccttatgttgttgattcatttgaagaaaggactgctgtttcaattgccaatattgctactaccagcagtttaactgcttcaaacgacgacagcagttgccagaataatcaagaaactcaatcttccgagccaagtggtgataacagcagctacagaaatcacaataatgaagatcataatcactttccgtttagcaatctgcttccaaatatatggccagggcatgacagaaagttcaaatcacaagagagtgacaataagtttagcagatatgatgccgacgtgaagaatgagcaaagccaacttaaagaagacaatggaagacttgacaaaagagttggagcaaacgagtgaagaaaatatgttcggtgatgaaaaagacccactttttgttgccaacgttggtgactactcaaggataacaaagattagctctgcatgaggctcgttgaccaacaggcgacagcaagggtgttgtactgaactgctaacgaagtctacagtccatgatactgatcttagagggctctactgatataatgatgcaaatcggaggtcatcagatcatatggacattcgactgtcgaccgttctgactttagaggctatccaacgtcaacagttacaagccaatctaaattttcggatatgatttgccaaaaggatgattgtaaatagaaaagtttgcagaatgtccaccatgcagttaggcgtgaagatctgaagcaacatgttgttggatttctaagatcttagctcgtaacagctgtagagtatggtggtatatagcttcaggattgagatgggggtcacaggagtctgtcaggtgagcagagtcgaataaattgatgtgggtagcatttttcttcactagctgcgtatcggatctgagtgtgtatggcgagagttacggtaaatgttggttcgcatataggtccttggattatttattgtacgcgatatggtgaaaggaggttgtagctaacatgttgtgtctccgatcatcatactgacattattgtctctcatgatcttatacttgcttataaatagaacttaaaactttattttgagttgacagcatgagcgacaattgagagttgggtgcaatatgagcatgctggtgttaagg

SEQ ID NO: 33340 - DNA, 3917 bp, Zea Mays
atggcggcagccgttgccgttcttcgcgccgccctccgccggggccgtccggcagctgcgtcgctactgcaccgccttcccaacccctctgctcggagcctcccgccaccgcctcctctcggtcgagcgcttcgtcccctctcgcggcttggtttctccgccggattcgggcactcctcctccaccgaggattttggcttcggctactcccccgccaccgaggattcagcggccgccgcgaagcccaagaccaagaccaaggccaggaagcaccccatgaagcagtcgcgcttcgacttcaccaaggtggacgccgcgcttctccccaccgtcatcctcgtcggccgccccaacgtcggcaagtcagccctcttcaacagatttatacggaggagggaggcgttggtgtacaatactcctggggaccatgtcactcgtgacatccgtgaaggagttgccaagcttggggatctccgtttccgtgtgcttgactcagctggacttgagactgcagcaacatctgggagcattctcgctcggacagcagacatgacagggaatgtattggctaggtctcaatttgccattttcttgattgatgtgagggatggtcttcagccgctggatcttgaggttgggcaatggctgcgcaagcatgcatctggtatacatacgcttgttgcaatgaacaagtccgagtcacttgatgagcatggatttctgactgctgctgctggagaagcacacaagttggggtttggtgaccctgttgcaatatccgcagagacaggcctggggatggcagaactctatgagatactcaggccattgtttgaagaatacatgtttcagcttcgaaataatgacctcaaccaagatgatcctatctcggaggttgaaactgaggcccatgatggtgatgagagcaagttacctttgcagttggcaattgtgggacgtcctaatgttgggaagtccacccttttaaataccttgttgcaagaacagagagttcttgttggtccagaggcaggcctaacaagggactcgattcgggctcagtttcaatttgatagtcgaaccgtgtatttagtggatactgctggttggatggaaagatcagggaaggagaaagggccagcatctttgagtgttgtgcagtctaggaagaacttaatgagagctcacattgttgctcttgtgctggatgctgaaaagattgctaagtccaaaagtagcatgaatcatccagaaatcgtgatagcacggcaagcaatagaagagggccgtggactagttgtgattgtcaataaaatggatctccttagagataaccaaacactgtttaacaaggttatggacgctgttcctagagaaatccagacagtcattcctcaggtgacaggaataccagctgttttcgtgtcagcgctggaggggagggggcggattgctgtgatgcgccaggttatagatacctatgagaagtggtgtttaagattgtcaacatcacggctcaaccgttggttgcgtaaggttatgagcagacattcctggaaagattcagctactcagccaaaagtcaagtacttcactcaagtgaaggcacgaccaccaacatttgttgccttcatgagtgggaagactcagctttctgatacagatactaggttcttgacaaagtccctcaaggaagatttcgacatcgggggaataccgatacggatcatacaacgttctgttccaagaaaagcttatgctaagcgcaacaacacaaggaacactggccctagggttgtcaggatgaaaacagacaaacggacagcggtatctgacccagccctgtcatagagggtgagcaccagtatcagccgcctaacctgaagaagggaggtcatgtttcgcgtttgagctatatatatatgcttctcatggggaaacgggaagtgaatgtttttctgactcgggaagttatacaaagctatgagctagccggtccggctgcctgcaccgcatgctcaagaagaagaatgactgtaagaaacaagcccagcaattcgaaggacagcatcacttctcaacattgggtgcaaggtggtattgatgagcgtcaagcactcaagttcaccccagaactccagatcagatgaagaggactcctatgtggttcaaaaggatgctatcaccgtcgaagaagactgaaaatagtccagtatttaggttttttatggatctgaatgatgcagtatcctatgtaaagcgactaaatgtgccaagcggcatggtgggggcttgtcgccttgatgtagcatatgaacatttcaaggtccaggctgccaataagctattgaagtcacttccacaaaggggcagaaggaaaaaacttgatggggttcctgtttttagtgcgcaaaacttgaatattgcagtggcaacaaatgatggaattagatggtacacaccatacttttttgataaaaacttgttggacaatatccttgaagcttctatggatcaacatttccattcgataatgcaaaatcgccatacacgtcgtagaagggatattgtcgatgatagtttaacatcagaaataattgaagaaagtgctgaaagcttgcttgagcccccagaggttcaagaattaatgaatgagattggcccagctggtataccattaaatgttgtaacgaaagctgcagagattcagtttcttgatgttgttgataaagtccttctaggaaataagtggttaaggaaagcttctggcatacaaccaaagttcccttatgttgttgattcatttgaagaaaggactgctgtttcaattgccaatattgctactaccagcagtttaactgcttcaaacgacgacagcagttgccagaataatcaagaaactcaatcttccgagccaagtggtgataacagcagctacagaaatcacaataatgaagatcataatcactttccgtttagcaatctgcttccaaatatatggccagggcatgacagaaagttcaaatcacaagagagtgacaataagtttagcagatatgatgccgacgtgaagaatgagcaaagccaacttaaagaagacaatggaagacttgacaaaagagttggagcaaacgagtgaagaaaatatgttcggtgatgaaaaagacccactttttgttgccaacgttggtgactactcaaggataacaaagattagctctgcatgaggctcgttgaccaacaggcgacagcaagggtgttgtactgaactgctaacgaagtctacagtccatgatactgatcttagagggctctactgatataatgatgcaaatcggaggtcatcagatcatatggacattcgactgtcgaccgttctgactttagaggctatccaacgtcaacagttacaagccaatctaaattttcggatatgatttgccaaaaggatgattgtaaatagaaaagtttgcagaatgtccaccatgcagttaggcgtgaagatctgaagcaacatgttgttggatttctaagatcttagctcgtaacagctgtagagtatggtggtatatagcttcaggattgagatgggggtcacaggagtctgtcaggtgagcagagtcgaataaattgatgtgggtagcatttttcttcactagctgcgtatcggatctgagtgtgtatggcgagagttacggtaaatgttggttcgcatataggtccttggattatttattgtacgcgatatggtgaaaggaggttgtagctaacatgttgtgtctccgatcatcatactgacattattgtctctcatgatcttatacttgcttataaatagaacttaaaactttattttgagttgacagcatgagcgacaattgagagttgggtgcaatatgagcatgctggtgttaagg

SEQ ID NO: 33341 - DNA, 3946 bp, Zea Mays
atggcggcagccgttgccgttcttcgcgccgccctccgccggggccgtccggcagctgcgtcgctactgcaccgccttcccaacccctctgctcggagcctcccgccaccgcctcctctcggtcgagcgcttcgtcccctctcgcggcttggtttctccgccggattcgggcactcctcctccaccgaggattttggcttcggctactcccccgccaccgaggattcagcggccgccgcgaagcccaagaccaagaccaaggccaggaagcaccccatgaagcagtcgcgcttcgacttcaccaaggtggacgccgcgcttctccccaccgtcatcctcgtcggccgccccaacgtcggcaagtcagccctcttcaacagatttatacggaggagggaggcgttggtgtacaatactcctggggaccatgtcactcgtgacatccgtgaaggagttgccaagcttggggatctccgtttccgtgtgcttgactcagctggacttgagactgcagcaacatctgggagcattctcgctcggacagcagacatgacagggaatgtattggctaggtctcaatttgccattttcttgattgatgtgagccgctggatcttgaggttgggcaatggctgcgcaagcatgcatctggtatacatacgcttgttgcaatgaacaagtccgagtcacttgatgagcatggatttctgactgctgctgctggagaagcacacaagttggggtttggtgaccctgttgcaatatccgcagagacaggcctggggatggcagaactctatgagatactcaggccattgtttgaagaatacatgtttcagcttcgaaataatgacctcaaccaagatgatcctatctcggaggttgaaactgaggcccatgatggtgatgagagcaagttacctttgcagttggcaattgtgggacgtcctaatgttgggaagtccacccttttaaataccttgttgcaagaacagagagttcttgttggtccagaggcaggcctaacaagggactcgattcgggctcagtttcaatttgatagtcgaaccgtgtatttagtggatactgctggttggatggaaagatcagggaaggagaaagggccagcatctttgagtgttgtgcagtctaggaagaacttaatgagagctcacattgttgctcttgtgctggatgctgaaaagattgctaagtccaaaagtagcatgaatcatccagaaatcgtgatagcacggcaagcaatagaagagggccgtggactagttgtgattgtcaataaaatggatctccttagagataaccaaacactgtttaacaaggttatggacgctgttcctagagaaatccagacagtcattcctcaggtgacaggaataccagctgttttcgtgtcagcgctggaggggagggggcggattgctgtgatgcgccaggttatagatacctatgagaagtggtgtttaagattgtcaacatcacggctcaaccgttggttgcgtaaggttatgagcagacattcctggaaagattcagctactcagccaaaagtcaagtacttcactcaagtgaaggcacgaccaccaacatttgttgccttcatgagtgggaagactcagctttctgatacagatactaggttcttgacaaagtccctcaaggaagatttcgacatcgggggaataccgatacggatcatacaacgttctgttccaagaaaagcttatgctaagcgcaacaacacaaggaacactggccctagggttgtcaggatgaaaacagacaaacggacagcggtatctgacccagccctgtcatagagggtgagcaccagtatcagccgcctaacctgaagaagggaggtcatgtttcgcgtttgagctatatatatatgcttctcatggggaaacgggaagtgaatgtttttctgactcgggaagttatacaaagctatgagctagccggtccggctgcctgcaccgcatgctcaagaagaagaatgactgtaagaaacaagcccagcaattcgaaggacagcatcacttctcaacattgggtgcaaggtggtattgatgagcgtcaagcactcaagttcaccccagaactccagatcagatgaagaggactcctatgtggttcaaaaggatgctatcaccgtcgaagaagactgaaaatagtccagtatttaggttttttatggatctgaatgatgcagtatcctatgtaaagcgactaaatgtgccaagcggcatggtgggggcttgtcgccttgatgtagcatatgaacatttcaaggaaaagcctcacatgttccagtttgttccaaatgaaaagcaggtccaggctgccaataagctattgaagtcacttccacaaaggggcagaaggaaaaaacttgatggggttcctgtttttagtgcgcaaaacttgaatattgcagtggcaacaaatgatggaattagatggtacacaccatacttttttgataaaaacttgttggacaatatccttgaagcttctatggatcaacatttccattcgataatgcaaaatcgccatacacgtcgtagaagggatattgtcgatgatagtttaacatcagaaataattgaagaaagtgctgaaagcttgcttgagcccccagaggttcaagaattaatgaatgagattggcccagctggtataccattaaatgttgtaacgaaagctgcagagattcagtttcttgatgttgttgataaagtccttctaggaaataagtggttaaggaaagcttctggcatacaaccaaagttcccttatgttgttgattcatttgaagaaaggactgctgtttcaattgccaatattgctactaccagcagtttaactgcttcaaacgacgacagcagttgccagaataatcaagaaactcaatcttccgagccaagtggtgataacagcagctacagaaatcacaataatgaagatcataatcactttccgtttagcaatctgcttccaaatatatggccagggcatgacagaaagttcaaatcacaagagagtgacaataagtttagcagatatgatgccgacgtgaagaatgagcaaagccaacttaaagaagacaatggaagacttgacaaaagagttggagcaaacgagtgaagaaaatatgttcggtgatgaaaaagacccactttttgttgccaacgttggtgactactcaaggataacaaagattagctctgcatgaggctcgttgaccaacaggcgacagcaagggtgttgtactgaactgctaacgaagtctacagtccatgatactgatcttagagggctctactgatataatgatgcaaatcggaggtcatcagatcatatggacattcgactgtcgaccgttctgactttagaggctatccaacgtcaacagttacaagccaatctaaattttcggatatgatttgccaaaaggatgattgtaaatagaaaagtttgcagaatgtccaccatgcagttaggcgtgaagatctgaagcaacatgttgttggatttctaagatcttagctcgtaacagctgtagagtatggtggtatatagcttcaggattgagatgggggtcacaggagtctgtcaggtgagcagagtcgaataaattgatgtgggtagcatttttcttcactagctgcgtatcggatctgagtgtgtatggcgagagttacggtaaatgttggttcgcatataggtccttggattatttattgtacgcgatatggtgaaaggaggttgtagctaacatgttgtgtctccgatcatcatactgacattattgtctctcatgatcttatacttgcttataaatagaacttaaaactttattttgagttgacagcatgagcgacaattgagagttgggtgcaatatgagcatgctggtgttaagg

SEQ ID NO: 33342 - DNA, 2359 bp, Zea Mays
atggcggcagccgttgccgttcttcgcgccgccctccgccggggccgtccggcagctgcgtcgctactgcaccgccttcccaacccctctgctcggagcctcccgccaccgcctcctctcggtcgagcgcttcgtcccctctcgcggcttggtttctccgccggattcgggcactcctcctccaccgaggattttggcttcggctactcccccgccaccgaggattcagcggccgccgcgaagcccaagaccaagaccaaggccaggaagcaccccatgaagcagtcgcgcttcgacttcaccaaggtggacgccgcgcttctccccaccgtcatcctcgtcggccgccccaacgtcggcaagtcagccctcttcaacagatttatacggaggagggaggcgttggtgtacaatactcctggggaccatgtcactcgtgacatccgtgaaggagttgccaagcttggggatctccgtttccgtgtgcttgactcagctggacttgagactgcagcaacatctgggagcattctcgctcggacagcagacatgacagggaatgtattggctaggtctcaatttgccattttcttgattgatgtgagggatggtcttcagccgctggatcttgaggttgggcaatggctgcgcaagcatgcatctggtatacatacgcttgttgcaatgaacaagtccgagtcacttgatgagcatggatttctgactgctgctgctggagaagcacacaagttggggtttggtgaccctgttgcaatatccgcagagacaggcctggggatggcagaactctatgagatactcaggccattgtttgaagaatacatgtttcagcttcgaaatagtggatactgctggttggatggaaagatcagggaaggagaaagggccagcatctttgagtgttgtgcagtctaggaagaacttaatgagagctcacattgttgctcttgtgctggatgctgaaaagattgctaagtccaaaagtagcatgaatcatccagaaatcgtgatagcacggcaagcaatagaagagggccgtggactagttgtgattgtcaataaaatggatctccttagagataaccaaacactgtttaacaaggttatggacgctgttcctagagaaatccagacagtcattcctcaggtgacaggaataccagctgttttcgtgtcagcgctggaggggagggggcggattgctgtgatgcgccaggttatagatacctatgagaagtggtgtttaagattgtcaacatcacggctcaaccgttggttgcgtaaggttatgagcagacattcctggaaagattcagctactcagccaaaagtcaagtacttcactcaagtgaaggcacgaccaccaacatttgttgccttcatgagtgggaagactcagctttctgatacagatactaggttcttgacaaagtccctcaaggaagatttcgacatcgggggaataccgatacggatcatacaacgttctgttccaagaaaagcttatgctaagcgcaacaacacaaggaacactggccctagggttgtcaggatgaaaacagacaaacggacagcggtatctgacccagccctgtcatagagggtgagcaccagtatcagccgcctaacctgaagaagggaggtcatgtttcgcgtttgagctatatatatatgcttctcatggggaaacgggaagtgaatgtttttctgactcgggaagttatacaaagctatgagctagccggtccggctgcctgcaccgcatgctcaagaagaagaatgactgtaagaaacaagcccagcaattcgaaggacagcatcacttctcaacattgggtgcaaggtggtattgatgagcgtcaagcactcaagttcaccccagaactccagatcagatgaagaggtgttttttttttcttgcatccctcatgtttatacattttttttacgaaaaatatattagaatgatctctggtggtagtgttggagttggaggcttactgatcatcgtgcacccgtcaggtcagagagcaactgcaagcctacacgacacaggagcccctttatttttctttcctcttaaggcaaggcaactcctgtttgtaggggaatcgttatggttctgcttctgattgctcctagttcttccatcattttcgtgttcaaagagaaggctcccagaaaataaaataacgattgctatgaaaaaaaagagaaggctcgcagctgctctacctgaatagtttcacctgaagcatttgccggtcaattttgtccgttgatgtcggatagccgatcggatattcaggtgtttcatcgacacgcaaatcgggcaatg

SEQ ID NO: 33343 - DNA, 2576 bp, Zea Mays
atggcggcagccgttgccgttcttcgcgccgccctccgccggggccgtccggcagctgcgtcgctactgcaccgccttcccaacccctctgctcggagcctcccgccaccgcctcctctcggtcgagcgcttcgtcccctctcgcggcttggtttctccgccggattcgggcactcctcctccaccgaggattttggcttcggctactcccccgccaccgaggattcagcggccgccgcgaagcccaagaccaagaccaaggccaggaagcaccccatgaagcagtcgcgcttcgacttcaccaaggtggacgccgcgcttctccccaccgtcatcctcgtcggccgccccaacgtcggcaagtcagccctcttcaacagatttatacggaggagggaggcgttggtgtacaatactcctggggaccatgtcactcgtgacatccgtgaaggagttgccaagcttggggatctccgtttccgtgtgcttgactcagctggacttgagactgcagcaacatctgggagcattctcgctcggacagcagacatgacagggaatgtattggctaggtctcaatttgccattttcttgattgatgtgagccgctggatcttgaggttgggcaatggctgcgcaagcatgcatctggtatacatacgcttgttgcaatgaacaagtccgagtcacttgatgagcatggatttctgactgctgctgctggagaagcacacaagttggggtttggtgaccctgttgcaatatccgcagagacaggcctggggatggcagaactctatgagatactcaggccattgtttgaagaatacatgtttcagcttcgaaataatgacctcaaccaagatgatcctatctcggaggttgaaactgaggcccatgatggtgatgagagcaagttacctttgcagttggcaattgtgggacgtcctaatgttgggaagtccacccttttaaataccttgttgcaagaacagagagttcttgttggtccagaggcaggcctaacaagggactcgattcgggctcagtttcaatttgatagtcgaaccgtgtatttagtggatactgctggttggatggaaagatcagggaaggagaaagggccagcatctttgagtgttgtgcagtctaggaagaacttaatgagagctcacattgttgctcttgtgctggatgctgaaaagattgctaagtccaaaagtagcatgaatcatccagaaatcgtgatagcacggcaagcaatagaagagggccgtggactagttgtgattgtcaataaaatggatctccttagagataaccaaacactgtttaacaaggttatggacgctgttcctagagaaatccagacagtcattcctcaggtgacaggaataccagctgttttcgtgtcagcgctggaggggagggggcggattgctgtgatgcgccaggttatagatacctatgagaagtggtgtttaagattgtcaacatcacggctcaaccgttggttgcgtaaggttatgagcagacattcctggaaagattcagctactcagccaaaagtcaagtacttcactcaagtgaaggcacgaccaccaacatttgttgccttcatgagtgggaagactcagctttctgatacagatactaggttcttgacaaagtccctcaaggaagatttcgacatcgggggaataccgatacggatcatacaacgttctgttccaagaaaagcttatgctaagcgcaacaacacaaggaacactggccctagggttgtcaggatgaaaacagacaaacggacagcggtatctgacccagccctgtcatagagggtgagcaccagtatcagccgcctaacctgaagaagggaggtcatgtttcgcgtttgagctatatatatatgcttctcatggggaaacgggaagtgaatgtttttctgactcgggaagttatacaaagctatgagctagccggtccggctgcctgcaccgcatgctcaagaagaagaatgactgtaagaaacaagcccagcaattcgaaggacagcatcacttctcaacattgggtgcaaggtggtattgatgagcgtcaagcactcaagttcaccccagaactccagatcagatgaagaggtgttttttttttcttgcatccctcatgtttatacattttttttacgaaaaatatattagaatgatctctggtggtagtgttggagttggaggcttactgatcatcgtgcacccgtcaggtcagagagcaactgcaagcctacacgacacaggagcccctttatttttctttcctcttaaggcaaggcaactcctgtttgtaggggaatcgttatggttctgcttctgattgctcctagttcttccatcattttcgtgttcaaagagaaggctcccagaaaataaaataacgattgctatgaaaaaaaagagaaggctcgcagctgctctacctgaatagtttcacctgaagcatttgccggtcaattttgtccgttgatgtcggatagccgatcggatattcaggtgtttcatcgacacgcaaatcgggcaatg

SEQ ID NO: 33344 - DNA, 2582 bp, Zea Mays
atggcggcagccgttgccgttcttcgcgccgccctccgccggggccgtccggcagctgcgtcgctactgcaccgccttcccaacccctctgctcggagcctcccgccaccgcctcctctcggtcgagcgcttcgtcccctctcgcggcttggtttctccgccggattcgggcactcctcctccaccgaggattttggcttcggctactcccccgccaccgaggattcagcggccgccgcgaagcccaagaccaagaccaaggccaggaagcaccccatgaagcagtcgcgcttcgacttcaccaaggtggacgccgcgcttctccccaccgtcatcctcgtcggccgccccaacgtcggcaagtcagccctcttcaacagatttatacggaggagggaggcgttggtgtacaatactcctggggaccatgtcactcgtgacatccgtgaaggagttgccaagcttggggatctccgtttccgtgtgcttgactcagctggacttgagactgcagcaacatctgggagcattctcgctcggacagcagacatgacagggaatgtattggctaggtctcaatttgccattttcttgattgatgtgagggatggtcttcagccgctggatcttgaggttgggcaatggctgcgcaagcatgcatctggtatacatacgcttgttgcaatgaacaagtccgagtcacttgatgagcatggatttctgactgctgctgctggagaagcacacaagttggggtttggtgaccctgttgcaatatccgcagagacaggcctggggatggcagaactctatgagatactcaggccattgtttgaagaatacatgtttcagcttcgaaataatgacctcaaccaagatgatcctatctcggaggttgaaactgaggcccatgatggtgatgagagcaagttacctttgcagttggcaattgtgggacgtcctaatgttgggaagtccacccttttaaataccttgttgcaagaacagagagttcttgttggtccagaggcaggcctaacaagggactcgattcgggctcagtttcaatttgatagtcgaaccgtgtatttagtggatactgctggttggatggaaagatcagggaaggagaaagggccagcatctttgagtgttgtgcagtctaggaagaacttaatgagagctcacattgttgctcttgtgctggatgctgaaaagattgctaagtccaaaagtagcatgaatcatccagaaatcgtgatagcacggcaagcaatagaagagggccgtggactagttgtgattgtcaataaaatggatctccttagagataaccaaacactgtttaacaaggttatggacgctgttcctagagaaatccagacagtcattcctcaggaataccagctgttttcgtgtcagcgctggaggggagggggcggattgctgtgatgcgccaggttatagatacctatgagaagtggtgtttaagattgtcaacatcacggctcaaccgttggttgcgtaaggttatgagcagacattcctggaaagattcagctactcagccaaaagtcaagtacttcactcaagtgaaggcacgaccaccaacatttgttgccttcatgagtgggaagactcagctttctgatacagatactaggttcttgacaaagtccctcaaggaagatttcgacatcgggggaataccgatacggatcatacaacgttctgttccaagaaaagcttatgctaagcgcaacaacacaaggaacactggccctagggttgtcaggatgaaaacagacaaacggacagcggtatctgacccagccctgtcatagagggtgagcaccagtatcagccgcctaacctgaagaagggaggtcatgtttcgcgtttgagctatatatatatgcttctcatggggaaacgggaagtgaatgtttttctgactcgggaagttatacaaagctatgagctagccggtccggctgcctgcaccgcatgctcaagaagaagaatgactgtaagaaacaagcccagcaattcgaaggacagcatcacttctcaacattgggtgcaaggtggtattgatgagcgtcaagcactcaagttcaccccagaactccagatcagatgaagaggtgttttttttttcttgcatccctcatgtttatacattttttttacgaaaaatatattagaatgatctctggtggtagtgttggagttggaggcttactgatcatcgtgcacccgtcaggtcagagagcaactgcaagcctacacgacacaggagcccctttatttttctttcctcttaaggcaaggcaactcctgtttgtaggggaatcgttatggttctgcttctgattgctcctagttcttccatcattttcgtgttcaaagagaaggctcccagaaaataaaataacgattgctatgaaaaaaaagagaaggctcgcagctgctctacctgaatagtttcacctgaagcatttgccggtcaattttgtccgttgatgtcggatagccgatcggatattcaggtgtttcatcgacacgcaaatcgggcaatg

SEQ ID NO: 33345 - DNA, 2509 bp, Zea Mays
atggcggcagccgttgccgttcttcgcgccgccctccgccggggccgtccggcagctgcgtcgctactgcaccgccttcccaacccctctgctcggagcctcccgccaccgcctcctctcggtcgagcgcttcgtcccctctcgcggcttggtttctccgccggattcgggcactcctcctccaccgaggattttggcttcggctactcccccgccaccgaggattcagcggccgccgcgaagcccaagaccaagaccaaggccaggaagcaccccatgaagcagtcgcgcttcgacttcaccaaggtggacgccgcgcttctccccaccgtcatcctcgtcggccgccccaacgtcggcaagtcagccctcttcaacagatttatacggaggagggaggcgttggtgtacaatactcctggggaccatgtcactcgtgacatccgtgaaggagttgccaagcttggggatctccgtttccgtgtgcttgactcagctggacttgagactgcagcaacatctgggagcattctcgctcggacagcagacatgacagggaatgtattggctaggtctcaatttgccattttcttgattgatgtgagggatggtcttcagccgctggatcttgaggttgggcaatggctgcgcaagcatgcatctggtatacatacgcttgttgcaatgaacaagtccgagtcacttgatgagcatggatttctgactgctgctgctggagaagcacacaagttggggtttggtgaccctgttgcaatatccgcagagacaggcctggggatggcagaactctatgagatactcaggccattgtttgaagaatacatgtttcagcttcgaaatattggcaattgtgggacgtcctaatgttgggaagtccacccttttaaataccttgttgcaagaacagagagttcttgttggtccagaggcaggcctaacaagggactcgattcgggctcagtttcaatttgatagtcgaaccgtgtatttagtggatactgctggttggatggaaagatcagggaaggagaaagggccagcatctttgagtgttgtgcagtctaggaagaacttaatgagagctcacattgttgctcttgtgctggatgctgaaaagattgctaagtccaaaagtagcatgaatcatccagaaatcgtgatagcacggcaagcaatagaagagggccgtggactagttgtgattgtcaataaaatggatctccttagagataaccaaacactgtttaacaaggttatggacgctgttcctagagaaatccagacagtcattcctcaggtgacaggaataccagctgttttcgtgtcagcgctggaggggagggggcggattgctgtgatgcgccaggttatagatacctatgagaagtggtgtttaagattgtcaacatcacggctcaaccgttggttgcgtaaggttatgagcagacattcctggaaagattcagctactcagccaaaagtcaagtacttcactcaagtgaaggcacgaccaccaacatttgttgccttcatgagtgggaagactcagctttctgatacagatactaggttcttgacaaagtccctcaaggaagatttcgacatcgggggaataccgatacggatcatacaacgttctgttccaagaaaagcttatgctaagcgcaacaacacaaggaacactggccctagggttgtcaggatgaaaacagacaaacggacagcggtatctgacccagccctgtcatagagggtgagcaccagtatcagccgcctaacctgaagaagggaggtcatgtttcgcgtttgagctatatatatatgcttctcatggggaaacgggaagtgaatgtttttctgactcgggaagttatacaaagctatgagctagccggtccggctgcctgcaccgcatgctcaagaagaagaatgactgtaagaaacaagcccagcaattcgaaggacagcatcacttctcaacattgggtgcaaggtggtattgatgagcgtcaagcactcaagttcaccccagaactccagatcagatgaagaggtgttttttttttcttgcatccctcatgtttatacattttttttacgaaaaatatattagaatgatctctggtggtagtgttggagttggaggcttactgatcatcgtgcacccgtcaggtcagagagcaactgcaagcctacacgacacaggagcccctttatttttctttcctcttaaggcaaggcaactcctgtttgtaggggaatcgttatggttctgcttctgattgctcctagttcttccatcattttcgtgttcaaagagaaggctcccagaaaataaaataacgattgctatgaaaaaaaagagaaggctcgcagctgctctacctgaatagtttcacctgaagcatttgccggtcaattttgtccgttgatgtcggatagccgatcggatattcaggtgtttcatcgacacgcaaatcgggcaatg

SEQ ID NO: 33346 - DNA, 1135 bp, Zea Mays
atcttctgaacccatcccgccaattcgctatgcggaggctgttaaggaggcaccacgctcatcaacattgccgtcaagatcaactgtaatgaaagctggtccacaacaagtcctggattcactgtttaaaattcctgaaacacgcacgtatgagccaagttctatggactggaaaaaggtagtaaagaaactgcaaacaatcaattataccgctgcatcaaacaatcacgaaaggcctaaggatgggggtggctatcgtgagctccgtggtgttgctgcaaggcattacgataaaatgaaagaatactatcagaaagctgcctttgcatattcgaagggtgacaggtcatatgcttcttaccttgctgaggaggggaaacattatcgagaactaggtcgcatagaagacgagaaggccagcaggaatatatttgaagccagaaataagcatataacgaacacagtaaccatcgacttgcatggccaacatgtccaacatgctatgaaccttctcaaaattcacatgatgatttgtatttgcattccatctgtcttactgagggtaattaccggttgtggttcagaaggtacagggaagggaaaaataaagcgctcggttatagagcttgcggagaaggaacatattgagtggcgcgaagagaactctggaactgtagcccttcgacttggtgggccaagagagtatcggttccttgagcatgaaagcgattctgacctagtggggaactttaacatagattaacttctgatctaatctatgtattcccgtatttatgtgttatagctatggatgctgcctaggttgcgatgtaggctgtagttctgacacagaagctcggtattgtagttgggtaaattatggtgtaatgttgaccccaggctgctaactgtgcaatcacagaagctctgactgtacaaccgtagcccttctgtgagcaatgcaacacaggaaccgtaatcatcgtgagttgaagaatatcatactatggccgattgccacgggaaccaattttggcctgtaccaactggaacttacgatttgtatgaaaatatattcaacacttaggccacaaatattacttatcatgttcaactgaatacttttgaaatgtac

SEQ ID NO: 33347 - DNA, 1119 bp, Zea Mays
gttgatttgaatattgtagtgactatgaaggatgccaaattgaggttcaagtatcttctgaacccatcccgccaattcgctatgcggaggctgttaaggaggcaccacgctcatcaacattgccgtcaagatcaactgtaatgaaagctggtccacaacaagtcctggattcactgtttaaaattcctgaaacacgcacgtatgagccaagttctatggactggaaaaaggtagtaaagaaactgcaaacaatcaattataccgctgcatcaaacaatcacgaaaggcctaaggatgggggtggctatcgtgagctccgtggtgttgctgcaaggcattacgataaaatgaaagaatactatcagaaagctgcctttgcatattcgaagggtgacaggtcatatgcttcttaccttgctgaggaggggaaacattatcgagaactaggtcgcatagaagacgagaaggccagcaggaatatatttgaagccagaaataagcatataacgaacacagtaaccatcgacttgcatggccaacatgtccaacatgctatgaaccttctcaaaattcacatgatgatttgtatttgcattccatgttatagagcttgcggagaaggaacatattgagtggcgcgaagagaactctggaactgtagcccttcgacttggtgggccaagagagtatcggttccttgagcatgaaagcgattctgacctagtggggaactttaacatagattaacttctgatctaatctatgtattcccgtatttatgtgttatagctatggatgctgcctaggttgcgatgtaggctgtagttctgacacagaagctcggtattgtagttgggtaaattatggtgtaatgttgaccccaggctgctaactgtgcaatcacagaagctctgactgtacaaccgtagcccttctgtgagcaatgcaacacaggaaccgtaatcatcgtgagttgaagaatatcatactatggccgattgccacgggaaccaattttggcctgtaccaactggaacttacgatttgtatgaaaatatattcaacacttaggccacaaatattacttatcatgttcaactgaatacttttgaaatgtac

SEQ ID NO: 33348 - DNA, 1386 bp, Zea Mays
gagaaagtaaagtatggccaaggtccagttgcaccagctttggatgcattgcttgatatatctggtgtgtcttcagttgaaaacatggaaacaaaccatcaaagtgccagaaggaatgacacatgtcatctagatatgttttctggaaatgggctatcagtggagaatctgactgcagggaatagaagaagtctacgccagttgacagatgagatatccaacactgggctccagtctgaattaggacacgagtttttatggggtgaacctcagatcagctatgcggaggctgttaaggaggcaccacgctcatcaacattgccgtcaagatcaactgtaatgaaagctggtccacaacaagtcctggattcactgtttaaaattcctgaaacacgcacgtatgagccaagttctatggactggaaaaaggtagtaaagaaactgcaaacaatcaattataccgctgcatcaaacaatcacgaaaggcctaaggatgggggtggctatcgtgagctccgtggtgttgctgcaaggcattacgataaaatgaaagaatactatcagaaagctgcctttgcatattcgaagggtgacaggtcatatgcttcttaccttgctgaggaggggaaacattatcgagaactaggtcgcatagaagacgagaaggccagcaggaatatatttgaagccagaaataagcatataacgaacacagtaaccatcgacttgcatggccaacatgtccaacatgctatgaaccttctcaaaattcacatgatgatttgtatttgcattccatctgtcttactgagggtaattaccggttgtggttcagaaggtacagggaagggaaaaataaagcgctcggttatagagcttgcggagaaggaacatattgagtggcgcgaagagaactctggaactgtagcccttcgacttggtgggccaagagagtatcggttccttgagcatgaaagcgattctgacctagtggggaactttaacatagattaacttctgatctaatctatgtattcccgtatttatgtgttatagctatggatgctgcctaggttgcgatgtaggctgtagttctgacacagaagctcggtattgtagttgggtaaattatggtgtaatgttgaccccaggctgctaactgtgcaatcacagaagctctgactgtacaaccgtagcccttctgtgagcaatgcaacacaggaaccgtaatcatcgtgagttgaagaatatcatactatggccgattgccacgggaaccaattttggcctgtaccaactggaacttacgatttgtatgaaaatatattcaacacttaggccacaaatattacttatcatgttcaactgaatacttttgaaatgtac

SEQ ID NO: 33349 - DNA, 2440 bp, Zea Mays
acgactgaaaaaattctggaaatcgaaacccaccctcgagcgacgccaagcggccaagacggagaggagaacaattggggacggggaaagtccagggggaagccacggccaccggcgcgatgaaaccgtcgctttcgaagaagaagggcaagaagaagaagaagtcctcgctgccggccgccgcaccggcccctccgccggcggagggcgctgcggatacggaggcatgtcccccgctgcccggaaccataaccctaaccgctgccaccgctgctgcggcggtggtttcggagacggagtccagcagcagcggcgaggcctcgacgtgcccatccgcctgcttcaccgcaagctcgtctgggaccgcgtcctcgcactccttctctgccttgtcctcgtcggcgtccacagcttcgtcgtcggccgccggcgaggagcggcgggacctcacctggctgctcgacgcattcgccagcgccaccttcgaccagatcgactccgcctaccgcgaggccggaggggaccctttcgtggccgccggtatcctgtcctccacgcaggacactcacccgccgcagcccccgcagccggcgccgcagcccccgccgccaccagacctctcgccgcgcagtggatctggtggaaggaaggctggtcggaggcccaagcgggttgccgtggccgctacgggcatggtcgcggacgtgattggcaaggagtacacgcgacccgcggctaattctgtagtaagcatgccaaatgcttggaagggtcgggacggggagagcgatggcagcgggtctggtggccgcaaggacagtgttgaagaggcagagcagttcctgtgctccatgctcggggataattccgagcttggcatgggtgttgtcagagacgtgctagcgtcaatgtatcaatgggcaaggcaaagatgatggattggtggctatgggcgagaggtcctttagtcatggacatttgcatgattggattttcagttagtcatgtgaaaggacttgcaaggttcagagaaagtaaagtatggccaaggtccagttgcaccagccagtatgggtacgatgttgagaaggctttggatgcattgcttgatatatctggtgtgtcttcagttgaaaacatggaaacaaaccatcaaagtgccagaaggaatgacacatgtcatctagatatgttttctggaaatgggctatcagtggagaatctgactgcagggaatagaagaagtctacgccagttgacagatgagatatccaacactgggctccagtctgaattaggacacgagtttttatggggtgaacctcagatcagctatgcggaggctgttaaggaggcaccacgctcatcaacattgccgtcaagatcaactgtaatgaaagctggtccacaacaagtcctggattcactgtttaaaattcctgaaacacgcacgtatgagccaagttctatggactggaaaaaggtagtaaagaaactgcaaacaatcaattataccgctgcatcaaacaatcacgaaaggcctaaggatgggggtggctatcgtgagctccgtggtgttgctgcaaggcattacgataaaatgaaagaatactatcagaaagctgcctttgcatattcgaagggtgacaggtcatatgcttcttaccttgctgaggaggggaaacattatcgagaactaggtcgcatagaagacgagaaggccagcaggaatatatttgaagccagaaataagcatataacgaacacagtaaccatcgacttgcatggccaacatgtccaacatgctatgaaccttctcaaaattcacatgatgatttgtatttgcattccatctgtcttactgagggtaattaccggttgtggttcagaaggtacagggaagggaaaaataaagcgctcggttatagagcttgcggagaaggaacatattgagtggcgcgaagagaactctggaactgtagcccttcgacttggtgggccaagagagtatcggttccttgagcatgaaagcgattctgacctagtggggaactttaacatagattaacttctgatctaatctatgtattcccgtatttatgtgttatagctatggatgctgcctaggttgcgatgtaggctgtagttctgacacagaagctcggtattgtagttgggtaaattatggtgtaatgttgaccccaggctgctaactgtgcaatcacagaagctctgactgtacaaccgtagcccttctgtgagcaatgcaacacaggaaccgtaatcatcgtgagttgaagaatatcatactatggccgattgccacgggaaccaattttggcctgtaccaactggaacttacgatttgtatgaaaatatattcaacacttaggccacaaatattacttatcatgttcaactgaatacttttgaaatgtac

SEQ ID NO: 33350 - DNA, 2353 bp, Zea Mays
acgactgaaaaaattctggaaatcgaaacccaccctcgagcgacgccaagcggccaagacggagaggagaacaattggggacggggaaagtccagggggaagccacggccaccggcgcgatgaaaccgtcgctttcgaagaagaagggcaagaagaagaagaagtcctcgctgccggccgccgcaccggcccctccgccggcggagggcgctgcggatacggaggcatgtcccccgctgcccggaaccataaccctaaccgctgccaccgctgctgcggcggtggtttcggagacggagtccagcagcagcggcgaggcctcgacgtgcccatccgcctgcttcaccgcaagctcgtctgggaccgcgtcctcgcactccttctctgccttgtcctcgtcggcgtccacagcttcgtcgtcggccgccggcgaggagcggcgggacctcacctggctgctcgacgcattcgccagcgccaccttcgaccagatcgactccgcctaccgcgaggccggaggggaccctttcgtggccgccggtatcctgtcctccacgcaggacactcacccgccgcagcccccgcagccggcgccgcagcccccgccgccaccagacctctcgccgcgcagtggatctggtggaaggaaggctggtcggaggcccaagcgggttgccgtggccgctacgggcatggtcgcggacgtgattggcaaggagtacacgcgacccgcggctaattctgtagtaagcatgccaaatgcttggaagggtcgggacggggagagcgatggcagcgggtctggtggccgcaaggacagtgttgaagaggcagagcagttcctgtgctccatgctcggggataattccgagcttggcatgggtgttgtcagagacgtgctaggccagtatgggtacgatgttgagaaggaacaactcgctgctttgtgttctgaatggatatactgttggtttgtacagttgtgctaatcaagtgctttcaggctttggatgcattgcttgatatatctggtgtgtcttcagttgaaaacatggaaacaaaccatcaaagtgccagaaggaatgacacatgtcatctagatatgttttctggaaatgggctatcagtggagaatctgactgcagggaatagaagaagtctacgccagttgacagatgagatatccaacactgggctccagtctgaattaggacacgagtttttatggggtgaacctcagatcagctatgcggaggctgttaaggaggcaccacgctcatcaacattgccgtcaagatcaactgtaatgaaagctggtccacaacaagtcctggattcactgtttaaaattcctgaaacacgcacgtatgagccaagttctatggactggaaaaaggtagtaaagaaactgcaaacaatcaattataccgctgcatcaaacaatcacgaaaggcctaaggatgggggtggctatcgtgagctccgtggtgttgctgcaaggcattacgataaaatgaaagaatactatcagaaagctgcctttgcatattcgaagggtgacaggtcatatgcttcttaccttgctgaggaggggaaacattatcgagaactaggtcgcatagaagacgagaaggccagcaggaatatatttgaagccagaaataagcatataacgaacacagtaaccatcgacttgcatggccaacatgtccaacatgctatgaaccttctcaaaattcacatgatgatttgtatttgcattccatctgtcttactgagggtaattaccggttgtggttcagaaggtacagggaagggaaaaataaagcgctcggttatagagcttgcggagaaggaacatattgagtggcgcgaagagaactctggaactgtagcccttcgacttggtgggccaagagagtatcggttccttgagcatgaaagcgattctgacctagtggggaactttaacatagattaacttctgatctaatctatgtattcccgtatttatgtgttatagctatggatgctgcctaggttgcgatgtaggctgtagttctgacacagaagctcggtattgtagttgggtaaattatggtgtaatgttgaccccaggctgctaactgtgcaatcacagaagctctgactgtacaaccgtagcccttctgtgagcaatgcaacacaggaaccgtaatcatcgtgagttgaagaatatcatactatggccgattgccacgggaaccaattttggcctgtaccaactggaacttacgatttgtatgaaaatatattcaacacttaggccacaaatattacttatcatgttcaactgaatacttttgaaatgtac

SEQ ID NO: 33351 - DNA, 2286 bp, Zea Mays
acgactgaaaaaattctggaaatcgaaacccaccctcgagcgacgccaagcggccaagacggagaggagaacaattggggacggggaaagtccagggggaagccacggccaccggcgcgatgaaaccgtcgctttcgaagaagaagggcaagaagaagaagaagtcctcgctgccggccgccgcaccggcccctccgccggcggagggcgctgcggatacggaggcatgtcccccgctgcccggaaccataaccctaaccgctgccaccgctgctgcggcggtggtttcggagacggagtccagcagcagcggcgaggcctcgacgtgcccatccgcctgcttcaccgcaagctcgtctgggaccgcgtcctcgcactccttctctgccttgtcctcgtcggcgtccacagcttcgtcgtcggccgccggcgaggagcggcgggacctcacctggctgctcgacgcattcgccagcgccaccttcgaccagatcgactccgcctaccgcgaggccggaggggaccctttcgtggccgccggtatcctgtcctccacgcaggacactcacccgccgcagcccccgcagccggcgccgcagcccccgccgccaccagacctctcgccgcgcagtggatctggtggaaggaaggctggtcggaggcccaagcgggttgccgtggccgctacgggcatggtcgcggacgtgattggcaaggagtacacgcgacccgcggctaattctgtagtaagcatgccaaatgcttggaagggtcgggacggggagagcgatggcagcgggtctggtggccgcaaggacagtgttgaagaggcagagcagttcctgtgctccatgctcggggataattccgagcttggcatgggtgttgtcagagacgtgctaggccagtatgggtacgatgttgagaaggaacaactcgctgctttgtgttctgaatggatatactgttggtttgtacagttgtgctaatcaagtgctttcaggctttggatgcattgcttgatatatctggtgtgtcttcagttgaaaacatggaaacaaaccatcaaagtgccagaaggaatgacacatgtcatctagatatgttttctggaaatgggctatcagtggagaatctgactgcagggaatagaagaagtctacgccagttgacagatgagatatccaacactgggctccagtctgaattaggacacgagtttttatggggtgaacctcagatcagctatgcggaggctgttaaggaggcaccacgctcatcaacattgccgtcaagatcaactgtaatgaaagctggtccacaacaagtcctggattcactgtttaaaattcctgaaacacgcacgtatgagccaagttctatggactggaaaaagggggtggctatcgtgagctccgtggtgttgctgcaaggcattacgataaaatgaaagaatactatcagaaagctgcctttgcatattcgaagggtgacaggtcatatgcttcttaccttgctgaggaggggaaacattatcgagaactaggtcgcatagaagacgagaaggccagcaggaatatatttgaagccagaaataagcatataacgaacacagtaaccatcgacttgcatggccaacatgtccaacatgctatgaaccttctcaaaattcacatgatgatttgtatttgcattccatctgtcttactgagggtaattaccggttgtggttcagaaggtacagggaagggaaaaataaagcgctcggttatagagcttgcggagaaggaacatattgagtggcgcgaagagaactctggaactgtagcccttcgacttggtgggccaagagagtatcggttccttgagcatgaaagcgattctgacctagtggggaactttaacatagattaacttctgatctaatctatgtattcccgtatttatgtgttatagctatggatgctgcctaggttgcgatgtaggctgtagttctgacacagaagctcggtattgtagttgggtaaattatggtgtaatgttgaccccaggctgctaactgtgcaatcacagaagctctgactgtacaaccgtagcccttctgtgagcaatgcaacacaggaaccgtaatcatcgtgagttgaagaatatcatactatggccgattgccacgggaaccaattttggcctgtaccaactggaacttacgatttgtatgaaaatatattcaacacttaggccacaaatattacttatcatgttcaactgaatacttttgaaatgtac

SEQ ID NO: 33352 - DNA, 2211 bp, Zea Mays
acgactgaaaaaattctggaaatcgaaacccaccctcgagcgacgccaagcggccaagacggagaggagaacaattggggacggggaaagtccagggggaagccacggccaccggcgcgatgaaaccgtcgctttcgaagaagaagggcaagaagaagaagaagtcctcgctgccggccgccgcaccggcccctccgccggcggagggcgctgcggatacggaggcatgtcccccgctgcccggaaccataaccctaaccgctgccaccgctgctgcggcggtggtttcggagacggagtccagcagcagcggcgaggcctcgacgtgcccatccgcctgcttcaccgcaagctcgtctgggaccgcgtcctcgcactccttctctgccttgtcctcgtcggcgtccacagcttcgtcgtcggccgccggcgaggagcggcgggacctcacctggctgctcgacgcattcgccagcgccaccttcgaccagatcgactccgcctaccgcgaggccggaggggaccctttcgtggccgccggtatcctgtcctccacgcaggacactcacccgccgcagcccccgcagccggcgccgcagcccccgccgccaccagacctctcgccgcgcagtggatctggtggaaggaaggctggtcggaggcccaagcgggttgccgtggccgctacgggcatggtcgcggacgtgattggcaaggagtacacgcgacccgcggctaattctgtagtaagcatgccaaatgcttggaagggtcgggacggggagagcgatggcagcgggtctggtggccgcaaggacagtgttgaagaggcagagcagttcctgtgctccatgctcggggataattccgagcttggcatgggtgttgtcagagacgtgctaggccagtatgggtacgatgttgagaaggctttggatgcattgcttgatatatctggtgtgtcttcagttgaaaacatggaaacaaaccatcaaagtgccagaaggaatgacacatgtcatctagatatgttttctggaaatgggctatcagtggagaatctgactgcagggaatagaagaagtctacgccagttgacagatgagatatccaacactgggctccagtctgaattaggacacgagtttttatggggtgaacctcagatcagctatgcggaggctgttaaggaggcaccacgctcatcaacattgccgtcaagatcaactgtaatgaaagctggtccacaacaagtcctggattcactgtttaaaattcctgaaacacgcacgtatgagccaagttctatggactggaaaaaggtagtaaagaaactgcaaacaatcaattataccgctgcatcaaacaatcacgaaaggcctaaggatgggggtggctatcgtgagctccgtggtgttgctgcaaggcattacgataaaatgaaagaatactatcagaaagctgcctttgcatattcgaagggtgacaggtcatatgcttcttaccttgctgaggaggggaaacattatcgagaactaggtcgcatagaagacgagaaggccagcaggaatatatttgaagccagaaataagcatataacgaacacagtaaccatcgacttgcatggccaacatgtccaacatgctatgaaccttctcaaaattcacatgatgatttgtatttgcattccatgttatagagcttgcggagaaggaacatattgagtggcgcgaagagaactctggaactgtagcccttcgacttggtgggccaagagagtatcggttccttgagcatgaaagcgattctgacctagtggggaactttaacatagattaacttctgatctaatctatgtattcccgtatttatgtgttatagctatggatgctgcctaggttgcgatgtaggctgtagttctgacacagaagctcggtattgtagttgggtaaattatggtgtaatgttgaccccaggctgctaactgtgcaatcacagaagctctgactgtacaaccgtagcccttctgtgagcaatgcaacacaggaaccgtaatcatcgtgagttgaagaatatcatactatggccgattgccacgggaaccaattttggcctgtaccaactggaacttacgatttgtatgaaaatatattcaacacttaggccacaaatattacttatcatgttcaactgaatacttttgaaatgtac

SEQ ID NO: 33353 - DNA, 1828 bp, Zea Mays
ccgtgctccatcgcaagagaggagatgagatcatgagagcgagatttagtggttgcacatttgatctatctatatatatatatatgaaccgtctagcccacatcctcctcctcctgtagtctacctccacacctgttacgacgactactactcttctgtcgacggcgtgccctatgcggccggccgagatcatggaccgccgccgctttgccgagacggagggcaagagggcgcacgacccgctgtacagcccgcggcgcgcggcgagggcgacggccaccggcttccccgtcggtgagcacggggaggtgctggcggggccagtgatcgtgggcgcggggccggcaggccttgcggtggcggcgtgcctcaccatgcggggcgtcccgtacgtgctgttggagcgccatggctgcgtcgcctcgctgtggcgccaccgcacgtaccgcaggctgcgcctccacctgcccaaacgcttctgcgaactgccgctcatgccgttcccgccaagctacccggcctacccaacccgggagcagttcctcgcctacctcgaggactacatcgccaccttcggcatcaggccattcttccgccaggccgtcgtcagcgccgagcacgacggcgacttctggtgcgtccgcaccctcgacggcggcggcaccagccgggagtaccgctccaaatggctagtcgtggccacaggcgagaacgcggagcccgtcgtgcctgacatcgacggcatccatgccttcaggggcctcgtcatacactccagtgactaccgcagcggcgagagctaccggggtaagaaagtgctcgtgatcggctgcggcaattccggtatggaggtgtctctcgacctctccaaccacaatgtacacacgtccatggtggtgcgtgactcggtgcatgttcttccaagagagatcatgggtgtctccacttttgacaccgcacgcctcggcattcctcgacctaacattggtccgatggagttaaagagagtctctggaaagacaccagttctggatgtgggaactatagccaagatcaaatctggagacattaaagtgtatccagcaattcaaagttttcaagagcatggggttcagtttattgatggcaagtctgaatcatttgatgttgtgattcttgccactggatataaaagtaatgttccttattggttgaaggataaggatttgttttcagagaaaaatggatttccacataattcaaatgaatggaaaggaaaaaatggtctttatgctgctggattttcaagacgtgggctacttggtgtgtctatggatgctacaaatattgcagatgacatccttggatgttggaatgactttggctatgaaagacacaagagaaaataatatgttatttgtgtgattgataaggataccatctccaatttttactcaaatattttgtggatacgtgtacttgtctatttacatctattcgaacatgtggatgcaataggaaaaatattgtgctaacttctccaccaccacaatcatacctaccaccacaatcatatagttgcattagacaagtacatgtaaaagttataggtttatcttttgtattttagttttgctctaacattagatcttctaatttgagagacaatcgttggattctttttctttgtgaggttgaagagattcttttattttgacaaacaacgcaagttgtttttgtaagtgttgattgtactagatgaatgggtaaatttcttgtttttcttatagtgtggtaatattagttgcaatatatttttaccttggtgatgggtacacatattatttag

SEQ ID NO: 33354 - DNA, 2420 bp, Zea Mays
cgtctgctagaccacacgctttcgaaatttgaaataacgtcctttttgaggggaatttctgtgaaaagggccggagtacgagaaacacccccaccccaacccggaggaaaggaaaggcgagggaagaaaaaaagaattttggaggtgtaaacaaaaaccccgggctttccgaaatgggctccgggatgctataaaagtggggcggactcccggtgctcagcctaccagcacagcagcagcaacaacaacaaacagcgacagcgagcgcatcaaagcacccacgcagggcagcaggccaggcggcggtgctgccggcagagacacccacccccaccacacccaagcccggtgcctcgcgtctccactccacctccggggcgtaggaggtcgggtgcccgtgccatcccccacataccaaagcgtcggaagagggtttcttgaggggttttagtcgggtgtccaagcttggttgcggagtcaaatgcgagcggagtgatgtggcccatggaggaggagatgttcctggcggtgaagcggacggagcacgtcgaggtcacttcccgggcgatggattccgcgccggcggcggggcccaggacggtgcgggtcttctgcgacgacaacgacgcgaccgactcgtccggcgacgaggcggagggcgcggccgcgcgcaggagggtgaagcgctacgtgcaggagatccggctgcagcgggcggtgccggtgaaggaggaggcggcgtccgcgagggccgtcgcgggggagcggcccaggccgctggccctcccggggcggaagaggaagtccgacggcgccggcgccggcgccgagccccggttccgcggcgtgcggcggcggccgtggggcaagtacgcggcggagatccgcgacccctggcgccgggtgcgcgtctggctcggcaccttcgacaccgccgaggaggccgccaaggtgtacgactcggccgccatccagctccgcggggccgacgccaccaccaacttcgagcacgcggcggtccccgtccccgtccccgacgaggtcgcgggtcgcctcccgcagccgccgccggctccggcgtccaagaacgcgtcgtcctccgccacgtcctcctacgactccggcgaggagtcccacgccgcggcggcctcgccgacctccgttctccgcacgttccctccgtcctccgcggccgccgacgccacctgcaagaaaccggcgccggccgcggagaccgacgagtcgaccggcgtcggcggcagcaggagcagcgtgtacgcataccccttcttcgccaacgacgactgcttcggcggcgacttccccccgctgtacactgacttcgacctgctggccgacttcccggagccgacgctggacttcctggcggacatccccgaggagaagctgccgccgctgccggagccgttccccgcggcgagccccgacgagtgcccgtccgacgcggaggcggcgtcgccggcgaggtggcagcaggtggacgacttcttccaggacatcaccgacctgttccagatcgacccgctgcccgtcgtctagcgctcccgcccgcccgccagccctcccctccctctgcgcaccggatccgcctagcccgtccggccaattttgttttcgtgctgttgttgtttttttgggtcctagtcgttaattcttttagcgtaaggtgaagagagagagagataagaggtgtccgtccggctctgcagtgcgtccttgtggccccgccgccgccgctgctgccatgtgtgccgagcatctacccccccggcaaggaggaagaagagtccttgaccggggcgagcgaggctgtctgtctgccccttgctcaccgagttatcagtaatcgtcggggattataatcaagtcatgagtaattagcgacgtgctgtctctggttttgtctgtcgcctcgtctgggcgggcagcagtgtgttgcacgacggacggcgcgacggttccccatacggcccgctgtttgctcgcctcgcaccggagggccgtacgcagcagtaattgccggagccggtcttggtcgctgggatcgcagcggaaccggcacatttacggcgtcccctggctgatggggtctctggtgcgcgtgtttttttccgtgctctgcgtagctgcgccgtagcggtatttccgtcgagcgccgtggctcgaggggccccgaggacacgccgccggccggcgacaaggattatgaaatggcatatggctttgcttcggggttgttaattaactcgtctgacccgccctcttttcctcgtgggtagcgcaggggctgtgcgtggcttggcgtcgctcacgctgtgttctcctgccaccgtgcgtggcctcgcctgcaaaatgccgcgccccttggactcttttgaccgcctttgcttgcacggcgg

SEQ ID NO: 33355 - DNA, 232 bp, Zea Mays
aaaaagttggggtgctaaattttcttcaacatcttccttcttttggaagtatttcgtgtctacatgagattggatagagcacagctggtcaagaacacttggacatttcacatttgacatttcaaaattcaaatggagcaagacaaggaagcctgttggtttctagagttatttcctgcctgttagaggtttctccctctcctgtccatcaatgagagaatctgcaaacaat

SEQ ID NO: 33356 - DNA, 6252 bp, Zea Mays
ccaaggctgcccaggtggggcccaaggcccaatagctaatagataagctctatctagttagttatacttatccaaagatagtagataaagatcagctctatctagatagttatacttatccaaagttagtagatagacttgagatagctctatatatagatctgtaaactctggaataaagacaagcagaattccaatctattctggcttcccagagggagccagagtctcctgtgatcttctccctgcgcacaacccagccaggatcacgacggcgccccagcgccgccaccctggtcccaccaaatcccctccctacaatctgcgcaatctgcccggtagaatccgtagttctaccaatctggtatcagaggactcgacgatcatgagttcctccaagtcgccgtcaccgggacagcagacgccgccggcctcaagcccgcccgcagcgccggtcgtctccctggccgcggtccctgcgtcgtcggaggccatggcgctcggccctcccggcgcggccatcaaccagcaggccgcccccgcgctcacaccggcccagatcgcggcgtccttggcggatctcagccacgccgtgcgcgatatgcagatcaccatgaacgccatgctgacaggccacctccccttccccaatccacaagccgccaatccaccccagccgctgcacccgtccctgacagcgcagccaccgccggccgcactgcccccacccacgcagccacctgcgccactccctccactcgcccggcaaccaatttcttaccagtacggcatgccgatcgaccccgggccgtcatccaccgcatcaccaaccacagcccccatccatatgatccgcttcccaccatccccatcccccatcccatcttgggcgcagggcgcgcctacagtttcaccaccagtgtactctgaggcactcccgcgaccggcgctcacgacttccttacccagcagcaccgtcggtgggcctcccgggatgctgttaggaggcggcgacgaccccctgttcccgggtcgggggcccttgcgccctcacgtacccgcagcgacagcagcatggtcaccgtaccacgggctacctcaggacgacaacgtggagaccgcagcctacgggggcgctgaggcgcgcgcgcctccacgctactacaaactggattttgccacatatgatggctccgaggatccgctgaactggctaaatcattgtgagcagttcttccgggggcagcgcacgccagcctcggatcgcacgtggctggcctcgtaccatcttaaggggccggcacagacgtggtattatgccctggaacaggacgagggcatgccgtcttgggatcgcttcgccgagctgtgtcgccttcgcttcggtccagctgtgcgcggttctcgccttgcggaactgggacgcctccccttcctgtccacggtccaggagtactcggaccgcttccaggcgttgctgtgtcgagctcgggacgtctcccccatgcagaagacggagctattcgtgggcggccttcccgagtacttgcgggtggacgttgagctgcgcgacccgcaggatctacaaactgccatgtacctggcacgggcgttcgaacggcgcgtggcggcctggcccccattccagcagcgcgggtcgcgaccaccgcaacgggcgcagggctcgggtcgcgtgacaccagcaccgcccggggctctaccgaccagtacgacgacgccaggcgatagtacgactccgacacgcccgtttcgccgattgtccccgggcgagcagcaggagcggcgccggcaggggctctgcttcaactgcgatgaaccctacgttcggggacacgtctgccagcggctgttctacttggaggtcgacgacttcctcgacgaggcgtccggtgagggtggggtcgacccccttgaggagtcggccgccccagacgtcacgggagccaacgcgttggtggtctcgttacacgcgctggcgggcatccggacggacaagacgctgctgctaccagtcaccatcaacggcgagcgactactcgcgctcatggacacagggtcaacccacaacttcctcaacgctgacacaatgagccgcctcgggttagccatggcgggtggcgagcaccttcgggtcacggtggccaacggtgaccgcctaccctgcgccggcatcacccgcgacgtccccgtcatcatcaacgacgagtccttctccatcacgtgcgttgggatgcgcctgggctgcttcgacttcatcctcggcgtggacttcctggagacgctgggcaccatccagtggaacttccgagcactgaccctgtcgttccagcgccagggccggcgcatccactggcagggtgtgcgggccacgcaacagcctgccccgcagcagctggttgtggcagtcgtcgacactgcccaacagcccctcatggacgtccttttgcagcaacatggcgccatcttcgacgagcccacgggactgcccccggcccgcccctacgaccatcgcatccacctgctgcccggtacagctccggtggccgtacgaccgtaccggtacgcacagctgcagaaggacgagctggagcgacagtgtgaggccatgctcacacaaggcatcatacgacccagcacgtcgccgttctccgctccggtgctcttggttcgcaaggcggaccgctcgtggcgtttctgcatcgactaccgcgccctcaacgccaagacgtccaaggacaagttcccgatcccggtggtggacgagctcctcgacgagctccatggagcccgtttcttctccaagctggacctacgctcaggctaccaccaggtgcggatgcacaccgatgacatcgccaagacggcgttccgcacccatcatggccactatgagttcctagtcatgccgttcggcctctcgaacgcgcctgctacgttccaggccctaatgaacgacgtactccgcccatatcttcggaagtttgtgcttgtcttcttcgacgatatcctgatctacagtgcatcatgggcggagcacctccagcatgtgggcatcgtcctcgagacattgcaggcaaaccacctccacctgaagcgctccaagtgttccttcggcgccacatcagtggcctatctgggccatgtcatctccgagggcggggtcgccatggacgccgacaaggtcgcggcagtggcctcctggccgcccccgcggtctgcacgaggcctccggggcttcttgggactagcagggtactaccggaagttcatcaaagacttcggcctcatcgcagccccgctgacacgtctcttgcgacgagacgcgtttgcctgggacgatgacgcgacaacagccttccacgccctaaagcacgccctaacgacgggtccagtgctccagatgccaggcttcgccaagctcttcgtcgtcgactgtgacgcgtcaggtgcagggttcggtgctgtccttcatcagggcgcgggacctctcgcctacttcagcaagccatttgcagcccgccaccttaagttggcggcctacgagagggagctcatcggcctcgtgcaggccgtccgtcactggcgcccgtacttgtgggggcgccacttttctgttcggactgaccactacagtctcaaattcttgctggatcagcgcttgtccacagttcctcaacatcagtggaccagcaagttgttcggtttcgatttctcggtggaatacaggccggggcgcctgaacaccgtggccgacgccctatcccgccgcgactcggaggctaccgtggaggacacggctatggcagcactggccatctcgggcccgacattctccctgctggacgacatcaggggggcgctggcagctgcacctgacgggcagcatctcctccagcagctgcgggacggcgtattggctgcgccatggcgcctcttcgacgggctgctcctgcacggcacacgcatcttcgtgccgaactacgacgacctgcgccaccaggtgctgacactggcgcactcggcaggtcatgagggcatccagaaaaccctccatcgactacgggcagacttctacatgccacatgatcgcgcgctcgtccaggactgggtgcgcacctgcaccacgtgccagcaaaacaagacactggcgcagcagccgggcggcctcctgcaaccccttgaggtgccgtcccaggtgtgggccgacatctccatggacttcatcgaggggctgcccaaggtggcaggcaagtccgtcatcctcacagtggtggatcgcttctccaaatacgcccacttcatcgccctcggccacccctacaccgcgtcgtccgtagcacgggcattcttcgacggcatcgtacgactgcacgggttcccgttgtctattgtcagtgaccgggaccccgtcttcaccgggcacgtgtggcgcgacctcttcaggatggcgggggtgacactaaagatgagcaccgccttccacccacagacggatggacaatcggaggtggtcaacaaaattattgcgatgtatcttcggtgtgtcaccggcgatcgaccgcgggcatgggtggattggctgtcctgggcggagtattgctataatacctcctaccacacagcactgcgtgccactcccttcgaggtggtctatggcagatccccaccgtccatgctaccttacacgccagggacgacacgtactgaggccgcagacgacatgctacgctccagagatgagatgctggccgaggtgcgccagcgccttttgcaggcccagcagctcgccaagaagtattacgatgccgggcatcgggaggtccagttccaggtgggcgactgggtgtggctacgcctgctacaccgcacctttcagtccctccatccacgcgcgaagggaaagctgggacctcgctacgcaggccctttccgtgtccaggaaaggattgggtcggtagcctaccgcctgcagttgccagatggtgctcgcatccatgatgtcttccacgtcagcctgctgaagccgcatcgtggggatcctcctgcaactccggggacgcttgacccagtgatggatggtcggctgcttcctgtgccggccaaggtgcttcgcgctcaacttaggcggggcgtgtggcaggttctcgtacagtggcgtggactggctgaagatgacgccacatgggaaaagcttgaagagttccgtgttgcttaccccaacttacagctcgaggacgagctgtttgagaaggcggggagagatgttatgtatggccaagcctatgttaggcgcaatagggccaaggctgcccaggtggggcccaaggcccaatagctaatagataagctctatctagttagttatacttatccaaagatagtagataaagatcagctctatctagatagttatacttatccaaagttagtagatagacttgagatagctctatatatagatctgtaaactctggaataaagacaagcagaattccaatctattctggcttcccagagggagccagagtctcctgtgatcttctccctgcgcacaacccagccaggatcacgacggcgccccaacgccgccaccctggtcccaccaaatcccctccctacaatctgcgcaatctgcccggtagaatccgtagttctaccaataccaaatccagcgtgaaccgctacaattactttacaagtccaataaaaaagttgcaccaaaagcatgattaaaaaaagccatgacttgaatatttacccaaactcaagcatgtcattcttcagggagctgcaccaagttcacgcttcatattcgcagagaagaatgcaaactatgttctgcttacctgaacaataagtgtcttgaggagcttcttgtaagtggggtgatctctacttatgcacagtagctctttccttgctgactccaacatatctgttaccaaatcatcctgagcttgaaggactttaattctggaagcattgagctgcatcgagtaatcactgcataagaccacacacaataagatcagtgaattgatatgttttacacaaaagaaaaacagtatggtcatcagcatatggtaaagtggggaaatatccataacggcctgtagacaatagtagctatgaagtgtgacataggtaaaacagaaacaagtcacaagaatgagaataagaaattaagttagaactgctatttacattttcttcttgatgccaacttgcttc

SEQ ID NO: 33357 - DNA, 459 bp, Zea Mays
ctacttcacaagcctcgatggcatgctacgggatgaatgaagccatgaagaagaagaagaagatgcatgattaagaaaggcgatcgaagagctcccttcgatccaatccaggaggggaagtggtcggttgcagctgccggttcatggatacctctctggtgcagcaatggccgctgctcacctctgcacttgcatgggtgtgcatgacccgggagatgagcccgccatcatctttccctcgtgcttggattgaagggagctcctctctgtctttgcattgcagacatggatatgcatgctattgcctcccaagcgccgggaaactttaatctggataattggattcatgcataaatgaaccagaatcggggacgcatgcgcattgccacctccccactccctgcctgaattttttgcattttggcccttccttggaaaaaaatcacgtttagactctag

SEQ ID NO: 33358 - DNA, 1827 bp, Zea Mays
cgccgccgccgaggaggagctctccatctcactctggtctgcatccgcggcggtggccggcggggagggcggccgtgtgccggtgccgctccggcgcacctcctcgaccgtcctgaccacgtccgccaccttgggccgccggtcgggggtcctggacacgcacgccatcgcgatctggagcatctccaccatctcctcctcgatgtcagggacccgcagcagcgcgccgtcgaacacctcggcggtccactcctcgcggacgaccgactgcacccacctcacgaggtggacgacctcgctgccgcgcccgccggatacctggacgggcgacctccccgtgagcagctccagcacgaggacgccgaggctgtacacgtctgaagcctgcgacgccttcctcgtgtcggcgacctccggcgcgcagtacccgagggagcgggacctcgccgcgatcgggttcgccagctgtgccaggccgaggtccgagatgcagccgtatccgtccctgttgacgaacacgttggaggccttgatgttgccgtggacaaatctgccgttgttctcggcgtggacgtgtgccactcctcttgctgcacccagagcgatcttccacctggtttcccagtccaatggcgttcgctcctctcccctcttccctgaaaggagcacaggcagtatgtctacttcattcgatcacgtgaagagtttagattagaacgtcagatattaaccatcagaccacagcacaattaataccaaatttgttctctgtatggccaaaaaaacatttataaccaggtgttccctgcacagtgcaagcttgtagtactgtttagatgtaatgctacatcatggtacagacagattcagagttaacatgaatgcagatagctgatgcatagtaccgaaaaatctggcggcggtcctcctatggtccagattctgacactgaaatggaggagcggggccatgacagtgaacaccagcgctaacagatccaagggttttaccaattcaatctgaaaagacttcaaactttatggtactactaggtgacaacactcaactactgtctgcttactaatggacctgtcatgcagttctctttcacaaccgccagccatttctctatacctaccaccacttatagctccctattttacctttatttagcatattcacaacgtcacatggctgatggctacaaattaattagtactccctccgtttctttttatttgtcactagatagtgtaattttgcactatccagcgacaaataaaaagaaatggagggagtagttaactaactatgcagtttgctattcaaattccatgacatcatatgatttaagtatgcttttgttagcatggcccgcttaacctcataggatgagatgggaaacagattatcttgctgctaagacggcactgatgtgatcagagctgaccagtgaccaccacacatcaagcatgccatgtgaacttgaattgaaacggcataatgtttgaagacgcgtcgcaagtgaagacagctaataagcacatcacaccaagcagctagacaacttaaatgaaacgcatgagattcaatacatgacagcaagttagcaaacaaaaaaataagcaagaaatgggcagcacatgctacttccggacttccggtgagacatgcacagagcgctaaagttcatcttctccttaagaagaggtcaaaagtggcatgctcaccagtctgttactccacatgaggatttttttttgtcaaagcagaaaagcgatcagatattgactggtatggcgtaaagataggaagccgggagatgag

SEQ ID NO: 33359 - DNA, 2045 bp, Zea Mays
gttgcaatgctttcacgtgttggcaacattttgcgtgaaccctcgtcatcgccaccatcgcttcatcgcctggtaaaaaaaagccatgcgtgggtcgaggaagctccattccatgggcgggcgtggcgtagtacgtggcaggacgcattagaggaggaagtctgatagggacggatgtccactgcactgatcgagtgatctcattctctctcctccgtcgtagtagccagaaacggatgcctgctgctgctggaacaggaggacaggcgcgccagccatgggtgatgggtggggtgcttgctagctgttgaactcagctaccatgccagccgtccactatatttgacgcattgcgtcgcgcgtcgccatcggccatcgccacgcccacctgtcgtctgcgctgctgagcatcgacgtacgcgcacggcggccggaacgaagggggagcgagagcaagatgaggcggaagcagctcctgccgccgtggctgctggtcgtcctgttcttgtcgtggtcgtcggcggcgccagtgcccgcctcatccaccaccaccaccaccaccactctccccggtcaaatgcggcggcggcgctactacgactccatcttcagcctgggcgactcgtacgcggacaccggcaacggccccgtcgtgttcggctggcacgctctggccagccccgttatgcgcccgccctacggctccaccttcttcggccgccccaccggacgcaactgcgacggccgcctcgtcatcgacttcctcgctgagagcctgggcctgccgctggtcccgcctttcctgcaggcgcaggcgcgccacgggacggggagcttccggcgcggcgccaacttcgccgtcgggggcgccaccgccctcgacgccagcttcttccaccgctgggatccccccggcggcagcgtgttcccgctcaacgccagcctgggcgtgcagctgcagtggttccagtcgctcaagcgctcgctctgcgccacgcccaaaggcatgtgtgttgcattgcatgacccacgaggccacgaccacgacgacacagatgaacatgaactgacgcgctgcgacaggttgttgcgcagatcgctcttcttcgtgggcgcgttcggggccaacgactacctcctcgccatggccgcgacgagcctcgaacaagtcgggtcgctcgtgccagccgtcgtcaggaccatctccgcggccgtcgagaggctgatcgtggagcacggggcggcaaccgtggtggtccccggcgtgatcccggtggggtgcgcgccgccggtgctcgccacgttcgccgaccccgacccggcaggctacgacccgcggacggggtgtctgagatcgatcaacgaggtggccacccgccacaacgctctgctccaggacggcctgcgcgagctccgggccaggcacgccgccgccaccgtcgtctacgccgacttcttcggccccgtcatcgacatggtgacgtcgcctgccaaggttcgacgaagacgtgctgacgctttgctgcggaggacctgggcggttcaactacaacaggcacgttttctgcggcgaccccggcgccagcgagtgcaaggacccgtcggctcgtttgttctgggacggcgtccacctgacggaggcagcctaccgatacgtcgccgccggctggctgagcgccataacgtagccgcggccgggaagagggggcggcggtggtggtaacactgccaacaggaaccggacggcggctgcagctgccaccgaggagtccccgtgctactgagcggtgaaaggcaccgaaagcgtgcatgtgtgaagttggtttggcggtggtggtgctagctactacttcctgcctatcatcagaatttgggtacacagcaactaaccacatttgaatttgggtacgtagccacatactatataggaagggtggacaatgtttgttttgtgaaggaaaaacattacttctcaggaagaagaataaataaagcagtgtttggtcaagaacgaggtggaatggagcgtacgtcttgcatggttc

SEQ ID NO: 33360 - DNA, 1170 bp, Zea Mays
gcaggcggcaggcgctaacacactgggccggcccaccgagccgggacgaccggtcccgcgcgccagagagacgtcggtcggttggtttagctgcacgcttcgtcgcttcctctcgccctctggctgcctccacccgatcacggatggaatggaactagtataccgtggaagcaagcaggagggagaggaagacgaggcgagcgagatgcttagttcgaggtctatcgatggttgaagccggtggatctggtgccgtgggcgatgccgggcacgctgcacccggcgtgactgacgtcgggcgcgtcgggcacactggacgagccgaaggcgttcggcgaaatgcctctccccgagagcgcgctgtgtacctgatcctcttggctctgtgagaaccctgtcgtcgtcgacgagaattatgtcctaagattgcagatttcggcatggcaaagcttcttggccgagattacagcagggtactgacaacagtgcgagggaccataggataccttgcgccggagtggatctcagggctaccgataacacacaaggccgatgtctacagctttggaatgattctcctggaaatcctatctgggcgaaggaattcggagaagattgaagaggggaggtttacttacttcccttcctatgtcgcggtcaagttgagcgaaggagacgatgtcatgtggctgctggatagtagtctggagagcaatgctgatgcagagcagctacagagagcctgcagagttgcatgctggtgcattcaggatgctgaagatcacaggccgatgatggggcaggctgtgcacatgctggaaggtgccatggatgctcaagtccctcctgttccaaggtcactgcaaaactatgtcggcgtggaggattctaccactgcagaattttacatctctgaaggctcgtgctagtccagtgtgagcctgcccttttgttctttgtactgcttcggaactgaatctaagcggaacacacagttgctgtgtactgcagttttactcactagtgaactattttaagaatataagtactgcaaccctcacatttcctgattaactgcttcaaatgttggtcagacatcataggaattttgatgtacttcaaccctcatatttcctgattaactacttcaaatgttggcatgtaatgttt

SEQ ID NO: 33361 - DNA, 1177 bp, Zea Mays
gcaggcggcaggcgctaacacactgggccggcccaccgagccgggacgaccggtcccgcgcgccagagagacgtcggtcggttggtttagctgcacgcttcgtcgcttcctctcgccctctggctgcctccacccgatcacggatggaatggaactagtataccgtggaagcaagcaggagggagaggaagacgaggcgagcgagatgcttagttcgaggtctatcgatggttgaagccggtggatctggtgccgtgggcgatgccgggcacgctgcacccggcgtgactgacgtcgggcgcgtcgggcacactggacgagccgaaggcgttcggcgaaatgcctctccccgagagcgcgctgtgtacctgatcctcttggctctgtgagaaccctgtcgtcgtcgacgaggtaacagaattatgtcctaagattgcagatttcggcatggcaaagcttcttggccgagattacagcagggtactgacaacagtgcgagggaccataggataccttgcgccggagtggatctcagggctaccgataacacacaaggccgatgtctacagctttggaatgattctcctggaaatcctatctgggcgaaggaattcggagaagattgaagaggggaggtttacttacttcccttcctatgtcgcggtcaagttgagcgaaggagacgatgtcatgtggctgctggatagtagtctggagagcaatgctgatgcagagcagctacagagagcctgcagagttgcatgctggtgcattcaggatgctgaagatcacaggccgatgatggggcaggctgtgcacatgctggaaggtgccatggatgctcaagtccctcctgttccaaggtcactgcaaaactatgtcggcgtggaggattctaccactgcagaattttacatctctgaaggctcgtgctagtccagtgtgagcctgcccttttgttctttgtactgcttcggaactgaatctaagcggaacacacagttgctgtgtactgcagttttactcactagtgaactattttaagaatataagtactgcaaccctcacatttcctgattaactgcttcaaatgttggtcagacatcataggaattttgatgtacttcaaccctcatatttcctgattaactacttcaaatgttggcatgtaatgttt

SEQ ID NO: 33362 - DNA, 2932 bp, Zea Mays
gcaggcggcaggcgctaacacactgggccggcccaccgagccgggacgaccggtcccgcgcgccagagagacgtcggtcggttggtttagctgcacgcttcgtcgcttcctctcgccctctggctgcctccacccgatcacggatggaatggaactagtataccgtggaagcaagcaggagggagaggaagacgaggcgagcgagatgcttagttcgaggtctatcgatggttgaagccggtggatctggtgccgtgggcgatgccgggcacgctgcacccggcgtgactgacgtcgggcgcgtcgggcacactggacgagccgaaggcgttcggcgaaatgcctctccccgagagcgcgctgtgtacctgatcctcttggctctgtgagaaccctgtcgtcgtcgacgaggtaacaggtaatgccggactcctcatgtcacatgtcagttgcgtccttgtggtttagctggatagagacttggttttgacaaaagttactagaaaacggatgcacaacagatcggcgtcatgttgactgcaaacaggattttgattattctgtttatctgtttacttattataaacatcgacctcagtccaccatccaataaccgaacttggtaccgtgtcatagtagggtccatatgcccggccaaccttgttggacttggacctggacaatagggcattgcgactagcgctcttgagccttgaccgatgagcagatcttttccttgttttccatatatcagctcggttaggagactaagcacaagcacgtactccacttcattggggtggacaagaagaagagtatcccttaaaatggtgggcacaggcagtttgagtgcttcttgacaacggaaatcttgtaataagagaccgagtaaacagttccatggtggtttggcagagttttgataacccgactgatgtactgctctctggaggatacctgggattcaataaaatcaatggcaacatcaacagtcttggtatacattttaatctgtcattcgatgcaactagaaggagaggttttattatccagtatcctgaaggtcggaggtttgctggtgccttccctgaatggatggatattctcgaagatggaaactatacgctaatattcaatgacacatatacatacatacgtttagatgatactagttttgttagattcggtaagcaaggggactgtgattctattttatggtctgccccagaaagtttatgtgattatgatccatattgtggaccttacagcctttgcacgttgtctggctctggctcttgtatatgccctgttggttttaattcagtgtcgacagatgcatggattactgctggttgttcgagaaatgactctctgaattgtgaaaatgtggaagtgacattttatccaatagatggcatccatagatatcccctggaagctttcgcgttggaagttacaaacatgagtgagtgtgaatccgcttgcttaagggattgtacctgtactgcctttgcttacaatgcaagttgcttgctatggttttcggagctgcggaatacaatagtgctcgactctggtctaaatggcatccgtatgtacgtacgtacggcagccagacaacagtcaggttctggaaccgttcctccgttttctttctggaaaagagtgcctcttgaatggatgatcggtgtgataacccttattgttatttctctgattcttttgttgagatgcagaagcaaaccttacagtgctagaactgtgggtgaccatggaagtcttgtggtattctcgtttgcgcaaataaagaactccaccaaaagattctctgaaaaacttggcgaaggaggatttggctgcgttttcaaagggatgttgccaggctgcactcctgtggctgtcaagaagctaaaagaccacagacaggacgagaagcagtttcgagccgaggtgcggaccataggtatgattcagcacatcaatattgtccgtctgcttgggttttgcgccgaaggtagtgggaggttcctagtgtatgaatatatggcgaatggttctttgagcagccacctgttctccaagagttcctctaagctaagctgggagctgcattactcgatcgcgcttggaatcgcacggggcctggcttatctgcacgagggttgcgttgatgaattatgtcctaagattgcagatttcggcatggcaaagcttcttggccgagattacagcagggtactgacaacagtgcgagggaccataggataccttgcgccggagtggatctcagggctaccgataacacacaaggccgatgtctacagctttggaatgattctcctggaaatcctatctgggcgaaggaattcggagaagattgaagaggggaggtttacttacttcccttcctatgtcgcggtcaagttgagcgaaggagacgatgtcatgtggctgctggatagtagtctggagagcaatgctgatgcagagcagctacagagagcctgcagagttgcatgctggtgcattcaggatgctgaagatcacaggccgatgatggggcaggctgtgcacatgctggaaggtgccatggatgctcaagtccctcctgttccaaggtcactgcaaaactatgtcggcgtggaggattctaccactgcagaattttacatctctgaaggctcgtgctagtccagtgtgagcctgcccttttgttctttgtactgcttcggaactgaatctaagcggaacacacagttgctgtgtactgcagttttactcactagtgaactattttaagaatataagtactgcaaccctcacatttcctgattaactgcttcaaatgttggtcagacatcataggaattttgatgtacttcaaccctcatatttcctgattaactacttcaaatgttggcatgtaatgttt

SEQ ID NO: 33363 - DNA, 2290 bp, Zea Mays
gcaggcggcaggcgctaacacactgggccggcccaccgagccgggacgaccggtcccgcgcgccagagagacgtcggtcggttggtttagctgcacgcttcgtcgcttcctctcgccctctggctgcctccacccgatcacggatggaatggaactagtataccgtggaagcaagcaggagggagaggaagacgaggcgagcgagatgcttagttcgaggtctatcgatggttgaagccggtggatctggtgccgtgggcgatgccgggcacgctgcacccggcgtgactgacgtcgggcgcgtcgggcacactggacgagccgaaggcgttcggcgaaatgcctctccccgagagcgcgctgtgtacctgatcctcttggctctgtgagaaccctgtcgtcgtcgacgaggtaacagtgcttcttgacaacggaaatcttgtaataagagaccgagtaaacagttccatggtggtttggcagagttttgataacccgactgatgtactgctctctggaggatacctgggattcaataaaatcaatggcaacatcaacagtcttggtatacattttaatctgtcattcgatgcaactagaaggagaggttttattatccagtatcctgaaggtcggaggtttgctggtgccttccctgaatggatggatattctcgaagatggaaactatacgctaatattcaatgacacatatacatacatacgtttagatgatactagttttgttagattcggtaagcaaggggactgtgattctattttatggtctgccccagaaagtttatgtgattatgatccatattgtggaccttacagcctttgcacgttgtctggctctggctcttgtatatgccctgttggttttaattcagtgtcgacagatgcatggattactgctggttgttcgagaaatgactctctgaattgtgaaaatgtggaagtgacattttatccaatagatggcatccatagatatcccctggaagctttcgcgttggaagttacaaacatgagtgagtgtgaatccgcttgcttaagggattgtacctgtactgcctttgcttacaatgcaagttgcttgctatggttttcggagctgcggaatacaatagtgctcgactctggtctaaatggcatccgtatgtacgtacgtacggcagccagacaacagtcaggttctggaaccgttcctccgttttctttctggaaaagagtgcctcttgaatggatgatcggtgtgataacccttattgttatttctctgattcttttgttgagatgcagaagcaaaccttacagtgctagaactgtgggtgaccatggaagtcttgtggtattctcgtttgcgcaaataaagaactccaccaaaagattctctgaaaaacttggcgaaggaggatttggctgcgttttcaaagggatgttgccaggctgcactcctgtggctgtcaagaagctaaaagaccacagacaggacgagaagcagtttcgagccgaggtgcggaccatagaattatgtcctaagattgcagatttcggcatggcaaagcttcttggccgagattacagcagggtactgacaacagtgcgagggaccataggataccttgcgccggagtggatctcagggctaccgataacacacaaggccgatgtctacagctttggaatgattctcctggaaatcctatctgggcgaaggaattcggagaagattgaagaggggaggtttacttacttcccttcctatgtcgcggtcaagttgagcgaaggagacgatgtcatgtggctgctggatagtagtctggagagcaatgctgatgcagagcagctacagagagcctgcagagttgcatgctggtgcattcaggatgctgaagatcacaggccgatgatggggcaggctgtgcacatgctggaaggtgccatggatgctcaagtccctcctgttccaaggtcactgcaaaactatgtcggcgtggaggattctaccactgcagaattttacatctctgaaggctcgtgctagtccagtgtgagcctgcccttttgttctttgtactgcttcggaactgaatctaagcggaacacacagttgctgtgtactgcagttttactcactagtgaactattttaagaatataagtactgcaaccctcacatttcctgattaactgcttcaaatgttggtcagacatcataggaattttgatgtacttcaaccctcatatttcctgattaactacttcaaatgttggcatgtaatgttt

SEQ ID NO: 33364 - DNA, 1478 bp, Zea Mays
ctattgctgtcagtcacttttgcggagagggagagacgcgcacgccagcagcgtcacaaaaagcgagcgcgcgccaccgcttccgctcccccgagaatatccatatccattatcacagtgtctcctactatttctttttactcactgtggtggactcgtctctatatattgcaagggtaatgacacttgtctgactcccctcacatacagatacagtacagttcacacactctcctgtctcctatccatccagccaccgaagctagccaagaccaagatgtctcagttgctgcacctgccggacctcgcggcgccgcggaccaggatgggctcggcgctggcggcgggggcccgcgtcaagcagggggaggcggggacggcgagggggcgggtgctcagggtcgccgaccccgtgcggcgggagtgcctggtgccggtcccgccgccgccggtcctcgccgcggggaggcgcggagacgacgacgacgtcgacgaggagaggcagcggtactacctcaacctgggctacgcgatccggacgctcagggaggagctccccgacgtgctctgcaaggaccacagcttcgacatctacagacattgtcttcagagaccctctcaacacattcaagggcctgggaaactacaagaggctcttctgggcgctgcgcctcaccggccgggtcttcttcagggcgtcgtgggttgaagtggtcagcatatggcagcccgccgagaacagcatcctgcttcgctggaccgcccacggcgtccctcgggtgccctggggctggtgggacgccgcccacgcccgcttcgacggcgcgtccgtgtacaagctcgacaggaacggcaagatctacgagcacaaggtgcacaacgtcgctacgaacccgccggccaagtccaaggtcctgccggtccacgagctggtcaggtcactcggttgcccctccactgcccaacccacatgttctgacttctgaagctttcgtcgtcgcagtgatgtgccatcttatatcttattattcgagattaattagcatggataggatgctacgtcgagattaattatctggaagaaggattggcgtgggtttaacatgataccctccattttttttgtttttcagtgtgatttgatagcgcacaaagttacagagcactcctgcaggctgcagttgtatatatgtacagttatagaataagaacatcagttattgattgttaaagcatcagtcagcaaataactagtctgacatgtttctgttcccagtaacatcaggaacatgctgcgatcctctagtgtggtgacctgcaatgccaactaattaacatcttcgtcatattccgggaacaagctaatcttgatgcacctgctgcagcttggagcacttaaagtcgaccacgtgtttagataccttaaaactcgcaatgaaagtaagaatgcctgattatgaagtgatatcaaatttaca

SEQ ID NO: 33365 - DNA, 1714 bp, Zea Mays
cacgtaggggggcctgtatggctgtatctattgctgtcagtcacttttgcggagagggagagacgcgcacgccagcagcgtcacaaaaagcgagcgcgcgccaccgcttccgctcccccgagaatatccatatccattatcacagtgtctcctactatttctttttactcactgtggtggactcgtctctatatattgcaaggccaccgaagctagccaagaccaagatgtctcagttgctgcacctgccggacctcgcggcgccgcggaccaggatgggctcggcgctggcggcgggggcccgcgtcaagcagggggaggcggggacggcgagggggcgggtgctcagggtcgccgaccccgtgcggcgggagtgcctggtgccggtcccgccgccgccggtcctcgccgcggggaggcgcggagacgacgacgacgtcgacgaggagaggcagcggtactacctcaacctgggctacgcgatccggacgctcagggaggagctccccgacgtgctctgcaaggaccacagcttcgacatctacaggttccattccaattccatcgcctggccttttcttttacttggttggaggactcgactgagctgctggggtatcacagggcatggctgcttgcttgcacttgcacatatcttgggctaaacagtttgattttgtacactgtgccgcctcctctgttcaaatcaacagcttgggtgtgccaaatgctctgtttgaagactgtgcccttttaatttctgtccccaactccccatcaatccacctttttttttcctaactacatacatctgccactgtacgacagagaagacattgtcttcagagaccctctcaacacattcaagggcctgggaaactacaagaggctcttctgggcgctgcgcctcaccggccgggtcttcttcagggcgtcgtgggttgaagtggtcagcatatggcagcccgccgagaacagcatcctgcttcgctggaccgcccacggcgtccctcgggtgccctggggctggtgggacgccgcccacgcccgcttcgacggcgcgtccgtgtacaagctcgacaggaacggcaagatctacgagcacaaggtgcacaacgtcgctacgaacccgccggccaagtccaaggtcctgccggtccacgagctggtcaggtcactcggttgcccctccactgcccaacccacatgttctgacttctgaagctttcgtcgtcgcagtgatgtgccatcttatatcttattattcgagattaattagcatggataggatgctacgtcgagattaattatctggaagaaggattggcgtgggtttaacatgataccctccattttttttgtttttcagtgtgatttgatagcgcacaaagttacagagcactcctgcaggctgcagttgtatatatgtacagttatagaataagaacatcagttattgattgttaaagcatcagtcagcaaataactagtctgacatgtttctgttcccagtaacatcaggaacatgctgcgatcctctagtgtggtgacctgcaatgccaactaattaacatcttcgtcatattccgggaacaagctaatcttgatgcacctgctgcagcttggagcacttaaagtcgaccacgtgtttagataccttaaaactcgcaatgaaagtaagaatgcctgattatgaagtgatatcaaatttaca

SEQ ID NO: 33366 - DNA, 4693 bp, Zea Mays
ctgcaggcagacaagctaggttttactgcttcattgagcacaaagatccgctgacctcttgctcttggtaaaaatccaacctttcttgtattgttttcttcctgggaaaacctccttgtggtgcataaacttcgtagtacactctgccatttctggagaggaagctgagaactactatccatatctggcacgacccttgtcaagaaccatggctgttcacatgccatgaagctgcttgaactggaggcacctaaatgctgtggattgttcctatgcagatgattggatcagtggtttcaggcttcggggggttcgatcagatgttgtatgaataatagcaggattgcttgagagactatagtttgggtactgtttgcttctgtatttactggtacggtttcctactgatctgcggctgcgcaggaaggcattctcttttttgccgtaccatggatgcaccggatgttcaacagagcatgggatataaggagtccaggggtggtatgcctaagtttttccatgcccttggaccagcactcctgatttcaatgggttacattgatctcgggaagtgggtggcagccgttgaagctggttcttgttttggattcgacctggtgttgctggctctccttttcaatttcactgccattgtatgtcagtaccttgctgcttgcattggcactgtcacagggaagaatcttgcagagatatgccaccaagagtacaaccagccaacatgtatattccttggtgttcaagctggattgtctttgttgacgtcagagctgactatgatttttggcatagcactcggattcaacctcctgtttgaatatgatgatctcatcacagggatatgctttgcaacagtggtacctaatctgctaccatatgctatatcccacctgggaaagaagatggaagggacaataaatgcctgcatagcaggatttgcacttcttagttatgtgcttggcttattggttagccagccacaaattcctctcacgatgaatgtaatattccccaagatcagtggtgagagtgcttactctctgatggcgcttcttggtgcaaacataatggcacacaacttctacattcattcatcagttgtccagggtcagaaaaagtcatctgcagttggtcttggagccttatttcacgaccaccttttttcaatattgttcatttttactggaatctttatggtgaactatgttctaatgaactctgcagcagcggaatctactaatactcttctcattaccttccaagatgttgtagagctaatgaatcagatatttgtaaaccctctggcaccaactatatttttagtggttcttctcttctccagccacatcatctcgctgacatctgctatcggtagccaagtgatttcacaccatttattcgaaatgctatttggcgacagtgggtggatgaacaatctgaaaggatatactggaagccctgtggtgctcccatataccgttttagttttagttgcacttatatctgtggctttttcactgtacctggctgttacaccattgagatctggaagtcatgaagctgaatcccatgaatggtctgtgcattctcagagagaactcttgaatacttctcaagaaagggaagatgttaaggtggacaatgttacatatgaggaagatcaaagatcagatgttgtcccttctcccagggatgtgcctgacagccatccggaactggccttggactatattgatacttctgacactgctgtagaatctgatcacgactctcaacaatctactgcttatgcatccactgctcctgaaacctgctcctccccgtcgtttactcgcgaggagtcaaaatcagttgttgcagtcaactggccggagcctttggagaaggttcctacttctactgtgatggaggaaagcacagtagaaaatgtggtctctaggatcacgactgaaagagatgttttagtagaaacagatgttgtctcgggcaaggataaggaagatatccgtactttggagtctgagaagtcaattgttgatagcaccccatatgtgtctgatgacggtccgccatcccttactttcagcaggggaaagggctcagatgcaggaaatggcagtggtagtctctcaaggttatctggtttgggccgtgcagcaaggagacagctagctgctactcttgatgagttctgggggcatctgtttgattaccatggtaagctcactcaagaagctagcaccaaaaagtttggtatcttgcttgggatagaccttagaacacctagcacatctgtaagaacggataaacaagctgctgaaatacttaagagcccactggtgagagactcaatgcggggggcagcttttttgtcaagctcagtggacatgatgtcccctaagaatgaaacgtcgaatttggaacttgcatatgggcttcagaggggacctggcatgggattgtcaagctggtctcagggtatgcagctaccaaatacacagctgcagagctcaagcaatagcctacttgagcagagtgcaagattaaactcaaattttagttcatcttattcagacaacaatcagttctaccaacctgcaacaattcatggataccagctcacatcttacctgaaacagatgaatgccagcccaagcctttactctagcatgccgctggacccacaacggcttccaaaatcatctgtgtctgctgtgccaaactatgctgattccatgatgcatgctcgtaatcataacctgcttgcttcactgggtggtactactacacagcttcctgcaacatcccgcgtaggctcaatgatgcctgaaagatcgtattatgatccttccagcgttgatgggaatgaaaacgctggttcacctgcttactcaaaaaagtaccacagctcacctgatatgtctggaataatcgctgcaagtagagctgcactcttgaatgaagcaaagttgggtgctgccattggaccacagtcatacctcagcaggctggcggcagaaagatctcaatatgcaagctcaacagccaggcccgcggctccattagcatttgacgagctttcacctcctaagctccagagtgatatcttctcggcgcagtcaagcatgagaccaagtgctagatccctttgggctaagcaaccatttgagcaattgttcggcatgtcaagtgcagagctcagtaaaggtgacttcaatcttccaggcagatcaggtggcgtggccaaggatgatttctcttataaggaatctgagacgaagcttcttcagtccctcaggctctgcatcatgaagctccttaagctagagggatcagggtggctgttcaagcaaaatggtggttgtgatgaagatctaatcgaccgagtcgctgcagccgagaagctattgatgcaagggactgccgagaatcaactgctgcttcatggtggtgatctccagcaacattcttccgaccaggccggcatccagtacatgcgcacgcttcccaactgcggggaggactgtgtttggcgcgcgtcactcgtcgttagtttcggtgtctggtgtgtccgccgagtgctggacatgtctctggtggaaagcaggccagaactttggggcaagtatacctatgtccttaaccgtcttcaggggatcttggaccctgcgttctccaagcctcggggtgctctgacaatatgcacctgccttcagaaagacaccagagtgcgcaatagcccaccccacagtgggctaacagccatgggcccggtccccacaccgatccggggcgccttcacgaccgcaggcgtggttctggagatgatcaaggacgtggaggctgcggtctcaggccgcaagggcaggagcggcacggcggcgggcgacgtcgccttccccaaggggaaggagaacctggcctccgtgctgaagcggtacaagcggcggctcgccagcaagggccagtagcgcgcgggtgtcagacaggcaggcgatcgcaagcaatgttaggaggagcctgactattgttctccaggggggctgccactggcgccggcctccctgagccctggattttttcgttgcacgacgttcctagggaccggtggttgcccgatggtcgtcttggtcccttccagcaggttttttttttccttccctctttctgttggtttctttttgttggctttgtgatgttttgtaaggggcaactagggtatgtgctcagaaggactcaagatgtacacgcgaagatgtactagtctgctgatgcagcgttgtaaagtccacactctgcaggttaaccctttttggggccgtcaagtgttagtgcgtgccctatgtatgttaatcacccctgcagagaggttgcgaatactgaactactcacagacctgcacctgtcgagatcgtttgtaatatccgacgtcttgttcagaattgttctcactcttttttgcccgttgtgtaatttaccctgaagggacttcaagtacgtgcttcggcaagcacggtcgtgaaagaaaaaaaactgttagcatcagtgagctgcctgttgagcagtaaaagagaatacaatgtgagctctcaactcaaaagcgagatgtgtcacgcgcgtatctcaagaagcattgggccaaagctttttatgccaggcaagagagatgcatcca

SEQ ID NO: 33367 - DNA, 5013 bp, Zea Mays
cgaaagagaggaaagctacgcctgagtcggggaacgcctacgaagcagacaagctaggttttactgcttcattgagcacaaagatccgctgacctcttgctcttggtaaaaatccaacctttcttgtattgttttcttcctgggaaaacctccttgtggtgcataaacttcgtagtacactctgccatttctggagaggaagctgagaactactatccatatctggcacgacccttgtcaagaaccatggctgttcacatgccatgaagctgcttgaactggaggcacctaaatgctgtggattgttcctatgcagatgattggatcagtggtttcaggcttcggggggttcgatcagatgttgtatgaataatagcaggattgcttgagagactatagtttgggtactgtttgcttctgtatttactggtacggtttcctactgatctgcggctgcgcaggaaggcattctcttttttgccgtaccatggatgcaccggatgttcaacagagcatgggatataaggagtccaggggtggtatgcctaagtttttccatgcccttggaccagcactcctgatttcaatgggttacattgatctcgggaagtgggtggcagccgttgaagctggttcttgttttggattcgacctggtgttgctggctctccttttcaatttcactgccattgtatgtcagtaccttgctgcttgcattggcactgtcacagggaagaatcttgcagagatatgccaccaagagtacaaccagccaacatgtatattccttggtgttcaagctggattgtctttgttgacgtcagagctgactatgatttttggcatagcactcggattcaacctcctgtttgaatatgatgatctcatcacagggatatgctttgcaacagtggtacctaatctgctaccatatgctatatcccacctgggaaagaagatggaagggacaataaatgcctgcatagcaggatttgcacttcttagttatgtgcttggcttattggttagccagccacaaattcctctcacgatgaatgtaatattccccaagatcagtggtgagagtgcttactctctgatggcgcttcttggtgcaaacataatggcacacaacttctacattcattcatcagttgtccagggtcagaaaaagtcatctgcagttggtcttggagccttatttcacgaccaccttttttcaatattgttcatttttactggaatctttatggtgaactatgttctaatgaactctgcagcagcggaatctactaatactcttctcattaccttccaagatgttgtagagctaatgaatcagatatttgtaaaccctctggcaccaactatatttttagtggttcttctcttctccagccacatcatctcgctgacatctgctatcggtagccaagtgatttcacaccatttattcggtataaaccttcctctttctggacatcgtctcctactgaaggtttttgccatagttcctactctgtactgggcgaaagttgcaggagctgaagggatataccaattattaattatatgccagattattcaagccatgcttcttccatcttcagtcgtcccactttttcgtgttgcttcatcaagatcaataatgggagcccatagagtgtctttgcatctggagatactggtttttcttgcatttctccttatgctattttcaaatatcatatttgtggcagaaatgctatttggcgacagtgggtggatgaacaatctgaaaggatatactggaagccctgtggtgctcccatataccgttttagttttagttgcacttatatctgtggctttttcactgtacctggctgttacaccattgagatctggaagtcatgaagctgaatcccatgaatggtctgtgcattctcagagagaactcttgaatacttctcaagaaagggaagatgttaaggtggacaatgttacatatgaggaagatcaaagatcagatgttgtcccttctcccagggatgtgcctgacagccatccggaactggccttggactatattgatacttctgacactgctgtagaatctgatcacgactctcaacaatctactgcttatgcatccactgctcctgaaacctgctcctccccgtcgtttactcgcgaggagtcaaaatcagttgttgcagtcaactggccggagcctttggagaaggttcctacttctactgtgatggaggaaagcacagtagaaaatgtggtctctaggatcacgactgaaagagatgttttagtagaaacagatgttgtctcgggcaaggataaggaagatatccgtactttggagtctgagaagtcaattgttgatagcaccccatatgtgtctgatgacggtccgccatcccttactttcagcaggggaaagggctcagatgcaggaaatggcagtggtagtctctcaaggttatctggtttgggccgtgcagcaaggagacagctagctgctactcttgatgagttctgggggcatctgtttgattaccatggtaagctcactcaagaagctagcaccaaaaagtttggtatcttgcttgggatagaccttagaacacctagcacatctgtaagaacggataaacaagctgctgaaatacttaagagcccactggtgagagactcaatgcggggggcagcttttttgtcaagctcagtggacatgatgtcccctaagaatgaaacgtcgaatttggaacttgcatatgggcttcagaggggacctggcatgggattgtcaagctggtctcagggtatgcagctaccaaatacacagctgcagagctcaagcaatagcctacttgagcagagtgcaagattaaactcaaattttagttcatcttattcagacaacaatcagttctaccaacctgcaacaattcatggataccagctcacatcttacctgaaacagatgaatgccagcccaagcctttactctagcatgccgctggacccacaacggcttccaaaatcatctgtgtctgctgtgccaaactatgctgattccatgatgcatgctcgtaatcataacctgcttgcttcactgggtggtactactacacagcttcctgcaacatcccgcgtaggctcaatgatgcctgaaagatcgtattatgatccttccagcgttgatgggaatgaaaacgctggttcacctgcttactcaaaaaagtaccacagctcacctgatatgtctggaataatcgctgcaagtagagctgcactcttgaatgaagcaaagttgggtgctgccattggaccacagtcatacctcagcaggctggcggcagaaagatctcaatatgcaagctcaacagccaggcccgcggctccattagcatttgacgagctttcacctcctaagctccagagtgatatcttctcggcgcagtcaagcatgagaccaagtgctagatccctttgggctaagcaaccatttgagcaattgttcggcatgtcaagtgcagagctcagtaaaggtgacttcaatcttccaggcagatcaggtggcgtggccaaggatgatttctcttataaggaatctgagacgaagcttcttcagtccctcaggctctgcatcatgaagctccttaagctagagggatcagggtggctgttcaagcaaaatggtggttgtgatgaagatctaatcgaccgagtcgctgcagccgagaagctattgatgcaagggactgccgagaatcaactgctgcttcatggtggtgatctccagcaacattcttccgaccaggccggcatccagtacatgcgcacgcttcccaactgcggggaggactgtgtttggcgcgcgtcactcgtcgttagtttcggtgtctggtgtgtccgccgagtgctggacatgtctctggtggaaagcaggccagaactttggggcaagtatacctatgtccttaaccgtcttcaggggatcttggaccctgcgttctccaagcctcggggtgctctgacaatatgcacctgccttcagaaagacaccagagtgcgcaatagcccaccccacagtgggctaacagccatgggcccggtccccacaccgatccggggcgccttcacgaccgcaggcgtggttctggagatgatcaaggacgtggaggctgcggtctcaggccgcaagggcaggagcggcacggcggcgggcgacgtcgccttccccaaggggaaggagaacctggcctccgtgctgaagcggtacaagcggcggctcgccagcaagggccagtagcgcgcgggtgtcagacaggcaggcgatcgcaagcaatgttaggaggagcctgactattgttctccaggggggctgccactggcgccggcctccctgagccctggattttttcgttgcacgacgttcctagggaccggtggttgcccgatggtcgtcttggtcccttccagcaggttttttttttccttccctctttctgttggtttctttttgttggctttgtgatgttttgtaaggggcaactagggtatgtgctcagaaggactcaagatgtacacgcgaagatgtactagtctgctgatgcagcgttgtaaagtccacactctgcaggttaaccctttttggggccgtcaagtgttagtgcgtgccctatgtatgttaatcacccctgcagagaggttgcgaatactgaactactcacagacctgcacctgtcgagatcgtttgtaatatccgacgtcttgttcagaattgttctcactcttttttgcccgttgtgtaatttaccctgaagggacttcaagtacgtgcttcggcaagcacggtcgtgaaagaaaaaaaactgttagcatcagtgagctgcctgttgagcagtaaaagagaatacaatgtgagctctcaactcaaaagcgagatgtgtcacgcgcgtatctcaagaagcattgggccaaagctttttatgccaggcaagagagatgcatcca

SEQ ID NO: 33368 - DNA, 5581 bp, Zea Mays
cagttcccgccgccgcgtcgaggtagctgtcacccaaattgagctttccgtcgctgctggatgtgttggaatcggaagcttcgggcgcatagcttgagctcgctcaagtgtatcgagcaagcaaaccaagcgttgggggtcttgctttgcgcctttgccgcgctagcttagcctatctatccgtgctaggaatccccctccctttcggtgtgatgtttttgacttgccactgcctggtgttgctggggctgcttttctcttctcctttggggctctgaatgaagactgaagaaatcgaaagagaggaaagctacgcctgagtcggggaacgcctacgaagcagacaagctaggttttactgcttcattgagcacaaagatccgctgacctcttgctcttgatgattggatcagtggtttcaggcttcggggggttcgatcagatgttgtatgaataatagcaggattgcttgagagactatagtttgggtactgtttgcttctgtatttactggtacggtttcctactgatctgcggctgcgcaggaaggcattctcttttttgccgtaccatggatgcaccggatgttcaacagagcatgggatataaggagtccaggggtggtatgcctaagtttttccatgcccttggaccagcactcctgatttcaatgggttacattgatctcgggaagtgggtggcagccgttgaagctggttcttgttttggattcgacctggtgttgctggctctccttttcaatttcactgccattgtatgtcagtaccttgctgcttgcattggcactgtcacagggaagaatcttgcagaggtatcggtttaccgatgttgttccttggttttgctggccttctattgagatttagttcagtaaatctttgtttccatttcacaacgctatatgatggcttcatattgagctggacttgaaggaacttagaagagcagggagtagggaaactacatgcgagatattcaatttatgcgaattgttgataaacaaaatggatcaattcacttgccttgttaaataattcttttccatctgtagttcaattatactccctctgttccacaatagaagtcgttttagactttcaacaaattcattcaataattgatgtatatgttatgtaatgtgtctagattcgttgccattcatttgaatatagacataaaaagaagacctaaaacgactactaatttggtacagagggagtagtactgttggatgtagaagggcttctttttggaggaaaatatatcttttatctcatcttacttgttcttgatattcctttcaagttgctaactttttcatgccttcacatgaaacaaagatatgccaccaagagtacaaccagccaacatgtatattccttggtgttcaagctggattgtctttgttgacgtcagagctgactatgatttttggcatagcactcggattcaacctcctgtttgaatatgatgatctcatcacagggatatgctttgcaacagtgatggaagggacaataaatgcctgcatagcaggatttgcacttcttagttatgtgcttggcttattggttagccagccacaaattcctctcacgatgaatgtaatattccccaagatcagtggtgagagtgcttactctctgatggcgcttcttggtgcaaacataatggcacacaacttctacattcattcatcagttgtccagggtcagaaaaagtcatctgcagttggtcttggagccttatttcacgaccaccttttttcaatattgttcatttttactggaatctttatggtgaactatgttctaatgaactctgcagcagcggaatctactaatactcttctcattaccttccaagatgttgtagagctaatgaatcagatatttgtaaaccctctggcaccaactatatttttagtggttcttctcttctccagccacatcatctcgctgacatctgctatcggtagccaagtgatttcacaccatttattcggtataaaccttcctctttctggacatcgtctcctactgaaggtttttgccatagttcctactctgtactgggcgaaagttgcaggagctgaagggatataccaattattaattatatgccagattattcaagccatgcttcttccatcttcagtcgtcccactttttcgtgttgcttcatcaagatcaataatgggagcccatagagtgtctttgcatctggagatactggtttttcttgcatttctccttatgctattttcaaatatcatatttgtggcagaaatgctatttggcgacagtgggtggatgaacaatctgaaaggatatactggaagccctgtggtgctcccatataccgttttagttttagttgcacttatatctgtggctttttcactgtacctggctgttacaccattgagatctggaagtcatgaagctgaatcccatgaatggtctgtgcattctcagagagaactcttgaatacttctcaagaaagggaagatgttaaggtggacaatgttacatatgaggaagatcaaagatcagatgttgtcccttctcccagggatgtgcctgacagccatccggaactggccttggactatattgatacttctgacactgctgtagaatctgatcacgactctcaacaatctactgcttatgcatccactgctcctgaaacctgctcctccccgtcgtttactcgcgaggagtcaaaatcagttgttgcagtcaactggccggagcctttggagaaggttcctacttctactgtgatggaggaaagcacagtagaaaatgtggtctctaggatcacgactgaaagagatgttttagtagaaacagatgttgtctcgggcaaggataaggaagatatccgtactttggagtctgagaagtcaattgttgatagcaccccatatgtgtctgatgacggtccgccatcccttactttcagcaggggaaagggctcagatgcaggaaatggcagtggtagtctctcaaggttatctggtttgggccgtgcagcaaggagacagctagctgctactcttgatgagttctgggggcatctgtttgattaccatggtaagctcactcaagaagctagcaccaaaaagtttggtatcttgcttgggatagaccttagaacacctagcacatctgtaagaacggataaacaagctgctgaaatacttaagagcccactggtgagagactcaatgcggggggcagcttttttgtcaagctcagtggacatgatgtcccctaagaatgaaacgtcgaatttggaacttgcatatgggcttcagaggggacctggcatgggattgtcaagctggtctcagggtatgcagctaccaaatacacagctgcagagctcaagcaatagcctacttgagcagagtgcaagattaaactcaaattttagttcatcttattcagacaacaatcagttctaccaacctgcaacaattcatggataccagctcacatcttacctgaaacagatgaatgccagcccaagcctttactctagcatgccgctggacccacaacggcttccaaaatcatctgtgtctgctgtgccaaactatgctgattccatgatgcatgctcgtaatcataacctgcttgcttcactgggtggtactactacacagcttcctgcaacatcccgcgtaggctcaatgatgcctgaaagatcgtattatgatccttccagcgttgatgggaatgaaaacgctggttcacctgcttactcaaaaaagtaccacagctcacctgatatgtctggaataatcgctgcaagtagagctgcactcttgaatgaagcaaagttgggtgctgccattggaccacagtcatacctcagcaggctggcggcagaaagatctcaatatgcaagctcaacagccaggcccgcggctccattagcatttgacgagctttcacctcctaagctccagagtgatatcttctcggcgcagtcaagcatgagaccaagtgctagatccctttgggctaagcaaccatttgagcaattgttcggcatgtcaagtgcagagctcagtaaaggtgacttcaatcttccaggcagatcaggtggcgtggccaaggatgatttctcttataaggaatctgagacgaagcttcttcagtccctcaggctctgcatcatgaagctccttaagctagagggatcagggtggctgttcaagcaaaatggtggttgtgatgaagatctaatcgaccgagtcgctgcagccgagaagctattgatgcaagggactgccgagaatcaactgctgcttcatggtggtgatctccagcaacattcttccgaccaggccggcatccagtacatgcgcacgcttcccaactgcggggaggactgtgtttggcgcgcgtcactcgtcgttagtttcggtgtctggtgtgtccgccgagtgctggacatgtctctggtggaaagcaggccagaactttggggcaagtatacctatgtccttaaccgtcttcaggggatcttggaccctgcgttctccaagcctcggggtgctctgacaatatgcacctgccttcagaaagacaccagagtgcgcaatagcccaccccacagtgggctaacagccatgggcccggtccccacaccgatccggggcgccttcacgaccgcaggcgtggttctggagatgatcaaggacgtggaggctgcggtctcaggccgcaagggcaggagcggcacggcggcgggcgacgtcgccttccccaaggggaaggagaacctggcctccgtgctgaagcggtacaagcggcggctcgccagcaagggccagtagcgcgcgggtgtcagacaggcaggcgatcgcaagcaatgttaggaggagcctgactattgttctccaggggggctgccactggcgccggcctccctgagccctggattttttcgttgcacgacgttcctagggaccggtggttgcccgatggtcgtcttggtcccttccagcaggttttttttttccttccctctttctgttggtttctttttgttggctttgtgatgttttgtaaggggcaactagggtatgtgctcagaaggactcaagatgtacacgcgaagatgtactagtctgctgatgcagcgttgtaaagtccacactctgcaggttaaccctttttggggccgtcaagtgttagtgcgtgccctatgtatgttaatcacccctgcagagaggttgcgaatactgaactactcacagacctgcacctgtcgagatcgtttgtaatatccgacgtcttgttcagaattgttctcactcttttttgcccgttgtgtaatttaccctgaagggacttcaagtacgtgcttcggcaagcacggtcgtgaaagaaaaaaaactgttagcatcagtgagctgcctgttgagcagtaaaagagaatacaatgtgagctctcaactcaaaagcgagatgtgtcacgcgcgtatctcaagaagcattgggccaaagctttttatgccaggcaagagagatgcatcca

SEQ ID NO: 33369 - DNA, 4665 bp, Zea Mays
cagttcccgccgccgcgtcgaggtagctgtcacccaaattgagctttccgtcgctgctggatgtgttggaatcggaagcttcgggcgcatagcttgagctcgctcaagtgtatcgagcaagcaaaccaagcgttgggggtcttgctttgcgcctttgccgcgctagcttagcctatctatccgtgctaggaatccccctccctttcggtgtgatgtttttgacttgccactgcctggtgttgctggggctgcttttctcttctcctttggggctctgaatgaagactgaagaaatcgaaagagaggaaagctacgcctgagtcggggaacgcctacgaagcagacaagctaggttttactgcttcattgagcacaaagatccgctgacctcttgctcttgatatgccaccaagagtacaaccagccaacatgtatattccttggtgttcaagctggattgtctttgttgacgtcagagctgactatgatttttggcatagcactcggattcaacctcctgtttgaatatgatgatctcatcacagggatatgctttgcaacagtggtacctaatctgctaccatatgctatatcccacctgggaaagaagatggaagggacaataaatgcctgcatagcaggatttgcacttcttagttatgtgcttggcttattggttagccagccacaaattcctctcacgatgaatgtaatattccccaagatcagtggtgagagtgcttactctctgatggcgcttcttggtgcaaacataatggcacacaacttctacattcattcatcagttgtccagggtcagaaaaagtcatctgcagttggtcttggagccttatttcacgaccaccttttttcaatattgttcatttttactggaatctttatggtgaactatgttctaatgaactctgcagcagcggaatctactaatactcttctcattaccttccaagatgttgtagagctaatgaatcagatatttgtaaaccctctggcaccaactatatttttagtggttcttctcttctccagccacatcatctcgctgacatctgctatcggtagccaagtgatttcacaccatttattcggtataaaccttcctctttctggacatcgtctcctactgaaggtttttgccatagttcctactctgtactgggcgaaagttgcaggagctgaagggatataccaattattaattatatgccagattattcaagccatgcttcttccatcttcagtcgtcccactttttcgtgttgcttcatcaagatcaataatgggagcccatagagtgtctttgcatctggagatactggtttttcttgcatttctccttatgctattttcaaatatcatatttgtggcagaaatgctatttggcgacagtgggtggatgaacaatctgaaaggatatactggaagccctgtggtgctcccatataccgttttagttttagttgcacttatatctgtggctttttcactgtacctggctgttacaccattgagatctggaagtcatgaagctgaatcccatgaatggtctgtgcattctcagagagaactcttgaatacttctcaagaaagggaagatgttaaggtggacaatgttacatatgaggaagatcaaagatcagatgttgtcccttctcccagggatgtgcctgacagccatccggaactggccttggactatattgatacttctgacactgctgtagaatctgatcacgactctcaacaatctactgcttatgcatccactgctcctgaaacctgctcctccccgtcgtttactcgcgaggagtcaaaatcagttgttgcagtcaactggccggagcctttggagaaggttcctacttctactgtgatggaggaaagcacagtagaaaatgtggtctctaggatcacgactgaaagagatgttttagtagaaacagatgttgtctcgggcaaggataaggaagatatccgtactttggagtctgagaagtcaattgttgatagcaccccatatgtgtctgatgacggtccgccatcccttactttcagcaggggaaagggctcagatgcaggaaatggcagtggtagtctctcaaggttatctggtttgggccgtgcagcaaggagacagctagctgctactcttgatgagttctgggggcatctgtttgattaccatggtaagctcactcaagaagctagcaccaaaaagtttggtatcttgcttgggatagaccttagaacacctagcacatctgtaagaacggataaacaagctgctgaaatacttaagagcccactggtgagagactcaatgcggggggcagcttttttgtcaagctcagtggacatgatgtcccctaagaatgaaacgtcgaatttggaacttgcatatgggcttcagaggggacctggcatgggattgtcaagctggtctcagggtatgcagctaccaaatacacagctgcagagctcaagcaatagcctacttgagcagagtgcaagattaaactcaaattttagttcatcttattcagacaacaatcagttctaccaacctgcaacaattcatggataccagctcacatcttacctgaaacagatgaatgccagcccaagcctttactctagcatgccgctggacccacaacggcttccaaaatcatctgtgtctgctgtgccaaactatgctgattccatgatgcatgctcgtaatcataacctgcttgcttcactgggtggtactactacacagcttcctgcaacatcccgcgtaggctcaatgatgcctgaaagatcgtattatgatccttccagcgttgatgggaatgaaaacgctggttcacctgcttactcaaaaaagtaccacagctcacctgatatgtctggaataatcgctgcaagtagagctgcactcttgaatgaagcaaagttgggtgctgccattggaccacagtcatacctcagcaggctggcggcagaaagatctcaatatgcaagctcaacagccaggcccgcggctccattagcatttgacgagctttcacctcctaagctccagagtgatatcttctcggcgcagtcaagcatgagaccaagtgctagatccctttgggctaagcaaccatttgagcaattgttcggcatgtcaagtgcagagctcagtaaaggtgacttcaatcttccaggcagatcaggtggcgtggccaaggatgatttctcttataaggaatctgagacgaagcttcttcagtccctcaggctctgcatcatgaagctccttaagctagagggatcagggtggctgttcaagcaaaatggtggttgtgatgaagatctaatcgaccgagtcgctgcagccgagaagctattgatgcaagggactgccgagaatcaactgctgcttcatggtggtgatctccagcaacattcttccgaccaggccggcatccagtacatgcgcacgcttcccaactgcggggaggactgtgtttggcgcgcgtcactcgtcgttagtttcggtgtctggtgtgtccgccgagtgctggacatgtctctggtggaaagcaggccagaactttggggcaagtatacctatgtccttaaccgtcttcaggggatcttggaccctgcgttctccaagcctcggggtgctctgacaatatgcacctgccttcagaaagacaccagagtgcgcaatagcccaccccacagtgggctaacagccatgggcccggtccccacaccgatccggggcgccttcacgaccgcaggcgtggttctggagatgatcaaggacgtggaggctgcggtctcaggccgcaagggcaggagcggcacggcggcgggcgacgtcgccttccccaaggggaaggagaacctggcctccgtgctgaagcggtacaagcggcggctcgccagcaagggccagtagcgcgcgggtgtcagacaggcaggcgatcgcaagcaatgttaggaggagcctgactattgttctccaggggggctgccactggcgccggcctccctgagccctggattttttcgttgcacgacgttcctagggaccggtggttgcccgatggtcgtcttggtcccttccagcaggttttttttttccttccctctttctgttggtttctttttgttggctttgtgatgttttgtaaggggcaactagggtatgtgctcagaaggactcaagatgtacacgcgaagatgtactagtctgctgatgcagcgttgtaaagtccacactctgcaggttaaccctttttggggccgtcaagtgttagtgcgtgccctatgtatgttaatcacccctgcagagaggttgcgaatactgaactactcacagacctgcacctgtcgagatcgtttgtaatatccgacgtcttgttcagaattgttctcactcttttttgcccgttgtgtaatttaccctgaagggacttcaagtacgtgcttcggcaagcacggtcgtgaaagaaaaaaaactgttagcatcagtgagctgcctgttgagcagtaaaagagaatacaatgtgagctctcaactcaaaagcgagatgtgtcacgcgcgtatctcaagaagcattgggccaaagctttttatgccaggcaagagagatgcatcca

SEQ ID NO: 33370 - DNA, 5649 bp, Zea Mays
gtccgacgcttctcacctcgagagcccgtcgctgttgcctcggactcgagggagctggcggcgcaaacgccgtgcggccaaaatcgagatccccaccatccgaatcgaggtcctctctaccagaatcagttcccgccgccgcgtcgaggtagctgtcacccaaattgagctttccgtcgctgctggatgtgttggaatcggaagcttcgggcgcatagcttgagctcgctcaagtgtatcgagcaagcaaaccaagcgttgggggtcttgctttgcgcctttgccgcgctagcttagcctatctatccgtgctaggaatccccctccctttcggtgtgatgtttttgacttgccactgcctggtgttgctggggctgcttttctcttctcctttggggctctgaatgaagactgaagaaatcgaaagagaggaaagctacgcctgagtcggggaacgcctacgaagcagacaagctaggttttactgcttcattgagcacaaagatccgctgacctcttgctcttgatgattggatcagtggtttcaggcttcggggggttcgatcagatgttgtatgaataatagcaggattgcttgagagactatagtttgggtactgtttgcttctgtatttactggtacggtttcctactgatctgcggctgcgcaggaaggcattctcttttttgccgtaccatggatgcaccggatgttcaacagagcatgggatataaggagtccaggggtggtatgcctaagtttttccatgcccttggaccagcactcctgatttcaatgggttacattgatctcgggaagtgggtggcagccgttgaagctggttcttgttttggattcgacctggtgttgctggctctccttttcaatttcactgccattgtatgtcagtaccttgctgcttgcattggcactgtcacagggaagaatcttgcagaggtatcggtttaccgatgttgttccttggttttgctggccttctattgagatttagttcagtaaatctttgtttccatttcacaacgctatatgatggcttcatattgagctggacttgaaggaacttagaagagcagggagtagggaaactacatgcgagatattcaatttatgcgaattgttgataaacaaaatggatcaattcacttgccttgttaaataattcttttccatctgtagttcaattatactccctctgttccacaatagaagtcgttttagactttcaacaaattcattcaataattgatgtatatgttatgtaatgtgtctagattcgttgccattcatttgaatatagacataaaaagaagacctaaaacgactactaatttggtacagagggagtagtactgttggatgtagaagggcttctttttggaggaaaatatatcttttatctcatcttacttgttcttgatattcctttcaagttgctaactttttcatgccttcacatgaaacaaagatatgccaccaagagtacaaccagccaacatgtatattccttggtgttcaagctggattgtctttgttgacgtcagagctgactatgggatatgctttgcaacagtgatggaagggacaataaatgcctgcatagcaggatttgcacttcttagttatgtgcttggcttattggttagccagccacaaattcctctcacgatgaatgtaatattccccaagatcagtggtgagagtgcttactctctgatggcgcttcttggtgcaaacataatggcacacaacttctacattcattcatcagttgtccagggtcagaaaaagtcatctgcagttggtcttggagccttatttcacgaccaccttttttcaatattgttcatttttactggaatctttatggtgaactatgttctaatgaactctgcagcagcggaatctactaatactcttctcattaccttccaagatgttgtagagctaatgaatcagatatttgtaaaccctctggcaccaactatatttttagtggttcttctcttctccagccacatcatctcgctgacatctgctatcggtagccaagtgatttcacaccatttattcggtataaaccttcctctttctggacatcgtctcctactgaaggtttttgccatagttcctactctgtactgggcgaaagttgcaggagctgaagggatataccaattattaattatatgccagattattcaagccatgcttcttccatcttcagtcgtcccactttttcgtgttgcttcatcaagatcaataatgggagcccatagagtgtctttgcatctggagatactggtttttcttgcatttctccttatgctattttcaaatatcatatttgtggcagaaatgctatttggcgacagtgggtggatgaacaatctgaaaggatatactggaagccctgtggtgctcccatataccgttttagttttagttgcacttatatctgtggctttttcactgtacctggctgttacaccattgagatctggaagtcatgaagctgaatcccatgaatggtctgtgcattctcagagagaactcttgaatacttctcaagaaagggaagatgttaaggtggacaatgttacatatgaggaagatcaaagatcagatgttgtcccttctcccagggatgtgcctgacagccatccggaactggccttggactatattgatacttctgacactgctgtagaatctgatcacgactctcaacaatctactgcttatgcatccactgctcctgaaacctgctcctccccgtcgtttactcgcgaggagtcaaaatcagttgttgcagtcaactggccggagcctttggagaaggttcctacttctactgtgatggaggaaagcacagtagaaaatgtggtctctaggatcacgactgaaagagatgttttagtagaaacagatgttgtctcgggcaaggataaggaagatatccgtactttggagtctgagaagtcaattgttgatagcaccccatatgtgtctgatgacggtccgccatcccttactttcagcaggggaaagggctcagatgcaggaaatggcagtggtagtctctcaaggttatctggtttgggccgtgcagcaaggagacagctagctgctactcttgatgagttctgggggcatctgtttgattaccatggtaagctcactcaagaagctagcaccaaaaagtttggtatcttgcttgggatagaccttagaacacctagcacatctgtaagaacggataaacaagctgctgaaatacttaagagcccactggtgagagactcaatgcggggggcagcttttttgtcaagctcagtggacatgatgtcccctaagaatgaaacgtcgaatttggaacttgcatatgggcttcagaggggacctggcatgggattgtcaagctggtctcagggtatgcagctaccaaatacacagctgcagagctcaagcaatagcctacttgagcagagtgcaagattaaactcaaattttagttcatcttattcagacaacaatcagttctaccaacctgcaacaattcatggataccagctcacatcttacctgaaacagatgaatgccagcccaagcctttactctagcatgccgctggacccacaacggcttccaaaatcatctgtgtctgctgtgccaaactatgctgattccatgatgcatgctcgtaatcataacctgcttgcttcactgggtggtactactacacagcttcctgcaacatcccgcgtaggctcaatgatgcctgaaagatcgtattatgatccttccagcgttgatgggaatgaaaacgctggttcacctgcttactcaaaaaagtaccacagctcacctgatatgtctggaataatcgctgcaagtagagctgcactcttgaatgaagcaaagttgggtgctgccattggaccacagtcatacctcagcaggctggcggcagaaagatctcaatatgcaagctcaacagccaggcccgcggctccattagcatttgacgagctttcacctcctaagctccagagtgatatcttctcggcgcagtcaagcatgagaccaagtgctagatccctttgggctaagcaaccatttgagcaattgttcggcatgtcaagtgcagagctcagtaaaggtgacttcaatcttccaggcagatcaggtggcgtggccaaggatgatttctcttataaggaatctgagacgaagcttcttcagtccctcaggctctgcatcatgaagctccttaagctagagggatcagggtggctgttcaagcaaaatggtggttgtgatgaagatctaatcgaccgagtcgctgcagccgagaagctattgatgcaagggactgccgagaatcaactgctgcttcatggtggtgatctccagcaacattcttccgaccaggccggcatccagtacatgcgcacgcttcccaactgcggggaggactgtgtttggcgcgcgtcactcgtcgttagtttcggtgtctggtgtgtccgccgagtgctggacatgtctctggtggaaagcaggccagaactttggggcaagtatacctatgtccttaaccgtcttcaggggatcttggaccctgcgttctccaagcctcggggtgctctgacaatatgcacctgccttcagaaagacaccagagtgcgcaatagcccaccccacagtgggctaacagccatgggcccggtccccacaccgatccggggcgccttcacgaccgcaggcgtggttctggagatgatcaaggacgtggaggctgcggtctcaggccgcaagggcaggagcggcacggcggcgggcgacgtcgccttccccaaggggaaggagaacctggcctccgtgctgaagcggtacaagcggcggctcgccagcaagggccagtagcgcgcgggtgtcagacaggcaggcgatcgcaagcaatgttaggaggagcctgactattgttctccaggggggctgccactggcgccggcctccctgagccctggattttttcgttgcacgacgttcctagggaccggtggttgcccgatggtcgtcttggtcccttccagcaggttttttttttccttccctctttctgttggtttctttttgttggctttgtgatgttttgtaaggggcaactagggtatgtgctcagaaggactcaagatgtacacgcgaagatgtactagtctgctgatgcagcgttgtaaagtccacactctgcaggttaaccctttttggggccgtcaagtgttagtgcgtgccctatgtatgttaatcacccctgcagagaggttgcgaatactgaactactcacagacctgcacctgtcgagatcgtttgtaatatccgacgtcttgttcagaattgttctcactcttttttgcccgttgtgtaatttaccctgaagggacttcaagtacgtgcttcggcaagcacggtcgtgaaagaaaaaaaactgttagcatcagtgagctgcctgttgagcagtaaaagagaatacaatgtgagctctcaactcaaaagcgagatgtgtcacgcgcgtatctcaagaagcattgggccaaagctttttatgccaggcaagagagatgcatcca

SEQ ID NO: 33371 - DNA, 4286 bp, Zea Mays
ataaggagaggccccaggccagagaaaaaagcatcgaatttccccccgttaattggcctgagccctcagccgtctaccagcagcagctagaggcagacaagctaggttttactgcttcattgagcacaaagatccgctgacctcttgctcttgatttttggcatagcactcggattcaacctcctgtttgaatatgatgatctcatcacagggatatgctttgcaacagtgatggaagggacaataaatgcctgcatagcaggatttgcacttcttagttatgtgcttggcttattggttagccagccacaaattcctctcacgatgaatgtaatattccccaagatcagtggtgagagtgcttactctctgatggcgcttcttggtgcaaacataatggcacacaacttctacattcattcatcagttgtccagggtcagaaaaagtcatctgcagttggtcttggagccttatttcacgaccaccttttttcaatattgttcatttttactggaatctttatggtgaactatgttctaatgaactctgcagcagcggaatctactaatactcttctcattaccttccaagatgttgtagagctaatgaatcagatatttgtaaaccctctggcaccaactatatttttagtggttcttctcttctccagccacatcatctcgctgacatctgctatcggtagccaagtgatttcacaccatttattcggtataaaccttcctctttctggacatcgtctcctactgaaggtttttgccatagttcctactctgtactgggcgaaagttgcaggagctgaagggatataccaattattaattatatgccagattattcaagccatgcttcttccatcttcagtcgtcccactttttcgtgttgcttcatcaagatcaataatgggagcccatagagtgtctttgcatctggagatactggtttttcttgcatttctccttatgctattttcaaatatcatatttgtggcagaaatgctatttggcgacagtgggtggatgaacaatctgaaaggatatactggaagccctgtggtgctcccatataccgttttagttttagttgcacttatatctgtggctttttcactgtacctggctgttacaccattgagatctggaagtcatgaagctgaatcccatgaatggtctgtgcattctcagagagaactcttgaatacttctcaagaaagggaagatgttaaggtggacaatgttacatatgaggaagatcaaagatcagatgttgtcccttctcccagggatgtgcctgacagccatccggaactggccttggactatattgatacttctgacactgctgtagaatctgatcacgactctcaacaatctactgcttatgcatccactgctcctgaaacctgctcctccccgtcgtttactcgcgaggagtcaaaatcagttgttgcagtcaactggccggagcctttggagaaggttcctacttctactgtgatggaggaaagcacagtagaaaatgtggtctctaggatcacgactgaaagagatgttttagtagaaacagatgttgtctcgggcaaggataaggaagatatccgtactttggagtctgagaagtcaattgttgatagcaccccatatgtgtctgatgacggtccgccatcccttactttcagcaggggaaagggctcagatgcaggaaatggcagtggtagtctctcaaggttatctggtttgggccgtgcagcaaggagacagctagctgctactcttgatgagttctgggggcatctgtttgattaccatggtaagctcactcaagaagctagcaccaaaaagtttggtatcttgcttgggatagaccttagaacacctagcacatctgtaagaacggataaacaagctgctgaaatacttaagagcccactggtgagagactcaatgcggggggcagcttttttgtcaagctcagtggacatgatgtcccctaagaatgaaacgtcgaatttggaacttgcatatgggcttcagaggggacctggcatgggattgtcaagctggtctcagggtatgcagctaccaaatacacagctgcagagctcaagcaatagcctacttgagcagagtgcaagattaaactcaaattttagttcatcttattcagacaacaatcagttctaccaacctgcaacaattcatggataccagctcacatcttacctgaaacagatgaatgccagcccaagcctttactctagcatgccgctggacccacaacggcttccaaaatcatctgtgtctgctgtgccaaactatgctgattccatgatgcatgctcgtaatcataacctgcttgcttcactgggtggtactactacacagcttcctgcaacatcccgcgtaggctcaatgatgcctgaaagatcgtattatgatccttccagcgttgatgggaatgaaaacgctggttcacctgcttactcaaaaaagtaccacagctcacctgatatgtctggaataatcgctgcaagtagagctgcactcttgaatgaagcaaagttgggtgctgccattggaccacagtcatacctcagcaggctggcggcagaaagatctcaatatgcaagctcaacagccaggcccgcggctccattagcatttgacgagctttcacctcctaagctccagagtgatatcttctcggcgcagtcaagcatgagaccaagtgctagatccctttgggctaagcaaccatttgagcaattgttcggcatgtcaagtgcagagctcagtaaaggtgacttcaatcttccaggcagatcaggtggcgtggccaaggatgatttctcttataaggaatctgagacgaagcttcttcagtccctcaggctctgcatcatgaagctccttaagctagagggatcagggtggctgttcaagcaaaatggtggttgtgatgaagatctaatcgaccgagtcgctgcagccgagaagctattgatgcaagggactgccgagaatcaactgctgcttcatggtggtgatctccagcaacattcttccgaccaggccggcatccagtacatgcgcacgcttcccaactgcggggaggactgtgtttggcgcgcgtcactcgtcgttagtttcggtgtctggtgtgtccgccgagtgctggacatgtctctggtggaaagcaggccagaactttggggcaagtatacctatgtccttaaccgtcttcaggggatcttggaccctgcgttctccaagcctcggggtgctctgacaatatgcacctgccttcagaaagacaccagagtgcgcaatagcccaccccacagtgggctaacagccatgggcccggtccccacaccgatccggggcgccttcacgaccgcaggcgtggttctggagatgatcaaggacgtggaggctgcggtctcaggccgcaagggcaggagcggcacggcggcgggcgacgtcgccttccccaaggggaaggagaacctggcctccgtgctgaagcggtacaagcggcggctcgccagcaagggccagtagcgcgcgggtgtcagacaggcaggcgatcgcaagcaatgttaggaggagcctgactattgttctccaggggggctgccactggcgccggcctccctgagccctggattttttcgttgcacgacgttcctagggaccggtggttgcccgatggtcgtcttggtcccttccagcaggttttttttttccttccctctttctgttggtttctttttgttggctttgtgatgttttgtaaggggcaactagggtatgtgctcagaaggactcaagatgtacacgcgaagatgtactagtctgctgatgcagcgttgtaaagtccacactctgcaggttaaccctttttggggccgtcaagtgttagtgcgtgccctatgtatgttaatcacccctgcagagaggttgcgaatactgaactactcacagacctgcacctgtcgagatcgtttgtaatatccgacgtcttgttcagaattgttctcactcttttttgcccgttgtgtaatttaccctgaagggacttcaagtacgtgcttcggcaagcacggtcgtgaaagaaaaaaaactgttagcatcagtgagctgcctgttgagcagtaaaagagaatacaatgtgagctctcaactcaaaagcgagatgtgtcacgcgcgtatctcaagaagcattgggccaaagctttttatgccaggcaagagagatgcatcca

SEQ ID NO: 33372 - DNA, 4347 bp, Zea Mays
cccacttcttcctcagataaggagaggccccaggccagagaaaaaagcatcgaatttccccccgttaattggcctgagccctcagccgtctaccagcagcagctagaggcagacaagctaggttttactgcttcattgagcacaaagatccgctgacctcttgctcttgatttttggcatagcactcggattcaacctcctgtttgaatatgatgatctcatcacagggatatgctttgcaacagtggtacctaatctgctaccatatgctatatcccacctgggaaagaagatggaagggacaataaatgcctgcatagcaggatttgcacttcttagttatgtgcttggcttattggttagccagccacaaattcctctcacgatgaatgtaatattccccaagatcagtggtgagagtgcttactctctgatggcgcttcttggtgcaaacataatggcacacaacttctacattcattcatcagttgtccagggtcagaaaaagtcatctgcagttggtcttggagccttatttcacgaccaccttttttcaatattgttcatttttactggaatctttatggtgaactatgttctaatgaactctgcagcagcggaatctactaatactcttctcattaccttccaagatgttgtagagctaatgaatcagatatttgtaaaccctctggcaccaactatatttttagtggttcttctcttctccagccacatcatctcgctgacatctgctatcggtagccaagtgatttcacaccatttattcggtataaaccttcctctttctggacatcgtctcctactgaaggtttttgccatagttcctactctgtactgggcgaaagttgcaggagctgaagggatataccaattattaattatatgccagattattcaagccatgcttcttccatcttcagtcgtcccactttttcgtgttgcttcatcaagatcaataatgggagcccatagagtgtctttgcatctggagatactggtttttcttgcatttctccttatgctattttcaaatatcatatttgtggcagaaatgctatttggcgacagtgggtggatgaacaatctgaaaggatatactggaagccctgtggtgctcccatataccgttttagttttagttgcacttatatctgtggctttttcactgtacctggctgttacaccattgagatctggaagtcatgaagctgaatcccatgaatggtctgtgcattctcagagagaactcttgaatacttctcaagaaagggaagatgttaaggtggacaatgttacatatgaggaagatcaaagatcagatgttgtcccttctcccagggatgtgcctgacagccatccggaactggccttggactatattgatacttctgacactgctgtagaatctgatcacgactctcaacaatctactgcttatgcatccactgctcctgaaacctgctcctccccgtcgtttactcgcgaggagtcaaaatcagttgttgcagtcaactggccggagcctttggagaaggttcctacttctactgtgatggaggaaagcacagtagaaaatgtggtctctaggatcacgactgaaagagatgttttagtagaaacagatgttgtctcgggcaaggataaggaagatatccgtactttggagtctgagaagtcaattgttgatagcaccccatatgtgtctgatgacggtccgccatcccttactttcagcaggggaaagggctcagatgcaggaaatggcagtggtagtctctcaaggttatctggtttgggccgtgcagcaaggagacagctagctgctactcttgatgagttctgggggcatctgtttgattaccatggtaagctcactcaagaagctagcaccaaaaagtttggtatcttgcttgggatagaccttagaacacctagcacatctgtaagaacggataaacaagctgctgaaatacttaagagcccactggtgagagactcaatgcggggggcagcttttttgtcaagctcagtggacatgatgtcccctaagaatgaaacgtcgaatttggaacttgcatatgggcttcagaggggacctggcatgggattgtcaagctggtctcagggtatgcagctaccaaatacacagctgcagagctcaagcaatagcctacttgagcagagtgcaagattaaactcaaattttagttcatcttattcagacaacaatcagttctaccaacctgcaacaattcatggataccagctcacatcttacctgaaacagatgaatgccagcccaagcctttactctagcatgccgctggacccacaacggcttccaaaatcatctgtgtctgctgtgccaaactatgctgattccatgatgcatgctcgtaatcataacctgcttgcttcactgggtggtactactacacagcttcctgcaacatcccgcgtaggctcaatgatgcctgaaagatcgtattatgatccttccagcgttgatgggaatgaaaacgctggttcacctgcttactcaaaaaagtaccacagctcacctgatatgtctggaataatcgctgcaagtagagctgcactcttgaatgaagcaaagttgggtgctgccattggaccacagtcatacctcagcaggctggcggcagaaagatctcaatatgcaagctcaacagccaggcccgcggctccattagcatttgacgagctttcacctcctaagctccagagtgatatcttctcggcgcagtcaagcatgagaccaagtgctagatccctttgggctaagcaaccatttgagcaattgttcggcatgtcaagtgcagagctcagtaaaggtgacttcaatcttccaggcagatcaggtggcgtggccaaggatgatttctcttataaggaatctgagacgaagcttcttcagtccctcaggctctgcatcatgaagctccttaagctagagggatcagggtggctgttcaagcaaaatggtggttgtgatgaagatctaatcgaccgagtcgctgcagccgagaagctattgatgcaagggactgccgagaatcaactgctgcttcatggtggtgatctccagcaacattcttccgaccaggccggcatccagtacatgcgcacgcttcccaactgcggggaggactgtgtttggcgcgcgtcactcgtcgttagtttcggtgtctggtgtgtccgccgagtgctggacatgtctctggtggaaagcaggccagaactttggggcaagtatacctatgtccttaaccgtcttcaggggatcttggaccctgcgttctccaagcctcggggtgctctgacaatatgcacctgccttcagaaagacaccagagtgcgcaatagcccaccccacagtgggctaacagccatgggcccggtccccacaccgatccggggcgccttcacgaccgcaggcgtggttctggagatgatcaaggacgtggaggctgcggtctcaggccgcaagggcaggagcggcacggcggcgggcgacgtcgccttccccaaggggaaggagaacctggcctccgtgctgaagcggtacaagcggcggctcgccagcaagggccagtagcgcgcgggtgtcagacaggcaggcgatcgcaagcaatgttaggaggagcctgactattgttctccaggggggctgccactggcgccggcctccctgagccctggattttttcgttgcacgacgttcctagggaccggtggttgcccgatggtcgtcttggtcccttccagcaggttttttttttccttccctctttctgttggtttctttttgttggctttgtgatgttttgtaaggggcaactagggtatgtgctcagaaggactcaagatgtacacgcgaagatgtactagtctgctgatgcagcgttgtaaagtccacactctgcaggttaaccctttttggggccgtcaagtgttagtgcgtgccctatgtatgttaatcacccctgcagagaggttgcgaatactgaactactcacagacctgcacctgtcgagatcgtttgtaatatccgacgtcttgttcagaattgttctcactcttttttgcccgttgtgtaatttaccctgaagggacttcaagtacgtgcttcggcaagcacggtcgtgaaagaaaaaaaactgttagcatcagtgagctgcctgttgagcagtaaaagagaatacaatgtgagctctcaactcaaaagcgagatgtgtcacgcgcgtatctcaagaagcattgggccaaagctttttatgccaggcaagagagatgcatcca

SEQ ID NO: 33373 - DNA, 4584 bp, Zea Mays
agccacagcagctcgtccccttccccccacttcttcctcagataaggagaggccccaggccagagaaaaaagcatcgaatttccccccgttaattggcctgagccctcagccgtctaccagcagcagctagaggcagacaagctaggttttactgcttcattgagcacaaagatccgctgacctcttgctcttgatatgccaccaagagtacaaccagccaacatgtatattccttggtgttcaagctggattgtctttgttgacgtcagagctgactatggtacttgcagatttagttggatgtctctcataccttttatgtttaaattgtgaattctcatcctgcaaagcaatgttacatgatgtagttctgacatgctagattctgttggctatatctggaattttcagatttttggcatagcactcggattcaacctcctgtttgaatatgatgatctcatcacagggatatgctttgcaacagtggtacctaatctgctaccatatgctatatcccacctgggaaagaagatggaagggacaataaatgcctgcatagcaggatttgcacttcttagttatgtgcttggcttattggttagccagccacaaattcctctcacgatgaatgtaatattccccaagatcagtggtgagagtgcttactctctgatggcgcttcttggtgcaaacataatggcacacaacttctacattcattcatcagttgtccagaaaaagtcatctgcagttggtcttggagccttatttcacgaccaccttttttcaatattgttcatttttactggaatctttatggtgaactatgttctaatgaactctgcagcagcggaatctactaatactcttctcattaccttccaagatgttgtagagctaatgaatcagatatttgtaaaccctctggcaccaactatatttttagtggttcttctcttctccagccacatcatctcgctgacatctgctatcggtagccaagtgatttcacaccatttattcggtataaaccttcctctttctggacatcgtctcctactgaaggtttttgccatagttcctactctgtactgggcgaaagttgcaggagctgaagggatataccaattattaattatatgccagattattcaagccatgcttcttccatcttcagtcgtcccactttttcgtgttgcttcatcaagatcaataatgggagcccatagagtgtctttgcatctggagatactggtttttcttgcatttctccttatgctattttcaaatatcatatttgtggcagaaatgctatttggcgacagtgggtggatgaacaatctgaaaggatatactggaagccctgtggtgctcccatataccgttttagttttagttgcacttatatctgtggctttttcactgtacctggctgttacaccattgagatctggaagtcatgaagctgaatcccatgaatggtctgtgcattctcagagagaactcttgaatacttctcaagaaagggaagatgttaaggtggacaatgttacatatgaggaagatcaaagatcagatgttgtcccttctcccagggatgtgcctgacagccatccggaactggccttggactatattgatacttctgacactgctgtagaatctgatcacgactctcaacaatctactgcttatgcatccactgctcctgaaacctgctcctccccgtcgtttactcgcgaggagtcaaaatcagttgttgcagtcaactggccggagcctttggagaaggttcctacttctactgtgatggaggaaagcacagtagaaaatgtggtctctaggatcacgactgaaagagatgttttagtagaaacagatgttgtctcgggcaaggataaggaagatatccgtactttggagtctgagaagtcaattgttgatagcaccccatatgtgtctgatgacggtccgccatcccttactttcagcaggggaaagggctcagatgcaggaaatggcagtggtagtctctcaaggttatctggtttgggccgtgcagcaaggagacagctagctgctactcttgatgagttctgggggcatctgtttgattaccatggtaagctcactcaagaagctagcaccaaaaagtttggtatcttgcttgggatagaccttagaacacctagcacatctgtaagaacggataaacaagctgctgaaatacttaagagcccactggtgagagactcaatgcggggggcagcttttttgtcaagctcagtggacatgatgtcccctaagaatgaaacgtcgaatttggaacttgcatatgggcttcagaggggacctggcatgggattgtcaagctggtctcagggtatgcagctaccaaatacacagctgcagagctcaagcaatagcctacttgagcagagtgcaagattaaactcaaattttagttcatcttattcagacaacaatcagttctaccaacctgcaacaattcatggataccagctcacatcttacctgaaacagatgaatgccagcccaagcctttactctagcatgccgctggacccacaacggcttccaaaatcatctgtgtctgctgtgccaaactatgctgattccatgatgcatgctcgtaatcataacctgcttgcttcactgggtggtactactacacagcttcctgcaacatcccgcgtaggctcaatgatgcctgaaagatcgtattatgatccttccagcgttgatgggaatgaaaacgctggttcacctgcttactcaaaaaagtaccacagctcacctgatatgtctggaataatcgctgcaagtagagctgcactcttgaatgaagcaaagttgggtgctgccattggaccacagtcatacctcagcaggctggcggcagaaagatctcaatatgcaagctcaacagccaggcccgcggctccattagcatttgacgagctttcacctcctaagctccagagtgatatcttctcggcgcagtcaagcatgagaccaagtgctagatccctttgggctaagcaaccatttgagcaattgttcggcatgtcaagtgcagagctcagtaaaggtgacttcaatcttccaggcagatcaggtggcgtggccaaggatgatttctcttataaggaatctgagacgaagcttcttcagtccctcaggctctgcatcatgaagctccttaagctagagggatcagggtggctgttcaagcaaaatggtggttgtgatgaagatctaatcgaccgagtcgctgcagccgagaagctattgatgcaagggactgccgagaatcaactgctgcttcatggtggtgatctccagcaacattcttccgaccaggccggcatccagtacatgcgcacgcttcccaactgcggggaggactgtgtttggcgcgcgtcactcgtcgttagtttcggtgtctggtgtgtccgccgagtgctggacatgtctctggtggaaagcaggccagaactttggggcaagtatacctatgtccttaaccgtcttcaggggatcttggaccctgcgttctccaagcctcggggtgctctgacaatatgcacctgccttcagaaagacaccagagtgcgcaatagcccaccccacagtgggctaacagccatgggcccggtccccacaccgatccggggcgccttcacgaccgcaggcgtggttctggagatgatcaaggacgtggaggctgcggtctcaggccgcaagggcaggagcggcacggcggcgggcgacgtcgccttccccaaggggaaggagaacctggcctccgtgctgaagcggtacaagcggcggctcgccagcaagggccagtagcgcgcgggtgtcagacaggcaggcgatcgcaagcaatgttaggaggagcctgactattgttctccaggggggctgccactggcgccggcctccctgagccctggattttttcgttgcacgacgttcctagggaccggtggttgcccgatggtcgtcttggtcccttccagcaggttttttttttccttccctctttctgttggtttctttttgttggctttgtgatgttttgtaaggggcaactagggtatgtgctcagaaggactcaagatgtacacgcgaagatgtactagtctgctgatgcagcgttgtaaagtccacactctgcaggttaaccctttttggggccgtcaagtgttagtgcgtgccctatgtatgttaatcacccctgcagagaggttgcgaatactgaactactcacagacctgcacctgtcgagatcgtttgtaatatccgacgtcttgttcagaattgttctcactcttttttgcccgttgtgtaatttaccctgaagggacttcaagtacgtgcttcggcaagcacggtcgtgaaagaaaaaaaactgttagcatcagtgagctgcctgttgagcagtaaaagagaatacaatgtgagctctcaactcaaaagcgagatgtgtcacgcgcgtatctcaagaagcattgggccaaagctttttatgccaggcaagagagatgcatcca

SEQ ID NO: 33374 - DNA, 5580 bp, Zea Mays
aaaagagcagcgagcaagctgaaggtgaaagccacagcagctcgtccccttccccccacttcttcctcagataaggagaggccccaggccagagaaaaaagcatcgaatttccccccgttaattggcctgagccctcagccgtctaccagcagcagctagaggcagacaagctaggttttactgcttcattgagcacaaagatccgctgacctcttgctcttgatgattggatcagtggtttcaggcttcggggggttcgatcagatgttgtatgaataatagcaggattgcttgagagactatagtttgggtactgtttgcttctgtatttactggtacggtttcctactgatctgcggctgcgcaggaaggcattctcttttttgccgtaccatggatgcaccggatgttcaacagagcatgggatataaggagtccaggggtggtatgcctaagtttttccatgcccttggaccagcactcctgatttcaatgggttacattgatctcgggaagtgggtggcagccgttgaagctggttcttgttttggattcgacctggtgttgctggctctccttttcaatttcactgccattgtatgtcagtaccttgctgcttgcattggcactgtcacagggaagaatcttgcagaggtatcggtttaccgatgttgttccttggttttgctggccttctattgagatttagttcagtaaatctttgtttccatttcacaacgctatatgatggcttcatattgagctggacttgaaggaacttagaagagcagggagtagggaaactacatgcgagatattcaatttatgcgaattgttgataaacaaaatggatcaattcacttgccttgttaaataattcttttccatctgtagttcaattatactccctctgttccacaatagaagtcgttttagactttcaacaaattcattcaataattgatgtatatgttatgtaatgtgtctagattcgttgccattcatttgaatatagacataaaaagaagacctaaaacgactactaatttggtacagagggagtagtactgttggatgtagaagggcttctttttggaggaaaatatatcttttatctcatcttacttgttcttgatattcctttcaagttgctaactttttcatgccttcacatgaaacaaagatatgccaccaagagtacaaccagccaacatgtatattccttggtgttcaagctggattgtctttgttgacgtcagagctgactatggtacttgcagatttagttggatgtctctcataccttttatgtttaaattgtgaattctcatcctgcaaagcaatgttacatgatgtagttctgacatgctagattctgttggctatatctggaattttcagatttttggcatagcactcggattcaacctcctgtttgaatatgatgatctcatcacagggatatgctttgcaacagtggtacctaatctgctaccatatgctatatcccacctgggaaagaagatggaagggacaataaatgcctgcatagcaggatttgcacttcttagttatgtgcttggcttattggttagccagccacaaattcctctcacgatgaatgtaatattccccaagatcagtggtgagagtgcttactctctgatggcgcttcttggtgcaaacataatggcacacaacttctacattcattcatcagttgtccagggtcagaaaaagtcatctgcagttggtcttggagccttatttcacgaccaccttttttcaatattgttcatttttactggaatctttatggtgaactatgttctaatgaactctgcagcagcggaatctactaatactcttctcattaccttccaagatgttgtagagctaatgaatcagatatttgtaaaccctctggcaccaactatatttttagtggttcttctcttctccagccacatcatctcgctgacatctgctatcggtagccaagtgatttcacaccatttattcggtataaaccttcctctttctggacatcgtctcctactgaaggtttttgccatagttcctactctgtactgggcgaaagttgcaggagctgaagggatataccaattattaattatatgccagattattcaagccatgcttcttccatcttcagtcgtcccactttttcgtgttgcttcatcaagatcaataatgggagcccatagagtgtctttgcatctggagatactggtttttcttgcatttctccttatgctattttcaaatatcatatttgtggcagaaatgctatttggcgacagtgggtggatgaacaatctgaaaggatatactggaagccctgtggtgctcccatataccgttttagttttagttgcacttatatctgtggctttttcactgtacctggctgttacaccattgagatctggaagtcatgaagctgaatcccatgaatggtctgtgcattctcagagagaactcttgaatacttctcaagaaagggaagatgttaaggtggacaatgttacatatgaggaagatcaaagatcagatgttgtcccttctcccagggatgtgcctgacagccatccggaactggccttggactatattgatacttctgacactgctgtagaatctgatcacgactctcaacaatctactgcttatgcatccactgctcctgaaacctgctcctccccgtcgtttactcgcgaggagtcaaaatcagttgttgcagtcaactggccggagcctttggagaaggttcctacttctactgtgatggaggaaagcacagtagaaaatgtggtctctaggatcacgactgaaagagatgttttagtagaaacagatgttgtctcgggcaaggataaggaagatatccgtactttggagtctgagaagtcaattgttgatagcaccccatatgtgtctgatgacggtccgccatcccttactttcagcaggggaaagggctcagatgcaggaaatggcagtggtagtctctcaaggttatctggtttgggccgtgcagcaaggagacagctagctgctactcttgatgagttctgggggcatctgtttgattaccatggtaagctcactcaagaagctagcaccaaaaagtttggtatcttgcttgggatagaccttagaacacctagcacatctgtaagaacggataaacaagctgctgaaatacttaagagcccactggtgagagactcaatgcggggggcagcttttttgtcaagctcagtggacatgatgtcccctaagaatgaaacgtcgaatttggaacttgcatatgggcttcagaggggacctggcatgggattgtcaagctggtctcagggtatgcagctaccaaatacacagctgcagagctcaagcaatagcctacttgagcagagtgcaagattaaactcaaattttagttcatcttattcagacaacaatcagttctaccaacctgcaacaattcatggataccagctcacatcttacctgaaacagatgaatgccagcccaagcctttactctagcatgccgctggacccacaacggcttccaaaatcatctgtgtctgctgtgccaaactatgctgattccatgatgcatgctcgtaatcataacctgcttgcttcactgggtggtactactacacagcttcctgcaacatcccgcgtaggctcaatgatgcctgaaagatcgtattatgatccttccagcgttgatgggaatgaaaacgctggttcacctgcttactcaaaaaagtaccacagctcacctgatatgtctggaataatcgctgcaagtagagctgcactcttgaatgaagcaaagttgggtgctgccattggaccacagtcatacctcagcaggctggcggcagaaagatctcaatatgcaagctcaacagccaggcccgcggctccattagcatttgacgagctttcacctcctaagctccagagtgatatcttctcggcgcagtcaagcatgagaccaagtgctagatccctttgggctaagcaaccatttgagcaattgttcggcatgtcaagtgcagagctcagtaaaggtgacttcaatcttccaggcagatcaggtggcgtggccaaggatgatttctcttataaggaatctgagacgaagcttcttcagtccctcaggctctgcatcatgaagctccttaagctagagggatcagggtggctgttcaagcaaaatggtggttgtgatgaagatctaatcgaccgagtcgctgcagccgagaagctattgatgcaagggactgccgagaatcaactgctgcttcatggtggtgatctccagcaacattcttccgaccaggccggcatccagtacatgcgcacgcttcccaactgcggggaggactgtgtttggcgcgcgtcactcgtcgttagtttcggtgtctggtgtgtccgccgagtgctggacatgtctctggtggaaagcaggccagaactttggggcaagtatacctatgtccttaaccgtcttcaggggatcttggaccctgcgttctccaagcctcggggtgctctgacaatatgcacctgccttcagaaagacaccagagtgcgcaatagcccaccccacagtgggctaacagccatgggcccggtccccacaccgatccggggcgccttcacgaccgcaggcgtggttctggagatgatcaaggacgtggaggctgcggtctcaggccgcaagggcaggagcggcacggcggcgggcgacgtcgccttccccaaggggaaggagaacctggcctccgtgctgaagcggtacaagcggcggctcgccagcaagggccagtagcgcgcgggtgtcagacaggcaggcgatcgcaagcaatgttaggaggagcctgactattgttctccaggggggctgccactggcgccggcctccctgagccctggattttttcgttgcacgacgttcctagggaccggtggttgcccgatggtcgtcttggtcccttccagcaggttttttttttccttccctctttctgttggtttctttttgttggctttgtgatgttttgtaaggggcaactagggtatgtgctcagaaggactcaagatgtacacgcgaagatgtactagtctgctgatgcagcgttgtaaagtccacactctgcaggttaaccctttttggggccgtcaagtgttagtgcgtgccctatgtatgttaatcacccctgcagagaggttgcgaatactgaactactcacagacctgcacctgtcgagatcgtttgtaatatccgacgtcttgttcagaattgttctcactcttttttgcccgttgtgtaatttaccctgaagggacttcaagtacgtgcttcggcaagcacggtcgtgaaagaaaaaaaactgttagcatcagtgagctgcctgttgagcagtaaaagagaatacaatgtgagctctcaactcaaaagcgagatgtgtcacgcgcgtatctcaagaagcattgggccaaagctttttatgccaggcaagagagatgcatcca

SEQ ID NO: 33375 - DNA, 4443 bp, Zea Mays
aaaagagcagcgagcaagctgaaggtgaaagccacagcagctcgtccccttccccccacttcttcctcagataaggagaggccccaggccagagaaaaaagcatcgaatttccccccgttaattggcctgagccctcagccgtctaccagcagcagctagaggcagacaagctaggttttactgcttcattgagcacaaagatccgctgacctcttgctcttgatatgccaccaagagtacaaccagccaacatgtatattccttggtgttcaagctggattgtctttgttgacgtcagagctgactatgatttttggcatagcactcggattcaacctcctgtttgaatatgatgatctcatcacagggatatgctttgcaacagtgatggaagggacaataaatgcctgcatagcaggatttgcacttcttagttatgtgcttggcttattggttagccagccacaaattcctctcacgatgaatgtaatattccccaagatcagtggtgagagtgcttactctctgatggcgcttcttggtgcaaacataatggcacacaacttctacattcattcatcagttgtccagggtcagaaaaagtcatctgcagttggtcttggagccttatttcacgaccaccttttttcaatattgttcatttttactggaatctttatggtgaactatgttctaatgaactctgcagcagcggaatctactaatactcttctcattaccttccaagatgttgtagagctaatgaatcagatatttgtaaaccctctggcaccaactatatttttagtggttcttctcttctccagccacatcatctcgctgacatctgctatcggtagccaagtgatttcacaccatttattcggtataaaccttcctctttctggacatcgtctcctactgaaggtttttgccatagttcctactctgtactgggcgaaagttgcaggagctgaagggatataccaattattaattatatgccagattattcaagccatgcttcttccatcttcagtcgtcccactttttcgtgttgcttcatcaagatcaataatgggagcccatagagtgtctttgcatctggagatactggtttttcttgcatttctccttatgctattttcaaatatcatatttgtggcagaaatgctatttggcgacagtgggtggatgaacaatctgaaaggatatactggaagccctgtggtgctcccatataccgttttagttttagttgcacttatatctgtggctttttcactgtacctggctgttacaccattgagatctggaagtcatgaagctgaatcccatgaatggtctgtgcattctcagagagaactcttgaatacttctcaagaaagggaagatgttaaggtggacaatgttacatatgaggaagatcaaagatcagatgttgtcccttctcccagggatgtgcctgacagccatccggaactggccttggactatattgatacttctgacactgctgtagaatctgatcacgactctcaacaatctactgcttatgcatccactgctcctgaaacctgctcctccccgtcgtttactcgcgaggagtcaaaatcagttgttgcagtcaactggccggagcctttggagaaggttcctacttctactgtgatggaggaaagcacagtagaaaatgtggtctctaggatcacgactgaaagagatgttttagtagaaacagatgttgtctcgggcaaggataaggaagatatccgtactttggagtctgagaagtcaattgttgatagcaccccatatgtgtctgatgacggtccgccatcccttactttcagcaggggaaagggctcagatgcaggaaatggcagtggtagtctctcaaggttatctggtttgggccgtgcagcaaggagacagctagctgctactcttgatgagttctgggggcatctgtttgattaccatggtaagctcactcaagaagctagcaccaaaaagtttggtatcttgcttgggatagaccttagaacacctagcacatctgtaagaacggataaacaagctgctgaaatacttaagagcccactggtgagagactcaatgcggggggcagcttttttgtcaagctcagtggacatgatgtcccctaagaatgaaacgtcgaatttggaacttgcatatgggcttcagaggggacctggcatgggattgtcaagctggtctcagggtatgcagctaccaaatacacagctgcagagctcaagcaatagcctacttgagcagagtgcaagattaaactcaaattttagttcatcttattcagacaacaatcagttctaccaacctgcaacaattcatggataccagctcacatcttacctgaaacagatgaatgccagcccaagcctttactctagcatgccgctggacccacaacggcttccaaaatcatctgtgtctgctgtgccaaactatgctgattccatgatgcatgctcgtaatcataacctgcttgcttcactgggtggtactactacacagcttcctgcaacatcccgcgtaggctcaatgatgcctgaaagatcgtattatgatccttccagcgttgatgggaatgaaaacgctggttcacctgcttactcaaaaaagtaccacagctcacctgatatgtctggaataatcgctgcaagtagagctgcactcttgaatgaagcaaagttgggtgctgccattggaccacagtcatacctcagcaggctggcggcagaaagatctcaatatgcaagctcaacagccaggcccgcggctccattagcatttgacgagctttcacctcctaagctccagagtgatatcttctcggcgcagtcaagcatgagaccaagtgctagatccctttgggctaagcaaccatttgagcaattgttcggcatgtcaagtgcagagctcagtaaaggtgacttcaatcttccaggcagatcaggtggcgtggccaaggatgatttctcttataaggaatctgagacgaagcttcttcagtccctcaggctctgcatcatgaagctccttaagctagagggatcagggtggctgttcaagcaaaatggtggttgtgatgaagatctaatcgaccgagtcgctgcagccgagaagctattgatgcaagggactgccgagaatcaactgctgcttcatggtggtgatctccagcaacattcttccgaccaggccggcatccagtacatgcgcacgcttcccaactgcggggaggactgtgtttggcgcgcgtcactcgtcgttagtttcggtgtctggtgtgtccgccgagtgctggacatgtctctggtggaaagcaggccagaactttggggcaagtatacctatgtccttaaccgtcttcaggggatcttggaccctgcgttctccaagcctcggggtgctctgacaatatgcacctgccttcagaaagacaccagagtgcgcaatagcccaccccacagtgggctaacagccatgggcccggtccccacaccgatccggggcgccttcacgaccgcaggcgtggttctggagatgatcaaggacgtggaggctgcggtctcaggccgcaagggcaggagcggcacggcggcgggcgacgtcgccttccccaaggggaaggagaacctggcctccgtgctgaagcggtacaagcggcggctcgccagcaagggccagtagcgcgcgggtgtcagacaggcaggcgatcgcaagcaatgttaggaggagcctgactattgttctccaggggggctgccactggcgccggcctccctgagccctggattttttcgttgcacgacgttcctagggaccggtggttgcccgatggtcgtcttggtcccttccagcaggttttttttttccttccctctttctgttggtttctttttgttggctttgtgatgttttgtaaggggcaactagggtatgtgctcagaaggactcaagatgtacacgcgaagatgtactagtctgctgatgcagcgttgtaaagtccacactctgcaggttaaccctttttggggccgtcaagtgttagtgcgtgccctatgtatgttaatcacccctgcagagaggttgcgaatactgaactactcacagacctgcacctgtcgagatcgtttgtaatatccgacgtcttgttcagaattgttctcactcttttttgcccgttgtgtaatttaccctgaagggacttcaagtacgtgcttcggcaagcacggtcgtgaaagaaaaaaaactgttagcatcagtgagctgcctgttgagcagtaaaagagaatacaatgtgagctctcaactcaaaagcgagatgtgtcacgcgcgtatctcaagaagcattgggccaaagctttttatgccaggcaagagagatgcatcca

SEQ ID NO: 33376 - DNA, 5073 bp, Zea Mays
aaaagagcagcgagcaagctgaaggtgaaagccacagcagctcgtccccttccccccacttcttcctcagataaggagaggccccaggccagagaaaaaagcatcgaatttccccccgttaattggcctgagccctcagccgtctaccagcagcagctagaggcagacaagctaggttttactgcttcattgagcacaaagatccgctgacctcttgctcttggtaaaaatccaacctttcttgtattgttttcttcctgggaaaacctccttgtggtgcataaacttcgtagtacactctgccatttctggagaggaagctgagaactactatccatatctggcacgacccttgtcaagaaccatggctgttcacatgccatgaagctgcttgaactggaggcacctaaatgctgtggattgttcctatgcagatgattggatcagtggtttcaggcttcggggggttcgatcagatgttgtatgaataatagcaggattgcttgagagactatagtttgggtactgtttgcttctgtatttactggtacggtttcctactgatctgcggctgcgcaggaaggcattctcttttttgccgtaccatggatgcaccggatgttcaacagagcatgggatataaggagtccaggggtggtatgcctaagtttttccatgcccttggaccagcactcctgatttcaatgggttacattgatctcgggaagtgggtggcagccgttgaagctggttcttgttttggattcgacctggtgttgctggctctccttttcaatttcactgccattgtatgtcagtaccttgctgcttgcattggcactgtcacagggaagaatcttgcagagatatgccaccaagagtacaaccagccaacatgtatattccttggtgttcaagctggattgtctttgttgacgtcagagctgactatgggatatgctttgcaacagtggtacctaatctgctaccatatgctatatcccacctgggaaagaagatggaagggacaataaatgcctgcatagcaggatttgcacttcttagttatgtgcttggcttattggttagccagccacaaattcctctcacgatgaatgtaatattccccaagatcagtggtgagagtgcttactctctgatggcgcttcttggtgcaaacataatggcacacaacttctacattcattcatcagttgtccagggtcagaaaaagtcatctgcagttggtcttggagccttatttcacgaccaccttttttcaatattgttcatttttactggaatctttatggtgaactatgttctaatgaactctgcagcagcggaatctactaatactcttctcattaccttccaagatgttgtagagctaatgaatcagatatttgtaaaccctctggcaccaactatatttttagtggttcttctcttctccagccacatcatctcgctgacatctgctatcggtagccaagtgatttcacaccatttattcggtataaaccttcctctttctggacatcgtctcctactgaaggtttttgccatagttcctactctgtactgggcgaaagttgcaggagctgaagggatataccaattattaattatatgccagattattcaagccatgcttcttccatcttcagtcgtcccactttttcgtgttgcttcatcaagatcaataatgggagcccatagagtgtctttgcatctggagatactggtttttcttgcatttctccttatgctattttcaaatatcatatttgtggcagaaatgctatttggcgacagtgggtggatgaacaatctgaaaggatatactggaagccctgtggtgctcccatataccgttttagttttagttgcacttatatctgtggctttttcactgtacctggctgttacaccattgagatctggaagtcatgaagctgaatcccatgaatggtctgtgcattctcagagagaactcttgaatacttctcaagaaagggaagatgttaaggtggacaatgttacatatgaggaagatcaaagatcagatgttgtcccttctcccagggatgtgcctgacagccatccggaactggccttggactatattgatacttctgacactgctgtagaatctgatcacgactctcaacaatctactgcttatgcatccactgctcctgaaacctgctcctccccgtcgtttactcgcgaggagtcaaaatcagttgttgcagtcaactggccggagcctttggagaaggttcctacttctactgtgatggaggaaagcacagtagaaaatgtggtctctaggatcacgactgaaagagatgttttagtagaaacagatgttgtctcgggcaaggataaggaagatatccgtactttggagtctgagaagtcaattgttgatagcaccccatatgtgtctgatgacggtccgccatcccttactttcagcaggggaaagggctcagatgcaggaaatggcagtggtagtctctcaaggttatctggtttgggccgtgcagcaaggagacagctagctgctactcttgatgagttctgggggcatctgtttgattaccatggtaagctcactcaagaagctagcaccaaaaagtttggtatcttgcttgggatagaccttagaacacctagcacatctgtaagaacggataaacaagctgctgaaatacttaagagcccactggtgagagactcaatgcggggggcagcttttttgtcaagctcagtggacatgatgtcccctaagaatgaaacgtcgaatttggaacttgcatatgggcttcagaggggacctggcatgggattgtcaagctggtctcagggtatgcagctaccaaatacacagctgcagagctcaagcaatagcctacttgagcagagtgcaagattaaactcaaattttagttcatcttattcagacaacaatcagttctaccaacctgcaacaattcatggataccagctcacatcttacctgaaacagatgaatgccagcccaagcctttactctagcatgccgctggacccacaacggcttccaaaatcatctgtgtctgctgtgccaaactatgctgattccatgatgcatgctcgtaatcataacctgcttgcttcactgggtggtactactacacagcttcctgcaacatcccgcgtaggctcaatgatgcctgaaagatcgtattatgatccttccagcgttgatgggaatgaaaacgctggttcacctgcttactcaaaaaagtaccacagctcacctgatatgtctggaataatcgctgcaagtagagctgcactcttgaatgaagcaaagttgggtgctgccattggaccacagtcatacctcagcaggctggcggcagaaagatctcaatatgcaagctcaacagccaggcccgcggctccattagcatttgacgagctttcacctcctaagctccagagtgatatcttctcggcgcagtcaagcatgagaccaagtgctagatccctttgggctaagcaaccatttgagcaattgttcggcatgtcaagtgcagagctcagtaaaggtgacttcaatcttccaggcagatcaggtggcgtggccaaggatgatttctcttataaggaatctgagacgaagcttcttcagtccctcaggctctgcatcatgaagctccttaagctagagggatcagggtggctgttcaagcaaaatggtggttgtgatgaagatctaatcgaccgagtcgctgcagccgagaagctattgatgcaagggactgccgagaatcaactgctgcttcatggtggtgatctccagcaacattcttccgaccaggccggcatccagtacatgcgcacgcttcccaactgcggggaggactgtgtttggcgcgcgtcactcgtcgttagtttcggtgtctggtgtgtccgccgagtgctggacatgtctctggtggaaagcaggccagaactttggggcaagtatacctatgtccttaaccgtcttcaggggatcttggaccctgcgttctccaagcctcggggtgctctgacaatatgcacctgccttcagaaagacaccagagtgcgcaatagcccaccccacagtgggctaacagccatgggcccggtccccacaccgatccggggcgccttcacgaccgcaggcgtggttctggagatgatcaaggacgtggaggctgcggtctcaggccgcaagggcaggagcggcacggcggcgggcgacgtcgccttccccaaggggaaggagaacctggcctccgtgctgaagcggtacaagcggcggctcgccagcaagggccagtagcgcgcgggtgtcagacaggcaggcgatcgcaagcaatgttaggaggagcctgactattgttctccaggggggctgccactggcgccggcctccctgagccctggattttttcgttgcacgacgttcctagggaccggtggttgcccgatggtcgtcttggtcccttccagcaggttttttttttccttccctctttctgttggtttctttttgttggctttgtgatgttttgtaaggggcaactagggtatgtgctcagaaggactcaagatgtacacgcgaagatgtactagtctgctgatgcagcgttgtaaagtccacactctgcaggttaaccctttttggggccgtcaagtgttagtgcgtgccctatgtatgttaatcacccctgcagagaggttgcgaatactgaactactcacagacctgcacctgtcgagatcgtttgtaatatccgacgtcttgttcagaattgttctcactcttttttgcccgttgtgtaatttaccctgaagggacttcaagtacgtgcttcggcaagcacggtcgtgaaagaaaaaaaactgttagcatcagtgagctgcctgttgagcagtaaaagagaatacaatgtgagctctcaactcaaaagcgagatgtgtcacgcgcgtatctcaagaagcattgggccaaagctttttatgccaggcaagagagatgcatcca

SEQ ID NO: 33377 - DNA, 4791 bp, Zea Mays
aaaactgacacataagaaaagagcagcgagcaagctgaaggtgaaagccacagcagctcgtccccttccccccacttcttcctcagataaggagaggccccaggccagagaaaaaagcatcgaatttccccccgttaattggcctgagccctcagccgtctaccagcagcagctagaggcagacaagctaggttttactgcttcattgagcacaaagatccgctgacctcttgctcttggaaggcattctcttttttgccgtaccatggatgcaccggatgttcaacagagcatgggatataaggagtccaggggtggtatgcctaagtttttccatgcccttggaccagcactcctgatttcaatgggttacattgatctcgggaagtgggtggcagccgttgaagctggttcttgttttggattcgacctggtgttgctggctctccttttcaatttcactgccattgtatgtcagtaccttgctgcttgcattggcactgtcacagggaagaatcttgcagagatatgccaccaagagtacaaccagccaacatgtatattccttggtgttcaagctggattgtctttgttgacgtcagagctgactatgatttttggcatagcactcggattcaacctcctgtttgaatatgatgatctcatcacagggatatgctttgcaacagtggtacctaatctgctaccatatgctatatcccacctgggaaagaagatggaagggacaataaatgcctgcatagcaggatttgcacttcttagttatgtgcttggcttattggttagccagccacaaattcctctcacgatgaatgtaatattccccaagatcagtggtgagagtgcttactctctgatggcgcttcttggtgcaaacataatggcacacaacttctacattcattcatcagttgtccagggtcagaaaaagtcatctgcagttggtcttggagccttatttcacgaccaccttttttcaatattgttcatttttactggaatctttatggtgaactatgttctaatgaactctgcagcagcggaatctactaatactcttctcattaccttccaagatgttgtagagctaatgaatcagatatttgtaaaccctctggcaccaactatatttttagtggttcttctcttctccagccacatcatctcgctgacatctgctatcggtagccaagtgatttcacaccatttattcggtataaaccttcctctttctggacatcgtctcctactgaaggtttttgccatagttcctactctgtactgggcgaaagttgcaggagctgaagggatataccaattattaattatatgccagattattcaagccatgcttcttccatcttcagtcgtcccactttttcgtgttgcttcatcaagatcaataatgggagcccatagagtgtctttgcatctggagatactggtttttcttgcatttctccttatgctattttcaaatatcatatttgtggcagaaatgctatttggcgacagtgggtggatgaacaatctgaaaggatatactggaagccctgtggtgctcccatataccgttttagttttagttgcacttatatctgtggctttttcactgtacctggctgttacaccattgagatctggaagtcatgaagctgaatcccatgaatggtctgtgcattctcagagagaactcttgaatacttctcaagaaagggaagatgttaaggtggacaatgttacatatgaggaagatcaaagatcagatgttgtcccttctcccagggatgtgcctgacagccatccggaactggccttggactatattgatacttctgacactgctgtagaatctgatcacgactctcaacaatctactgcttatgcatccactgctcctgaaacctgctcctccccgtcgtttactcgcgaggagtcaaaatcagttgttgcagtcaactggccggagcctttggagaaggttcctacttctactgtgatggaggaaagcacagtagaaaatgtggtctctaggatcacgactgaaagagatgttttagtagaaacagatgttgtctcgggcaaggataaggaagatatccgtactttggagtctgagaagtcaattgttgatagcaccccatatgtgtctgatgacggtccgccatcccttactttcagcaggggaaagggctcagatgcaggaaatggcagtggtagtctctcaaggttatctggtttgggccgtgcagcaaggagacagctagctgctactcttgatgagttctgggggcatctgtttgattaccatggtaagctcactcaagaagctagcaccaaaaagtttggtatcttgcttgggatagaccttagaacacctagcacatctgtaagaacggataaacaagctgctgaaatacttaagagcccactggtgagagactcaatgcggggggcagcttttttgtcaagctcagtggacatgatgtcccctaagaatgaaacgtcgaatttggaacttgcatatgggcttcagaggggacctggcatgggattgtcaagctggtctcagggtatgcagctaccaaatacacagctgcagagctcaagcaatagcctacttgagcagagtgcaagattaaactcaaattttagttcatcttattcagacaacaatcagttctaccaacctgcaacaattcatggataccagctcacatcttacctgaaacagatgaatgccagcccaagcctttactctagcatgccgctggacccacaacggcttccaaaatcatctgtgtctgctgtgccaaactatgctgattccatgatgcatgctcgtaatcataacctgcttgcttcactgggtggtactactacacagcttcctgcaacatcccgcgtaggctcaatgatgcctgaaagatcgtattatgatccttccagcgttgatgggaatgaaaacgctggttcacctgcttactcaaaaaagtaccacagctcacctgatatgtctggaataatcgctgcaagtagagctgcactcttgaatgaagcaaagttgggtgctgccattggaccacagtcatacctcagcaggctggcggcagaaagatctcaatatgcaagctcaacagccaggcccgcggctccattagcatttgacgagctttcacctcctaagctccagagtgatatcttctcggcgcagtcaagcatgagaccaagtgctagatccctttgggctaagcaaccatttgagcaattgttcggcatgtcaagtgcagagctcagtaaaggtgacttcaatcttccaggcagatcaggtggcgtggccaaggatgatttctcttataaggaatctgagacgaagcttcttcagtccctcaggctctgcatcatgaagctccttaagctagagggatcagggtggctgttcaagcaaaatggtggttgtgatgaagatctaatcgaccgagtcgctgcagccgagaagctattgatgcaagggactgccgagaatcaactgctgcttcatggtggtgatctccagcaacattcttccgaccaggccggcatccagtacatgcgcacgcttcccaactgcggggaggactgtgtttggcgcgcgtcactcgtcgttagtttcggtgtctggtgtgtccgccgagtgctggacatgtctctggtggaaagcaggccagaactttggggcaagtatacctatgtccttaaccgtcttcaggggatcttggaccctgcgttctccaagcctcggggtgctctgacaatatgcacctgccttcagaaagacaccagagtgcgcaatagcccaccccacagtgggctaacagccatgggcccggtccccacaccgatccggggcgccttcacgaccgcaggcgtggttctggagatgatcaaggacgtggaggctgcggtctcaggccgcaagggcaggagcggcacggcggcgggcgacgtcgccttccccaaggggaaggagaacctggcctccgtgctgaagcggtacaagcggcggctcgccagcaagggccagtagcgcgcgggtgtcagacaggcaggcgatcgcaagcaatgttaggaggagcctgactattgttctccaggggggctgccactggcgccggcctccctgagccctggattttttcgttgcacgacgttcctagggaccggtggttgcccgatggtcgtcttggtcccttccagcaggttttttttttccttccctctttctgttggtttctttttgttggctttgtgatgttttgtaaggggcaactagggtatgtgctcagaaggactcaagatgtacacgcgaagatgtactagtctgctgatgcagcgttgtaaagtccacactctgcaggttaaccctttttggggccgtcaagtgttagtgcgtgccctatgtatgttaatcacccctgcagagaggttgcgaatactgaactactcacagacctgcacctgtcgagatcgtttgtaatatccgacgtcttgttcagaattgttctcactcttttttgcccgttgtgtaatttaccctgaagggacttcaagtacgtgcttcggcaagcacggtcgtgaaagaaaaaaaactgttagcatcagtgagctgcctgttgagcagtaaaagagaatacaatgtgagctctcaactcaaaagcgagatgtgtcacgcgcgtatctcaagaagcattgggccaaagctttttatgccaggcaagagagatgcatcca

SEQ ID NO: 33378 - DNA, 5277 bp, Zea Mays
aaaaaactgacacataagaaaagagcagcgagcaagctgaaggtgaaagccacagcagctcgtccccttccccccacttcttcctcagataaggagaggccccaggccagagaaaaaagcatcgaatttccccccgttaattggcctgagccctcagccgtctaccagcagcagctagaggcagacaagctaggttttactgcttcattgagcacaaagatccgctgacctcttgctcttggaaggcattctcttttttgccgtaccatggatgcaccggatgttcaacagagcatgggatataaggagtccaggggtggtatgcctaagtttttccatgcccttggaccagcactcctgatttcaatgggttacattgatctcgggaagtgggtggcagccgttgaagctggttcttgttttggattcgacctggtgttgctggctctccttttcaatttcactgccattgtatgtcagtaccttgctgcttgcattggcactgtcacagggaagaatcttgcagaggtatcggtttaccgatgttgttccttggttttgctggccttctattgagatttagttcagtaaatctttgtttccatttcacaacgctatatgatggcttcatattgagctggacttgaaggaacttagaagagcagggagtagggaaactacatgcgagatattcaatttatgcgaattgttgataaacaaaatggatcaattcacttgccttgttaaataattcttttccatctgtagttcaattatactccctctgttccacaatagaagtcgttttagactttcaacaaattcattcaataattgatgtatatgttatgtaatgtgtctagattcgttgccattcatttgaatatagacataaaaagaagacctaaaacgactactaatttggtacagagggagtagtactgttggatgtagaagggcttctttttggaggaaaatatatcttttatctcatcttacttgttcttgatattcctttcaagttgctaactttttcatgccttcacatgaaacaaagatatgccaccaagagtacaaccagccaacatgtatattccttggtgttcaagctggattgtctttgttgacgtcagagctgactatgatttttggcatagcactcggattcaacctcctgtttgaatatgatgatctcatcacagggatatgctttgcaacagtgatggaagggacaataaatgcctgcatagcaggatttgcacttcttagttatgtgcttggcttattggttagccagccacaaattcctctcacgatgaatgtaatattccccaagatcagtggtgagagtgcttactctctgatggcgcttcttggtgcaaacataatggcacacaacttctacattcattcatcagttgtccagggtcagaaaaagtcatctgcagttggtcttggagccttatttcacgaccaccttttttcaatattgttcatttttactggaatctttatggtgaactatgttctaatgaactctgcagcagcggaatctactaatactcttctcattaccttccaagatgttgtagagctaatgaatcagatatttgtaaaccctctggcaccaactatatttttagtggttcttctcttctccagccacatcatctcgctgacatctgctatcggtagccaagtgatttcacaccatttattcggtataaaccttcctctttctggacatcgtctcctactgaaggtttttgccatagttcctactctgtactgggcgaaagttgcaggagctgaagggatataccaattattaattatatgccagattattcaagccatgcttcttccatcttcagtcgtcccactttttcgtgttgcttcatcaagatcaataatgggagcccatagagtgtctttgcatctggagatactggtttttcttgcatttctccttatgctattttcaaatatcatatttgtggcagaaatgctatttggcgacagtgggtggatgaacaatctgaaaggatatactggaagccctgtggtgctcccatataccgttttagttttagttgcacttatatctgtggctttttcactgtacctggctgttacaccattgagatctggaagtcatgaagctgaatcccatgaatggtctgtgcattctcagagagaactcttgaatacttctcaagaaagggaagatgttaaggtggacaatgttacatatgaggaagatcaaagatcagatgttgtcccttctcccagggatgtgcctgacagccatccggaactggccttggactatattgatacttctgacactgctgtagaatctgatcacgactctcaacaatctactgcttatgcatccactgctcctgaaacctgctcctccccgtcgtttactcgcgaggagtcaaaatcagttgttgcagtcaactggccggagcctttggagaaggttcctacttctactgtgatggaggaaagcacagtagaaaatgtggtctctaggatcacgactgaaagagatgttttagtagaaacagatgttgtctcgggcaaggataaggaagatatccgtactttggagtctgagaagtcaattgttgatagcaccccatatgtgtctgatgacggtccgccatcccttactttcagcaggggaaagggctcagatgcaggaaatggcagtggtagtctctcaaggttatctggtttgggccgtgcagcaaggagacagctagctgctactcttgatgagttctgggggcatctgtttgattaccatggtaagctcactcaagaagctagcaccaaaaagtttggtatcttgcttgggatagaccttagaacacctagcacatctgtaagaacggataaacaagctgctgaaatacttaagagcccactggtgagagactcaatgcggggggcagcttttttgtcaagctcagtggacatgatgtcccctaagaatgaaacgtcgaatttggaacttgcatatgggcttcagaggggacctggcatgggattgtcaagctggtctcagggtatgcagctaccaaatacacagctgcagagctcaagcaatagcctacttgagcagagtgcaagattaaactcaaattttagttcatcttattcagacaacaatcagttctaccaacctgcaacaattcatggataccagctcacatcttacctgaaacagatgaatgccagcccaagcctttactctagcatgccgctggacccacaacggcttccaaaatcatctgtgtctgctgtgccaaactatgctgattccatgatgcatgctcgtaatcataacctgcttgcttcactgggtggtactactacacagcttcctgcaacatcccgcgtaggctcaatgatgcctgaaagatcgtattatgatccttccagcgttgatgggaatgaaaacgctggttcacctgcttactcaaaaaagtaccacagctcacctgatatgtctggaataatcgctgcaagtagagctgcactcttgaatgaagcaaagttgggtgctgccattggaccacagtcatacctcagcaggctggcggcagaaagatctcaatatgcaagctcaacagccaggcccgcggctccattagcatttgacgagctttcacctcctaagctccagagtgatatcttctcggcgcagtcaagcatgagaccaagtgctagatccctttgggctaagcaaccatttgagcaattgttcggcatgtcaagtgcagagctcagtaaaggtgacttcaatcttccaggcagatcaggtggcgtggccaaggatgatttctcttataaggaatctgagacgaagcttcttcagtccctcaggctctgcatcatgaagctccttaagctagagggatcagggtggctgttcaagcaaaatggtggttgtgatgaagatctaatcgaccgagtcgctgcagccgagaagctattgatgcaagggactgccgagaatcaactgctgcttcatggtggtgatctccagcaacattcttccgaccaggccggcatccagtacatgcgcacgcttcccaactgcggggaggactgtgtttggcgcgcgtcactcgtcgttagtttcggtgtctggtgtgtccgccgagtgctggacatgtctctggtggaaagcaggccagaactttggggcaagtatacctatgtccttaaccgtcttcaggggatcttggaccctgcgttctccaagcctcggggtgctctgacaatatgcacctgccttcagaaagacaccagagtgcgcaatagcccaccccacagtgggctaacagccatgggcccggtccccacaccgatccggggcgccttcacgaccgcaggcgtggttctggagatgatcaaggacgtggaggctgcggtctcaggccgcaagggcaggagcggcacggcggcgggcgacgtcgccttccccaaggggaaggagaacctggcctccgtgctgaagcggtacaagcggcggctcgccagcaagggccagtagcgcgcgggtgtcagacaggcaggcgatcgcaagcaatgttaggaggagcctgactattgttctccaggggggctgccactggcgccggcctccctgagccctggattttttcgttgcacgacgttcctagggaccggtggttgcccgatggtcgtcttggtcccttccagcaggttttttttttccttccctctttctgttggtttctttttgttggctttgtgatgttttgtaaggggcaactagggtatgtgctcagaaggactcaagatgtacacgcgaagatgtactagtctgctgatgcagcgttgtaaagtccacactctgcaggttaaccctttttggggccgtcaagtgttagtgcgtgccctatgtatgttaatcacccctgcagagaggttgcgaatactgaactactcacagacctgcacctgtcgagatcgtttgtaatatccgacgtcttgttcagaattgttctcactcttttttgcccgttgtgtaatttaccctgaagggacttcaagtacgtgcttcggcaagcacggtcgtgaaagaaaaaaaactgttagcatcagtgagctgcctgttgagcagtaaaagagaatacaatgtgagctctcaactcaaaagcgagatgtgtcacgcgcgtatctcaagaagcattgggccaaagctttttatgccaggcaagagagatgcatcca

SEQ ID NO: 33379 - DNA, 5678 bp, Zea Mays
aaaaaactgacacataagaaaagagcagcgagcaagctgaaggtgaaagccacagcagctcgtccccttccccccacttcttcctcagataaggagaggccccaggccagagaaaaaagcatcgaatttccccccgttaattggcctgagccctcagccgtctaccagcagcagctagaggcagacaagctaggttttactgcttcattgagcacaaagatccgctgacctcttgctcttggtaaaaatccaacctttcttgtattgttttcttcctgggaaaacctccttgtggtgcataaacttcgtagtacactctgccatttctggagaggaagctgagaactactatccatatctggcacgacccttgtcaagaaccatggctgttcacatgccatgaagctgcttgaactggaggcacctaaatgctgtggattgttcctatgcagatgattggatcagtggtttcaggcttcggggggttcgatcagatgttgtatgaataatagcaggattgcttgagagactatagtttgggtactgtttgcttctgtatttactggtacggtttcctactgatctgcggctgcgcaggaaggcattctcttttttgccgtaccatggatgcaccggatgttcaacagagcatgggatataaggagtccaggggtggtatgcctaagtttttccatgcccttggaccagcactcctgatttcaatgggttacattgatctcgggaagtgggtggcagccgttgaagctggttcttgttttggattcgacctggtgttgctggctctccttttcaatttcactgccattgtatgtcagtaccttgctgcttgcattggcactgtcacagggaagaatcttgcagaggtatcggtttaccgatgttgttccttggttttgctggccttctattgagatttagttcagtaaatctttgtttccatttcacaacgctatatgatggcttcatattgagctggacttgaaggaacttagaagagcagggagtagggaaactacatgcgagatattcaatttatgcgaattgttgataaacaaaatggatcaattcacttgccttgttaaataattcttttccatctgtagttcaattatactccctctgttccacaatagaagtcgttttagactttcaacaaattcattcaataattgatgtatatgttatgtaatgtgtctagattcgttgccattcatttgaatatagacataaaaagaagacctaaaacgactactaatttggtacagagggagtagtactgttggatgtagaagggcttctttttggaggaaaatatatcttttatctcatcttacttgttcttgatattcctttcaagttgctaactttttcatgccttcacatgaaacaaagatatgccaccaagagtacaaccagccaacatgtatattccttggtgttcaagctggattgtctttgttgacgtcagagctgactatgatttttggcatagcactcggattcaacctcctgtttgaatatgatgatctcatcacagggatatgctttgcaacagtggtacctaatctgctaccatatgctatatcccacctgggaaagaagatggaagggacaataaatgcctgcatagcaggatttgcacttcttagttatgtgcttggcttattggttagccagccacaaattcctctcacgatgaatgtaatattccccaagatcagtggtgagagtgcttactctctgatggcgcttcttggtgcaaacataatggcacacaacttctacattcattcatcagttgtccagggtcagaaaaagtcatctgcagttggtcttggagccttatttcacgaccaccttttttcaatattgttcatttttactggaatctttatggtgaactatgttctaatgaactctgcagcagcggaatctactaatactcttctcattaccttccaagatgttgtagagctaatgaatcagatatttgtaaaccctctggcaccaactatatttttagtggttcttctcttctccagccacatcatctcgctgacatctgctatcggtagccaagtgatttcacaccatttattcggtataaaccttcctctttctggacatcgtctcctactgaaggtttttgccatagttcctactctgtactgggcgaaagttgcaggagctgaagggatataccaattattaattatatgccagattattcaagccatgcttcttccatcttcagtcgtcccactttttcgtgttgcttcatcaagatcaataatgggagcccatagagtgtctttgcatctggagatactggtttttcttgcatttctccttatgctattttcaaatatcatatttgtggcagaaatgctatttggcgacagtgggtggatgaacaatctgaaaggatatactggaagccctgtggtgctcccatataccgttttagttttagttgcacttatatctgtggctttttcactgtacctggctgttacaccattgagatctggaagtcatgaagctgaatcccatgaatggtctgtgcattctcagagagaactcttgaatacttctcaagaaagggaagatgttaaggtggacaatgttacatatgaggaagatcaaagatcagatgttgtcccttctcccagggatgtgcctgacagccatccggaactggccttggactatattgatacttctgacactgctgtagaatctgatcacgactctcaacaatctactgcttatgcatccactgctcctgaaacctgctcctccccgtcgtttactcgcgaggagtcaaaatcagttgttgcagtcaactggccggagcctttggagaaggttcctacttctactgtgatggaggaaagcacagtagaaaatgtggtctctaggatcacgactgaaagagatgttttagtagaaacagatgttgtctcgggcaaggataaggaagatatccgtactttggagtctgagaagtcaattgttgatagcaccccatatgtgtctgatgacggtccgccatcccttactttcagcaggggaaagggctcagatgcaggaaatggcagtggtagtctctcaaggttatctggtttgggccgtgcagcaaggagacagctagctgctactcttgatgagttctgggggcatctgtttgattaccatggtaagctcactcaagaagctagcaccaaaaagtttggtatcttgcttgggatagaccttagaacacctagcacatctgtaagaacggataaacaagctgctgaaatacttaagagcccactggtgagagactcaatgcggggggcagcttttttgtcaagctcagtggacatgatgtcccctaagaatgaaacgtcgaatttggaacttgcatatgggcttcagaggggacctggcatgggattgtcaagctggtctcagggtatgcagctaccaaatacacagctgcagagctcaagcaatagcctacttgagcagagtgcaagattaaactcaaattttagttcatcttattcagacaacaatcagttctaccaacctgcaacaattcatggataccagctcacatcttacctgaaacagatgaatgccagcccaagcctttactctagcatgccgctggacccacaacggcttccaaaatcatctgtgtctgctgtgccaaactatgctgattccatgatgcatgctcgtaatcataacctgcttgcttcactgggtggtactactacacagcttcctgcaacatcccgcgtaggctcaatgatgcctgaaagatcgtattatgatccttccagcgttgatgggaatgaaaacgctggttcacctgcttactcaaaaaagtaccacagctcacctgatatgtctggaataatcgctgcaagtagagctgcactcttgaatgaagcaaagttgggtgctgccattggaccacagtcatacctcagcaggctggcggcagaaagatctcaatatgcaagctcaacagccaggcccgcggctccattagcatttgacgagctttcacctcctaagctccagagtgatatcttctcggcgcagtcaagcatgagaccaagtgctagatccctttgggctaagcaaccatttgagcaattgttcggcatgtcaagtgcagagctcagtaaaggtgacttcaatcttccaggcagatcaggtggcgtggccaaggatgatttctcttataaggaatctgagacgaagcttcttcagtccctcaggctctgcatcatgaagctccttaagctagagggatcagggtggctgttcaagcaaaatggtggttgtgatgaagatctaatcgaccgagtcgctgcagccgagaagctattgatgcaagggactgccgagaatcaactgctgcttcatggtggtgatctccagcaacattcttccgaccaggccggcatccagtacatgcgcacgcttcccaactgcggggaggactgtgtttggcgcgcgtcactcgtcgttagtttcggtgtctggtgtgtccgccgagtgctggacatgtctctggtggaaagcaggccagaactttggggcaagtatacctatgtccttaaccgtcttcaggggatcttggaccctgcgttctccaagcctcggggtgctctgacaatatgcacctgccttcagaaagacaccagagtgcgcaatagcccaccccacagtgggctaacagccatgggcccggtccccacaccgatccggggcgccttcacgaccgcaggcgtggttctggagatgatcaaggacgtggaggctgcggtctcaggccgcaagggcaggagcggcacggcggcgggcgacgtcgccttccccaaggggaaggagaacctggcctccgtgctgaagcggtacaagcggcggctcgccagcaagggccagtagcgcgcgggtgtcagacaggcaggcgatcgcaagcaatgttaggaggagcctgactattgttctccaggggggctgccactggcgccggcctccctgagccctggattttttcgttgcacgacgttcctagggaccggtggttgcccgatggtcgtcttggtcccttccagcaggttttttttttccttccctctttctgttggtttctttttgttggctttgtgatgttttgtaaggggcaactagggtatgtgctcagaaggactcaagatgtacacgcgaagatgtactagtctgctgatgcagcgttgtaaagtccacactctgcaggttaaccctttttggggccgtcaagtgttagtgcgtgccctatgtatgttaatcacccctgcagagaggttgcgaatactgaactactcacagacctgcacctgtcgagatcgtttgtaatatccgacgtcttgttcagaattgttctcactcttttttgcccgttgtgtaatttaccctgaagggacttcaagtacgtgcttcggcaagcacggtcgtgaaagaaaaaaaactgttagcatcagtgagctgcctgttgagcagtaaaagagaatacaatgtgagctctcaactcaaaagcgagatgtgtcacgcgcgtatctcaagaagcattgggccaaagctttttatgccaggcaagagagatgcatcca

SEQ ID NO: 33380 - DNA, 4906 bp, Zea Mays
aaaaaagaaagaaaaaaaactgacacataagaaaagagcagcgagcaagctgaaggtgaaagccacagcagctcgtccccttccccccacttcttcctcagataaggagaggccccaggccagagaaaaaagcatcgaatttccccccgttaattggcctgagccctcagccgtctaccagcagcagctagaggcagacaagctaggttttactgcttcattgagcacaaagatccgctgacctcttgctcttgatgattggatcagtggtttcaggcttcggggggttcgatcagatgttgtatgaataatagcaggattgcttgagagactatagtttgggtactgtttgcttctgtatttactggtacggtttcctactgatctgcggctgcgcaggaaggcattctcttttttgccgtaccatggatgcaccggatgttcaacagagcatgggatataaggagtccaggggtggtatgcctaagtttttccatgcccttggaccagcactcctgatttcaatgggttacattgatctcgggaagtgggtggcagccgttgaagctggttcttgttttggattcgacctggtgttgctggctctccttttcaatttcactgccattgtatgtcagtaccttgctgcttgcattggcactgtcacagggaagaatcttgcagagatatgccaccaagagtacaaccagccaacatgtatattccttggtgttcaagctggattgtctttgttgacgtcagagctgactatgatttttggcatagcactcggattcaacctcctgtttgaatatgatgatctcatcacagggatatgctttgcaacagtgatggaagggacaataaatgcctgcatagcaggatttgcacttcttagttatgtgcttggcttattggttagccagccacaaattcctctcacgatgaatgtaatattccccaagatcagtggtgagagtgcttactctctgatggcgcttcttggtgcaaacataatggcacacaacttctacattcattcatcagttgtccagggtcagaaaaagtcatctgcagttggtcttggagccttatttcacgaccaccttttttcaatattgttcatttttactggaatctttatggtgaactatgttctaatgaactctgcagcagcggaatctactaatactcttctcattaccttccaagatgttgtagagctaatgaatcagatatttgtaaaccctctggcaccaactatatttttagtggttcttctcttctccagccacatcatctcgctgacatctgctatcggtagccaagtgatttcacaccatttattcggtataaaccttcctctttctggacatcgtctcctactgaaggtttttgccatagttcctactctgtactgggcgaaagttgcaggagctgaagggatataccaattattaattatatgccagattattcaagccatgcttcttccatcttcagtcgtcccactttttcgtgttgcttcatcaagatcaataatgggagcccatagagtgtctttgcatctggagatactggtttttcttgcatttctccttatgctattttcaaatatcatatttgtggcagaaatgctatttggcgacagtgggtggatgaacaatctgaaaggatatactggaagccctgtggtgctcccatataccgttttagttttagttgcacttatatctgtggctttttcactgtacctggctgttacaccattgagatctggaagtcatgaagctgaatcccatgaatggtctgtgcattctcagagagaactcttgaatacttctcaagaaagggaagatgttaaggtggacaatgttacatatgaggaagatcaaagatcagatgttgtcccttctcccagggatgtgcctgacagccatccggaactggccttggactatattgatacttctgacactgctgtagaatctgatcacgactctcaacaatctactgcttatgcatccactgctcctgaaacctgctcctccccgtcgtttactcgcgaggagtcaaaatcagttgttgcagtcaactggccggagcctttggagaaggttcctacttctactgtgatggaggaaagcacagtagaaaatgtggtctctaggatcacgactgaaagagatgttttagtagaaacagatgttgtctcgggcaaggataaggaagatatccgtactttggagtctgagaagtcaattgttgatagcaccccatatgtgtctgatgacggtccgccatcccttactttcagcaggggaaagggctcagatgcaggaaatggcagtggtagtctctcaaggttatctggtttgggccgtgcagcaaggagacagctagctgctactcttgatgagttctgggggcatctgtttgattaccatggtaagctcactcaagaagctagcaccaaaaagtttggtatcttgcttgggatagaccttagaacacctagcacatctgtaagaacggataaacaagctgctgaaatacttaagagcccactggtgagagactcaatgcggggggcagcttttttgtcaagctcagtggacatgatgtcccctaagaatgaaacgtcgaatttggaacttgcatatgggcttcagaggggacctggcatgggattgtcaagctggtctcagggtatgcagctaccaaatacacagctgcagagctcaagcaatagcctacttgagcagagtgcaagattaaactcaaattttagttcatcttattcagacaacaatcagttctaccaacctgcaacaattcatggataccagctcacatcttacctgaaacagatgaatgccagcccaagcctttactctagcatgccgctggacccacaacggcttccaaaatcatctgtgtctgctgtgccaaactatgctgattccatgatgcatgctcgtaatcataacctgcttgcttcactgggtggtactactacacagcttcctgcaacatcccgcgtaggctcaatgatgcctgaaagatcgtattatgatccttccagcgttgatgggaatgaaaacgctggttcacctgcttactcaaaaaagtaccacagctcacctgatatgtctggaataatcgctgcaagtagagctgcactcttgaatgaagcaaagttgggtgctgccattggaccacagtcatacctcagcaggctggcggcagaaagatctcaatatgcaagctcaacagccaggcccgcggctccattagcatttgacgagctttcacctcctaagctccagagtgatatcttctcggcgcagtcaagcatgagaccaagtgctagatccctttgggctaagcaaccatttgagcaattgttcggcatgtcaagtgcagagctcagtaaaggtgacttcaatcttccaggcagatcaggtggcgtggccaaggatgatttctcttataaggaatctgagacgaagcttcttcagtccctcaggctctgcatcatgaagctccttaagctagagggatcagggtggctgttcaagcaaaatggtggttgtgatgaagatctaatcgaccgagtcgctgcagccgagaagctattgatgcaagggactgccgagaatcaactgctgcttcatggtggtgatctccagcaacattcttccgaccaggccggcatccagtacatgcgcacgcttcccaactgcggggaggactgtgtttggcgcgcgtcactcgtcgttagtttcggtgtctggtgtgtccgccgagtgctggacatgtctctggtggaaagcaggccagaactttggggcaagtatacctatgtccttaaccgtcttcaggggatcttggaccctgcgttctccaagcctcggggtgctctgacaatatgcacctgccttcagaaagacaccagagtgcgcaatagcccaccccacagtgggctaacagccatgggcccggtccccacaccgatccggggcgccttcacgaccgcaggcgtggttctggagatgatcaaggacgtggaggctgcggtctcaggccgcaagggcaggagcggcacggcggcgggcgacgtcgccttccccaaggggaaggagaacctggcctccgtgctgaagcggtacaagcggcggctcgccagcaagggccagtagcgcgcgggtgtcagacaggcaggcgatcgcaagcaatgttaggaggagcctgactattgttctccaggggggctgccactggcgccggcctccctgagccctggattttttcgttgcacgacgttcctagggaccggtggttgcccgatggtcgtcttggtcccttccagcaggttttttttttccttccctctttctgttggtttctttttgttggctttgtgatgttttgtaaggggcaactagggtatgtgctcagaaggactcaagatgtacacgcgaagatgtactagtctgctgatgcagcgttgtaaagtccacactctgcaggttaaccctttttggggccgtcaagtgttagtgcgtgccctatgtatgttaatcacccctgcagagaggttgcgaatactgaactactcacagacctgcacctgtcgagatcgtttgtaatatccgacgtcttgttcagaattgttctcactcttttttgcccgttgtgtaatttaccctgaagggacttcaagtacgtgcttcggcaagcacggtcgtgaaagaaaaaaaactgttagcatcagtgagctgcctgttgagcagtaaaagagaatacaatgtgagctctcaactcaaaagcgagatgtgtcacgcgcgtatctcaagaagcattgggccaaagctttttatgccaggcaagagagatgcatcca

SEQ ID NO: 33381 - DNA, 4565 bp, Zea Mays
agaaaatttaattaataaacccgaagaagccaagagggaagggaaaaaaaaagaaagaaaaaaaactgacacataagaaaagagcagcgagcaagctgaaggtgaaagccacagcagctcgtccccttccccccacttcttcctcagataaggagaggccccaggccagagaaaaaagcatcgaatttccccccgttaattggcctgagccctcagccgtctaccagcagcagctagaggcagacaagctaggttttactgcttcattgagcacaaagatccgctgacctcttgctcttgatatgccaccaagagtacaaccagccaacatgtatattccttggtgttcaagctggattgtctttgttgacgtcagagctgactatgatttttggcatagcactcggattcaacctcctgtttgaatatgatgatctcatcacagggatatgctttgcaacagtggtacctaatctgctaccatatgctatatcccacctgggaaagaagatggaagggacaataaatgcctgcatagcaggatttgcacttcttagttatgtgcttggcttattggttagccagccacaaattcctctcacgatgaatgtaatattccccaagatcagtggtgagagtgcttactctctgatggcgcttcttggtgcaaacataatggcacacaacttctacattcattcatcagttgtccagggtcagaaaaagtcatctgcagttggtcttggagccttatttcacgaccaccttttttcaatattgttcatttttactggaatctttatggtgaactatgttctaatgaactctgcagcagcggaatctactaatactcttctcattaccttccaagatgttgtagagctaatgaatcagatatttgtaaaccctctggcaccaactatatttttagtggttcttctcttctccagccacatcatctcgctgacatctgctatcggtagccaagtgatttcacaccatttattcggtataaaccttcctctttctggacatcgtctcctactgaaggtttttgccatagttcctactctgtactgggcgaaagttgcaggagctgaagggatataccaattattaattatatgccagattattcaagccatgcttcttccatcttcagtcgtcccactttttcgtgttgcttcatcaagatcaataatgggagcccatagagtgtctttgcatctggagatactggtttttcttgcatttctccttatgctattttcaaatatcatatttgtggcagaaatgctatttggcgacagtgggtggatgaacaatctgaaaggatatactggaagccctgtggtgctcccatataccgttttagttttagttgcacttatatctgtggctttttcactgtacctggctgttacaccattgagatctggaagtcatgaagctgaatcccatgaatggtctgtgcattctcagagagaactcttgaatacttctcaagaaagggaagatgttaaggtggacaatgttacatatgaggaagatcaaagatcagatgttgtcccttctcccagggatgtgcctgacagccatccggaactggccttggactatattgatacttctgacactgctgtagaatctgatcacgactctcaacaatctactgcttatgcatccactgctcctgaaacctgctcctccccgtcgtttactcgcgaggagtcaaaatcagttgttgcagtcaactggccggagcctttggagaaggttcctacttctactgtgatggaggaaagcacagtagaaaatgtggtctctaggatcacgactgaaagagatgttttagtagaaacagatgttgtctcgggcaaggataaggaagatatccgtactttggagtctgagaagtcaattgttgatagcaccccatatgtgtctgatgacggtccgccatcccttactttcagcaggggaaagggctcagatgcaggaaatggcagtggtagtctctcaaggttatctggtttgggccgtgcagcaaggagacagctagctgctactcttgatgagttctgggggcatctgtttgattaccatggtaagctcactcaagaagctagcaccaaaaagtttggtatcttgcttgggatagaccttagaacacctagcacatctgtaagaacggataaacaagctgctgaaatacttaagagcccactggtgagagactcaatgcggggggcagcttttttgtcaagctcagtggacatgatgtcccctaagaatgaaacgtcgaatttggaacttgcatatgggcttcagaggggacctggcatgggattgtcaagctggtctcagggtatgcagctaccaaatacacagctgcagagctcaagcaatagcctacttgagcagagtgcaagattaaactcaaattttagttcatcttattcagacaacaatcagttctaccaacctgcaacaattcatggataccagctcacatcttacctgaaacagatgaatgccagcccaagcctttactctagcatgccgctggacccacaacggcttccaaaatcatctgtgtctgctgtgccaaactatgctgattccatgatgcatgctcgtaatcataacctgcttgcttcactgggtggtactactacacagcttcctgcaacatcccgcgtaggctcaatgatgcctgaaagatcgtattatgatccttccagcgttgatgggaatgaaaacgctggttcacctgcttactcaaaaaagtaccacagctcacctgatatgtctggaataatcgctgcaagtagagctgcactcttgaatgaagcaaagttgggtgctgccattggaccacagtcatacctcagcaggctggcggcagaaagatctcaatatgcaagctcaacagccaggcccgcggctccattagcatttgacgagctttcacctcctaagctccagagtgatatcttctcggcgcagtcaagcatgagaccaagtgctagatccctttgggctaagcaaccatttgagcaattgttcggcatgtcaagtgcagagctcagtaaaggtgacttcaatcttccaggcagatcaggtggcgtggccaaggatgatttctcttataaggaatctgagacgaagcttcttcagtccctcaggctctgcatcatgaagctccttaagctagagggatcagggtggctgttcaagcaaaatggtggttgtgatgaagatctaatcgaccgagtcgctgcagccgagaagctattgatgcaagggactgccgagaatcaactgctgcttcatggtggtgatctccagcaacattcttccgaccaggccggcatccagtacatgcgcacgcttcccaactgcggggaggactgtgtttggcgcgcgtcactcgtcgttagtttcggtgtctggtgtgtccgccgagtgctggacatgtctctggtggaaagcaggccagaactttggggcaagtatacctatgtccttaaccgtcttcaggggatcttggaccctgcgttctccaagcctcggggtgctctgacaatatgcacctgccttcagaaagacaccagagtgcgcaatagcccaccccacagtgggctaacagccatgggcccggtccccacaccgatccggggcgccttcacgaccgcaggcgtggttctggagatgatcaaggacgtggaggctgcggtctcaggccgcaagggcaggagcggcacggcggcgggcgacgtcgccttccccaaggggaaggagaacctggcctccgtgctgaagcggtacaagcggcggctcgccagcaagggccagtagcgcgcgggtgtcagacaggcaggcgatcgcaagcaatgttaggaggagcctgactattgttctccaggggggctgccactggcgccggcctccctgagccctggattttttcgttgcacgacgttcctagggaccggtggttgcccgatggtcgtcttggtcccttccagcaggttttttttttccttccctctttctgttggtttctttttgttggctttgtgatgttttgtaaggggcaactagggtatgtgctcagaaggactcaagatgtacacgcgaagatgtactagtctgctgatgcagcgttgtaaagtccacactctgcaggttaaccctttttggggccgtcaagtgttagtgcgtgccctatgtatgttaatcacccctgcagagaggttgcgaatactgaactactcacagacctgcacctgtcgagatcgtttgtaatatccgacgtcttgttcagaattgttctcactcttttttgcccgttgtgtaatttaccctgaagggacttcaagtacgtgcttcggcaagcacggtcgtgaaagaaaaaaaactgttagcatcagtgagctgcctgttgagcagtaaaagagaatacaatgtgagctctcaactcaaaagcgagatgtgtcacgcgcgtatctcaagaagcattgggccaaagctttttatgccaggcaagagagatgcatcca

SEQ ID NO: 33382 - DNA, 4630 bp, Zea Mays
ctaaaagtggcaatcaccaagcgtccaaagtccaacacaatcaaaaggttgccacgttgacgctttcatgttatcccgaacagtgaaagcaaccagcactatacaatcattttttggttttatatagtacttagttataattaatttcttcgtcacttgtgacaacgctctcttttcagatttttcttttagtttatccgacctttaacatttctgaatttaaaccggcaaattaacccagacgaacagatgacaagaatttcaaaaaaaaaaaaaaaagcgtaagcaccacagttcttgaaatcaggactggtccacaaaacccactcttgccaccccgtgacagcaggaaacagtacacagtagcgcataaccttccaagaaaatttaattaataaacccgaagaagccaagagggaagggaaaaaaaaagaaagaaaaaaaactgacacataagaaaagagcagcgagcaagctgaaggtgaaagccacagcagctcgtccccttccccccacttcttcctcagataaggagaggccccaggccagagaaaaaagcatcgaatttccccccgttaattggcctgagccctcagccgtctaccagcagcagctagaggcagacaagctaggttttactgcttcattgagcacaaagatccgctgacctcttgctcttggtaaaaatccaacctttcttgtattgttttcttcctgggaaaacctccttgtggtgcataaacttcgtagtacactctgccatttctggagaggaagctgagaactactatccatatctggcacgacccttgtcaagaaccatggctgttcacatgccatgaagctgcttgaactggaggcacctaaatgctgtggattgttcctatgcagatgattggatcagtggtttcaggcttcggggggttcgatcagatgttgtatgaataatagcaggattgcttgagagactatagtttgggtactgtttgcttctgtatttactggtacggtttcctactgatctgcggctgcgcaggaaggcattctcttttttgccgtaccatggatgcaccggatgttcaacagagcatgggatataaggagtccaggggtggtatgcctaagtttttccatgcccttggaccagcactcctgatttcaatgggttacattgatctcgggaagtgggtggcagccgttgaagctggttcttgttttggattcgacctggtgttgctggctctccttttcaatttcactgccattgtatgtcagtaccttgctgcttgcattggcactgtcacagggaagaatcttgcagagatatgccaccaagagtacaaccagccaacatgtatattccttggtgttcaagctggattgtctttgttgacgtcagagctgactatgatttttggcatagcactcggattcaacctcctgtttgaatatgatgatctcatcacagggatatgctttgcaacagtggtacctaatctgctaccatatgctatatcccacctgggaaagaagatggaagggacaataaatgcctgcatagcaggatttgcacttcttagttatgtgcttggcttattggttagccagccacaaattcctctcacgatgaatgtaatattccccaagatcagtggtgagagtgcttactctctgatggcgcttcttggtgcaaacataatggcacacaacttctacattcattcatcagttgtccagggtcagaaaaagtcatctgcagttggtcttggagccttatttcacgaccaccttttttcaatattgttcatttttactggaatctttatggtgaactatgttctaatgaactctgcagcagcggaatctactaatactcttctcattaccttccaagatgttgtagagctaatgaatcagatatttgtaaaccctctggcaccaactatatttttagtggttcttctcttctccagccacatcatctcgctgacatctgctatcggtagccaagtgatttcacaccatttattcggtataaaccttcctctttctggacatcgtctcctactgaaggtttttgccatagttcctactctgtactgggcgaaagttgcaggagctgaagggatataccaattattaattatatgccagattattcaagccatgcttcttccatcttcagtcgtcccactttttcgtgttgcttcatcaagatcaataatgggagcccatagagtgtctttgcatctggagatactggtttttcttgcatttctccttatgctattttcaaatatcatatttgtggcagaaatgctatttggcgacagtgggtggatgaacaatctgaaaggatatactggaagccctgtggtgctcccatataccgttttagttttagttgcacttatatctgtggctttttcactgtacctggctgttacaccattgagatctggaagtcatgaagctgaatcccatgaatggtctgtgcattctcagagagaactcttgaatacttctcaagaaagggaagatgttaaggtggacaatgttacatatgaggaagatcaaagatcagatgttgtcccttctcccagggatgtgcctgacagccatccggaactggccttggactatattgatacttctgacactgctgtagaatctgatcacgactctcaacaatctactgcttatgcatccactgctcctgaaacctgctcctccccgtcgtttactcgcgaggagtcaaaatcagttgttgcagtcaactggccggagcctttggagaaggttcctacttctactgtgatggaggaaagcacagtagaaaatgtggtctctaggatcacgactgaaagagatgttttagtagaaacagatgttgtctcgggcaaggataaggaagatatccgtactttggagtctgagaagtcaattgttgatagcaccccatatgtgtctgatgacggtccgccatcccttactttcagcaggggaaagggctcagatgcaggaaatggcagtggtagtctctcaaggttatctggtttgggccgtgcagcaaggagacagctagctgctactcttgatgagttctgggggcatctgtttgattaccatggtaagctcactcaagaagctagcaccaaaaagtttggtatcttgcttgggatagaccttagaacacctagcacatctgtaagaacggataaacaagctgctgaaatacttaagagcccactggtgagagactcaatgcggggggcagcttttttgtcaagctcagtggacatgatgtcccctaagaatgaaacgtcgaatttggaacttgcatatgggcttcagaggggacctggcatgggattgtcaagctggtctcagggtatgcagctaccaaatacacagctgcagagctcaagcaatagcctacttgagcagagtgcaagattaaactcaaattttagttcatcttattcagacaacaatcagttctaccaacctgcaacaattcatggataccagctcacatcttacctgaaacagatgaatgccagcccaagcctttactctagcatgccgctggacccacaacggcttccaaaatcatctgtgtctgctgtgccaaactatgctgattccatgatgcatgctcgtaatcataacctgcttgcttcactgggtggtactactacacagcttcctgcaacatcccgcgtaggctcaatgatgcctgaaagatcgtattatgatccttccagcgttgatgggaatgaaaacgctggttcacctgcttactcaaaaaagtaccacagctcacctgatatgtctggaataatcgctgcaagtagagctgcactcttgaatgaagcaaagttgggtgctgccattggaccacagtcatacctcagcaggctggcggcagaaagatctcaatatgcaagctcaacagccaggcccgcggctccattagcatttgacgagctttcacctcctaagctccagagtgatatcttctcggcgcagtcaagcatgagaccaagtgctagatccctttgggctaagcaaccatttgagcaattgttcggcatgtcaagtgcagagctcagtaaaggtgacttcaatcttccaggcagatcaggtggcgtggccaaggatgatttctcttataaggaatctgagacgaagcttcttcagtccctcaggctctgcatcatgaagctccttaagctagagggatcagggtggctgttcaagcaaaatggtggttgtgatgaagatctaatcgaccgagtcgctgcagccgagaagctattgatgcaagggactgccgagaatcaactgctgcttcatggtggtgatctccagcaacattcttccgaccaggccggcatccagtacatgcgcacgcttcccaactgcggggaggactgtgtttggcgcgcgtcactcgtcgttagtttcggtgtctggtgtgtccgccgagtgctggacatgtctctggtggaaagcaggccagaactttggggcaagtatacctatgtccttaaccgtcttcaggggtggacaatcatctgaaatggcattacaatatagaaaacaaaaggactggcccaggattttc

SEQ ID NO: 33383 - DNA, 1335 bp, Zea Mays
cttcggtagtcttgtgtgtacaatcaattgttcacatctttgtatcacaagaaagttattaagctatggcattccaatcttttacttacgtggatagaagttttctcagtagcgcagagtgcaaatactgaacatgacaaacaactcatcagttccaagtgtctttatatttttacttagcattaagagctacacttctctgcctgtagatctttttcagactaaaggcctaaacgtggacctgcttcaaacttcaagtcttgaactggaagctatcaaaattactgttgcaggcaccagattagggccatcttatgcaaatgaccatgatggttcccccttcgttcccgcaagaactccactatctgaacaaggaggacaggctgcttcgctggctggtcgtgaagcacagagacacggtatacgggttggagttcttgaacgcggatggcgggagggacgagctgagaagtttcagccttggtcacacgaagggcgactacgatattgaaattgactccgacgacgaagactacgatgactccgacgacgaagagtacgcaatcgaggaggaggaagaggaagaggaggcggcgaaggatgaggagaagaagtagaactgtttggccaggtttctgcagtctcatctgtattggcagatgcgcgttttcttagaaatcaaatgttctctttgtaacatctgcgactttttataaaggctgtagggtatgggatgagagtcagaacctatcacttgtgtttctgaacttttaaaaccaggaaaacgggagctggaacttaccggttggttgtaaaatggatgacatgaatttggaaaatcttcccgtgacaaagcgtgctttgatactattttgataaaatctcctcatgacataatctgccatgtgtgtgcgttgatgtcttattgggcaagtctaagcaagaaagagttgcaggaccttattcaggagggcgctaagctgttcggtttgcgcagccaatgtcaaggtggttactcaagatggaggccatgaagaaaatgatgtggaggatgagccgactcatgaagactaatgaagagttgaaaaggctttgtgggaagagaagctggatgtctgttctgtgatgccccagttctggtggtttgctagtgtctttgggattggatattgctgtcttattgttgttgatgagttggctggttattagtttcgttggttgacaggtttagaactagatcttttgcagctcttaaacttgctagggtagttagcctgctgtgcttctatctttggccgcaacacacctgaattagtgctgtccatgtggcttttt

SEQ ID NO: 33384 - DNA, 1301 bp, Zea Mays
gttttaattgttcaatggtgttcgagggaaatgcgtcaaggagccatgagtctcgggtttcggacttgcgatgtcttggcgccttggcggcacacggcgtcttccgcgtgctcgatgaaatgcccaagtagattttgccctaggattggccttcgcactgtcttcggaatcgttctctgcgaagaggctactgctcttgtgattgttcgtttgcatggagctagtggtcacaagtccaaatcacaggattgcactgatcgagttgtctcagggccatcttatgcaaatgaccatgatggttcccccttcgttcccgcaagaactccactatctgaacaaggaggacaggctgcttcgctggctggtcgtgaagcacagagacacggtatacgggttggagttcttgaacgcggatggcgggagggacgagctgagaagtttcagccttggtcacacgaagggcgactacgatattgaaattgactccgacgacgaagactacgatgactccgacgacgaagagtacgcaatcgaggaggaggaagaggaagaggaggcggcgaaggatgaggagaagaagtagaactgtttggccaggtttctgcagtctcatctgtattggcagatgcgcgttttcttagaaatcaaatgttctctttgtaacatctgcgactttttataaaggctgtagggtatgggatgagagtcagaacctatcacttgtgtttctgaacttttaaaaccaggaaaacgggagctggaacttaccggttggttgtaaaatggatgacatgaatttggaaaatcttcccgtgacaaagcgtgctttgatactattttgataaaatctcctcatgacataatctgccatgtgtgtgcgttgatgtcttattgggcaagtctaagcaagaaagagttgcaggaccttattcaggagggcgctaagctgttcggtttgcgcagccaatgtcaaggtggttactcaagatggaggccatgaagaaaatgatgtggaggatgagccgactcatgaagactaatgaagagttgaaaaggctttgtgggaagagaagctggatgtctgttctgtgatgccccagttctggtggtttgctagtgtctttgggattggatattgctgtcttattgttgttgatgagttggctggttattagtttcgttggttgacaggtttagaactagatcttttgcagctcttaaacttgctagggtagttagcctgctgtgcttctatctttggccgcaacacacctgaattagtgctgtccatgtggcttttt

SEQ ID NO: 33385 - DNA, 1454 bp, Zea Mays
gcgatgtcttggcgccttggcggcacacggcgtcttccgcgtgctcgatgaaatgcccaagtagattttgccctaggattggccttcgcactgtcttcggaatcgttctctgcgaagaggctactgctcttgtgattgttcgtttgcatggagctagtggtcacaagtccaaatcacaggattgcactgatcgagttgtctcaggtgacacattgtatggaaccagtatggactacctgagcgattttttttaccttgctcttgcttcggtagtcttgtgtgtacaatcaattgttcacatctttgtatcacaagaaagttattaagctatggcattccaatcttttacttacgtggatagaagttttctcagtagcgcagagtgcaaatactgaacatgacaaacaactcatcagttccaagtgtctttatatttttacttagcattaagagctacacttctctgcctgtagatctttttcagactaaaggcctaaacgtggacctgcttcaaacttcaagtcttgaactggaagctatcaaaattactgttgcaggcaccagattaggtcttagtaagctcagaacagttcccaaaagcattgtctcacaggacaatgtatcatttcaattacgattcaactaaacagaaaacgagtttggttttaatcttctgttgctaccctccagtgccatgtaccaaaactgtgtattgctttgagttaggtacatcagtttagttatctaaggtttatgatattacacttcccttgtaaattactctttccgctaggttgccaaaactgaccaaagtagttctacttttggtatttttgtctgtaggatactggttttattattaatatttatttattttggctttggatttttcaatgtaggaaactagttagtccctgtcaacaaagtcttttaacagcgttctgcataccagtcacatttaactagtgtcctgcggaccgttttctctttcagttgtgatatccttttccacttcatgctatgagctttttattggtgactattgctttgctacaccattttctaattcagatcaacgttatggtcaaaatttaaatattgctccacaatttgtgacaagattttggtttattggttgtaacatataatgtatgttggtttctatcaacactcaaagaacagctgattgcttgtaagcactattagattagttttgacaacccttctcgatcacttgctgccattactcaacattttttttgttttagcttgcggatttcgcgctgcaggtttttactaaacattggagtttagacagttgttgtgagataagcaattaaatttaccttacagtgtcatgtggaaattagaaaaaaaaagtgctgtgctactgctgcatcaacctctagacacagatgtggttgtagcttgtatgcaactgggatgagtttcag

SEQ ID NO: 33386 - DNA, 1299 bp, Zea Mays
gcgccccggccctcctgtcgcccttgctgtctcgggagtcggggccccgtaaaaaaggcaaactcgaccccgcgaccgcttcctctgctcctcttcctcctctcctctcgcatccgcagcttccccagccagctagggtttgcagatgacgaccgcggcgcgccccacctgggcgccggccaagggcggcaacgagcaggggggcacccgcatcttcggcccctcccagaagttctcctcccgcgacctcgccgcgcacacctccctcaagccaagaaaagacggtcaacagacccaagaggagttacagaagaggaatctcagggaggaacttgaggaacgtgagcgcaagcactactcttccaaggataagtcctatgccgaaagagaccggcggaaaagctctagccatctactcttagaaggttcaaagagagagacagaggataagatagttccacgagaaatcgatgctgatgactccgatgtggagcctaaaagcgatgacgagagcgatgaagatgatgatgacgacgacactgaagctctaatggcagagcttgagaggattaagaaagaaagagccgaggagaagcttagaaaggagcggcaacaagcagaagaggaggccaagatgaaggaggctgaactgatgcggggaaacccgttgattaatatcaacaatgctggctccttcagtgttaagagaaggtgggacgacgacgtggtattcaagaatcaagcacgaggagagaccaagacaccgaaacggttcatcaacgacaccatcaggagtgatttccaccgtaaatttcttcagaggtacatgaagtgacgcttccgtcgttcacaattcagcctggagcccctcatcgttatcatgtttgtgtatgagcgaaagatcattattgtgttgttgtatgaaacaagagtgtaaacatatgtctactacttaacaaagttatgctgagcaatgcatatcctagttgaatgtgacaatgctatgttttctatattttgacgttatttggttgtaatcatatttaagtttgactaggaaagatgagctcagagagcagcacagatggattgagtaagggtgtgtttggttgagtggagaacggttgtacgaaagaggggcgaactctataaattattgggatgttcttgctccactaaaatgattgacgatgggtaggctctattctccagttcaaccaaacacaccctgagatgtgagatcaactccagcagcctcctgtgtatggctaatctaagaaactttgcatcgcgtgtcct

SEQ ID NO: 33387 - DNA, 1299 bp, Zea Mays
cggcgccccggccctcctgtcgcccttgctgtctcgggagtcggggccccgtaaaaaaggcaaactcgaccccgcgaccgcttcctctgctcctcttcctcctctcctctcgcatccgcagcttccccagccagctagggtttgcagatgacgaccgcggcgcgccccacctgggcgccggccaagggcggcaacgagcaggggggcacccgcatcttcggcccctcccagaagttctcctcccgcgacctcgccgcgcacacctccctcaagccaagacggtcaacagacccaagaggagttacagaagaggaatctcagggaggaacttgaggaacgtgagcgcaagcactactcttccaaggataagtcctatgccgaagaaagagaccggcggaaaagctctagccatctactcttagaaggttcaaagagagagacagaggataagatagttccacgagaaatcgatgctgatgactccgatgtggagcctaaaagcgatgacgagagcgatgaagatgatgatgacgacgacactgaagctctaatggcagagcttgagaggattaagaaagaaagagccgaggagaagcttagaaaggagcggcaacaagcagaagaggaggccaagatgaaggaggctgaactgatgcggggaaacccgttgattaatatcaacaatgctggctccttcagtgttaagagaaggtgggacgacgacgtggtattcaagaatcaagcacgaggagagaccaagacaccgaaacggttcatcaacgacaccatcaggagtgatttccaccgtaaatttcttcagaggtacatgaagtgacgcttccgtcgttcacaattcagcctggagcccctcatcgttatcatgtttgtgtatgagcgaaagatcattattgtgttgttgtatgaaacaagagtgtaaacatatgtctactacttaacaaagttatgctgagcaatgcatatcctagttgaatgtgacaatgctatgttttctatattttgacgttatttggttgtaatcatatttaagtttgactaggaaagatgagctcagagagcagcacagatggattgagtaagggtgtgtttggttgagtggagaacggttgtacgaaagaggggcgaactctataaattattgggatgttcttgctccactaaaatgattgacgatgggtaggctctattctccagttcaaccaaacacaccctgagatgtgagatcaactccagcagcctcctgtgtatggctaatctaagaaactttgcatcgcgtgtcct

SEQ ID NO: 33388 - DNA, 990 bp, Zea Mays
ccattaaccccggccccggcaactccccaagtcgagcaacaggccaaacccccagccgccggaagccgctaccgctagcacctccgatcgagtcggcgccatggaagacgtcatcaccgacgtgccgccgccttcccgcttttcccctgacgacctcgacaacttcgccgctccgccagcgcagcccacccccatcttcgtcgtttccccgaaccctagcccaccggccccgcgcctcctcgtcgtattcatctcccccacctccctcgcgctcctcgcctccccgccgccgctcctcgcctccctgctcctcccggacctgcccctactcccgcacgcgcccatgcgcgtgtacctccacccctccggcgcgctcctcgccgcggcgcacggcgccttccccgcccaccgcgcgcgcgccgccgcgaaggctcttgtctccaggctccagccggaggaggtgctggttttggacgcggtccggagcgggacgtaccggggccgcctcgccgcggacgagcccgtggaagggaagttggagacccgcgcggcgcgcgcgcggggaggcgtgggggctgccaaggcagtccaggctctggtcccacccggcagcgtggtggacgggctcggcgccgccgtgctcgcggagtgcgagatccggggcaaggcggccagcatggtggtgacgtggccggcggactccaggcccgcggagttcggggtcatgcggcgcgtggcggcggagctcggcgtcgacaccggcaaggccgcggccagggtctccggccggcccgacctggattccttgtacacttgagatttctctgttactgctgctgaattgctgatttcgttggctgtggcgttgggttgtctgatgagtgagtgttttgttggtttgagacaatttggggtcaaatctggtctgacggacgagttggtttgcgtgatttcatatatgaacaaattctgatctcagttgtgtcaata

SEQ ID NO: 33389 - DNA, 1204 bp, Zea Mays
gaaacttcttttcccctttcaccatttgccaaatgttttgcggcgggccaaacaggaccagaattacacggaaggagcatgtgcggacaagctcggtttgatgggcttgatccaaaagcccgcataggctgagcaccgtctagtcgtcgccagtttcgttccgctgcagcagcggcagcgctcccctcctcgacgccgcggcttctcctcatcctcgcccgctccgtccgctgactggaagtggtctacacagaaggttaccatattgttaagttaaagttggatcattggaacaatgccgccccataagattgagactgggcatcaagatgtggtccatgatattgccatggattactacgggaagcgcctagctacagcctcctctgataacacaataaagatcattggcctacgacggccgggtgatcatctggaaggaaggaagcaagcctgatgaatgggcactagcacacacctttgctgagcacaagtcctccgtgaactccattgcatgggcgcctcatgagctgggtctatgcttggcttgtggttcatcagacgggaacatttcagtcttcgctgctcgttctgatggaggttgggacaccacacgtatcgaccaggcacatccagttggtgtgacctcagtttcctgggctccagcaatggcaccaggagctctaatcagcgcaggatcttctggccagtttgagtatgttcagaaactcgcttctggtggctgcgacaacacggttaaggtgtggaagctcaacaatgggagttggcggatggactgtttccctgccctacagatgcacaaggactgggtgagagatgtcgcgtgggccccaaacctgggccttccaaagtccaccatcgccagcgcctctcaggacggaacggtcgtcatctggacagcagcaaaagaaggtgagcagtgggacggccgggtgctgtatgatttcagaacccccgtttggaggctgtcgtggtcactgactgggaacatactggcggtttccgacggcaacaacaatgtgaccctgtggaaggaagctgtggatggcgaatggcagcaagtgacgactgttgagccataggcacagtgcacgagacatggtttcaggctcgggcaaaagtgaacaattaacttgttatacagtccattctgtttattcagtgccttttcgttcccatgttt

SEQ ID NO: 33390 - DNA, 2317 bp, Zea Mays
caaaaacaagatgcgatagtgtgtgattgtattaggaaaagtagtcatactatgctataaaaaaagatcaagaactcaatgtcttgtttttactcaaagtctttaccaaacaagatgctgtgtttccattatcaaattcagaagtgccaccattcctactaacattccctccatccatcaaagcatgcgctagtcttatgctgcgtgtcattccgattgctatgtgctcttcacctctggccactaatgctttttataatgtgttgatggacccttaatgcttaaaacactaacttgcttgctctcctatccatataatgtgcatggtttactctgtttcagaccacaatatcctatctggtgcacttgtggatatatatgctaaataattcactgtgcgagtaatcaggactgcacattgtaggttcactgaactgcagctgagacctttttctagaagcactatgcctttaccatgctttgggtgtccagggaccaatgcaaagaaaacatgatcgaccagggagatagtctttctgtgctaattatgtgtttattatctcccatctttcagcggtaatggccgtccttgtcattctaggaactatgctgttatctgctcatctctaagagcaggccgtatgatcaaacacattttagtaactgtcctcacactgtattgccactgtacacagaattccaatcactagattaaagatctgctctgctcatcagctcatacatgagagttgactcctccagtgctgattctgaaggccagagcagccatccaaaaacgacacctcaggcgatgtccacagtgacgacggcttctagtccacccacgtacgcttataaatggcagcgtctcttcgctgaacgctgcaaccaagcacggataggagtttcaggcattccgggcgtcacgcatctgatcagaaatgctaagggcggtggcgttcgccgtcttcctcctctctccgccactcggcaccacggctgttcgcagagctacaacgcgatctacagcttcggcgactccatcgccgacaccggcaacctctgcacgggctccggcggctgcccgtcgtggctcaccaccgggcagccaccctacggcaacacccacttcggccaccccaccggccggtgcaccgacggccgggtcatcctcgactttctagctgatcactttggcctgccgcttctcccgccgtctaaggcgatcggcgccggggacgtcaggaagggcgcgaacatggccatcattggcgccaccaccatggacctggagttcttcaataagcacggcctcggcagcagcatctggaacaatgggcccctgggcacccagatccagtggttccagcagctcatgccctccatctgcggcgccgattgccagagctacttcaacagctccctgttcgtcgtgggcgagttcgggggcaacgactacaacgcgccgctcttcggcggcaaggccatggccgaggtcaggagctacgtgcccgagatcgtggaccggatcgcaagcggcgtggagacgctgatcgggctgggcgcggtggacgtggtggtgcccggggtgctgccgatcgggtgcttcccgctgtacctgacgctgtacccgggctcgagcaaggacggcgactacgacgaggccggctgcctcaggagctacaacaacctctccagctaccacaacgagctgctgaggcaggcggtgtccgggctgcagagcaagcacggcggcggcgtccggctcatgtacgccgacttctacgcgcaggtcgcggacatggtccggtcgccggagagctacgggctgcaatacgggctgagagtgtgctgcggcgccggcgggcagggctcctacaactactacaacaaggcgcggtgcgggatggccgggtcgagcgcgtgcggcgacccggagaagtacctggtgtgggacggcatccatctcacggaagccgcctaccgttccatcgcggatgggtggctcaaggggacctactgcagccccggcatcctgcgtcgttgaggacctcgccatgcatatcaatcactctatctatctatacgactatagtaataatcaaataatgttagggccggatgagactgtggtggcaaagaaaattgacagtttctctatactttgtgcgcgctacggaagggtcgtcatttccgctctccaatacctttggctagggagaaatatcttaaatataatataggatttaaatgtttaatttgaagatctaactgaaaaaataatagatggtgcatatgacatttcgatatacatggt

SEQ ID NO: 33391 - DNA, 2951 bp, Zea Mays
ctcatttgtatacctttgatcatgtctcttttatatgctatgactaatgtgttttcaagtctatttcaaaccaagtcataggtatattgaaagggaattggagtcttcggcgaagacaaaggcttccactccgtaaatcatccttcgccgttactccacgcttctctccatcatttgggggagaattcaaagcaaaaggaccttgtctttgggagaaatgagctcaaagcaacaagaccggacttcgtctttggttgatcaagattgacaacaaatgacgattaagtgttcaacatgaaaaagaggtagaaggaaagcaaaatgcaaagactcaagaaaaaggtattgctaggacattttgtttttaacaaaaacaagatgcgatagtgtgtgattgtattaggaaaagtagtcatactatgctataaaaaaagatcaagaactcaatgtcttgtttttactcaaagtctttaccaaacaagatgctgtgtttccattatcaaattcagaagtgccaccattcctactaacattccctccatccatcaaagcatgcgctagtcttatgctgcgtgtcattccgattgctatgtgctcttcacctctggccactaatgctttttataatgtgttgatggacccttaatgcttaaaacactaacttgcttgctctcctatccatataatgtgcatggtttactctgtttcagaccacaatatcctatctggtgcacttgtggatatatatgctaaataattcactgtgcgagtaatcaggactgcacattgtaggttcactgaactgcagctgagacctttttctagaagcactatgcctttaccatgctttgggtgtccagggaccaatgcaaagaaaacatgatcgaccagggagatagtctttctgtgctaattatgtgtttattatctcccatctttcagcggtaatggccgtccttgtcattctaggaactatgctgttatctgctcatctctaagagcaggccgtatgatcaaacacattttagtaactgtatgtatttctgctcaatatccaacgtacatgcattcttctctgccatctggttttccaatcagcttcttcaaattttcagtttgtgtcgtgtatgatctatgcatctaattatcataggaaagaaaccgactgatacatgcacaaagagaggacaaatttccagcgcgcacacagaaaagtttaaatcctctgttttgaaaagtgaaactggagtggtattagttttgagtacaccatttctgttcttttttcaggtcctcacactgtattgccactgtacacagaattccaatcactagattaaagatctgctctgctcatcagctcatacatgagagttgactcctccagtgctgattctgaaggccagagcagccatccaaaaacgacacctcaggcgatgtccacagtgacgacggcttctagtccacccacgtacgcttataaatggcagcgtctcttcgctgaacgctgcaaccaagcacggataggagtttcaggcattccgggcgtcacgcatctgatcagaaatgctaagggcggtggcgttcgccgtcttcctcctctctccgccactcggcaccacggctgttcgcagagctacaacgcgatctacagcttcggcgactccatcgccgacaccggcaacctctgcacgggctccggcggctgcccgtcgtggctcaccaccgggcagccaccctacggcaacacccacttcggccaccccaccggccggtgcaccgacggccgggtcatcctcgactttctagctgatcactttggcctgccgcttctcccgccgtctaaggcgatcggcgccggggacgtcaggaagggcgcgaacatggccatcattggcgccaccaccatggacctggagttcttcaataagcacggcctcggcagcagcatctggaacaatgggcccctgggcacccagatccagtggttccagcagctcatgccctccatctgcggcgccggtgacgaccattgccagagctacttcaacagctccctgttcgtcgtgggcgagttcgggggcaacgactacaacgcgccgctcttcggcggcaaggccatggccgaggtcaggagctacgtgcccgagatcgtggaccggatcgcaagcggcgtggagacgctgatcgggctgggcgcggtggacgtggtggtgcccggggtgctgccgatcgggtgcttcccgctgtacctgacgctgtacccgggctcgagcaaggacggcgactacgacgaggccggctgcctcaggagctacaacaacctctccagctaccacaacgagctgctgaggcaggcggtgtccgggctgcagagcaagcacggcggcggcgtccggctcatgtacgccgacttctacgcgcaggtcgcggacatggtccggtcgccggagagctacgggctgcaatacgggctgagagtgtgctgcggcgccggcgggcagggctcctacaactactacaacaaggcgcggtgcgggatggccgggtcgagcgcgtgcggcgacccggagaagtacctggtgtgggacggcatccatctcacggaagccgcctaccgttccatcgcggatgggtggctcaaggggacctactgcagccccggcatcctgcgtcgttgaggacctcgccatgcatatcaatcactctatctatctatacgactatagtaataatcaaataatgttagggccggatgagactgtggtggcaaagaaaattgacagtttctctatactttgtgcgcgctacggaagggtcgtcatttccgctctccaatacctttggctagggagaaatatcttaaatataatataggatttaaatgtttaatttgaagatctaactgaaaaaataatagatggtgcatatgacatttcgatatacatggt

SEQ ID NO: 33392 - DNA, 5013 bp, Zea Mays
ttttactagcaatggaaaggagaggagcaaaagagggagccaaaacatagcaaggaaaaggaaaaagaaaatgatcctctctccccagcacttgcgacaggtactagcaggctagcggctgcctcccttgtccccaccggccgccaccaccaccaccacggcaccaccacaccgacccccttcccctcccctctccctgtcgtgcggtgcctcctccgcccaaatccccaaatccgcgcctccgatccgccgccgtccacgatctgccgcagccgttgacccgctaaaaatggcctccgggccgccctcgccatccggcaaaccctactcgcgcaaatctcacgccagctccaaggctcccagcgtcccttccttcgacgcccacaacggccagctcctacccaccgtcaccttttcgctgccctccacgaccaccgcccgccgggagctgcgccgccgcctctcttccgagctctcccaggtgcgcgccgccgtcaagcgcctgaactccctcccggctcccgccccctcctcggcgctctctgccaccgacccctccacgccgcatccgccgtacccgccggcgtccaagcacaagtctaagaagggcggcggagtcccgcagccgcacctctcggcggaggcgcggcgcaagctctacgcgcccgtgttcaagacctgcgccgctctgctctccaggctgatgaagcacaagcacagctgggtgttcaacaagcccgtagatgcgagcgcgcttggcctgcacgactaccatacaatcatcaccaaacccatggacctcggcacagtcaagtcaaagctaggtgccgggcagtacaagtcaccacgggaatttgcaggtgatgtgcgtctgacgttccagaacgccatgacgtacaaccccaagggccaggacgtgcacttcatggccgagcagctgcttaacatgttcgaggagaagtggccggagattgaggctgagatagctcagctatcaccacagcctcctacaccatcctcagcagcacccaaaaagccaaagccaaaggagatagataattctaggccgttagagaggtctgattcgacagttcatgctgccgggatagaagctaccccgaagacacacactggcagaccccaagttttaaagaagcccaaggcaagggagcccaataagagggatatgacattctgggagaagcagcggcttagcaataacctccaggatttgccaccagagaagctagacaatgttgttcagatcataaagaagaggaacttgtcactcagccagcacgacgatgagattgaggttgatatcgatagctttgatgttgaaacattatgggagctcgatagattcgtgacaaactataggaagagtataactaagaataagcggaaggctgagctttctgcggtaaggccggatgaagctgatcctgatcaggagccggagaaggtagaacatgtgaggcagggcaaggcggatcaggatcaaattcctgcagtacaagaaccgattccagaaccagaaacagttgatgttgatccacctaaggaaagtgcagcaggtgggccagtcatacggacacagatagttcatcagcagatggttctgatgctgggcaatcacccagaacgtagcatctataagccagctgctgctttttggcatatgcagaattggttgtttgttattcaaattctaactatatttggaaaattgagaggggaggaagtaccagtccatgggatcggtgaaggagaagcatctagtaatttgaatggtgatctaatgccttgctataagaaaacaccccaagtaggagctccatgggttttctttttcatgatgaaactctcacgtccaccgtcggagtatcatacatccctgaaaaaattagcagcaattgtacaagggatcgcgaaaaagcaggctagagtgtttcctgtttcgtttgttcggcggcctcttcggctcttcccggtggggacgcgagcgcgaacacatcgcgttatccccggctccggccaaatgctcccgcttcgccgcctaccgccgctcccactgccacgcggtcccgcaccccgccgcctgctatcggccgcggcatccgcggccgccgtctcgccgcttccatggccaggcctcagcgcctggcgccgggcgccgcccagcgacctccgcacgtggggcccgaacggtccctgcgcctccggcgacgtcgatgagccggctgctgacgccggtgcggcctcgtcgctggcggagatgggggcgctcgtgctgtccaccgccgaccccctcgccaaggcacggcgcacccacgccgccttctcccggtgggccgccgggctccccatcggccaggcgacggcccccgaccaccccgccaggcccgataagcccctcgtggtgacgcagaaggagattaccacgcacaaggagatgggggtgccgctcaacgcgtacatgctgcacaacctggcgcacgtcgagctcaacgccatcgacctcgcatgggacaccgtcgtgcggttcgcgccgctcagggatacgctgggggacggcttcttcgcggatttcgcgcgtgtggccgatgacgagagccgacattttcgctggtactcgcagcggctaggggagcttgggttcagttatggtgatatgcctgttcacaatcttctgtggagggagtgtgcaaagtcctcaagtgacgtttctgcacgattggcagtgattcctttggtccaggtgccacatcattgtcgcttccttctgtgtgatgcttgtcctgtgtatatgctttatttttgtagctgaacttaatagtcttcagtctttacttagtagttgtagtttatgttttaggtgagaatgcttgttgaagaactttacattgttaaaattgaccaatatgttgattattagaaccttgataggaagccagaggtctcgatgctggaccaaggttagtccaaaggttatctggttttggggaccatcgatctgcagacattgtggcaagagtagcagaggaagagcttgcacatgtttctgtaggtttgtattggtttctcaaagtatgccaaatgatgggtcgtgaaccaggcgatactttcaaagacttgataaaggaatacagtgttgtactgaagggtccatttaactatccggctcgtgatgaagctggtataccccgagaatggtatgacgagaagttcaaacaagaagcagcacaaaaactttcagaggtccatgatagattagcttgtattgttgagatggagaaagagagtgcaagtttgaatgactaagtgccacttgatgtacatgggagattgggtcctcacactgtattgccactgtacacagaattccaatcactagattaaagatctgctctgctcatcagctcatacatgagagttgactcctccagtgctgattctgaaggccagagcagccatccaaaaacgacacctcaggcgatgtccacagtgacgacggcttctagtccacccacgtacgcttataaatggcagcgtctcttcgctgaacgctgcaaccaagcacggataggagtttcaggcattccgggcgtcacgcatctgatcagaaatgctaagggcggtggcgttcgccgtcttcctcctctctccgccactcggcaccacggctgttcgcagagctacaacgcgatctacagcttcggcgactccatcgccgacaccggcaacctctgcacgggctccggcggctgcccgtcgtggctcaccaccgggcagccaccctacggcaacacccacttcggccaccccaccggccggtgcaccgacggccgggtcatcctcgactttctagctgatcactttggcctgccgcttctcccgccgtctaaggcgatcggcgccggggacgtcaggaagggcgcgaacatggccatcattggcgccaccaccatggacctggagttcttcaataagcacggcctcggcagcagcatctggaacaatgggcccctgggcacccagatccagtggttccagcagctcatgccctccatctgcggcgccggtgacgaccattgccagagctacttcaacagctccctgttcgtcgtgggcgagttcgggggcaacgactacaacgcgccgctcttcggcggcaaggccatggccgaggtcaggagctacgtgcccgagatcgtggaccggatcgcaagcggcgtggagacgctgatcgggctgggcgcggtggacgtggtggtgcccggggtgctgccgatcgggtgcttcccgctgtacctgacgctgtacccgggctcgagcaaggacggcgactacgacgaggccggctgcctcaggagctacaacaacctctccagctaccacaacgagctgctgaggcaggcggtgtccgggctgcagagcaagcacggcggcggcgtccggctcatgtacgccgacttctacgcgcaggtcgcggacatggtccggtcgccggagagctacgggctgcaatacgggctgagagtgtgctgcggcgccggcgggcagggctcctacaactactacaacaaggcgcggtgcgggatggccgggtcgagcgcgtgcggcgacccggagaagtacctggtgtgggacggcatccatctcacggaagccgcctaccgttccatcgcggatgggtggctcaaggggacctactgcagccccggcatcctgcgtcgttgaggacctcgccatgcatatcaatcactctatctatctatacgactatagtaataatcaaataatgttagggccggatgagactgtggtggcaaagaaaattgacagtttctctatactttgtgcgcgctacggaagggtcgtcatttccgctctccaatacctttggctagggagaaatatcttaaatataatataggatttaaatgtttaatttgaagatctaactgaaaaaataatagatggtgcatatgacatttcgatatacatggt

SEQ ID NO: 33393 - DNA, 4689 bp, Zea Mays
ttttactagcaatggaaaggagaggagcaaaagagggagccaaaacatagcaaggaaaaggaaaaagaaaatgatcctctctccccagcacttgcgacaggtactagcaggctagcggctgcctcccttgtccccaccggccgccaccaccaccaccacggcaccaccacaccgacccccttcccctcccctctccctgtcgtgcggtgcctcctccgcccaaatccccaaatccgcgcctccgatccgccgccgtccacgatctgccgcagccgttgacccgctaaaaatggcctccgggccgccctcgccatccggcaaaccctactcgcgcaaatctcacgccagctccaaggctcccagcgtcccttccttcgacgcccacaacggccagctcctacccaccgtcaccttttcgctgccctccacgaccaccgcccgccgggagctgcgccgccgcctctcttccgagctctcccaggtgcgcgccgccgtcaagcgcctgaactccctcccggctcccgccccctcctcggcgctctctgccaccgacccctccacgccgcatccgccgtacccgccggcgtccaagcacaagtctaagaagggcggcggagtcccgcagccgcacctctcggcggaggcgcggcgcaagctctacgcgcccgtgttcaagacctgcgccgctctgctctccaggctgatgaagcacaagcacagctgggtgttcaacaagcccgtagatgcgagcgcgcttggcctgcacgactaccatacaatcatcaccaaacccatggacctcggcacagtcaagtcaaagctaggtgccgggcagtacaagtcaccacgggaatttgcaggtgatgtgcgtctgacgttccagaacgccatgacgtacaaccccaagggccaggacgtgcacttcatggccgagcagctgcttaacatgttcgaggagaagtggccggagattgaggctgagatagctcagctatcaccacagcctcctacaccatcctcagcagcacccaaaaagccaaagccaaaggagatagataattctaggccgttagagaggtctgattcgacagttcatgctgccgggatagaagctaccccgaagacacacactggcagaccccaagttttaaagaagcccaaggcaagggagcccaataagagggatatgacattctgggagaagcagcggcttagcaataacctccaggatttgccaccagagaagctagacaatgttgttcagatcataaagaagaggaacttgtcactcagccagcacgacgatgagattgaggttgatatcgatagctttgatgttgaaacattatgggagctcgatagattcgtgacaaactataggaagagtataactaagaataagcggaaggctgagctttctgcggtaaggccggatgaagctgatcctgatcaggagccggagaaggtagaacatgtgaggcagggcaaggcggatcaggatcaaattcctgcagtacaagaaccgattccagaaccagaaacagttgatgttgatccacctaaggaaagtgcagcagatgataatgagagatgtgtgggtgaatcatcacctggtcatttggaagatcagaagggagagaatgctggtagatcaagtagttctggaagctctagcagtgactcgggttcatcctctagtgatacggacacagatagttcatcagcagatggttctgatgctgggcaatcacccagaacgtagcatctataagccagatgttgatgggggcactggaaaccataacaccttagttcaagaaaggattctagcatgaatttatgggttatggtgatatgcctgttcacaatcttctgtggagggagtgtgcaaagtcctcaagtgacgtttctgcacgattggcagtgattcctttggtccaggaagccagaggtctcgatgctggaccaaggttagtccaaaggttatctggttttggggaccatcgatctgcagacattgtggcaagagtagcagaggaagagcttgcacatgtttctgtaggtttgtattggtttctcaaagtatgccaaatgatgggtcgtgaaccaggcgatactttcaaagacttgataaaggaatacagtgttgtactgaagggtccatttaactatccggctcgtgatgaagctggtataccccgagaatggtatgacgagaagttcaaacaagaagcagcacaaaaactttcagaggtccatgatagattagcttgtattgttgagatggagaaagagagtgcaagtttgaatgactaagtgccacttgatgtacatgggagattgggttttgtctggctggagtggaaagattaacgaatcatcaaagtgtgtacctaccagtggatgcttggaaagttttctgccgtcggatgggaaaccagatattgtaggcctggagccgtgaactaataccattaggatgctgggttactttttttttggaaactagacgctgtattacttggatgtattatttggaacaacactgacggtggattggtatgatacatgtccattcttcattctactgcaggcttagcgagtgccaaatgttgtgttcagccctctgatctatgatctgaacaagcagttatattgactgtacagtgagtaccaaatgctcgtgggcgcccatgatgcctatcaccctatagcacctttttttgtctttacttgacccactttgtttttaaactaactctcagcttccaaagttattgatgctccataaatcatgagtgatcccatgatttttgtttcttctccaagataagatgtatcctgctcagattagaattaaagatatgtctctcccttcttttagcattgctcttattgttaaaagagctttcagttgttttttgcagtcatggctgtttcaatttttgtgagctagggcccttgcccatgtataccagtgctaaactgctgacataattcctcagtaatccctcataagatgtttcagcttttataggtcctcacactgtattgccactgtacacagaattccaatcactagattaaagatctgctctgctcatcagctcatacatgagagttgactcctccagtgctgattctgaaggccagagcagccatccaaaaacgacacctcaggcgatgtccacagtgacgacggcttctagtccacccacgtacgcttataaatggcagcgtctcttcgctgaacgctgcaaccaagcacggataggagtttcaggcattccgggcgtcacgcatctgatcagaaatgctaagggcggtggcgttcgccgtcttcctcctctctccgccactcggcaccacggctgttcgcagagctacaacgcgatctacagcttcggcgactccatcgccgacaccggcaacctctgcacgggctccggcggctgcccgtcgtggctcaccaccgggcagccaccctacggcaacacccacttcggccaccccaccggccggtgcaccgacggccgggtcatcctcgactttctagctgatcactttggcctgccgcttctcccgccgtctaaggcgatcggcgccggggacgtcaggaagggcgcgaacatggccatcattggcgccaccaccatggacctggagttcttcaataagcacggcctcggcagcagcatctggaacaatgggcccctgggcacccagatccagtggttccagcagctcatgccctccatctgcggcgccgattgccagagctacttcaacagctccctgttcgtcgtgggcgagttcgggggcaacgactacaacgcgccgctcttcggcggcaaggccatggccgaggtcaggagctacgtgcccgagatcgtggaccggatcgcaagcggcgtggagacgctgatcgggctgggcgcggtggacgtggtggtgcccggggtgctgccgatcgggtgcttcccgctgtacctgacgctgtacccgggctcgagcaaggacggcgactacgacgaggccggctgcctcaggagctacaacaacctctccagctaccacaacgagctgctgaggcaggcggtgtccgggctgcagagcaagcacggcggcggcgtccggctcatgtacgccgacttctacgcgcaggtcgcggacatggtccggtcgccggagagctacgggctgcaatacgggctgagagtgtgctgcggcgccggcgggcagggctcctacaactactacaacaaggcgcggtgcgggatggccgggtcgagcgcgtgcggcgacccggagaagtacctggtgtgggacggcatccatctcacggaagccgcctaccgttccatcgcggatgggtggctcaaggggacctactgcagccccggcatcctgcgtcgttgaggacctcgccatgcatatcaatcactctatctatctatacgactatagtaataatcaaataatgttagggccggatgagactgtggtggcaaagaaaattgacagtttctctatactttgtgcgcgctacggaagggtcgtcatttccgctctccaatacctttggctagggagaaatatcttaaatataatataggatttaaatgtttaatttgaagatctaactgaaaaaataatagatggtgcatatgacatttcgatatacatggt

SEQ ID NO: 33394 - DNA, 5372 bp, Zea Mays
ttttactagcaatggaaaggagaggagcaaaagagggagccaaaacatagcaaggaaaaggaaaaagaaaatgatcctctctccccagcacttgcgacaggtactagcaggctagcggctgcctcccttgtccccaccggccgccaccaccaccaccacggcaccaccacaccgacccccttcccctcccctctccctgtcgtgcggtgcctcctccgcccaaatccccaaatccgcgcctccgatccgccgccgtccacgatctgccgcagccgttgacccgctaaaaatggcctccgggccgccctcgccatccggcaaaccctactcgcgcaaatctcacgccagctccaaggctcccagcgtcccttccttcgacgcccacaacggccagctcctacccaccgtcaccttttcgctgccctccacgaccaccgcccgccgggagctgcgccgccgcctctcttccgagctctcccaggtgcgcgccgccgtcaagcgcctgaactccctcccggctcccgccccctcctcggcgctctctgccaccgacccctccacgccgcatccgccgtacccgccggcgtccaagcacaagtctaagaagggcggcggagtcccgcagccgcacctctcggcggaggcgcggcgcaagctctacgcgcccgtgttcaagacctgcgccgctctgctctccaggctgatgaagcacaagcacagctgggtgttcaacaagcccgtagatgcgagcgcgcttggcctgcacgactaccatacaatcatcaccaaacccatggacctcggcacagtcaagtcaaagctaggtgccgggcagtacaagtcaccacgggaatttgcaggtgatgtgcgtctgacgttccagaacgccatgacgtacaaccccaagggccaggacgtgcacttcatggccgagcagctgcttaacatgttcgaggagaagtggccggagattgaggctgagatagctcagctatcaccacagcctcctacaccatcctcagcagcacccaaaaagccaaagccaaaggagatagataattctaggccgttagagaggtctgattcgacagttcatgctgccgggatagaagctaccccgaagacacacactggcagaccccaagttttaaagaagcccaaggcaagggagcccaataagagggatatgacattctgggagaagcagcggcttagcaataacctccaggatttgccaccagagaagctagacaatgttgttcagatcataaagaagaggaacttgtcactcagccagcacgacgatgagattgaggttgatatcgatagctttgatgttgaaacattatgggagctcgatagattcgtgacaaactataggaagagtataactaagaataagcggaaggctgagctttctgcggtaaggccggatgaagctgatcctgatcaggagccggagaaggtagaacatgtgaggcagggcaaggcggatcaggatcaaattcctgcagtacaagaaccgattccagaaccagaaacagttgatgttgatccacctaaggaaagtgcagcagatgataatgagagatgtgtgggtgaatcatcacctggtcatttggaagatcagaagggagagaatgctggtagatcaagtagttctggaagctctagcagtgactcgggttcatcctctagtgatacggacacagatagttcatcagcagatggttctgatgctgggcaatcacccagaacgtagcatctataagccagctgctgctttttggcatatgcagaattggttgtttgttattcaaattctaactatatttggaaaattgagaggggaggaagtaccagtccatgggatcggtgaaggagaagcatctagtaatttgaatggtgatctaatgccttgctataagaaaacaccccaagtaggagctccatgggttttctttttcatgatgaaactctcacgtccaccgtcggagtatcatacatccctgaaaaaattagcagcaattgtacaagggatcgcgaaaaagcaggctagagtgtttcctgtttcgtttgttcggcggcctcttcggctcttcccggtggggacgcgagcgcgaacacatcgcgttatccccggctccggccaaatgctcccgcttcgccgcctaccgccgctcccactgccacgcggtcccgcaccccgccgcctgctatcggccgcggcatccgcggccgccgtctcgccgcttccatggccaggcctcagcgcctggcgccgggcgccgcccagcgacctccgcacgtggggcccgaacggtccctgcgcctccggcgacgtcgatgagccggctgctgacgccggtgcggcctcgtcgctggcggagatgggggcgctcgtgctgtccaccgccgaccccctcgccaaggcacggcgcacccacgccgccttctcccggtgggccgccgggctccccatcggccaggcgacggcccccgaccaccccgccaggcccgataagcccctcgtggtgacgcagaaggagattaccacgcacaaggagatgggggtgccgctcaacgcgtacatgctgcacaacctggcgcacgtcgagctcaacgccatcgacctcgcatgggacaccgtcgtgcggttcgcgccgctcagggatacgctgggggacggcttcttcgcggatttcgcgcgtgtggccgatgacgagagccgacattttcgctggtactcgcagcggctaggggagcttgggttcagttatggtgatatgcctgttcacaatcttctgtggagggagtgtgcaaagtcctcaagtgacgtttctgcacgattggcagtgattcctttggtccaggaagccagaggtctcgatgctggaccaaggttagtccaaaggttatctggttttggggaccatcgatctgcagacattgtggcaagagtagcagaggaagagcttgcacatgtttctgtaggtttgtattggtttctcaaagtatgccaaatgatgggtcgtgaaccaggcgatactttcaaagacttgataaaggaatacagtgttgtactgaagggtccatttaactatccggctcgtgatgaagctggtataccccgagaatggtatgacgagaagttcaaacaagaagcagcacaaaaactttcagaggtccatgatagattagcttgtattgttgagatggagaaagagagtgcaagtttgaatgactaagtgccacttgatgtacatgggagattgggcttagcgagtgccaaatgttgtgttcagccctctgatctatgatctgaacaagcagttatattgactgtacagtgagtaccaaatgctcgtgggcgcccatgatgcctatcaccctatagcacctttttttgtctttacttgacccactttgtttttaaactaactctcagcttccaaagttattgatgctccataaatcatgagtgatcccatgatttttgtttcttctccaagataagatgtatcctgctcagattagaattaaagatatgtctctcccttcttttagcattgctcttattgttaaaagagctttcagttgttttttgcagtcatggctgtttcaatttttgtgagctagggcccttgcccatgtataccagtgctaaactgctgacataattcctcagtaatccctcataagatgtttcagcttttataggtcctcacactgtattgccactgtacacagaattccaatcactagattaaagatctgctctgctcatcagctcatacatgagagttgactcctccagtgctgattctgaaggccagagcagccatccaaaaacgacacctcaggcgatgtccacagtgacgacggcttctagtccacccacgtacgcttataaatggcagcgtctcttcgctgaacgctgcaaccaagcacggataggagtttcaggcattccgggcgtcacgcatctgatcagaaatgctaagggcggtggcgttcgccgtcttcctcctctctccgccactcggcaccacggctgttcgcagagctacaacgcgatctacagcttcggcgactccatcgccgacaccggcaacctctgcacgggctccggcggctgcccgtcgtggctcaccaccgggcagccaccctacggcaacacccacttcggccaccccaccggccggtgcaccgacggccgggtcatcctcgactttctagctgatcactttggcctgccgcttctcccgccgtctaaggcgatcggcgccggggacgtcaggaagggcgcgaacatggccatcattggcgccaccaccatggacctggagttcttcaataagcacggcctcggcagcagcatctggaacaatgggcccctgggcacccagatccagtggttccagcagctcatgccctccatctgcggcgccgattgccagagctacttcaacagctccctgttcgtcgtgggcgagttcgggggcaacgactacaacgcgccgctcttcggcggcaaggccatggccgaggtcaggagctacgtgcccgagatcgtggaccggatcgcaagcggcgtggagacgctgatcgggctgggcgcggtggacgtggtggtgcccggggtgctgccgatcgggtgcttcccgctgtacctgacgctgtacccgggctcgagcaaggacggcgactacgacgaggccggctgcctcaggagctacaacaacctctccagctaccacaacgagctgctgaggcaggcggtgtccgggctgcagagcaagcacggcggcggcgtccggctcatgtacgccgacttctacgcgcaggtcgcggacatggtccggtcgccggagagctacgggctgcaatacgggctgagagtgtgctgcggcgccggcgggcagggctcctacaactactacaacaaggcgcggtgcgggatggccgggtcgagcgcgtgcggcgacccggagaagtacctggtgtgggacggcatccatctcacggaagccgcctaccgttccatcgcggatgggtggctcaaggggacctactgcagccccggcatcctgcgtcgttgaggacctcgccatgcatatcaatcactctatctatctatacgactatagtaataatcaaataatgttagggccggatgagactgtggtggcaaagaaaattgacagtttctctatactttgtgcgcgctacggaagggtcgtcatttccgctctccaatacctttggctagggagaaatatcttaaatataatataggatttaaatgtttaatttgaagatctaactgaaaaaataatagatggtgcatatgacatttcgatatacatggt

SEQ ID NO: 33395 - DNA, 5242 bp, Zea Mays
ttttactagcaatggaaaggagaggagcaaaagagggagccaaaacatagcaaggaaaaggaaaaagaaaatgatcctctctccccagcacttgcgacaggtactagcaggctagcggctgcctcccttgtccccaccggccgccaccaccaccaccacggcaccaccacaccgacccccttcccctcccctctccctgtcgtgcggtgcctcctccgcccaaatccccaaatccgcgcctccgatccgccgccgtccacgatctgccgcagccgttgacccgctaaaaatggcctccgggccgccctcgccatccggcaaaccctactcgcgcaaatctcacgccagctccaaggctcccagcgtcccttccttcgacgcccacaacggccagctcctacccaccgtcaccttttcgctgccctccacgaccaccgcccgccgggagctgcgccgccgcctctcttccgagctctcccaggtgcgcgccgccgtcaagcgcctgaactccctcccggctcccgccccctcctcggcgctctctgccaccgacccctccacgccgcatccgccgtacccgccggcgtccaagcacaagtctaagaagggcggcggagtcccgcagccgcacctctcggcggaggcgcggcgcaagctctacgcgcccgtgttcaagacctgcgccgctctgctctccaggctgatgaagcacaagcacagctgggtgttcaacaagcccgtagatgcgagcgcgcttggcctgcacgactaccatacaatcatcaccaaacccatggacctcggcacagtcaagtcaaagctaggtgccgggcagtacaagtcaccacgggaatttgcaggtgatgtgcgtctgacgttccagaacgccatgacgtacaaccccaagggccaggacgtgcacttcatggccgagcagctgcttaacatgttcgaggagaagtggccggagattgaggctgagatagctcagctatcaccacagcctcctacaccatcctcagcagcacccaaaaagccaaagccaaaggagatagataattctaggccgttagagaggtctgattcgacagttcatgctgccgggatagaagctaccccgaagacacacactggcagaccccaagttttaaagaagcccaaggcaagggagcccaataagagggatatgacattctgggagaagcagcggcttagcaataacctccaggatttgccaccagagaagctagacaatgttgttcagatcataaagaagaggaacttgtcactcagccagcacgacgatgagattgaggttgatatcgatagctttgatgttgaaacattatgggagctcgatagattcgtgacaaactataggaagagtataactaagaataagcggaaggctgagctttctgcggtaaggccggatgaagctgatcctgatcaggagccggagaaggtagaacatgtgaggcagggcaaggcggatcaggatcaaattcctgcagtacaagaaccgattccagaaccagaaacagttgatgttgatccacctaaggaaagtgcagcagatgataatgagagatgtgtgggtgaatcatcacctggtcatttggaagatcagaagggagagaatgctggtagatcaagtagttctggaagctctagcagtgactcgggttcatcctctagtgatacggacacagatagttcatcagcagatggttctgatgctgggcaatcacccagaacgtagcatctataagccagctgctgctttttggcatatgcagaattggttgtttgttattcaaattctaactatatttggaaaattgagaggggaggaagtaccagtccatgggatcggtgaaggagaagcatctagtaatttgaatggtgatctaatgccttgctataagaaaacaccccaagtaggagctccatgggttttctttttcatgatgaaactctcacgtccaccgtcggagtatcatacatccctgaaaaaattagcagcaattgtacaagggatcgcgaaaaagcaggctagagtgtttcctgtttcgtttgttcggcggcctcttcggctcttcccggtggggacgcgagcgcgaacacatcgcgttatccccggctccggccaaatgctcccgcttcgccgcctaccgccgctcccactgccacgcggtcccgcaccccgccgcctgctatcggccgcggcatccgcggccgccgtctcgccgcttccatggccaggcctcagcgcctggcgccgggcgccgcccagcgacctccgcacgtggggcccgaacggtccctgcgcctccggcgacgtcgatgagccggctgctgacgccggtgcggcctcgtcgctggcggagatgggggcgctcgtgctgtccaccgccgaccccctcgccaaggcacggcgcacccacgccgccttctcccggtgggccgccgggctccccatcggccaggcgacggcccccgaccaccccgccaggcccgataagcccctcgtggtgacgcagaaggagattaccacgcacaaggagatgggggtgccgctcaacgcgtacatgctgcacaacctggcgcacgtcgagctcaacgccatcgacctcgcatgggacaccgtcgtgcggttcgcgccgctcagggatacgctgggggacggcttcttcgcggatttcgcgcgtgtggccgatgacgagagccgacattttcgctggtactcgcagcggctaggggagcttgggttcagttatggtgatatgcctgttcacaatcttctgtggagggagtgtgcaaagtcctcaagtgacgtttctgcacgattggcagtgattcctttggtccagaaccttgataggaagccagaggtctcgatgctggaccaaggttagtccaaaggttatctggttttggggaccatcgatctgcagacattgtggcaagagtagcagaggaagagcttgcacatgtttctgtaggtttgtattggtttctcaaagtatgccaaatgatgggtcgtgaaccaggcgatactttcaaagacttgataaaggaatacagtgttgtactgaagggtccatttaactatccggctcgtgatgaagctggtataccccgagaatggtatgacgagaagttcaaacaagaagcagcacaaaaactttcagaggtccatgatagattagcttgtattgttgagatggagaaagagagtgcaagtttgaatgactaagtgccacttgatgtacatgggagattgggttttgtctggctggagtggaaagattaacgaatcatcaaagtgtgtacctaccagtggatgcttggaaagttttctgccgtcggatgggaaaccagatattgtaggcctggagccgtgaactaataccattaggatgctgggttactttttttttggaaactagacgctgtattacttggatgtattatttggaacaacactgacggtggattggtatgatacatgtccattcttcattctactgcaggcttagcgagtgccaaatgttgtgttcagccctctgatctatgatctgaacaagcagttatattgactgtacagtgagtaccaaatgctcgtgggcgcccatgatgcctatcaccctatagcacctttttttgtctttacttgacccactttgtttttaaactaactctcagcttccaaagttattgatgctccataaatcatgagtgatcccatgatttttgtttcttctccaagataagatgtatcctgctcagattagaattaaagatatgtctctcccttcttttagcattgctcttattgttaaaagagctttcagttgttttttgcagtcatggctgtttcaatttttgtgagctagggcccttgcccatgtataccagtgctaaactgctgacataattcctcagtaatccctcataagatgtttcagcttttataggtatgatgtttttactatggatctaaatacagtgcatatcttaagtatacagtaaaagctacgtatctcgtcttgtactttggaatggagggagtaccagataaatttcgtgactttgcgagtccagtggtcctcacactgtattgccactgtacacagaattccaatcactagattaaagatctgctctgctcatcagctcatacatgagagttgactcctccagtgctgattctgaaggccagagcagccatccaaaaacgacacctcaggcgatgtccacagtgacgacggcttctagtccacccacgtacgcttataaatggcagcgtctcttcgctgaacgctgcaaccaagcacggataggagtttcaggcattccgggcgtcacgcatctgatcagaaatgctaagggcggtggcgttcgccgtcttcctcctctctccgccactcggcaccacggctgttcgcagagctacaacgcgatctacagcttcggcgactccatcgccgacaccggcaacctctgcacgggctccggcggctgcccgtcgtggctcaccaccgggcagccaccctacggcaacacccacttcggccaccccaccggccggtgcaccgacggccgggtcatcctcgactttctagctgatcactttggcctgccgcttctcccgccgtctaaggcgatcggcgccggggacgtcaggaagggcgcgaacatggccatcattggcgccaccaccatggacctggagttcttcaataagcacggcctcggcagcagcatctggaacaatgggcccctgggcacccagatccagtggttccagcagctcatgccctccatctgcggcgccggtgacgaccattgccagagctacttcaacagctccctgttcgtcgtgggcgagttcgggggcaacgactacaacgcgccgctcttcggcggcaaggccatggccgaggtcaggagctacgtgcccgagatcgtggaccggatcgcaagcggcgtggagacgctgatcgggctgggcgcggtggacgtggtggtgcccggggtgctgccgatcgggtgcttcccgctgtacctgacgctgtacccgggctcgagcaaggacggcgactacgacgaggccggctgcctcaggagctacaacaacctctccagctaccacaacgagctgctgaggcaggcggtgtccgggctgcagagcaagcacggcggcggcgtccggctcatgtacgccgacttctacgcg

SEQ ID NO: 33396 - DNA, 1611 bp, Zea Mays
agccgcactaaacacatagccattcggtatcattttcttagggatcaccaacaaaagggagatatcgagatttcttacattaacactaaagatcaattagccgatatctttaccaagcctcttgatgaacaatcttttaacaaacttaggcatgagctcaatattcttgattctaggaacttcttttgttaaaattgcacacattgctcatttgtatacctttgatcatgtctcttttatatgctatgactaatgtgttttcaagtctatttcaaaccaagtcataggtatattgaaagggaattggagtcttcggcgaagacaaaggcttccactccgtaaatcatccttcgccgttactccacgcttctctccatcatttgggggagaattcaaagcaaaaggaccttgtctttgggagaaatgagctcaaagcaacaagaccggacttcgtctttggtataatcttaactcatttatttatgaccaaaggggaagatagcacaaaggctctaatgattccgtttttggcgattcatgccaaaaagggggagaagtgagcccaaagcaaaaggaccgcaccaccaccaatttcaaaaacttaagtgttgaatattttcaattggtgtcctattgtgttcaaaagggggaggaaagtagtttttcaaaataatatatcaaaaccctcttgaacactaagaggagaatctcttctagggggagttttgtcaaaggaaaagcatgtgaaatagggggagaaaatttcaaatcttgaagatgctttacaaaatcttatttatttacctttgactatttgcaaaagaactttgaaaaagatttacaaaagattttgtaaaaacaaaacatgtggtgcaaacgtggtccaaaatgttatataagaaagaaacaatccatgcatatctcataagtatttatattggctcaaattctaagcaacctttgcacttacattatgcaaactagttcaattatggacctctatatttgctttggtttgtgttggcatcaatcaccaaaaagggggagattgaaagggaattaggcttacacctagtccctaattaattttggtggttgaattgtccaacacaaacaattggactaactagtttgcccaagtgtatagattatacaggtgtaaaaggttcacactcagccaataaaaagaccaagttttggattcaactaaggagctatgtggtaaccgaaggccctctggtctgggagcaccggactgtccggtgtacaccgaacagtgtccggtgcaccaccggacagtgtccggtgcaccagaggactccaactcgaactcgccactttcgggaatttccggaggcgactcggctataattcaccggactgtccggtgtacaccggacagtgtccggtgcgccaaagggggtcggcctcaggaactcgccagcttcgggaaaagccaacggctcgtccgctataattcaccggactgtccggtgtgcaccggactgtccggtgcgactccggagcaacggtcatctccgcgccaacggctctctgccgcgcatttaatgcgcgctctgcgcgcgcagatggcaggcgcgcccactccgg

SEQ ID NO: 33397 - DNA, 3582 bp, Zea Mays
ttttactagcaatggaaaggagaggagcaaaagagggagccaaaacatagcaaggaaaaggaaaaagaaaatgatcctctctccccagcacttgcgacaggtactagcaggctagcggctgcctcccttgtccccaccggccgccaccaccaccaccacggcaccaccacaccgacccccttcccctcccctctccctgtcgtgcggtgcctcctccgcccaaatccccaaatccgcgcctccgatccgccgccgtccacgatctgccgcagccgttgacccgctaaaaatggcctccgggccgccctcgccatccggcaaaccctactcgcgcaaatctcacgccagctccaaggctcccagcgtcccttccttcgacgcccacaacggccagctcctacccaccgtcaccttttcgctgccctccacgaccaccgcccgccgggagctgcgccgccgcctctcttccgagctctcccaggtgcgcgccgccgtcaagcgcctgaactccctcccggctcccgccccctcctcggcgctctctgccaccgacccctccacgccgcatccgccgtacccgccggcgtccaagcacaagtctaagaagggcggcggagtcccgcagccgcacctctcggcggaggcgcggcgcaagctctacgcgcccgtgttcaagacctgcgccgctctgctctccaggctgatgaagcacaagcacagctgggtgttcaacaagcccgtagatgcgagcgcgcttggcctgcacgactaccatacaatcatcaccaaacccatggacctcggcacagtcaagtcaaagctaggtgccgggcagtacaagtcaccacgggaatttgcaggtgatgtgcgtctgacgttccagaacgccatgacgtacaaccccaagggccaggacgtgcacttcatggccgagcagctgcttaacatgttcgaggagaagtggccggagattgaggctgagatagctcagctatcaccacagcctcctacaccatcctcagcagcacccaaaaagccaaagccaaaggagatagataattctaggccgttagagaggtctgattcgacagttcatgctgccgggatagaagctaccccgaagacacacactggcagaccccaagttttaaagaagcccaaggcaagggagcccaataagagggatatgacattctgggagaagcagcggcttagcaataacctccaggatttgccaccagagaagctagacaatgttgttcagatcataaagaagaggaacttgtcactcagccagcacgacgatgagattgaggttgatatcgatagctttgatgttgaaacattatgggagctcgatagattcgtgacaaactataggaagagtataactaagaataagcggaaggctgagctttctgcggtaaggccggatgaagctgatcctgatcaggagccggagaaggtagaacatgtgaggcagggcaaggcggatcaggatcaaattcctgcagtacaagaaccgattccagaaccagaaacagttgatgttgatccacctaaggaaagtgcagcagatgataatgagagatgtgtgggtgaatcatcacctggtcatttggaagatcagaagggagagaatgctggtagatcaagtagttctggaagctctagcagtgactcgggttcatcctctagtgatacggacacagatagttcatcagcagatggttctgatgctgggcaatcacccagaacgtagcatctataagccagctgctgctttttggcatatgcagaattggttgtttgttattcaaattctaactatatttggaaaattgagaggggaggaagtaccagtccatgggatcggtgaaggagaagcatctagtaatttgaatggtgatctaatgccttgctataagaaaacaccccaagtaggagctccatgggttttctttttcatgatgaaactctcacgtccaccgtcggagtatcatacatccctgaaaaaattagcagcaattgtacaagggatcgcgaaaaagcaggctagagtgtttcctgtttcgtttgttcggcggcctcttcggctcttcccggtggggacgcgagcgcgaacacatcgcgttatccccggctccggccaaatgctcccgcttcgccgcctaccgccgctcccactgccacgcggtcccgcaccccgccgcctgctatcggccgcggcatccgcggccgccgtctcgccgcttccatggccaggcctcagcgcctggcgccgggcgccgcccagcgacctccgcacgtggggcccgaacggtccctgcgcctccggcgacgtcgatgagccggctgctgacgccggtgcggcctcgtcgctggcggagatgggggcgctcgtgctgtccaccgccgaccccctcgccaaggcacggcgcacccacgccgccttctcccggtgggccgccgggctccccatcggccaggcgacggcccccgaccaccccgccaggcccgataagcccctcgtggtgacgcagaaggagattaccacgcacaaggagatgggggtgccgctcaacgcgtacatgctgcacaacctggcgcacgtcgagctcaacgccatcgacctcgcatgggacaccgtcgtgcggttcgcgccgctcagggatacgctgggggacggcttcttcgcggatttcgcgcgtgtggccgatgacgagagccgacattttcgctggtactcgcagcggctaggggagcttgggttcagttatggtgatatgcctgttcacaatcttctgtggagggagtgtgcaaagtcctcaagtgacgtttctgcacgattggcagtgattcctttggtccaggaagccagaggtctcgatgctggaccaaggttagtccaaaggttatctggttttggggaccatcgatctgcagacattgtggcaagagtagcagaggaagagcttgcacatgtttctgtaggtttgtattggtttctcaaagtatgccaaatgatgggtcgtgaaccaggcgatactttcaaagacttgataaaggaatacagtgttgtactgaagggtccatttaactatccggctcgtgatgaagctggtataccccgagaatggtatgacgagaagttcaaacaagaagcagcacaaaaactttcagaggtccatgatagattagcttgtattgttgagatggagaaagagagtgcaagtttgaatgactaagtgccacttgatgtacatgggagattgggtaggcgctctactaattatttaccatatttaaagcagtcttcttaaccctgaaaactacaaaatatctcattagccatattctgttgcctcaatcaaatagataagaagcttgcatatggcagaccaatagcgcccactacttgattcaagccatttgtttccttcttagataattcttatgaatattgtattatctctagaaataaatctagagagggagaatcctgaaagaaaagcccatttgtaccttcactacgggcacatgatccatactaatctcctatcaatgtcattcagttcccct

SEQ ID NO: 33398 - DNA, 2190 bp, Zea Mays
gaccgaccggccaaccaaccagccagtcaaaaagagtgcttcgctcccaaccttgctcctccattttgctgcagccatccgttgtcgtaggaagcagcagcaaagtaactacctgctgaaatgggggacagaaagttgcgtcagaaattcggcacgggaaacgccggcccagtgccagtggtgggatgacgaaggattacgagagaattctcacggcggtgcatgttgaggagctagctgacggtgatatgtgtttgctgaattcatgcatggtatgctgctgaaatgctcgtgatggtggttggtggcatggtgggcgcgcggagtaatctgcgctccactgctctgccgtcgtcagtggtgagaagccgaggacacggacggcggcggcggcttgtcgccattgccgccgccgttgtgctcctcgtcgccctgcatcctggtggggatgcggatcccggagaagccgacgccgggcgagaacccgatggccgacacagcggggctgagcccgccgtgctgcatcgggttgtcggcttcgacgctctccggccatcctcgctcggagggctggttactggactgaaggggtcccctctggaagaagaactggctctggccgccaaacgccgcctgcatgtgcgccgcctgctgcgacacgttgaacaggtagccgccagcgctcccgccgcctgggtcgggcacggtccacggcaccatgcgctggctctgcgcctgctcgccccacatggcgccgccgccaaacgagtagctggcggcgccggagaagagcgcctgctgcgccgagccattgccgccgtgggcttccgaccggtcctgctgctggtggaacatggggtctgggagagactgcagcgacagccggagctcctggctgtggctgccggtgcgcgacaggaggtcgggcgtgtagctttggaagcccatggccgacgactgcgccgccgccgtggacgacgacgcctcgccgccgccacccgtgccagccatgggaaagaacgacttgatcgtgtccgcgatggagtccgagtcgagcgacgccgggaggaagcccgcggcgccgccgcttgctccaccggcgccggagaagtcgaacggagcgtgcgcggcgacggtgatggcctgcgcctggtcgtcggagttctcggcggcgggtcttggttctgctgcacttgctggtggaactgcagcagccggttgttgtggtgccgctgctgctcatctgcttcttgctgcgctcctccgcctcctcctccttctccgccgccgcctgcgtcgccgccgtgaggagcccggtggtggtgcctcggatccagatcccccgcctggttgcccgccgctactgctgctccgcgtccgacaaggcgcgtccatccaactcgccggcgcccataactaggacgacaagaaacacagaaaagaaaacagtcaaaagagtggagaagaaggcggcggtggcggcatggagatggacatcaggcgaagtggtggccagggatggatggacggacactgacccaggaggagaggcgaggcgaggagttggggagacaaactagaagcaatcggattctcggattcggatggatggcaacatcacattttacccttgggggtgggggtggggggacgggggaggcaaagctcgaagctttctcgctttctttttcccctcgggagtgtgggagctccgagcgcaggaggcacaagggaggcagcaagacaggatgataagactgggatttgggattttgtgaggagagagaaggggagagtgcgtgtgcgtgtgtgtcactcttctcttctcttcactctcgtgacttgtgagtgccgctgccactcgctgtccctatcgctagctcccttgctggcgctagctgatgagcgtgcaggttgctggacagggtggacagcgaggtgcaagaagggtgtttgggaagccaaatttggaggagctggcatgcgtcgatttgggcgcctcattttcgtcacttggatctgatgcatgattgtggagatggagatgtggcatgagatgtgtatttatctcttctttgtatgcttgctttgcctttgttatgcatgcatgggtccgattcttcccgtgacaaacaacggggcagatgccgcgtgaaaaatatacgataataaaccgcccctgtggcatgg

SEQ ID NO: 33399 - DNA, 2245 bp, Zea Mays
aaaaaacatactccgcttcttgcagcgcattcgcattcgcatcccacacagccacccacttcccaacaccaacagccatctccattggctgcagaagatccgggcgtcagggccgtataaaaaactacgcgcccccaatcctccgcaccgcacccagaggaggcaaggagcccatccacatccacctggtcctgctctcaccacaccgccgcgccaatggcggctcgccggcagcaccgccgcggcttcccgctggtcccgctcctgctctccctcctggccgccgccgcgtacggccgcctcatctccgacggcggcccgtccgcgcagctcctctcggtgatccgcctctcggggtcctcgccggccgcgggggcggccgccaaggccgaggagaagtgcgagcagtcctacgggttcctcccctgcaccaccaccgtgctcgggaacctcttcctcgtgctgacgtacggctacctcatgtacaaggcggccacgtacctgtcggcggggagcgagctgctgctcgagatcatggggcccggcctcgtcggcggcctcctcctccccatcctcggcgccctccccgacgcgctcctcgtgctcgtatctggcctgtccgggagtaaagaggaggcacagagtcaggtactgatcggaatggggctgcttgctggttccaccgtcttcctcctcaccctgctttgggggacctgtgtcgttgttggcaaatgtgaccttgggccaaaccgtgaggcagttgatgtaacagacaccaagggcttcagcttgactggcactggtattacaaccgacgtgcagaccagctatgcagcgcggatcatggggctatctgttatccccttcatcatcgctcagttcccaaagatgttgaagacccaccacgggcagcgtctagctatgttgctggccctcattgtgtcattcttgctcgtgctttcctactgtctgtatcaggttttccagccttggattcagaggaggaagcttgcatacgcaaagcacaagcacgtgatctctgggatactgaggcacgcccagatgcagtcactcggccgtctgctaaacgatgatggcacgcccaatgacgacgtcatcagaaagctgttccgcaagatcgacatggaccagagcgaatccctgtcccgtgctgagctgcacgccctcatcgtcggtatcaacttcgaggaggttgactttgacaggacggatgcggtggacaaggtcatggacgacttcgacacgtcccgcaacgatgtcgttgagcaggaggagtttgtgcaggggatgaagaaatggctcaacgaggccaagcgcagcgtgcccgtgggcggcgccttctccaccaagttcatcaatgaataccacgagaggacgaggcaggagcacaacgagctggttgacaggtccgatgaggcggtggagagcgtggagaaccccgggtggtgcatcgccaaggccgtggcgctgctgctgctgggcgccgccatcgcggccgcgttcgcggacccgctcgtggacgccgtccacaacttctccaacgccacgcacatcccgtccttcttcatctccttcatcgcccttccgctcgcgaccaactccagcgaggccgtctccgccatcatcttcgccagcaggaagaagcagcggacctgctccctcacattctccgaggtgtatggcggcgtgacgatgaacaacacgctgtgcctcggcgtgttcctggcgctcatctacttcaggaacctgacatgggacttctcgtcggaggtgctcatcatcctgctcgtctgcgtcgtcatggccctcttcaccagcttccggaccacgttcccgctctggacctgcctcgtcgcctacatgctctacccgttctcgctggtcctcgtctacatcctcgactacgtctttggctggtcataggctctcatcggcgcctcgagtgaacacgaccctgattggagcacctgggttttaacagccgccggtgtttctgcttgaccttgtaattttgactcatgtgaagctatctgtccagacttcttatatttctttgtgtatccaaagcacgcacgtacttcgtcaaacagcagctgcatgttttcagctcccttgtctgtacgtacatattgattttattttacctcaattgttagagttgtttgttataaagtttaaactaaaatttacaccaaaccggttaaaacacatatataggtttaag

SEQ ID NO: 33400 - DNA, 2300 bp, Zea Mays
ccaaaagtgccccacggaaaaaacatactccgcttcttgcagcgcattcgcattcgcatcccacacagccacccacttcccaacaccaacagccatctccattggctgcagaagatccgggcgtcagggccgtataaaaaactacgcgcccccaatcctccgcaccgcacccagaggaggcaaggagcccatccacatccacctggtcctgctctcaccacaccgccgcgccaatggcggctcgccggcagcaccgccgcggcttcccgctggtcccgctcctgctctccctcctggccgccgccgcgtacggccgcctcatctccgacggcggcccgtccgcgcagctcctctcggtgatccgcctctcggggtcctcgccggccgcgggggcggccgccaaggccgaggagaagtgcgagcagtcctacgggttcctcccctgcaccaccaccgtgctcgggaacctcttcctcgtgctgacgtacggctacctcatgtacaaggcggccacgtacctgtcggcggggagcgagctgctgctcgagatcatggggcccggcctcgtcggcggcctcctcctccccatcctcggcgccctccccgacgcgctcctcgtgctcgtatctggcctgtccgggagtaaagaggaggcacagagtcaggtactgatcggaatggggctgcttgctggttccaccgtcttcctcctcaccctgctttgggggacctgtgtcgttgttggcaaatgtgaccttgggccaaaccgtgaggcagttgatgtaacagacaccaagggcttcagcttgactggcactggtattacaaccgacgtgcagaccagctatgcagcgcggatcatggggctatctgttatccccttcatcatcgctcagttcccaaagatgttgaagacccaccacgggcagcgtctagctatgttgctggccctcattgtgtcattcttgctcgtgctttcctactgtctgtatcaggttttccagccttggattcagaggaggaagcttgcatacgcaaagcacaagcacgtgatctctgggatactgaggcacgcccagatgcagtcactcggccgtctgctaaacgatgatggcacgcccaatgacgacgtcatcagaaagtgcgttcccctgaacatcctgttgttgcataaccacggctgttccgcaagatcgacatggaccagagcgaatccctgtcccgtgctgagctgcacgccctcatcgtcggtatcaacttcgaggaggttgactttgacaggacggatgcggtggacaaggtcatggacgacttcgacacgtcccgcaacgatgtcgttgagcaggaggagtttgtgcaggggatgaagaaatggctcaacgaggccaagcgcagcgtgcccgtgggcggcgccttctccaccaagttcatcaatgaataccacgagaggacgaggcaggagcacaacgagctggttgacaggtccgatgaggcggtggagagcgtggagaaccccgggtggtgcatcgccaaggccgtggcgctgctgctgctgggcgccgccatcgcggccgcgttcgcggacccgctcgtggacgccgtccacaacttctccaacgccacgcacatcccgtccttcttcatctccttcatcgcccttccgctcgcgaccaactccagcgaggccgtctccgccatcatcttcgccagcaggaagaagcagcggacctgctccctcacattctccgaggtgtatggcggcgtgacgatgaacaacacgctgtgcctcggcgtgttcctggcgctcatctacttcaggaacctgacatgggacttctcgtcggaggtgctcatcatcctgctcgtctgcgtcgtcatggccctcttcaccagcttccggaccacgttcccgctctggacctgcctcgtcgcctacatgctctacccgttctcgctggtcctcgtctacatcctcgactacgtctttggctggtcataggctctcatcggcgcctcgagtgaacacgaccctgattggagcacctgggttttaacagccgccggtgtttctgcttgaccttgtaattttgactcatgtgaagctatctgtccagacttcttatatttctttgtgtatccaaagcacgcacgtacttcgtcaaacagcagctgcatgttttcagctcccttgtctgtacgtacatattgattttattttacctcaattgttagagttgtttgttataaagtttaaactaaaatttacaccaaaccggttaaaacacatatataggtttaag

SEQ ID NO: 33401 - DNA, 3016 bp, Zea Mays
atggagaagctggaagaatctgagactaaggttggctttctatggtatgaacatatatacaagctagacaaaggcccagaaacacaaatgcacacccttgccaaaaacatcgctgggacttctttggtctacacaaaatattttaaaatgatagaggaaggcacctactacatactggagatatgcagttgcacaagccatgtcatcgttcagatccgcaaaggcaagctcagttttgagcaactaaataacattaaatatagggcattatatggtataactataaccaaattgactcagggagtgactgctgatgaagaggaactcatggatgaaggtatcagatcattgatccctttcatgtcatggtctattcaaaaggaaaatccacttctgagattaacagttgagaactgtgagttgtccagtattggtgtgattatacttctggactgcctcacaaatgcgaagcaactccttgatgtgctatctattgcagacaatcatctagggagtcctgtggcagctgcattggccagattcttgggttcacatgtacgagctttaaatgctacagatatcggcttgggaacagtaggcttccaaatacttgaggaaacattgccaacagaagtagctctttcccacatcaacatcagcgtcagcctcggctcagcccccgccatcgctgattcgctggccatcagagtcggcggccaggccatgtcgaggttctggaagccagggtcggagaagccgagcaccctactcgtcgacgacgaggagggcggagtcgtcttcctgccctcctccagctccgtctcctcctccggctttggttacgcgagtctagagagacagcggcaacggctgccggtgtacaagtaccgcaaagccattctctacctggtggagcggcacgccaccaccattgtcgtcggcgagactggcagcggcaagtccacgcagatccctcagtaccttaaggaggctggttgggctgacggtggtcggcttataggatgcactcagcccagacgactggctgttcagatggttgcatcaagagtagctgaagaagtaggtgtaaagcttggagaagaagttggttataccatccgattcgaagatcaaacaaacccgggtatgaccatgataaaatttctcacagatggggtattgattagagagatgatggaagatcctcttcttaccaagtatagtgtaattatggtggatgaagctcatgaaaggtccatctcaaccgacatgttgctgggtctcttaaaaaagattcaacgtcgtcggcccgagttacggcttattatctcctctgcaacaattgaagcaagatcaatgtcaaccttcttcaacattaggcgaaagaattctttgcttgggtcttctgataatttgcccagcccagaacctgctgtactttctgttgaaatccattatgttgaagaacctgtctcagactacttacaggctactgtgaatactgtacttcttattcacgaaaaggaaccaccaggggatatcttggtattcttaactggtcaggatgacatagaagctgctgttaagttgttgaatgaagaaattcagcaccttggaagacactatttggacttgctgattttgcccttgtactccggccttccgcggggagatcaagatctcatttttgctcctacatcaaaagggaaaaggaaagttgtgttatcaaccaatattgctgagacatcgctgactctggagggtgtggtatatgttgttgatagtggattttccaagcagaaatgttataatccgatttcggacatagagagtttagttgtcgcaccaatatccaaggcatctgcaagacaacgagcaggcagagctggaagggtgcgacctgggaagtgctttaggatctatacagaggaatattatcttactgaaatgcagtcagaaggaattccagaaatgcaaaggtccaacctggtctcctgcataatacagttaaaagccctaggcatagacaacatcctgggctttgattggccagcttctccatctccagaggcaatgattcgggctcttgaagttctattctccctaggtatcctcgatgaagatgccaaattaacagtacccattggcttccaagttgctgagatccctctggaccccatgatttcgaaaatgatcttgtcagcgaatgattttggatgctctgatgagatattgaccatagcatcatttctgtctgttcaatctgtatgggtttctgtgaggggagtgaagaaggaatttgatgaagcaaagcttcgatttgctgctgctgagggagatcatgtaacattcctgaatatctacaaaggatttcaccagtctggaaaatctagccaatggtgttacaagaactttttgaattaccaagcactggcagttagaaaggccattattgctggttcatttactaatgcatgtcatctggaggaatacagccaaaacggaatgtataaaacaattaggacattacaagaagtttatattcatccatcttcagttctctttagggtcaatccaaagtgggttgtctaccagtctctcgtctcaactgacaagcattatatgcggaacgttattgccattgagccatcatggcttacggaagctgcaccacatttttatcagttccgagcattcaatcctgctccccactaacattactgtgggcaggactgcacgtcgttttgtaattttagagaacttaactttcctagggccacaattttgttgaagaaaaggattgccaatatttgtatatgctaagcacttgtggcattattctattccagtgatgatgggacggccaaaatcacacttgtcggtttatcccaaaatcacagtagcgagaaatctgtaacttgtacaacctcttgaatttgcccacattttgttcttgtcagtttatgggaggatgcagtttattggactatatagatgagttgtctcttttttgccc

SEQ ID NO: 33402 - DNA, 3103 bp, Zea Mays
atggagaagctggaagaatctgagactaaggttggctttctatggtatgaacatatatacaagctagacaaaggcccagaaacacaaatgcacacccttgccaaaaacatcgctgggacttctttggtctacacaaaatattttaaaatgatagaggaaggcacctactacatactggagatatgcagttgcacaagccatgtcatcgttcagatccgcaaaggcaagctcagttttgagcaactaaataacattaaatatagggcattatatggtataactataaccaaattgactcagggagtgactgctgatgaagaggaactcatggatgaaggtatcagatcattgatccctttcatgtcatggtctattcaaaaggaaaatccacttctgagattaacagttgagaactgtgagttgtccagtattggtgtgattatacttctggactgcctcacaaatgcgaagcaactccttgatgtgctatctattgcagacaatcatctagggagtcctgtggcagctgcattggccagattcttgggttcacatgtacgagctttaaatgctacagatatcggcttgggaacagtaggcttccaaatacttgaggaaacattgccaacagaagtagctctttcccacatcaacatcagcgtcagcctcggctcagcccccgccatcgctgattcgctggccatcagagtcggcggccaggccatgtcgaggttctggaagccagggtcggagaagccgagcaccctactcgtcgacgacgaggagggcggagtcgtcttcctgccctcctccagctccgtctcctcctccggctttggttacgcgagtctagagagacagcggcaacggctgccggtgtacaagtaccgcaaagccattctctacctggtggagcggcacgccaccaccattgtcgtcggcgagactggcagcggcaagtccacgcagatccctcagtaccttaaggaggctggttgggctgacggtggtcggcttataggatgcactcagcccagacgactggctgttcagatggttgcatcaagagtagctgaagaagtaggtgtaaagcttggagaagaagttggttataccatccgattcgaagatcaaacaaacccgggtatgaccatgataaaatttctcacagatggggtattgattagagagatgatggaagatcctcttcttaccaagtatagtgtaattatggtggatgaagctcatgaaaggtccatctcaaccgacatgttgctgggtctcttaaaaaagattcaacgtcgtcggcccgagttacggcttattatctcctctgcaacaattgaagcaagatcaatgtcaaccttcttcaacattaggcgaaagaattctttgcttgggtcttctgataatttgcccagcccagaacctgctgtactttctgttgaaatccattatgttgaagaacctgtctcagactacttacaggctactgtgaatactgtacttcttattcacgaaaaggaaccaccaggggatatcttggtattcttaactggtcaggatgacatagaagctgctgttaagttgttgaatgaagaaattcagcaccttggaagacactatttggacttgctgattttgcccttgtactccggccttccgcggggagatcaagatctcatttttgctcctacatcaaaagggaaaaggaaagttgtgttatcaaccaatattgctgagacatcgctgactctggagggtgtggtatatgttgttgatagtggattttccaagcagaaatgttataatccgatttcggacatagagagtttagttgtcgcaccaatatccaaggcatctgcaagacaacgagcaggcagagctggaagggtgcgacctgggaagtgctttaggatctatacagaggaatattatcttactgaaatgcagtcagaaggaattccagaaatgcaaaggtccaacctggtctcctgcataatacagttaaaagccctaggcatagacaacatcctgggctttgattggccagcttctccatctccagaggcaatgattcgggctcttgaagttctattctccctaggtatcctcgatgaagatgccaaattaacagtacccattggcttccaagttgctgagatccctctggaccccatgatttcgaaaatgatcttgtcagcgaatgattttggatgctctgatgagatattgaccatagcatcatttctgtctgttcaatctgtatgggtttctgtgaggggagtgaagaaggaatttgatgaagcaaagcttcgatttgctgctgctgagggagatcatgtaacattcctgaatatctacaaaggatttcaccagtctggaaaatctagccaatggtgttacaagaactttttgaattaccaagcactgaagaaagttgtcgacattaggggacaacttctcaggatagtgaagagttttggtatacaactgaaatcatgtgacagagatatgcaggcagttagaaaggccattattgctggttcatttactaatgcatgtcatctggaggaatacagccaaaacggaatgtataaaacaattaggacattacaagaagtttatattcatccatcttcagttctctttagggtcaatccaaagtgggttgtctaccagtctctcgtctcaactgacaagcattatatgcggaacgttattgccattgagccatcatggcttacggaagctgcaccacatttttatcagttccgagcattcaatcctgctccccactaacattactgtgggcaggactgcacgtcgttttgtaattttagagaacttaactttcctagggccacaattttgttgaagaaaaggattgccaatatttgtatatgctaagcacttgtggcattattctattccagtgatgatgggacggccaaaatcacacttgtcggtttatcccaaaatcacagtagcgagaaatctgtaacttgtacaacctcttgaatttgcccacattttgttcttgtcagtttatgggaggatgcagtttattggactatatagatgagttgtctcttttttgccc

SEQ ID NO: 33403 - DNA, 3379 bp, Zea Mays
atggagaagctggaagaatctgagactaaggttggctttctatggtatgaacatatatacaagctagacaaaggcccagaaacacaaatgcacacccttgccaaaaacatcgctgggacttctttggtctacacaaaatattttaaaatgatagaggaaggcacctactacatactggagatatgcagttgcacaagccatgtcatcgttcagatccgcaaaggcaagctcagttttgagcaactaaataacattaaatatagggcattatatggtataactataaccaaattgactcagggagtgactgctgatgaagaggaactcatggatgaaggtatcagatcattgatccctttcatgtcatggtctattcaaaaggaaaatccacttctgagattaacagttgagaactgtgagttgtccagtattggtgtgattatacttctggactgcctcacaaatgcgaagcaactccttgatgtgctatctattgcagacaatcatctagggagtcctgtggcagctgcattggccagattcttgggttcacatgtacgagctttaaatgctacagatatcggcttgggaacagtaggcttccaaatacttgaggaaacattgccaacagaagtagctctttcccacatcaacatcagcgtcagcctcggctcagcccccgccatcgctgattcgctggccatcagagtcggcggccaggccatgtcgaggttctggaagccagggtcggagaagccgagcaccctactcgtcgacgacgaggagggcggagtcgtcttcctgccctcctccagctccgtctcctcctccggctttggttacgcgagtctagagagacagcggcaacggctgccggtgtacaagtaccgcaaagccattctctacctggtggagcggcacgccaccaccattgtcgtcggcgagactggcagcggcaagtccacgcagatccctcagtaccttaaggaggctggttgggctgacggtggtcggcttataggatgcactcagcccagacgactggctgttcagatggttgcatcaagagtagctgaagaagtaggtgtaaagcttggagaagaagttggttataccatccgattcgaagatcaaacaaacccgggtatgaccatgataaaatttctcacagatggggtattgattagagagatgatggaagatcctcttcttaccaagtatagtgtaattatggtggatgaagctcatgaaaggtccatctcaaccgacatgttgctgggtctcttaaaaaagattcaacgtcgtcggcccgagttacggcttattatctcctctgcaacaattgaagcaagatcaatgtcaaccttcttcaacattaggcgaaagaattctttgcttgggtcttctgataatttgcccagcccagaacctgctgtactttctgttgaaggtaaaggatacaccgtggaaatccattatgttgaagaacctgtctcagactacttacaggctactgtgaatactgtacttcttattcacgaaaaggaaccaccaggggatatcttggtattcttaactggtcaggatgacatagaagctgctgttaagttgttgaatgaagaaattcagcaccttggaagacactatttggacttgctgattttgcccttgtactccggccttccgcggggagatcaagatctcatttttgctcctacatcaaaagggaaaaggaaagttgtgttatcaaccaatattgctgagacatcgctgactctggagggtgtggtatatgttgttgatagtggattttccaagcagaaatgttataatccgatttcggacatagagagtttagttgtcgcaccaatatccaaggcatctgcaagacaacgagcaggcagagctggaagggtgcgacctgggaagtgctttaggatctatacagaggaatattatcttactgaaatgcagtcagaaggaattccagaaatgcaaaggtccaacctggtctcctgcataatacagttaaaagccctaggcatagacaacatcctgggctttgattggccagcttctccatctccagaggcaatgattcgggctcttgaagttctattctccctaggtatcctcgatgaagatgccaaattaacagtacccattggcttccaagttgctgagatccctctggaccccatgatttcgaaaatgatcttgtcagcgaatgattttggatgctctgatgagatattgaccatagcatcatttctgtctgttcaatctgtatgggtttctgtgaggggagtgaagaaggaatttgatgaagcaaagcttcgatttgctgctgctgagggagatcatgtaacattcctgaatatctacaaaggatttcaccagtctggaaaatctagccaatggtgttacaagaactttttgaattaccaagcactgaagaaagttgtcgacattaggggacaacttctcaggatagtgaagagttttggtatacaactgaaatcatgtgacagagatatgcaggcagttagaaaggccattattgctggttcatttactaatgcatgtcatctggaggaatacagccaaaacggaatgtataaaacaattaggacattacaagaagtttatattcatccatcttcagttctctttagggtcaatccaaagtgggttgtctaccagtctctcgtctcaactgacaagcattatatgcggaacgttattgccattgagccatcatggcttacggaagctgcaccacatttttatcagttccgagcattcaatcctgctccccactaacattactgtggtaatttcttttggctactcagttatctttgccttacattcaacaaatgtagtgaagttttaacaatgattcaatggcaagattatgttttccccccagttggcttatcggcccagttggatatgggatgaaaggtgtcctgtggatcagaatggatctggctttattgctaaaagcagtttcaatgaaagatgttttgtgtgaaagtatttgtttgattattggctgatccgtgtcgttgatgttgatttacagggcaggactgcacgtcgttttgtaattttagagaacttaactttcctagggccacaattttgttgaagaaaaggattgccaatatttgtatatgctaagcacttgtggcattattctattccagtgatgatgggacggccaaaatcacacttgtcggtttatcccaaaatcacagtagcgagaaatctgtaacttgtacaacctcttgaatttgcccacattttgttcttgtcagtttatgggaggatgcagtttattggactatatagatgagttgtctcttttttgccc

SEQ ID NO: 33404 - DNA, 3103 bp, Zea Mays
atggagaagctggaagaatctgagactaaggttggctttctatggtatgaacatatatacaagctagacaaaggcccagaaacacaaatgcacacccttgccaaaaacatcgctgggacttctttggtctacacaaaatattttaaaatgatagaggaaggcacctactacatactggagatatgcagttgcacaagccatgtcatcgttcagatccgcaaaggcaagctcagttttgagcaactaaataacattaaatatagggcattatatggtataactataaccaaattgactcagggagtgactgctgatgaagaggaactcatggatgaaggtatcagatcattgatccctttcatgtcatggtctattcaaaaggaaaatccacttctgagattaacagttgagaactgtgagttgtccagtattggtgtgattatacttctggactgcctcacaaatgcgaagcaactccttgatgtgctatctattgcagacaatcatctagggagtcctgtggcagctgcattggccagattcttgggttcacatgtacgagctttaaatgctacagatatcggcttgggaacagtaggcttccaaatacttgaggaaacattgccaacagaagtagctctttcccacatcaacatcagcgtcagcctcggctcagcccccgccatcgctgattcgctggccatcagagtcggcggccaggccatgtcgaggttctggaagccagggtcggagaagccgagcaccctactcgtcgacgacgaggagggcggagtcgtcttcctgccctcctccagctccgtctcctcctccggctttggttacgcgagtctagagagacagcggcaacggctgccggtgtacaagtaccgcaaagccattctctacctggtggagcggcacgccaccaccattgtcgtcggcgagactggcagcggcaagtccacgcagatccctcagtaccttaaggaggctggttgggctgacggtggtcggcttataggatgcactcagcccagacgactggctgttcagatggttgcatcaagagtagctgaagaagtaggtgtaaagcttggagaagaagttggttataccatccgattcgaagatcaaacaaacccgggtatgaccatgataaaatttctcacagatggggtattgattagagagatgatggaagatcctcttcttaccaagtatagtgtaattatggtggatgaagctcatgaaaggtccatctcaaccgacatgttgctgggtctcttaaaaaagattcaacgtcgtcggcccgagttacggcttattatctcctctgcaacaattgaagcaagatcaatgtcaaccttcttcaacattaggcgaaagaattctttgcttgggtcttctgataatttgcccagcccagaacctgctgtactttctgttgaagtatgatccattatgttgaagaacctgtctcagactacttacaggctactgtgaatactgtacttcttattcacgaaaaggaaccaccaggggatatcttggtattcttaactggtcaggatgacatagaagctgctgttaagttgttgaatgaagaaattcagcaccttggaagacactatttggacttgctgattttgcccttgtactccggccttccgcggggagatcaagatctcatttttgctcctacatcaaaagggaaaaggaaagttgtgttatcaaccaatattgctgagacatcgctgactctggagggtgtggtatatgttgttgatagtggattttccaagcagaaatgttataatccgatttcggacatagagagtttagttgtcgcaccaatatccaaggcatctgcaagacaacgagcaggcagagctggaagggtgcgacctgggaagtgctttaggatctatacagaggaatattatcttactgaaatgcagtcagaaggaattccagaaatgcaaaggtccaacctggtctcctgcataatacagttaaaagccctaggcatagacaacatcctgggctttgattggccagcttctccatctccagaggcaatgattcgggctcttgaagttctattctccctaggtatcctcgatgaagatgccaaattaacagtacccattggcttccaagttgctgagatccctctggaccccatgatttcgaaaatgatcttgtcagcgaatgattttggatgctctgatgagatattgaccatagcatcatttctgtctgttcaatctgtatgggtttctgtgaggggagtgaagaaggaatttgatgaagcaaagcttcgatttgctgctgctgagggagatcatgtaacattcctgaatatctacaaaggatttcaccagtctggaaaatctagccaatggtgttacaagaactttttgaattaccaagcactgaagaaagttgtcgacattaggggacaacttctcaggatagtgaagagttttggtatacaactgaaatcatgtgacagagatatgcaggcagttagaaaggccattattgctggttcatttactaatgcatgtcatctggaggaatacagccaaaacggaatgtataaaacaattaggacattacaagaagtttatattcatccatcttcagttctctttagggtcaatccaaagtgggttgtctaccagtctctcgtctcaactgacaagcattatatgcggaacgttattgccattgagccatcatggcttacggaagctgcaccacatttttatcagttccgagcattcaatcctgctccccactaacattactgtggactgcacgtcgttttgtaattttagagaacttaactttcctagggccacaattttgttgaagaaaaggattgccaatatttgtatatgctaagcacttgtggcattattctattccagtgatgatgggacggccaaaatcacacttgtcggtttatcccaaaatcacagtagcgagaaatctgtaacttgtacaacctcttgaatttgcccacattttgttcttgtcagtttatgggaggatgcagtttattggactatatagatgagttgtctcttttttgccc

SEQ ID NO: 33405 - DNA, 1515 bp, Zea Mays
cgcgtctctgccgccatgcccgctctccatcgaaggaaggcgccattccagggattaccgcaccattctcgccctcgtccgctctccggcaccattccagcattccagggattaccgcctccccctcgatccgcggcactctcccccgtccttctcgagtatggcaccgccagtccgcctcgcgacccctgcctcctcccccctcgctctcttgttcccccagccaccgcgaggaactctgaaccccattccccaccaccgtaccaatccccgcatctacgccgctccccccgccccctgtcaactacgccaggtcctcgccatcgatgtcgcccaagcgtgtcgtcctcgcccccgacctcggcgtgcgggattcggtaccgaaagaagagacaggaggagaatacaagccctcagcctcggtgttccccattcaccactcaggcgcagtccatcgctccttcgacgagggctccagcgactacggctccatcgctcctcatggtgatgccgccgagggttgtcctacgaagccgtccgcgatgccgagggttgtcctacgaagcagacacgccctgcggctgcccacacaaagggtttggttcttgttcctccaagctactgcgcgtgtgcttccacattcggcacagtgggagccctcatggcagcagacgacgtgtgactccagactcggcgtagacgacccacaaggagctgctaatggcggaggctgagcgccgccatggatctgacacggtgtggaatgggaggagccgaagcggagattggatcaaagtgcactgggcaggagccaagcaaatcccaaatgtgtcagctgagtttcggtctcatattggtggagctgctgtatctgcagcaaagtggttctttctttgttttctctgttgatacgtttttagcagttattctgtttaatccttctatttcacatatagggtcatttattggattgtttgtgtggaaggcagttggttactacaatgctggaacagtggagtttattgtggacactctttctggagagttctacttcatggagatgaatactcgactccctcctcccctcctagatcccgtgatctgctacgaagctgccatcaacgccctcctccccctctccgctcagctcctcctcgctctttcgtagaggagaggatttcacactgatgcaagcgctcatcaaggcagatttctggcttctgtttttctcgtctaccagataatcaagaaagattttagtattgcaagatttgctcagatgatgcggaggttaaatttctttgtggcattctgttgcattgggcatatataatagagcatgatatcattgtcaaggatcacttggtctgtttaacacatacaatgaggctataaagatccatcaccatccaaggcacacttacccctgctacatgagtggcatttccgatctggcctcgatcgatacatatggattattggaatgatttatgcttacttccatcctaatgtaag

SEQ ID NO: 33406 - DNA, 1475 bp, Zea Mays
cacacagtcacaccaaacactgtgaacccacccagaaaggaacacagacacagggcagcccgagtcaccggtctatgcacccgagtccacaacggtcccccacctcgaacccaccgatcatcggcttcgccgtcgctgtagccgtctaaaaatacctcccgatctccgacgagttgtcgaactatggcatctcccgcgcaccgggcgcctcaccgcttccggcggcctcttcgcgcgccgctgccgccgccgccgccgcggctgcctactccctctttatactcccgccgtccctccgcgcaccaggtatcccaattaagaaccatcgtgccaagaccttcaaggaggcgtcatgccattcaagttgtcacggcatttgatgatgatcctggggatttctcgctggtgcacgatgacggggacgagcagtttggtgttcctcagtattcaagcgagagtgaatggagcgatgatgatgtcatattgacggcattcacagatgttgagttaccgatggcagtcaagagccgggccgagggtgcactaactatagctgcccataggttcgccacgattgacaaagggcataagaagagcagattgttgctggcatttacttctctaactggttgggttctacagatatttcaacaccatatagcatgaaatatctggttcctctgccgcctcctttcggccttgcactcattggaaaagtatatatggttctggctgctgcatgttcactttccatgggtccggcagtaacactcgttgatggtcttgatggtttggctggtggtattgctgctttggcactcatagcactatctgttgcagctctcccgatttgctctgaattcagtgtttttggagcatcaatgtcaggtgcttgcattgggtttctttttcacaacagatacagggcctccgtggttatgagccgggttggttctttcgcactcggaggagcagttgccacaattgcatcatgcagtggaatgtttcttccaatgttaatagcatgcagtctcttctttgttgagctactgtttgcaatattgcaggttccttttcacatggctaaaaactctttccgcggaacaagcagacatcccctgaaaatccgcccctcgcattactacctcagacttctagggataaaggaaccttatatcgtggcgggcgcatacatgatatcatgcttcctaactctgttggcaggataccttggccttgtctcagcgtagatgaactctcgtcgcttcctctctttttcttttcagttgtggtacatgataaaatccaggcagccattattgcttcatttttatgccaggtctgtgtttcagtgacacagagaatttaacagatgtagtcgttctttaatgttatgttatatattaggtgtagacgtagattatacggtgtttccataggtaacagtgctgccatcgcgtcaaaggcactgtagg

SEQ ID NO: 33407 - DNA, 1722 bp, Zea Mays
cacacagtcacaccaaacactgtgaacccacccagaaaggaacacagacacagggcagcccgagtcaccggtctatgcacccgagtccacaacggtcccccacctcgaacccaccgatcatcggcttcgccgtcgctgtagccgtctaaaaatacctcccgatctccgacgagttgtcgaactatggcatctcccgcgcaccgggcgcctcaccgcttccggcggcctcttcgcgcgccgctgccgccgccgccgccgcggctgcctactccctctttatactcccgccgtccctccgcgcaccaggtatcccaattaagaaccatcgtgccaagaccttcaaggaggcgtcatgccattcaagttgtcacggcatttgatgatgatcctggggatttctcgctggtgcacgatgacggggacgagcagtttggtgttcctcagtattcaagcgagagtgaatggagcgatgatgatgtcatattgacggcattcacagatgttgagttaccgatggcagtcaagagccgggccgagggtgcactaactatagctgcccataggttcgccacgattgacaaagggcataagaagagcagttttatcagcacttgctggattcctttttgcaccagtcgctgatagtctgaagatccaccatttccggaggagaggaaagtctgtttctccatcaagtagaaagccaacccctggaatgggaggattattctttgttcctgttggtatttttgttgcaaaaagagaggttggttccaactcgaatggagttaatggagcagctatgattaccctcatatttgcgatggttgggttgcttgatgatatttctagtctagcagtagatcacaattataaaataccgcgatggataaggttcttggttcaaattgttgctggcatttacttctctaactggttgggttctacagatatttcaacaccatatagcatgaaatatctggttcctctgccgcctcctttcggccttgcactcattggaaaagtatatatggttctggctgctgcatgttcactttccatgggtccggcagtaacactcgttgatggtcttgatggtttggctggtggtattgctgctttggcactcatagcactatctgttgcagctctcccgatttgctctgatacagggcctccgtggttatgagccgggttggttctttcgcactcggaggagcagttgccacaattgcatcatgcagtggaatgtttcttccaatgttaatagcatgcagtctcttctttgttgagctactgtttgcaatattgcaggttccttttcacatggctaaaaactctttccgcggaacaagcagacatcccctgaaaatccgcccctcgcattactacctcagacttctagggataaaggaaccttatatcgtggcgggcgcatacatgatatcatgcttcctaactctgttggcaggataccttggccttgtctcagcgtagatgaactctcgtcgcttcctctctttttcttttcagttgtggtacatgataaaatccaggcagccattattgcttcatttttatgccaggtctgtgtttcagtgacacagagaatttaacagatgtagtcgttctttaatgttatgttatatattaggtgtagacgtagattatacggtgtttccataggtaacagtgctgccatcgcgtcaaaggcactgtagg

SEQ ID NO: 33408 - DNA, 1646 bp, Zea Mays
ttttgtcaggtgtcagaaacaattaggtatcccaattaagaaccatcgtgccaagaccttcaaggaggcgtcatgccattcaagttgtcacggcatttgatgatgatcctggggatttctcgctggtgcacgatgacggggacgagcagtttggtgttcctcagtattcaagcgagagtgaatggagcgatgatgatgtcatattgacggcattcacagatgttgagttaccgatggcagtcaagagccgggccgagggtgcactaactatagctgcccataggttcgccacgattgacaaagggcataagaagagcagaactcaacaagggctgatgaataatgttggactggttgctttcttagtgatgttacttttctttgtcgactggtgttcttggaagattgttagactaccactggactctttttacttgacacgtccttttttaacatcggcagttttatcagcacttgctggattcctttttgcaccagtcgctgatagtctgaagatccaccatttccggaggagaggaaagtctgtttctccatcaagtagaaagccaacccctggaatgggaggattattctttgttcctgttggtatttttgttgcaaaaagagaggttggttccaactcgaatggagttaatggagcagctatgattaccctcatatttgcgatggttgggttgcttgatgatatttctagtctagcagtagatcacaattataaaataccgcgatggataaggttcttggttcaaattgttgctggcatttacttctctaactggttgggttctacagatatttcaacaccatatagcatgaaatatctggttcctctgccgcctcctttcggccttgcactcattggaaaagtatatatggttctggctgctgcatgttcactttccatgggtccggcagtaacactcgttgatggtcttgatggtttggctggtggtattgctgctttggcactcatagcactatctgttgcagctctcccgatttgctctgaattcagtgtttttggagcatcaatgtcaggtgcttgcattgggtttctttttcacaacagatacagggcctccgtggttatgagccgggttggttctttcgcactcggaggagcagttgccacaattgcatcatgcagtggaatgtttcttccaatgttaatagcatgcagtctcttctttgttgagctactgtttgcaatattgcaggttccttttcacatggctaaaaactctttccgcggaacaagcagacatcccctgaaaatccgcccctcgcattactacctcagacttctagggataaaggaaccttatatcgtggcgggcgcatacatgatatcatgcttcctaactctgttggcaggataccttggccttgtctcagcgtagatgaactctcgtcgcttcctctctttttcttttcagttgtggtacatgataaaatccaggcagccattattgcttcatttttatgccaggtctgtgtttcagtgacacagagaatttaacagatgtagtcgttctttaatgttatgttatatattaggtgtagacgtagattatacggtgtttccataggtaacagtgctgccatcgcgtcaaaggcactgtagg

SEQ ID NO: 33409 - DNA, 1499 bp, Zea Mays
ctagcgtttctccttggtggcggtatcccaattaagaaccatcgtgccaagaccttcaaggaggcgtcatgccattcaagttgtcacggcatttgatgatgatcctggggatttctcgctggtgcacgatgacggggacgagcagtttggtgttcctcagtattcaagcgagagtgaatggagcgatgatgatgtcatattgacggcattcacagatgttgagttaccgatggcagtcaagagccgggccgagggtgcactaactatagctgcccataggttcgccacgattgacaaagggcataagaagagcagttttatcagcacttgctggattcctttttgcaccagtcgctgatagtctgaagatccaccatttccggaggagaggaaagtctgtttctccatcaagtagaaagccaacccctggaatgggaggattattctttgttcctgttggtatttttgttgcaaaaagagaggttggttccaactcgaatggagttaatggagcagctatgattaccctcatatttgcgatggttgggttgcttgatgatatttctagtctagcagtagatcacaattataaaataccgcgatggataaggttcttggttcaaattgttgctggcatttacttctctaactggttgggttctacagatatttcaacaccatatagcatgaaatatctggttcctctgccgcctcctttcggccttgcactcattggaaaagtatatatggttctggctgctgcatgttcactttccatgggtccggcagtaacactcgttgatggtcttgatggtttggctggtggtattgctgctttggcactcatagcactatctgttgcagctctcccgatttgctctgaattcagtgtttttggagcatcaatgtcaggtgcttgcattgggtttctttttcacaacagatacagggcctccgtggttatgagccgggttggttctttcgcactcggaggagcagttgccacaattgcatcatgcagtggaatgtttcttccaatgttaatagcatgcagtctcttctttgttgagctactgtttgcaatattgcaggttccttttcacatggctaaaaactctttccgcggaacaagcagacatcccctgaaaatccgcccctcgcattactacctcagacttctagggataaaggaaccttatatcgtggcgggcgcatacatgatatcatgcttcctaactctgttggcaggataccttggccttgtctcagcgtagatgaactctcgtcgcttcctctctttttcttttcagttgtggtacatgataaaatccaggcagccattattgcttcatttttatgccaggtctgtgtttcagtgacacagagaatttaacagatgtagtcgttctttaatgttatgttatatattaggtgtagacgtagattatacggtgtttccataggtaacagtgctgccatcgcgtcaaaggcactgtagg

SEQ ID NO: 33410 - DNA, 2529 bp, Zea Mays
ccgctcccttcaacgaaacgttcttcgcatgagtggcctgtccccggcggcggaaccagtggaggcagcaccggcgcaggagacggctcgcagattgcagattcaacgggcctttgtcacggccaatctctccagcgtcagcctccactaccgtcccggctcggaagaagcttgtgagtttccaagccctccgtttctcgccaaagagggcacgagaactacctggtgagtccgaacagcacctcggcaacctcgatttcctcaactgcctggtgagtccgaacagcacctcggcaacctcttgaatgaaagagggcgacttcgaaatcttcgggactgtggtggcggctgtggttgtggcgggtttgttgatggagctggggacagtgatagtcgctgctttgacgctcgctcctcgccagtttgctcgtcttctccacgttgcagccagcaaagtactttcctgtcactcccttgagttgagggctcagtcctacgtagcaagtagtcgcagctccctgaagaaatgcatacacgaaatttcagaacacgagtttcgagataataacgtcgctatgaacaagaattggctacaaaaatgaaatacaaagatctggctccagacctggggtacattcttccacagtatgtaagtggcaacctaaagcacctctgcaagaggaaacaaggtgcttcagaacattgtcagaagataagtgttcctagctagagcctgagaacatatattctatgtgagaaaaaaaggaaaaataaaaagagagcatactcatgagaacaaggagtgcctcatcaaattggtcatgatcaatccaggatggacactgttaactgtgatgtttgctccttcttcctgtttacgaacattaacaatgtgtaagagcagaatcctgaaggatggcacataatttgagaaccaggagtaggtttcagagttttaaccagtgtaggcatgcatcagaaccatggattttcatacataggtaaaagggaacgagatcatatcatctctgcaagtcacactgatatgtatcaagatcccaaaggttccgaagttatctaaatcccaaagttcgcaatggccattgcttactgggtgccccttatatagttagtgcgtcatgacagtgaagcaggacagagcattagggccatgatggacaaattgtttctcttcaggtttctacccttcccgaaagagtaacagacatggataatactattaggataccctgaaaaaaataccttcagccttctagagagctccttcgcatgcagcaagttcgccagcttagactgtccataagccattttgtcgttgtatctgcaagttaataaaagatcattacttgcagttcaatcaacagacaattcctacaaagcagaaccataaacgcacatacattttctcatcattgaggttatcgaagtcaattcccttcggatacgtatggtggtgggcgactgatgacaaattcacaatgcggccctcaatacccgtagacttggcagtggccttcatggtatcaaggaggagattggtaagcagaaagtgtcctgataaaaaaacaatttcaagcaagtcatgctgtcagtgagagaatacctagatgatttgtcgcaaactgcatctcgaccccgtctttagacagctgaaaagggcaaaacatgacgcctgcattatttctgtggaacagaaaaggattccctcaagccttgatccagtgcaaagaggaaagcgctaaaataggcggaaactttcatatatatgaaagaaaaaacaagcaaaggaaactttcatatatatgaatgaaaaaaaacaagcgctaaaagtaataatacgtatatgctggagatagattcaacgaaatcaaaggaaactttcatatatatgaaaataaaaaacaagcatgaacaagaggtgaatagggttacatcaggatgttcagagggagtttgatcgagttgaactggtccacaaaagccctgacagacttgagggagctgaggtctagcttcagaacatcaatacgtgccgttgggttcttctccatgatggtctttcttgcttctgatgcagcttctgtgtttctagcagcgatgaccacatgggctcctctcagcggaagactcttgatgtctccagaccaatgccactagctcctcctggcatatgcaaaaaattacaagtttcagtaaaatttggaaaataatagatttttgacaccttggaattgagttaagcgagcaactggaccctcaaaatactatagtgagatgaaaaagactgaagatgatagctatctaactggaaggatccagcatcattgacctcaatagattatggataatcataatctctgcgcggctgcttgctgataggttctactaagcatggttaattgacttgtattttcacctaaatatagatgacatggaagaaaaatgtttttatgttcaccttagtagataagtatcttttttcttgctccaataattatcattaatcaa

SEQ ID NO: 33411 - DNA, 2762 bp, Zea Mays
aggcttgagtccctgcaacacaaaaaagaagggtggtcatcacttattggtgaagcactgaaggctaatatacatcaggatctggccctggcaacaaaagcatttaccgtggagtggtgactgatggtaaactagtatacttgatagcaccattgggtagtaatctgtcatcattgatgcaaatcttggcataaaaggaatcccagttagtacaacaatgggcaagtaaatgcatacaaactataaacaaaacacattttttctatccctttgcagcaaaaccataaagttgtatacgaaaacataaccacaagacaaatgttaatgacattgtgatccttacatctttggagattccactggcagttgtatttcttgaactgcagtcacatggagggggcaaagtacgtcccgaacgatgttggagacacttggtactcattcccatggagtgctgcagcctgacctcagaaagaaacaaaggtgatattaacatatttatgtggatggtttccatgaattcatatatcatttgaccccaaggttcctgtgcaacctagcatctatcaatccaaattgagcataggaacattgaatttaaatgagtttgtagtacaacttcatcttttcaaaagtccagattcagctaattatgctacatggcagaactgaagaattcagttcagacatgctaactgcatcatcaggagctgtcaaggcaacacaaatctcaaagagtccaaattaatgacacctgctgcacaaagaatcctatgaaggtcatttttttctcgaacgatcttaccaagtcattagtgctacaggttcagctggactgctcatcttcatactcggttggccccagcaaagggttttaatagatataagatatgacagacaaaagaggtatatgaaagtctaatactttgtagaaacatgatgggcatttatgcaataagtgctgttcaaatctgcaacctaaccagcatatagataatccaggtaatgcaataacaagtgttaacatcaaccagttggatgaccctttctcttcttgttgttttgctttagtttgagcaaaacatgtggtacttgatgttttacattcatcatattataacgcctgctgcttgttcgcagttagacacccttatatgaaatataagggtatctttgaatcagcctattatcctaagcgtatcaagaagttttgatatcccaaaaggggagattaagaaaacaacataagtgtgtcttttaagatattaaaatctctagatgccagtgaataagtgtggttgtcccaatttaattatgctaagtatttgctactaatcaacaacaaatataggtcaaataaagaggttgacatattcaatgcatgtatctcaacaatctactaagtactctagtgttgaatccaatagtctagatatgtatggtatcctgatatcaattactatgttaatcataactgacctgaccctttatattgcccttccactaactaataattacattgctttcagccttttgtccattaaatgcggattcacaatgactacttgtattacataataataaataataataaaactatataaagcaactaatttccacggtttccaccattgtcgacttttgcaaagaaaaaactatataaagcaccagtttccaccgtcgccgtgcgtcacgcgcgaagcgcataggtttgttcctctccaccgcatctcgcctaacaagcagagagggataatgacgctgccacctggataagtcttatcagaagaaaaaaacgtcattcgttgactccccactcgataaactcatctcagatggtggcgctgcaggcacatgagattagagccattttttcttgccatttttgctccctcactcaggttctatttttcttgccatttttgctccctcgctcaggccatctcaccacttcaaaaccctctcctgtctcatccgccttcctcgcgattgcaacgacaaggcgattagagacggcggcggccatggccaccgcgcagaaggaggacctgctcagggagattaccaagaaggaagaagagagcacttgtttcgagtagagcacctccgcatgagcgagcagaggtgcacgagtaggcggcacgggtgcgcggctgccaggagcgcttgcgcgcttgcatcagatgggagcgcggaagcgcttgcggctgccgggagatggagtgaggatgccgtaatgtgttgggtggctggaggaacgtcatcagagatggtctcgcttccctaggtgattatactgttactctaattaatttagtttcttgcatcctgcccatgcttgcggctgctgggagatgaagagcgaggatgccgcaatgcgttgggtggttggaggaatgtcatcagagatggtctcgattccctaggtgattatattgttactctaattatttcattctcttgcatcctgctatgcttttttttagaaacgaacctacatcttgggaataatgcttggctcgtgatgtgatcgaagtggtcatgcaaggattattctttagttcaatttgtggctggagttttgctattgcctggacatgtggtccttgattgggtaggcggcccacggccatgtagttgtgtggcagacttgagaagtctgtcgactggattggatagatgggtgagatttttttttttgctcctgatagtaagggggaaatcaaaacaaaactagaagagaaaatctatgttgatttaat

SEQ ID NO: 33412 - DNA, 1400 bp, Zea Mays
cgctaatggacgaataaattccatcacaaaaacattgaactgtatggaacatgctatactgaaagcgtgggggcaaaaacaaaaaaagaggacaaggaaacgagaagcgcccggcacccacctggtacccggtccgagagcgcaaattcacatttcacccaagcaaaggcaaagcaaatgcgtgaaagaatgactgtttaccaaatgttaaaccaaatacccacccctgcagtctttgtacatgaagctcctccatgtttgatctttacaagctttagcaacaaacacgaagcactccctgacaccattttcgccaccatccatcatcttggcatctactaggttagaaggtatgacttgtacatgtctgttgttagggtctaggaagcagacctctcgccctggtgctagaataggctgtacatgcggtacgaaatgtcaacctgagggcagttccttccagaatcgctgcttccatcagtccatctatcatgagttgacattattggctgttggagcaatgtgcctgccataccacccctcatgtctgaagttgttccctgggaaaatactttgtatcccccagtagcagtagccatgtaactagtggaagttccatcccaattttcagcctcttgacgtggatgtgacgagccaccagggtaaaatgaatactgagggtcatttgaccaaccaaagagggtgcctggaaactgtctgtgactctgactccagttccggttggtatcggtcaaactgggtggtgaagagatgttcatgcttagattttgtgtgacatctccatcatctttcaggcaatctgtagtcaagctagtaaagtcttgttgatctggaataccacaatcttgtaccagggcatcaggtgcagagcaatgtccagagcaagctttgcctgaaccggagtacagatgaggcttctcaaatccaggaggacaagcttgtctcctttcctttctatgcagagatgccacatcagtggatgatactgcactggctggtcttgatagcatagtgctatctgaagaatgagaggaaacaatatgaccagaccgaattgtgtcccagcgcctattgtgcgagctatcaccatcagacaacgatgcattcttattaagagtgctgcagcagaaacttgctcttgctatacctgtattagaaactgaaactggtgcattttgttgatttaccagctgtgatcgattctttgctacaagcttcatgttcaaatctgaaagattgtgtgatccagcagatccttgagttttggcataagatgcagaaagattactgggaagagttccgctgctcatattctgtgatgcagtcaatctgtgtgacacagtgctctctggtagttgcttataacctccaagaactat

SEQ ID NO: 33413 - DNA, 1467 bp, Zea Mays
agaatgttaatagatatttttgacttcttacgagtcatttaatatattctgaatacttttagtacctataataactaaataaggtatggactaaactttagtatctggactaaagaaaccaaacggaccctaactgtgatgattcacatgtaagacgtttacacaccaattagcttaacaacaaggacattaacagaagttactttgatggctgattgccaagatagtcatcctcagtggttccatcacgtccagtgaaacaggagaaaccgaaagctggctatagaagggcctgatctaaccagttcccttccaacaacaggtttgcaaaagggtacaaagaaaacgtttgtaagaatgtgagcagacgcatcatgatgcaccggaccgcggaagccttcagcttatggcgacgccttcccgtgaacaatccagttcagcttgcgcagagtcagttagatcccactcgatttacacggggcttcaccggagtcttggaagggctcaccctgacaggcagtgttcccaaaatcatcccgctgcaattcagagccatgatggcaccctcagcctgtgattcagagttcaaaagttagaatcaatatctccatcttaagcggatactcagtatggaaggaacaaatagaaggcatgcctgtacgagcacaatcatcttgcaggtcaatatacgattaggaaaaaaaaagcactgggaggaaaaatctcaattgtttgagcaaacttatcaacttattgtccctaatcattgcagcgagtgtcacaagaatctttgatgcatatgctgttaagaaattaccaaacatgcacaagttgatagaacatagctcctccaggctatgcagcatacccattttagggtagcatcatagcaagagcttactagtgacatgagtggcgtagcaaatgctatgcaaaacagacgaattaaactagtccattgttctagaggatctaaccagcaaacatcacttgctagtaaactaaatgcaggtaggcattagaacattatttaacaatataaacagaactaaccagtgcggaaaaaaaagttttgttcttacatggacaaattcaacaaaagcaatccttgtggaatgtacattatcccctagaagcctcaaccgagagacctgcaaaggaaatatatttaagaggcaaattatatgacatatcaatcggattttaatgttcttaagaaacagtatatttgatagtggatttggcaaaccacaaagtccaatgctcacctcaccgcaaagttcttcaaagaatttctttacatctaactgagtaacctacatgatgaagaggcaaatgagatcaccaaagcatcaaactgatagtgttagcttcagaaacttgcacccaagatctaggaccataaaatactaagcatcaatgaaaaagcaataagtgaaaagcagtaagctttatggcatagaaaag

SEQ ID NO: 33414 - DNA, 885 bp, Zea Mays
aattgattatggtcttggttggtatgctatagtattacgcctgtcatgctagacgtgccagagacccagagcgttgtcttatgtcattgattccatttttcttgttaagggtctattctgtgtgttggaagtgagtggcatcgctatccatcatcgttcttcataccctcttatatcagtgaagtccggtggatagatgatggcttccgtgggttacttccatttcccttcaacgagacactgggtgggaccactgcagctccgtcctacttcaataacaagaacaaggcggctgaagggcaatatctgaaagacattggagcatgtaacttactggtggaacttgatctaagacggccttacccctcgcgcgggagtgacttgtcgacatgggaggcattggccgcactgccgttcctggacagagagctttcccctgcattatatcggtccttcttcataccataccgatggcaacaaaacaatgtgttcggcctgtacaagctactgaggaggttgcatcctgaccatgcgtaatcaagggaaatgtggggtttgcttcaatgagcttaatcacgtgatttcttttaacaaacagcttgcagatttttactgccatagattttctgatcccaatgtgtaatggcgtacctatttttgtcccactgatccttccatcatacaaattcatcacgagatgacgaggatgagagtgctcaactgctgatgtagggagggatgttcgaggagaatcatgttgtgaaacggctgcttcgccagttgttacctttttggattgtttgttgaatattagccaatgacagactgatagatctatacctttttatgttgagcatttttttcctcctgcaaaatgcctctatt

SEQ ID NO: 33415 - DNA, 2117 bp, Zea Mays
gtgctttacttcgcgcgagcaaagaggggagctggggagggcaaacacgcactagacccaaatcctcgtagctccagacatccagaacggcagaaccttctagaccaaaccttcgacccatcacctcgagctccagccatgtcgctctcgtcggcgcgccagcgccgggccactgcagcgtcgccaccgacagatgatgggtacgccaaggacgccaaggacaggaggcggcggcccggcggagacggggacagcgaggacgagggtatcaagtggttcctcccgttcctggcgctcgggctcctccgccacatgagcgcgtcctccaacctgatccacgactgcgacgaggtcttcaactactgggagcccctccacttcctcctctaccgctccggcttccagacatgggagtacagttccgactttgctcttcggtcatatttgtaccttttctttcatgctcttgtagctgggcctgcttcattgatctttggttcgtgtgttctactcagtgagaatctttcttggtctcatttcaactattaccgaaactgttctggtggttgctctttcaagaagatatgggaagcggcttgcttgttatgttcttgcaatgctatgcttatccagcggttgcttctttgctagtaccagtttcttgccaagttcattctccatgtatgcagtaacactttcgtctgcactcttccttcttgagaaatatgctggtgcagtctcagttgcagctgctggagtgatccttggttggcctttctcaattttggtcttcctccctgttaccgtttattctctaattagaggatcttttagaagggtttttctatctggatttgtgacttcactgtgctttcttgttctttcgtttgttgctgattattactgctatggtcgattgacattctcggtgttcaatcttctgaaatataacgttattggtggcggcgaaagtcacttgtatggaaccgaggggttttcattttacttcaggaatggattcaataatttcaattttgccttcatcctggctcttcttttcttgggggttgtaccatttgcaagaaagaaatatgctcctgatctcctgatagttgtctctcctgtctatatctggttggctttcatgtctttgcaggcacacaaagaagaaaggtttctctatccaatttattcattgatatgtgttgcagctgcagctgttattgacagtttacctgattttttccatgacaaatattcatctgatcagtctatttttgaaaagatagcgaagggtctgcgtcctttgatacttggttttattctgtgtgcttcccacagccgaacattttccatgttaaatggatatggtgctcccctgcagatctatcagcatctagaacatcatgatgacactggacccgggtctattctgtgtgttggaagtgagtggcatcgctatccatcatcgttcttcataccctcttatatcagtgaagtccggtggatagatgatggcttccgtgggttacttccatttcccttcaacgagacactgggtgggaccactgcagctccgtcctacttcaataacaagaacaaggcggctgaagggcaatatctgaaagacattggagcatgtaacttactggtggaacttgatctaagacggccttacccctcgcgcgggagtgacttgtcgacatgggaggcattggccgcactgccgttcctggacagagagctttcccctgcattatatcggtccttcttcataccataccgatggcaacaaaacaatgtgttcggcctgtacaagctactgaggagcttgcagatttttactgccatagattttctgatcccaatgtgtaatggcgtacctatttttgtcccactgatccttccatcatacaaattcatcacgagatgacgaggatgagagtgctcaactgctgatgtagggagggatgttcgaggagaatcatgttgtgaaacggctgcttcgccagttgttacctttttggattgtttgttgaatattagccaatgacagactgatagatctatacctttttatgttgagcatttttttcctcctgcaaaatgcctctatt

SEQ ID NO: 33416 - DNA, 1709 bp, Zea Mays
gtgctttacttcgcgcgagcaaagaggggagctggggagggcaaacacgcactagacccaaatcctcgtagctccagacatccagaacggcagaaccttctagaccaaaccttcgacccatcacctcgagctccagccatgtcgctctcgtcggcgcgccagcgccgggccactgcagcgtcgccaccgacagatgatgggtacgccaaggacgccaaggacaggaggcggcggcccggcggagacggggacagcgaggacgagggtatcaagtggttcctcccgttcctggcgctcgggctcctccgccacatgagcgcgtcctccaacctgatccacgactgcgacgaggtcttcaactactgggagcccctccacttcctcctctaccgctccggcttccagacatgggagtacagttccgactttgctcttcggtcatatttgtaccttttctttcatgctcttgtagctgggcatccaaacaaacccctaaattagctaaattacaaccaaatcagccatgtatcctttgtactatgttgcaactagttattgctactgactaatgctaagagtaatggccatgttttctgtagtcctcataattgtatgaaaatagtagtgctgtaataggctatgaaaagaataacagctagcttttgaagaatcttttcttatattcatccagtcgaccagtccttgttaatggcaacctacagatggaacatactgaggctgactggcctttatctgtttgtgcaggtttctctatccaatttattcattgatatgtgttgcagctgcagctgttattgacagtttacctgattttttccatgacaaatattcatctgatcagtctatttttgaaaagatagcgaagggtctgcgtcctttgatacttggttttattctgtgtgcttcccacagccgaacattttccatgttaaatggatatggtgctcccctgcagatctatcagcatctagaacatcatgatgacactggacccgggtctattctgtgtgttggaagtgagtggcatcgctatccatcatcgttcttcataccctcttatatcagtgaagtccggtggatagatgatggcttccgtgggttacttccatttcccttcaacgagacactgggtgggaccactgcagctccgtcctacttcaataacaagaacaaggcggctgaagggcaatatctgaaagacattggagcatgtaacttactggtggaacttgatctaagacggccttacccctcgcgcgggagtgacttgtcgacatgggaggcattggccgcactgccgttcctggacagagagctttcccctgcattatatcggtccttcttcataccataccgatggcaacaaaacaatgtgttcggcctgtacaagctactgaggagcttgcagatttttactgccatagattttctgatcccaatgtgtaatggcgtacctatttttgtcccactgatccttccatcatacaaattcatcacgagatgacgaggatgagagtgctcaactgctgatgtagggagggatgttcgaggagaatcatgttgtgaaacggctgcttcgccagttgttacctttttggattgtttgttgaatattagccaatgacagactgatagatctatacctttttatgttgagcatttttttcctcctgcaaaatgcctctatt

SEQ ID NO: 33417 - DNA, 2115 bp, Zea Mays
gtgctttacttcgcgcgagcaaagaggggagctggggagggcaaacacgcactagacccaaatcctcgtagctccagacatccagaacggcagaaccttctagaccaaaccttcgacccatcacctcgagctccagccatgtcgctctcgtcggcgcgccagcgccgggccactgcagcgtcgccaccgacagatgatgggtacgccaaggacgccaaggacaggaggcggcggcccggcggagacggggacagcgaggacgagggtatcaagtggttcctcccgttcctggcgctcgggctcctccgccacatgagcgcgtcctccaacctgatccacgactgcgacgaggtcttcaactactgggagcccctccacttcctcctctaccgctccggcttccagacatgggagtacagttccgactttgctcttcggtcatatttgtaccttttctttcatgctcttgtagctgggcctgcttcattgatctttggtgagcataagatatgggaagcggcttgcttgttatgttcttgcaatgctatgcttatccagcggttgcttctttgctagtaccagtttcttgccaagttcattctccatgtatgcagtaacactttcgtctgcactcttccttcttgagaaatatgctggtgcagtctcagttgcagctgctggagtgatccttggttggcctttctcaattttggtcttcctccctgttaccgtttattctctaattagaggatcttttagaagggtttttctatctggatttgtgacttcactgtgctttcttgtaagtaaatccctcacaattgactgttttacaacatgtatgagtttgactgatcatgacaagtttatgctaggttctttcgtttgttgctgattattactgctatggtcgattgacattctcggtgttcaatcttctgaaatataacgttattggtggcggcgaaagtcacttgtatggaaccgaggggttttcattttacttcaggaatggattcaataatttcaattttgccttcatcctggctcttcttttcttgggggttgtaccatttgcaagaaagaaatatgctcctgatctcctgatagttgtctctcctgtctatatctggttggctttcatgtctttgcaggcacacaaagaagaaaggtttctctatccaatttattcattgatatgtgttgcagctgcagctgttattgacagtttacctgattttttccatgacaaatattcatctgatcagtctatttttgaaaagatagcgaagggtctgcgtcctttgatacttggttttattctgtgtgcttcccacagccgaacattttccatgttaaatggatatggtgctcccctgcagatctatcagcatctagaacatcatgatgacactggacccgggtctattctgtgtgttggaagtgagtggcatcgctatccatcatcgttcttcataccctcttatatcagtgaagtccggtggatagatgatggcttccgtgggttacttccatttcccttcaacgagacactgggtgggaccactgcagctccgtcctacttcaataacaagaacaaggcggctgaagggcaatatctgaaagacattggagcatgtaacttactggtggaacttgatctaagacggccttacccctcgcgcgggagtgacttgtcgacatgggaggcattggccgcactgccgttcctggacagagagctttcccctgcattatatcggtccttcttcataccataccgatggcaacaaaacaatgtgttcggcctgtacaagctactgaggagcttgcagatttttactgccatagattttctgatcccaatgtgtaatggcgtacctatttttgtcccactgatccttccatcatacaaattcatcacgagatgacgaggatgagagtgctcaactgctgatgtagggagggatgttcgaggagaatcatgttgtgaaacggctgcttcgccagttgttacctttttggattgtttgttgaatattagccaatgacagactgatagatctatacctttttatgttgagcatttttttcctcctgcaaaatgcctctatt

SEQ ID NO: 33418 - DNA, 1840 bp, Zea Mays
ctgcaattgtgctttacttcgcgcgagcaaagaggggagctggggagggcaaacacgcactagacccaaatcctcgtagctccagacatccagaacggcagaaccttctagaccaaaccttcgacccatcacctcgagctccagccatgtcgctctcgtcggcgcgccagcgccgggccactgcagcgtcgccaccgacagatgatgggtacgccaaggacgccaaggacaggaggcggcggcccggcggagacggggacagcgaggacgagggtatcaagtggttcctcccgttcctggcgctcgggctcctccgccacatgagcgcgtcctccaacctgatccacgactgcgacgaggtcttcaactactgggagcccctccacttcctcctctaccgctccggcttccagacatgggagtacagttccgactttgctcttcggtcatatttgtaccttttctttcatgctcttgtagctgggcctgcttcattgatctttggtgagcataaggttcgtgtgttctactcagtgagaatctttcttggtctcatttcaactattaccgaaactgttctggtggttgctctttcaagaagatatgggaagcggcttgcttgttatgttcttgcaatgctatgcttatccagcggttgcttctttgctagtaccagtttcttgccaagttcattctccatgtatgcagtaacactttcgtctgcactcttccttcttgagaaatatgctggtgcagtctcagttgcagctgctggagtgatccttggttggcctttctcaattttggtcttcctccctgttaccgtttattctctaattagaggatcttttagaagggtttttctatctggatttgtgacttcactgtgctttcttgtttctctatccaatttattcattgatatgtgttgcagctgcagctgttattgacagtttacctgattttttccatgacaaatattcatctgatcagtctatttttgaaaagatagcgaagggtctgcgtcctttgatacttggttttattctgtgtgcttcccacagccgaacattttccatgttaaatggatatggtgctcccctgcagatctatcagcatctagaacatcatgatgacactggacccgggtctattctgtgtgttggaagtgagtggcatcgctatccatcatcgttcttcataccctcttatatcagtgaagtccggtggatagatgatggcttccgtgggttacttccatttcccttcaacgagacactgggtgggaccactgcagctccgtcctacttcaataacaagaacaaggcggctgaagggcaatatctgaaagacattggagcatgtaacttactggtggaacttgatctaagacggccttacccctcgcgcgggagtgacttgtcgacatgggaggcattggccgcactgccgttcctggacagagagctttcccctgcattatatcggtccttcttcataccataccgatggcaacaaaacaatgtgttcggcctgtacaagctactgaggagcttgcagatttttactgccatagattttctgatcccaatgtgtaatggcgtacctatttttgtcccactgatccttccatcatacaaattcatcacgagatgacgaggatgagagtgctcaactgctgatgtagggagggatgttcgaggagaatcatgttgtgaaacggctgcttcgccagttgttacctttttggattgtttgttgaatattagccaatgacagactgatagatctatacctttttatgttgagcatttttttcctcctgcaaaatgcctctatt

SEQ ID NO: 33419 - DNA, 2147 bp, Zea Mays
cagggacccacctgcaattgtgctttacttcgcgcgagcaaagaggggagctggggagggcaaacacgcactagacccaaatcctcgtagctccagacatccagaacggcagaaccttctagaccaaaccttcgacccatcacctcgagctccagccatgtcgctctcgtcggcgcgccagcgccgggccactgcagcgtcgccaccgacagatgatgggtacgccaaggacgccaaggacaggaggcggcggcccggcggagacggggacagcgaggacgagggtatcaagtggttcctcccgttcctggcgctcgggctcctccgccacatgagcgcgtcctccaacctgatccacgactgcgacgaggtcttcaactactgggagcccctccacttcctcctctaccgctccggcttccagacatgggagtacagttccgactttgctcttcggtcatatttgtaccttttctttcatgctcttgtagctgggcctgcttcattgatctttggtgagcataaggttcgtgtgttctactcagtgagaatctttcttggtctcatttcaactattaccgaaactgttctggtggttgctctttcaagaagatatgggaagcggcttgcttgttatgttcttgcaatgctatgcttatccagcggttgcttctttgctagtaccagtttcttgccaagttcattctccatgtatgcagtaacactttcgtctgcactcttccttcttgagaaatatgctggtgcagtctcagttgcagctgctggagtgatccttggttggcctttctcaattttggtcttcctccctgttaccgtttattctctaattagaggatcttttagaagggtttttctatctggatttgtgacttcactgtgctttcttgttctttcgtttgttgctgattattactgctatggtcgattgacattctcggtgttcaatcttctgaaatataacgttattggtggcggcgaaagtcacttgtatggaaccgaggggttttcattttacttcaggaatggattcaataatttcaattttgccttcatcctggctcttcttttcttgggggttgtaccatttgcaagaaagaaatatgctcctgatctcctgatagttgtctctcctgtctatatctggttggctttcatgtctttgcaggcacacaaagaagaaaggtttctctatccaatttattcattgatatgtgttgcagctgcagctgttattgacagtttacctgattttttccatgacaaatattcatctgatcagtctatttttgaaaagatagcgaagggtctgcgtcctttgatacttggttttattctgtgtgcttcccacagccgaacattttccatgttaaatggatatggtgctcccctgcagatctatcagcatctagaacatcatgatgacactggacccgggtctattctgtgtgttggaagtgagtggcatcgctatccatcatcgttcttcataccctcttatatcagtgaagtccggtggatagatgatggcttccgtgggttacttccatttcccttcaacgagacactgggtgggaccactgcagctccgtcctacttcaataacaagaacaaggcggctgaagggcaatatctgaaagacattggagcatgtaacttactggtggaacttgatctaagacggccttacccctcgcgcgggagtgacttgtcgacatgggaggcattggccgcactgccgttcctggacagagagctttcccctgcattatatcggtccttcttcataccataccgatggcaacaaaacaatgtgttcggcctgtacaagctactgaggagcttgcagatttttactgccatagattttctgatcccaatgtgtaatggcgtacctatttttgtcccactgatccttccatcatacaaattcatcacgagatgacgaggatgagagtgctcaactgctgatgtagggagggatgttcgaggagaatcatgttgtgaaacggctgcttcgccagttgttacctttttggattgtttgttgaatattagccaatgacagactgatagatctatacctttttatgttgagcatttttttcctcctgcaaaatgcctctatt

SEQ ID NO: 33420 - DNA, 2586 bp, Zea Mays
cgcgttctgcggcgcagcggctgggctgaggacggcgatgctcacacacatgcttgaaacaggtacacattgggaattcaccaacctatagacttgaaaggaagcttggaaagggaggatttggacaagtatacgttggtcgacgtatttcagctcctcgtctcagtgaccgtaaccctggttcaaatgctttagaggttgcactgaaatttgaacaccaatccagcaaaggttgcaactttggagctccttatgagtggcaagtttacaacactcttagtgggaaccatggtgtcccacgggtacactacaaaggaaagcagggagagttttacatcatggttatggatattttgggaccaagcctatgggatgtttggaataataattcccactcgatgtctgttgagatggttgcttgcataggtatagaggcaatctccatactggaaaagatgcactctaaagggtatgtccatggtgatgtgaagcctgagaacttcttgcttggtcctcctggtaccccagaggagaagaagctttttcttgttgaccttggattggcaactaaatggaaggatgctggtacggggcaccatgttgaatatgatcagagacctgatatttttaggggaactgttcgctatgctagcgtgcatgcccacttgggaagaactgggagtaggagagatgatcttgaatccctcgcatacactcttatttttcttctccgtggccgcctcccttggcaaggataccaaggagagaacaaaggttttcttgtctgcaagaaaaagatggcgacatctccggagtctctgtgtggaatctgtccacaacctttccggaattttgttgagtatgtcgtgaacttgaaatttgatgaagaaccaaattatgctaggtgcatctctctttttgatggtattgttggcccaaatccagacataagaccgataaacactgatggtgcccaaaagctagtatatcaggttgggcagaagagaggtcgcttaatagtggacgaaaatgatgatgagcaacctaagaaaaagatcagaatggggatgccggcaactcagtggattagtgtctacaatgcccgtcgacctatgaaacagaggtcagcatgatgcacatatctgcataatggcagtaacatgaattttccattgtcttgccacatttgtttatcaggtaccactacaacgtagccgataatagattggtgcagcatattcaaaaggggaacgaagatggcttgtttattagttcagttgcctccagctcaaacctgtgggctttaattatggatgctggcactggttttacatctcaagtatacgaactttctagttactttcttcacaaggaatggataatggaacagtgggagagaaatttctatatcactgcactggctggtgcgaataatggaagctctttggtgattatgtcaagaggaacacaatatgcccagcagtcctacaaagtaagtgatacatttcctttcaaatggataaacaaaaagtggaaggagggcttctatgtcactgctatggcaacagctggaagccgatgggcagttgtcatgtcccgcaatgctggtttcacttctcaggtagtggagcttgatttcttatatccaagtgagggcatccacatgcgttgggacaatggctatcgcattacggcaacggctgccacatgggaccaggcggcctttatcttgagcataccaaggagaaagcctactgatgaaacacaggagaccctgagaacatctgcttttcctagccagcatgtgaaggtggttttatgatatcaatggggcattttgaagctgaaaactctgctaacctacttacctgcaactaacaaaaggtaacctatatatgaggaaaaaagaaagcaaagtctgttgtgtttcgctaatctctaccatggagcaaaagaacattgcggtatgcctttttttttaattgggctgtgtataaattatccaaagtattaggttgtgctgtaaagaatgtagaagtgtacctgctggacggttgccatgtatataaagtcgaattttttacaatgttgtttcgaattacaaagatggaatttgtagctttttcttcattcatctattcaagttacagatcaatagctactcccctccccccaaattataaaaggttcttgtcttttgaagatcattgcttttgtaatgtatctagatatatgctatgttgagatatatagcaaaaaactatctaaaaaaagtagaacgtcttacatttttaaaaaaaagatgtggtatgatgtagttcgtttgggtacatcacccaggatacaaaaaaatgcttgtatgtatgtcgttgatggtccgacaagttcgctttctctcttcgatcccagaactagagttggactgctatagcaatacctaaaagcagtatgatagcaacacacacaaaaggaagtcttgtttttcactatgaatcaattgtcctgttgttccattggacatctacagtgttgctgcatttgctgcaaaacacagaacagtcagaaagaaaaaaacgaagaaacaag

SEQ ID NO: 33421 - DNA, 2540 bp, Zea Mays
cgcgttctgcggcgcagcggctgggctgaggacggcgatgctcacacacatgcttgaaacaggtacacattgggaattcaccaacctatagacttgaaaggaagcttggaaagggaggatttggacaagtatacgttggtcgacgtatttcagctcctcgtctcagtgaccgtaaccctggttcaaatgctttagaggttgcactgaaatttgaacaccaatccagcaaaggttgcaactttggagctccttatgagtggcaagtttacaacactcttagtgggaaccatggtgtcccacgggtacactacaaaggaaagcagggagagttttacatcatggttatggatattttgggaccaagcctatgggatgtttggaataataattcccactcgatgtctgttgagatggttgcttgcataggtatagaggcaatctccatactggaaaagatgcactctaaagggtatgtccatggtgatgtgaagcctgagaacttcttgcttggtcctcctggtaccccagaggagaagaagctttttcttgttgaccttggattggcaactaaatggaaggatgctggtacggggcaccatgttgaatatgatcagagacctgatatttttaggggaactgttcgctatgctagcgtgcatgcccacttgggaagaactgggagtaggagagatgatcttgaatccctcgcatacactcttatttttcttctccgtggccgcctcccttggcaaggataccaaggagagaacaaaggttttcttgtctgcaagaaaaagatggcgacatctccggagtctctgtgtggaatctgtccacaacctttccggaattttgttgagtatgtcgtgaacttgaaatttgatgaagaaccaaattatgctaggttgggcagaagagaggtcgcttaatagtggacgaaaatgatgatgagcaacctaagaaaaagatcagaatggggatgccggcaactcagtggattagtgtctacaatgcccgtcgacctatgaaacagaggtaccactacaacgtagccgataatagattggtgcagcatattcaaaaggggaacgaagatggcttgtttattagttcagttgcctccagctcaaacctgtgggctttaattatggatgctggcactggttttacatctcaagtatacgaactttctagttactttcttcacaaggaatggataatggaacagtgggagagaaatttctatatcactgcactggctggtgcgaataatggaagctctttggtgattatgtcaagaggaacacaatatgcccagcagtcctacaaagtaagtgatacatttcctttcaaatggataaacaaaaagtggaaggagggcttctatgtcactgctatggcaacagctggaagccgatgggcagttgtcatgtcccgcaatgctggtttcacttctcaggtagtggagcttgatttcttatatccaagtgagggcatccacatgcgttgggacaatggctatcgcattacggcaacggctgccacatgggaccaggcggcctttatcttgagcataccaaggagaaagcctactgatgaaacacaggagaccctgagaacatctgcttttcctagccagcatgtgaaggacaaatggtccaacaacctatacctagcttccatctgttatggaagatcggtgtcctgaagcccgttttcacgatttggtctggttgctgagaggtatattgatatcaaatacaggtggttttatgatatcaatggggcattttgaagctgaaaactctgctaacctacttacctgcaactaacaaaaggtaacctatatatgaggaaaaaagaaagcaaagtctgttgtgtttcgctaatctctaccatggagcaaaagaacattgcggtatgcctttttttttaattgggctgtgtataaattatccaaagtattaggttgtgctgtaaagaatgtagaagtgtacctgctggacggttgccatgtatataaagtcgaattttttacaatgttgtttcgaattacaaagatggaatttgtagctttttcttcattcatctattcaagttacagatcaatagctactcccctccccccaaattataaaaggttcttgtcttttgaagatcattgcttttgtaatgtatctagatatatgctatgttgagatatatagcaaaaaactatctaaaaaaagtagaacgtcttacatttttaaaaaaaagatgtggtatgatgtagttcgtttgggtacatcacccaggatacaaaaaaatgcttgtatgtatgtcgttgatggtccgacaagttcgctttctctcttcgatcccagaactagagttggactgctatagcaatacctaaaagcagtatgatagcaacacacacaaaaggaagtcttgtttttcactatgaatcaattgtcctgttgttccattggacatctacagtgttgctgcatttgctgcaaaacacagaacagtcagaaagaaaaaaacgaagaaacaag

SEQ ID NO: 33422 - DNA, 2522 bp, Zea Mays
cgcgttctgcggcgcagcggctgggctgaggacggcgatgctcacacacatgcttgaaacaggtacacattgggaattcaccaacctatagacttgaaaggaagcttggaaagggaggatttggacaagtatacgttggtcgacgtatttcagctcctcgtctcagtgaccgtaaccctggttcaaatgctttagaggttgcactgaaatttgaacaccaatccagcaaaggttgcaactttggagctccttatgagtggcaagtttacaacactcttagtgggaaccatggtgtcccacgggtacactacaaaggaaagcagggagagttttacatcatggttatggatattttgggaccaagcctatgggatgtttggaataataattcccactcgatgtctgttgagatggttgcttgcataggtatagaggcaatctccatactggaaaagatgcactctaaaggcctgagaacttcttgcttggtcctcctggtaccccagaggagaagaagctttttcttgttgaccttggattggcaactaaatggaaggatgctggtacggggcaccatgttgaatatgatcagagacctgatatttttaggggaactgttcgctatgctagcgtgcatgcccacttgggaagaactgggagtaggagagatgatcttgaatccctcgcatacactcttatttttcttctccgtggccgcctcccttggcaaggataccaaggagagaacaaaggttttcttgtctgcaagaaaaagatggcgacatctccggagtctctgtgcatctctctttttgatggtattgttggcccaaatccagacataagaccgataaacactgatggtgcccaaaagctagtatatcaggttgggcagaagagaggtcgcttaatagtggacgaaaatgatgatgagcaacctaagaaaaagatcagaatggggatgccggcaactcagtggattagtgtctacaatgcccgtcgacctatgaaacagaggtaccactacaacgtagccgataatagattggtgcagcatattcaaaaggggaacgaagatggcttgtttattagttcagttgcctccagctcaaacctgtgggctttaattatggatgctggcactggttttacatctcaagtatacgaactttctagttactttcttcacaaggaatggataatggaacagtgggagagaaatttctatatcactgcactggctggtgcgaataatggaagctctttggtgattatgtcaagaggaacacaatatgcccagcagtcctacaaagtaagtgatacatttcctttcaaatggataaacaaaaagtggaaggagggcttctatgtcactgctatggcaacagctggaagccgatgggcagttgtcatgtcccgcaatgctggtttcacttctcaggtagtggagcttgatttcttatatccaagtgagggcatccacatgcgttgggacaatggctatcgcattacggcaacggctgccacatgggaccaggcggcctttatcttgagcataccaaggagaaagcctactgatgaaacacaggagaccctgagaacatctgcttttcctagccagcatgtgaaggacaaatggtccaacaacctatacctagcttccatctgttatggaagatcggtgtcctgaagcccgttttcacgatttggtctggttgctgagaggtatattgatatcaaatacaggtggttttatgatatcaatggggcattttgaagctgaaaactctgctaacctacttacctgcaactaacaaaaggtaacctatatatgaggaaaaaagaaagcaaagtctgttgtgtttcgctaatctctaccatggagcaaaagaacattgcggtatgcctttttttttaattgggctgtgtataaattatccaaagtattaggttgtgctgtaaagaatgtagaagtgtacctgctggacggttgccatgtatataaagtcgaattttttacaatgttgtttcgaattacaaagatggaatttgtagctttttcttcattcatctattcaagttacagatcaatagctactcccctccccccaaattataaaaggttcttgtcttttgaagatcattgcttttgtaatgtatctagatatatgctatgttgagatatatagcaaaaaactatctaaaaaaagtagaacgtcttacatttttaaaaaaaagatgtggtatgatgtagttcgtttgggtacatcacccaggatacaaaaaaatgcttgtatgtatgtcgttgatggtccgacaagttcgctttctctcttcgatcccagaactagagttggactgctatagcaatacctaaaagcagtatgatagcaacacacacaaaaggaagtcttgtttttcactatgaatcaattgtcctgttgttccattggacatctacagtgttgctgcatttgctgcaaaacacagaacagtcagaaagaaaaaaacgaagaaacaag

SEQ ID NO: 33423 - DNA, 4334 bp, Zea Mays
gggcgagatccattccagtcgcccccattcactccccttcctcgtccgtcctcttcctccctccgatccaccgctccccctacccgccgggccgccgctacctcgagcgagcggagatctctctcctcgaacggggggggaggaagatgctcaccaagttcgagaccaagagcaaccgggtcaagggcctcgccttccacccgcgccgcccatggatcctgtccagcctccatagcggagtcgttcagatgtgggactaccgcatgggcaccctcctcaaccgcttcgacgagcacgacgggcccgtcaggggcgtccactttcacgccacgcagccgctcttcgtgtccggaggtgacgattacaagattaaggtctggaattacaagactcaacgctgcctattcacacttcatgggcacctcgactacattcgcactgtgcaattccaccatgagtgcccatggatcgtaagtgctagcgacgatcagacaatccggatctggaattggcagtcacgcacatgtgtggccgtgctaactgggcataaccactatgtcatgtgtgcctccttccatcccaaagaggatctggttgtatcggcatcacttgatcagaccgtgcgtgtctgggatattggggctctgagaaagaagtcagcatcacctgccgatgacatcctccgcctcactcagatgaacacagatctatttggaggtattgatgctgtagtcaaatatgtcttggaaggccatgaccgcggggtcaactgggcctcatttcatcccactttgcctctcattgtttccggggcagatgaccggcaggtgaagatatggagaatgaacgataccaaggcttgggaagttgatacgttgaggggccacatgaataatgtgtcttgtgtgatgtttcatgcgaagcaagacatcatcgtgtctaactcagaagacaaaagcattcgtgtttgggatgccacaaagagaactggcattcaaacatttaggcgggaacatgaccgtttctggattcttgctgctcaccctgaaatgaaccttcttgctgctggtcatgacagtggcatgattgttttcaaattagagagggaacgcccggccttctgtgtcagtggtgacacagttttttatgtgaaggaccggtttctaaagttctttgaatactccacacagaaggaagttcagttggctccaataagaagacctgggtcagtcagcttgaaccagtcacccaggacactatcgtatagtccaactgaaaatgctgtcttgatttgctttgatgctgatgggggttcatatgaactctacattgctcccaaggattctgctggcaaggctgattacttgcaagaggcaaagaagggagctggtggttctgctgtatttgtggcacgcaacaggtttgcagtccttgagaggagtagcaatcaagttttggtgaagaatctgaagaatgaaatcatgaagaaaagcccccttcctattgcgacagatgcaatatattatgctgggacaggtaacttgctgtgcaaggctgaagaccgggtggccatctttgatcttcagcaaaggctagttcttggtgagctacagacacctgctgtcaaatatattgtttggtccagtgatatggaatctgttgcattcctgagcaagcatgttgtggttatagccagcaagaagcttgtccatcaatgcacactgcatgaaaccacccgtgtgaaaagtggtgcttgggatgagaatggcgtgttcatctacaccacactgaaccatatgaagtactgccttcccaatggcgacagtgggatcataaaaacccttgatgttcctatttacataacaagggttatcgggaataacattttctgcctagaccgtgatggaaagaacaagctgattgcagttgatgcaacagagtacattttcaagctcgctcttctcagaaaacgctatgatcatgttatgagtatgatcaagaactcccagttgtgtgggcaggctgtgatttcttatttacaacagaaaggttttccagaagttgctcttcactttgtgaaggatgagaagaccagatttaacttggcccttgagagtggtaacattcaaattgcagttgcttctgcaaaggagattgatgacaaggatcactggtacaggttgggaattgaggccctgaggcaaggaaatgttggtatcgtggaatatgcataccaacgaacaaaaagttttgagaggcttgcttttctgtatctcattactggttacttggacaaggtgggcttcatgtacaaaattgctggacagaataataatttgatgggacaatttcacaatgcattgtatcttgggcatgttaataagagagttgagatcttggaaaatgctgggcagctgcctcttgcttatgttcttgctgtcacacatgggctcactgaaattgctgagaggattgctgctgaattaggcgagcatgttcctttgctgcctgaaggaaaatcacactcgttactgatcccccctgcacctctcacagcctgtggtgattggccattgctgagggtagtgcgtggtatttttgaaggtggactggattctactggaagggcagagcttgaggaagatgatgaagcttctggtgctgactggggtgatgaggacttggatattgttgatgcaagtgaggtggtggcaaatggtggcgattattttgatgcagagggtgaaccaaacgaggaggagggtgaggaaggtggctgggacctggaagatctggaacttccacctgatacagagactccaaaatctgctggcaatgctcgctctcctgtatttgtcactccaacagcaggcatccctgtcagccaaatttggactcaaaaatcttctctggctggggagcatgcggctgcagggaactttgatacagcaatgaggttgcttagccgacaattgggcatcaagaactttgctccgctgaagcccttgtttcttgatctgcatatgggcagtcattcatatctgcgtgcccttgctgctgctccagttatatcagttgctgtagagaaaggttggaatgagtccgcaagtcctaatgtaagaggccctcctgcacttattttcagcttctcacaaatggaagacagactcaaggctgcctacaaagccacaactgagggcaggttcccagaagcactgaggcagttccttagcatcttacatacgattcctgtaatcgttgtagactcacggagagaagttgatgaagtgaaggaattaattgagatagtgagggagtatattcttggtctgaagatggaactcaagagaaaggaattgagggatgatgtgacccgccaacaggagttggccgcttacttcacaaattgcaagcttcagagaattcatatgaggcttgtgctttctagcgccatggctctttgcttcaagcagaaaaactatgctactgcagcacactttgcaaggatgcttcttgagaacagccctcaagaggctcaagcaaggaaggctcgacaggtgctgcaagcttgtcaggataaggatgattctcaccaactgaactatgactttagaaatccatttattgtttgcggtgctacatatgttccaatctaccgtggccaaaaggatatttcttgcccatactgtggatcccggtttgctccttccatcgaagggcagctttgtaccatatgtgagcttgccatagttggggcagacgcctcaggcctggtctgctcccctacgcagatgaagtagacgtctgctgttatcacttgctatatgctccaggagtcaggactgttgagtgacccatggaagctatgctgcatgttatcttacctcctgctgtccgcatcttcagcagcaccatctcgcaatgatgcctggatgtcttgatttggaggggatgaaacaattcaccgaacaccaaacttatcaacgccctccatgtcattccaaattttcgtctggaggggattcatcttggtcttgtctcaattatcgcagctgcgttttcagctctattttgtaaacatattgatgtacgatagctgatgtgagtgctggttcactgaaacgattttctgttatggcatatgccattttaatctctacagtttcagtatattgcacagtagattgtactcaaacatttaaaatttgattgtaccaaggattgagaccagtgttttaacactgaaaaattatgattgatacacaaccttttgtcactgaattgatgggtagtaattgcaatatcaatatattttttgtccactttatatgatg

SEQ ID NO: 33424 - DNA, 4183 bp, Zea Mays
gcacctgcagtttccttctccgggatctcaattctcatctgggagagggcgggcgagatccattccagtcgcccccattcactccccttcctcgtccgtcctcttcctccctccgatccaccgctccccctacccgccgggccgccgctacctcgagcgagcggagatctctctcctcgaacggggggggaggaagatgctcaccaagttcgagaccaagagcaaccgggtcaagggcctcgccttccacccgcgccgcccatggatcctgtccagcctccatagcggagtcgttcagatgtgggactaccgcatgggcaccctcctcaaccgcttcgacgagcacgacgggcccgtcaggggcgtccactttcacgccacgcagccgctcttcgtgtccggaggtgacgattacaagattaaggtctggaattacaagactcaacgctgcctattcacacttcatgggcacctcgactacattcgcactgtgcaattccaccatgagtgcccatggatcgtaagtgctagcgacgatcagacaatccggatctggaattggcagtcacgcacatgtgtggccgtgctaactgggcataaccactatgtcatgtgtgcctccttccatcccaaagaggatctggttgtatcggcatcacttgatcagaccgtgcgtgtctgggatattggggctctgagaaagaagtcagcatcacctgccgatgacatcctccgcctcactcagatgaacacagatctatttggagataccaaggcttgggaagttgatacgttgaggggccacatgaataatgtgtcttgtgtgatgtttcatgcgaagcaagacatcatcgtgtctaactcagaagacaaaagcattcgtgtttgggatgccacaaagagaactggcattcaaacatttaggcgggaacatgaccgtttctggattcttgctgctcaccctgaaatgaaccttcttgctgctggtcatgacagtggcatgattgttttcaaattagagagggaacgcccggccttctgtgtcagtggtgacacagttttttatgtgaaggaccggtttctaaagttctttgaatactccacacagaaggaagttcagttggctccaataagaagacctgggtcagtcagcttgaaccagtcacccaggacactatcgtatagtccaactgaaaatgctgtcttgatttgctttgatgctgatgggggttcatatgaactctacattgctcccaaggattctgctggcaaggctgattacttgcaagaggcaaagaagggagctggtggttctgctgtatttgtggcacgcaacaggtttgcagtccttgagaggagtagcaatcaagttttggtgaagaatctgaagaatgaaatcatgaagaaaagcccccttcctattgcgacagatgcaatatattatgctgggacaggtaacttgctgtgcaaggctgaagaccgggtggccatctttgatcttcagcaaaggctagttcttggtgagctacagacacctgctgtcaaatatattgtttggtccagtgatatggaatctgttgcattcctgagcaagcatgttgtggttatagccagcaagaagcttgtccatcaatgcacactgcatgaaaccacccgtgtgaaaagtggtgcttgggatgagaatggcgtgttcatctacaccacactgaaccatatgaagtactgccttcccaatggcgacagtgggatcataaaaacccttgatgttcctatttacataacaagggttatcgggaataacattttctgcctagaccgtgatggaaagaacaagctgattgcagttgatgcaacagagtacattttcaagctcgctcttctcagaaaacgctatgatcatgttatgagtatgatcaagaactcccagttgtgtgggcaggctgtgatttcttatttacaacagaaaggttttccagaagttgctcttcactttgtgaaggatgagaagaccagatttaacttggcccttgagagtggtaacattcaaattgcagttgcttctgcaaaggagattgatgacaaggatcactggtacaggttgggaattgaggccctgaggcaaggaaatgttggtatcgtggaatatgcataccaacgaacaaaaagttttgagaggcttgcttttctgtatctcattactggttacttggacaaggtgggcttcatgtacaaaattgctggacagaataataatttgatgggacaatttcacaatgcattgtatcttgggcatgttaataagagagttgagatcttggaaaatgctgggcagctgcctcttgcttatgttcttgctgtcacacatgggctcactgaaattgctgagaggattgctgctgaattaggcgagcatgttcctttgctgcctgaaggaaaatcacactcgttactgatcccccctgcacctctcacagcctgtggtgattggccattgctgagggtagtgcgtggtatttttgaaggtggactggattctactggaagggcagagcttgaggaagatgatgaagcttctggtgctgactggggtgatgaggacttggatattgttgatgcaagtgaggtggtggcaaatggtggcgattattttgatgcagagggtgaaccaaacgaggaggagggtgaggaaggtggctgggacctggaagatctggaacttccacctgatacagagactccaaaatctgctggcaatgctcgctctcctgtatttgtcactccaacagcaggcatccctgtcagccaaatttggactcaaaaatcttctctggctggggagcatgcggctgcagggaactttgatacagcaatgaggttgcttagccgacaattgggcatcaagaactttgctccgctgaagcccttgtttcttgatctgcatatgggcagtcattcatatctgcgtgcccttgctgctgctccagttatatcagttgctgtagagaaaggttggaatgagtccgcaagtcctaatgtaagaggccctcctgcacttattttcagcttctcacaaatggaagacagactcaaggctgcctacaaagccacaactgagggcaggttcccagaagcactgaggcagttccttagcatcttacatacgattcctgtaatcgttgtagactcacggagagaagttgatgaagtgaaggaattaattgagatagtgagggagtatattcttggtctgaagatggaactcaagagaaaggaattgagggatgatgtgacccgccaacaggagttggccgcttacttcacaaattgcaagcttcagagaattcatatgaggcttgtgctttctagcgccatggctctttgcttcaagcagaaaaactatgctactgcagcacactttgcaaggatgcttcttgagaacagccctcaagaggctcaagcaaggaaggctcgacaggtgctgcaagcttgtcaggataaggatgattctcaccaactgaactatgactttagaaatccatttattgtttgcggtgctacatatgttccaatctaccgtggccaaaaggatatttcttgcccatactgtggatcccggtttgctccttccatcgaagggcagctttgtaccatatgtgagcttgccatagttggggcagacgcctcaggcctggtctgctcccctacgcagatgaagtagacgatgttatcttacctcctgctgtccgcatcttcagcagcaccatctcgcaatgatgcctggatgtcttgatttggaggggatgaaacaattcaccgaacaccaaacttatcaacgccctccatgtcattccaaattttcgtctggaggggattcatcttggtcttgtctcaattatcgcagctgcgttttcagctctattttgtaaacatattgatgtacgatagctgatgtgagtgctggttcactgaaacgattttctgttatggcatatgccattttaatctctacagtttcagtatattgcacagtagattgtactcaaacatttaaaatttgattgtaccaaggattgagaccagtgttttaacactgaaaaattatgattgatacacaaccttttgtcactgaattgatgggtagtaattgcaatatcaatatattttttgtccactttatatgatg

SEQ ID NO: 33425 - DNA, 1422 bp, Zea Mays
acctcactcagatcggaggggagaaactaggctagttggtctggtgcccctggcactcgctgcacctgcagtttccttctccgggatctcaattctcatctgggagagggcgggcgagatccattccagtcgcccccattcactccccttcctcgtccgtcctcttcctccctccgatccaccgctccccctacccgccgggccgccgctacctcgagcgagcggagatctctctcctcgaacggggggggaggaagatgctcaccaagttcgagaccaagagcaaccgggtcaagggcctcgccttccacccgcgccgcccatggatcctgtccagcctccatagcggagtcgttcagatgtgggactaccgcatgggcaccctcctcaaccgcttcgacgagcacgacgggcccgtcaggggcgtccactttcacgccacgcagccgctcttcgtgtccggaggtgacgattacaagattaaggtctggaattacaagactcaacgctgcctattcacacttcatgggcacctcgactacattcgcactgtgcaattccaccatgagtgcccatggatcgtaagtgctagcgacgatcagacaatccggatctggaattggcagtcacgcacatgtgtggccgtgctaactgggcataaccactatgtcatgtgtgcctccttccatcccaaagaggatctggttgtatcggcatcacttgatcagaccgtgcgtgtctgggatattggggctctgagaaagaagtcagcatcacctgccgatgacatcctccgcctcactcagatgaacacagatctatttggaggtattgatgctgtagtcaaatatgtcttggaaggccatgaccgcggggtcaactgggcctcatttcatcccactttgcctctcattgtttccggggcagatgaccggcaggtgaagatatggagaatgaacgatgttatcttacctcctgctgtccgcatcttcagcagcaccatctcgcaatgatgcctggatgtcttgatttggaggggatgaaacaattcaccgaacaccaaacttatcaacgccctccatgtcattccaaattttcgtctggaggggattcatcttggtcttgtctcaattatcgcagctgcgttttcagctctattttgtaaacatattgatgtacgatagctgatgtgagtgctggttcactgaaacgattttctgttatggcatatgccattttaatctctacagtttcagtatattgcacagtagattgtactcaaacatttaaaatttgattgtaccaaggattgagaccagtgttttaacactgaaaaattatgattgatacacaaccttttgtcactgaattgatgggtagtaattgcaatatcaatatattttttgtccactttatatgatg

SEQ ID NO: 33426 - DNA, 4437 bp, Zea Mays
agactttgcgagcagtggagcaaaggctgttttccgtgggtgcttgaggcttaagcaagaggctcattgagatttgagaccaggagagatgtctggtctccgcggatccgacggtagcaaatgaacctcactcagatcggaggggagaaactaggctagttggtctggtgcccctggcactcgctgcacctgcagtttccttctccgggatctcaattctcatctgggagagggcgggcgagatccattccagtcgcccccattcactccccttcctcgtccgtcctcttcctccctccgatccaccgctccccctacccgccgggccgccgctacctcgagcgagcggagatctctctcctcgaacggggggggaggaagatgctcaccaagttcgagaccaagagcaaccgggtcaagggcctcgccttccacccgcgccgcccatggatcctgtccagcctccatagcggagtcgttcagatgtgggactaccgcatgggcaccctcctcaaccgcttcgacgagcacgacgggcccgtcaggggcgtccactttcacgccacgcagccgctcttcgtgtccggaggtgacgattacaagattaaggtctggaattacaagactcaacgctgcctattcacacttcatgggcacctcgactacattcgcactgtgcaattccaccatgagtgcccatggatcgtaagtgctagcgacgatcagacaatccggatctggaattggcagtcacgcacatgtgtggccgtgctaactgggcataaccactatgtcatgtgtgcctccttccatcccaaagaggatctggttgtatcggcatcacttgatcagaccgtgcgtgtctgggatattggggctctgagaaagaagtcagcatcacctgccgatgacatcctccgcctcactcagatgaacacagatctatttggaggtattgatgctgtagtcaaatatgtcttggaaggccatgaccgcggggtcaactgggcctcatttcatcccactttgcctctcattgtttccggggcagatgaccggcaggtgaagatatggagaatgaacgataccaaggcttgggaagttgatacgttgaggggccacatgaataatgtgtcttgtgtgatgtttcatgcgaagcaagacatcatcgtgtctaactcagaagacaaaagcattcgtgtttgggatgccacaaagagaactggcattcaaacatttaggcgggaacatgaccgtttctggattcttgctgctcaccctgaaatgaaccttcttgctgctggtcatgacagtggcatgattgttttcaaattagagagggaacgcccggccttctgtgtcagtggtgacacagttttttatgtgaaggaccggtttctaaagttctttgaatactccacacagaaggaagttcagttggctccaataagaagacctgggtcagtcagcttgaaccagtcacccaggacactatcgtatagtccaactgaaaatgctgtcttgatttgctttgatgctgatgggggttcatatgaactctacattgctcccaaggattctgctggcaaggctgattacttgcaagaggcaaagaagggagctggtggttctgctgtatttgtggcacgcaacaggtttgcagtccttgagaggagtagcaatcaagttttggtgaagaatctgaagaatgaaatcatgaagaaaagcccccttcctattgcgacagatgcaatatattatgctgggacaggtaacttgctgtgcaaggctgaagaccgggtggccatctttgatcttcagcaaaggctagttcttggtgagctacagacacctgctgtcaaatatattgtttggtccagtgatatggaatctgttgcattcctgagcaagcatgttgtggttatagccagcaagaagcttgtccatcaatgcacactgcatgaaaccacccgtgtgaaaagtggtgcttgggatgagaatggcgtgttcatctacaccacactgaaccatatgaagtactgccttcccaatggcgacagtgggatcataaaaacccttgatgttcctatttacataacaagggttatcgggaataacattttctgcctagaccgtgatggaaagaacaagctgattgcagttgatgcaacagagtacattttcaagctcgctcttctcagaaaacgctatgatcatgttatgagtatgatcaagaactcccagttgtgtgggcaggctgtgatttcttatttacaacagaaaggttttccagaagttgctcttcactttgtgaaggatgagaagaccagatttaacttggcccttgagagtggtaacattcaaattgcagttgcttctgcaaaggagattgatgacaaggatcactggtacaggttgggaattgaggccctgaggcaaggaaatgttggtatcgtggaatatgcataccaacgaacaaaaagttttgagaggcttgcttttctgtatctcattactggttacttggacaaggtgggcttcatgtacaaaattgctggacagaataataatttgatgggacaatttcacaatgcattgtatcttgggcatgttaataagagagttgagatcttggaaaatgctgggcagctgcctcttgcttatgttcttgctgtcacacatgggctcactgaaattgctgagaggattgctgctgaattaggcgagcatgttcctttgctgcctgaaggaaaatcacactcgttactgatcccccctgcacctctcacagcctgtggtgattggccattgctgagggtagtgcgtggtatttttgaaggtggactggattctactggaagggcagagcttgaggaagatgatgaagcttctggtgctgactggggtgatgaggacttggatattgttgatgcaagtgaggtggtggcaaatggtggcgattattttgatgcagagggtgaaccaaacgaggaggagggtgaggaaggtggctgggacctggaagatctggaacttccacctgatacagagactccaaaatctgctggcaatgctcgctctcctgtatttgtcactccaacagcagggaactttgatacagcaatgaggttgcttagccgacaattgggcatcaagaactttgctccgctgaagcccttgtttcttgatctgcatatgggcagtcattcatatctgcgtgcccttgctgctgctccagttatatcagttgctgtagagaaaggttggaatgagtccgcaagtcctaatgtaagaggccctcctgcacttattttcagcttctcacaaatggaagacagactcaaggctgcctacaaagccacaactgagggcaggttcccagaagcactgaggcagttccttagcatcttacatacgattcctgtaatcgttgtagactcacggagagaagttgatgaagtgaaggaattaattgagatagtgagggagtatattcttggtctgaagatggaactcaagagaaaggaattgagggatgatgtgacccgccaacaggagttggccgcttacttcacaaattgcaagcttcagagaattcatatgaggcttgtgctttctagcgccatggctctttgcttcaagcagaaaaactatgctactgcagcacactttgcaaggatgcttcttgagaacagccctcaagaggctcaagcaaggaaggctcgacaggtgctgcaagcttgtcaggataaggatgattctcaccaactgaactatgactttagaaatccatttattgtttgcggtgctacatatgttccaatctaccgtggccaaaaggatatttcttgcccatactgtggatcccggtttgctccttccatcgaagggcagctttgtaccatatgtgagcttgccatagttggggcagacgcctcaggcctggtctgctcccctacgcagatgaagtagacgatgttatcttacctcctgctgtccgcatcttcagcagcaccatctcgcaatgatgcctggatgtcttgatttggaggggatgaaacaattcaccgaacaccaaacttatcaacgccctccatgtcattccaaattttcgtctggaggggattcatcttggtcttgtctcaattatcgcagctgcgttttcagctctattttgtaaacatattgatgtacgatagctgatgtgagtgctggttcactgaaacgattttctgttatggcatatgccattttaatctctacagtttcagtatattgcacagtagattgtactcaaacatttaaaatttgattgtaccaaggattgagaccagtgttttaacactgaaaaattatgattgatacacaaccttttgtcactgaattgatgggtagtaattgcaatatcaatatattttttgtccactttatatgatg

SEQ ID NO: 33427 - DNA, 1734 bp, Zea Mays
gacggcaacccactccaggtctccaccccagccagagagccctggagcctggagggacggggtcggagcaaggctgaattccaggaagaagccatcccagccgcgtgtcgcctccttccacacctcagtcacccgttctataaatacgcgccaccgcgtaaaccgcgaagaaaaagtaaaagggaggaaaagggtccggtgtggcgacgatggagaggggcggcggcggcggagacgagatgatgatgacctcgggcgcgacgggccggatcgtgccggtgttccgctccgtgctgtcgcggcgcgctctgctccgcgtcgccgtggcgctgcactcgctcttcctctggctgctgctcctcgcccgcggcctccgccggcaccgggcggggaccggcgccgacgcgtcggcgtcggaggcgggggctggggccgggacctggagcgcgcggcggtggcggctgcggctgcaggccgcggaggaggaggacgtgcgccgccgcagggcgctcgcggaggaggtgcccatggaggaggaccggggcactaggtgggccaccttcctcgtcaccggggccaggaggaacgcgcttttctgccgcctctgggcgccggccgtcgacgagatgaggggcattttggtcatcatacatggcttgaatgagcacagtggaaggtacgtgcactttgctgagcagctgacagcatgtggtttcggagtatacgcaatggattggatagggcatggtggaagcgatggcctgcacggctatgtgccttcactagattacgtcatcgaagacatcgaagtgcttgttgacagaattctgatggagaatccaggggtcccttgtttcctcctcggccactccaccggtggggctgtcgtcctgaagagaaatggtgcaaaaacgttagcgaagtagcctggtcgttgaaacctgaaaaatggtctggctgctgctgctgctgctgcatggcatctctgtaccctcacatcagggagaaactggaaggcatcgttctgacatcgcccgcgctgcgtgtgaagcctgcgcatcctattgttggggctgtggcgccgatcttctctctggtggcgcccaggttccagttcaagggcgccaacaagaggggcatcccggtgtcccgcgaccccgcggcgctgctggccaagtactcggacccgctggtgtacacggggccgatcagggtgcggacggggcacgagatcctgcgcatctcctcccacctgctgcaccgcctggagaaggtcaccgtcccgttcctggtgctgcacggcaccgccgaccgggtcacggacccgctggcgtcgcgcgagctctacggcgcggcggcgtccgcgcacaaggacctgcgcctgtacgacgggttcctgcacgacctgctcttcgagcccgagcgcgacgaggtcggcgccgagatcgtcgcctggatggacgggatgctccggctccggcggcaggctggatgaagggatggccgtgctgcttctctccttctaggtggtgttcctctccaaagtataataatagatttgtgtgccaagataagatggatgcatttgtgctgtggaactacgttacgtatctatttatatttataacagcggggtaaaagggtcgttttgttttggtgtaaacgaaccaaaacatatggatcaaaatcagacgtaaaaatcagaaacattattacatagagtataaaaataaa

SEQ ID NO: 33428 - DNA, 1725 bp, Zea Mays
gagaggccagagcagaggagacggcaacccactccaggtctccaccccagccagagagccctggagcctggagggacggggtcggagcaaggctgaattccaggaagaagccatcccagccgcgtgtcgcctccttccacacctcagtcacccgttctataaatacgcgccaccgcgtaaaccgcgaagaaaaagtaaaagggaggaaaagggtccggtgtggcgacgatggagaggggcggcggcggcggagacgagatgatgatgacctcgggcgcgacgggccggatcgtgccggtgttccgctccgtgctgtcgcggcgcgctctgctccgcgtcgccgtggcgctgcactcgctcttcctctggctgctgctcctcgcccgcggcctccgccggcaccgggcggggaccggcgccgacgcgtcggcgtcggaggcgggggctggggccgggacctggagcgcgcggcggtggcggctgcggctgcaggccgcggaggaggaggacgtgcgccgccgcagggcgctcgcggaggaggtgcccatggaggaggaccggggcactaggtgggccaccttcctcgtcaccggggccaggaggaacgcgcttttctgccgcctctgggcgccggccgtcgacgagatgaggggcattttggtcatcatacatggcttgaatgagcacagtggaaggtacgtgcactttgctgagcagctgacagcatgtggtttcggagtatacgcaatggattggatagggcatggtggaagcgatggcctgcacggctatgtgccttcactagattacgtcatcgaagacatcgaagtgcttgttgacagaattctgatggagaatccaggggtcccttgtttcctcctcggccactccaccggtggggctgtcgtcctgaagagaaatggtgcaaaaacgttagcgaagtagcctggtcgttgaaacctgaaaaatggcatctctgtaccctcacatcagggagaaactggaaggcatcgttctgacatcgcccgcgctgcgtgtgaagcctgcgcatcctattgttggggctgtggcgccgatcttctctctggtggcgcccaggttccagttcaagggcgccaacaagaggggcatcccggtgtcccgcgaccccgcggcgctgctggccaagtactcggacccgctggtgtacacggggccgatcagggtgcggacggggcacgagatcctgcgcatctcctcccacctgctgcaccgcctggagaaggtcaccgtcccgttcctggtgctgcacggcaccgccgaccgggtcacggacccgctggcgtcgcgcgagctctacggcgcggcggcgtccgcgcacaaggacctgcgcctgtacgacgggttcctgcacgacctgctcttcgagcccgagcgcgacgaggtcggcgccgagatcgtcgcctggatggacgggatgctccggctccggcggcaggctggatgaagggatggccgtgctgcttctctccttctaggtggtgttcctctccaaagtataataatagatttgtgtgccaagataagatggatgcatttgtgctgtggaactacgttacgtatctatttatatttataacagcggggtaaaagggtcgttttgttttggtgtaaacgaaccaaaacatatggatcaaaatcagacgtaaaaatcagaaacattattacatagagtataaaaataaa

SEQ ID NO: 33429 - DNA, 1398 bp, Zea Mays
atggccgttttgggtaaaagccactctgagcccggaccgagggagggcgtccacacacaccatgcccccgcctccgtgactgtcgcgctccctgcccctacgcaggtccgtgaccgtcgcgctcccacccccaatgcgcacgctacccccacccacctcccattccgctgccaggatcatgcagctctgcgccgccacgcccgagcgtactggggcgctggcgccgccgcgttcccgcagacgcccgagcggagcccgaggttcacgggcgacgcccgactggggcactgcgttcatgatgtcgccgagcgctacggctgcgccgaggacgccggagaggtggcccgcgctgcccgcactctggagtacgcgcctgcgccgaggcgagagcaggcgaggtggggcggcgaatctgaggcagaagcgcctgcgctttatgaatccggagccgaatcgctccgtccagcttgcctcctcaccgttgcttttgcgctctgcttttcacttgccttgcgtggatctgctcaacgcacgaaccaccgcctcgccgagaaggagatcgtcatcgtcctctcctctgcctccgcggtccccgtcgagagcagtgttgctgtcttcgactagcacaaggaagcaatgttgaggcggctaagcgatgctacaatggaacaatccaataacagtgattcgtctattgacgagaggtccatccagcctcgaaagaatatgaaccccctacctcaataaaggcaaagaccacaactccaaaaatcacattttcactgtcctaaatggactgatggcagcattcctttggatgtactttctgataaactcacaaaaataagcaagatcgctgctagcaagaccaagatttacatggtgcttcagcttgtcaatgggggcgaactgttcgacgggattgctatgactgaaactgaaacagaaaacatacaagatgcaaatatggaggaacaacaatcttccttggtggatggtcttaaaactcccactactgtggctgatcaagaatccacagccgtggagtgcttgtccaatcatgagtatcactcgcagactcttggatatgtaattggtggcactaacatgagaagcgacaccaaccatctcacagaagggatcaatatcttaattgtcacactggacaggcttttggaccatctgcaaaataccggtagtttcaaatacaaagagctaaagagtaccaaaaaggtcatgcccgacgacaagctcgctgagttcgcgctcctcgaccccaagccaccaagaggtgagcagagtgtgaaaatcactaggatctatgatgagaagtttgctgatttgggatggggaagaggcgaaaatgagattgaggatgtgtttatcattgttttgtag

SEQ ID NO: 33430 - DNA, 1727 bp, Zea Mays
atggccgttttgggtaaaagccactctgagcccggaccgagggagggcgtccacacacaccatgcccccgcctccgtgactgtcgcgctccctgcccctacgcaggtccgtgaccgtcgcgctcccacccccaatgcgcacgctacccccacccacctcccattccgctgccaggatcatgcagctctgcgccgccacgcccgagcgtactggggcgctggcgccgccgcgttcccgcagacgcccgagcggagcccgaggttcacgggcgacgcccgactggggcactgcgttcatgatgtcgccgagcgctacggctgcgccgaggacgccggagaggtggcccgcgctgcccgcactctggagtacgcgcctgcgccgaggcgagagcaggcgaggtggggcggcgaatctgaggcagaagcgcctgcgctttatgaatccggagccgaatcgctccgtccagcttgcctcctcaccgttgcttttgcgctctgcttttcacttgccttgcgtggatctgctcaacgcacgaaccaccgcctcgccgagaaggagatcgtcatcgtcctctcctctgcctccgcggtccccgtcgagagcagtgttgctgtcttcgactagcacaaggaagcaatgttgaggcggctaagcgatgctacaatggaacaatccaataacagtgattcgtctattgacgagaggtccatccagcctcgaaagaatatgaaccccctacctcaataaaggcaaagaccacaactccaaaaatcacattttcactgtcctaaatggactgatggcagcattcctttggatgtactttctgataaactcacaaaaataagcaaggaagcttttgaacgaagagatttcatagcaactgttgtagctagcgccctgcaagaggcgttgatctctgtatctgtgatcaggaacatatataaattgatgttgcgattactaatccgatattaacaagattttttctaaaggcatcacaaacttgctatgttttgttctgaatgagtgaatatcatgtgcagctttaaagttaccatctatcttcatctcattttctttccaattataggtctgggatgcaactattgcagatccaaaattgcattatccttttgagctcaacctgtcatctatgatatgtattgtaactgatcatgtttttactacttcatgattcagatcgctgctagcaagaccaagatttacatggtgcttcagcttgtcaatgggggcgaactgttcgacgggattaaaacatacaagatgcaaatatggaggaacaacaatcttccttggtggatggtcttaaaactcccactactgtggctgatcaagaatccacagccgtggagtgcttgtccaatcatgagtatcactcgcagactcttggatatgtaattggtggcactaacatgagaagcgacaccaaccatctcacagaagggatcaatatcttaattgtcacactggacaggcttttggaccatctgcaaaataccggtagtttcaaatacaaagagctaaagagtaccaaaaaggtcatgcccgacgacaagctcgctgagttcgcgctcctcgaccccaagccaccaagaggtgagcagagtgtgaaaatcactaggatctatgatgagaagtttgctgatttgggatggggaagaggcgaaaatgagattgaggatgtgtttatcattgttttgtag

SEQ ID NO: 33431 - DNA, 3178 bp, Zea Mays
cgagtcccaagcgggtatccgcgccccctctccctgacgccgcgatggccgcgcccctctccctccccgcggcgtgatgcccgcagcccccctcccctggtgccctcgcccccgcgccccctctccgtgacgctgcgatggccgcgccccctctccctcccccggcgtgaagcccgcagccccctcccccggtgccatggtgccctcgcctctgcccccgagattgtcgccgagcgcccacccctcattcccgtaccctcgcccaagatcgcggatctacgcccgatgtgggcgtggggctgcgtccgagatcgtgaagccccatcgtgccctcgctcgagatctccccctcgccggtcctgctcgcgaagccctgccgtgatagtcgcgcccacttcacccgtcgtgacagccgcctccacgtccacacccatggggagcggatgcgggccacagatctccttccaaactgccaaactcggaggcgacagcccgacaagggccgaccttccatggtaggcgggccccttccatggtaggcgagatctgcggccatggtcaaagggccgttggggctggatttcgcagtcgcaacactgaactactgggtgcacaagggcattgccttcatctgcgagattaggaatcggatcctgtttaatatataagctactggccaatgattatggatcttgctggtagaacgatatgatccgcgcgtctgtattccgtaaagttcttacgatgatttttattttgtgtatctgatgccacattatgggtaaatccggagatctattttgtaaaaagtagtaatatggtctggtgctgctgggtaaatctggagatctattttgtaaaaagtagtaatctgaacacctttttggactgtcttataagtggcttctatatttcactgcacatttcaactaatggaaccagggaaacagataaaggtcatgaaaggattctagaaacgatcaacacagttggacatgatggtaataacattgacactgctgatttttgtttatgttacttgaaagtttaaagatctcctgtgtcatataatttatgctatagacatgaattattggctgccttttccccctgcccctgccttttcaaatcctttttgttgagccacttccctagcttgacaatctattgttacctccggcaaaaggtgagttcttggctgccttttccccccgcccctgccttttcaacctatgttcttttcatgggtagcttgattcagtcggtgaattgagcttccggcttcgacaggagactcagagcacactcacggctgctttgttgtttaatcacaccgctaatcgtgttatgaagagaacacatggaaagcataccaactcaattcttgagacttctattgtaaatgcttctttttgaagatctcagctatttacgtggcaacaaactcactagacatataacccaggactagggaacatgagtaaacttagctacttgtagctggatgactagatgggcaattagcaggagcagaaggatcccacatcgctaatcatcaattgctgatgctagaggctaagctatttttgggtgctttttcctcctatgatcggcatagagacatgcagatggatattgataatatgtcttatgaggcccagaacatctgcaatttagtttttgataagtcctccaagatttgaatattgtagggaaactacaacagatttgtgccatgttttactctgattttggagttttctgcttaactgaggcgaagcgcaaccaccaggttggctgttttagatctgtctcctagactgccctttgctcaagggaaatccctccttttcatttaacgcaaaagaaacttattctatttatttgtatctacgaaatctggcgtcaaatgttcagttgaactcagatgtgtgagactcaactgaagatcccaaatcatcacattatttccccgtcgaaatcatttgtgtttcttagagagaaaaaatgttttatgcttctgtctcctagactgacctttgctcaagggcaatccctccttttcatttaacgcaaaagaaatttattctgttgaacagtattttcatctttatacttatttggtactgcaacagcaatgagaggagcaatatccttgacaccttaattttgtattgccttacaaaggattttttagctgtcgcttgccaagtataggtcgtattgtgggtagtcacaccaaaactaaaactaatggcaattggtttgcaataggcagtgctctttctgttagctctggatgtcagggcaatgaacaaacacgttgagtatgatagtgatgctaaaattactgcaatgggttgaagccctaccatgtggcaaccattgatccatgcccaaaatgtgcctgccactggtgttcctgtcccaacactcgatcaacatgcaagtaaaaaatgaagcatagagccaaacgatgcgagagaagtatggtctacacatgagccagttcacataaacccttcagacccaagcaggtaccagcagaatggcacgccagctaaagaaaggagtcaatgcactgtaatgcgaagaattcttcatgacatcctatgagataatggttttcttgaatgggctagctcaagttgtgcggtttggtgtcatggtgttgttcaaacttcgcagtggtgtgtgaaatagaagaatcccaattcccaagcatattatttgtcacgcttggtacaggggaaatacgacagcatcatcgtggaggtgaagagctactacatgtcgatgagcaggtacagggatgataaaaaaagaaaggtatatcttcacgtcgatgagcgggtacagggatgacaaaaaaagaaagggtgagattatgaaggtttatgccaatgatcaaataaaaacatgtgttgagtttccagagtgttttgtataggattgctggtcaaacatgagctgttagtgagagaagaattgtgccctcttccctctggttctccctgattctcacaggaagactcatgtggtcggaagagggctgatgagcacgatcaccatggatgtggacaccacggcaagggtggacgagttcttggttaccacctttgtaggcccattggtggaggaagacttgacgagaggaccaatgaatactctcttttaa

SEQ ID NO: 33432 - DNA, 2825 bp, Zea Mays
cgagtcccaagcgggtatccgcgccccctctccctgacgccgcgatggccgcgcccctctccctccccgcggcgtgatgcccgcagcccccctcccctggtgccctcgcccccgcgccccctctccgtgacgctgcgatggccgcgccccctctccctcccccggcgtgaagcccgcagccccctcccccggtgccatggtgccctcgcctctgcccccgagattgtcgccgagcgcccacccctcattcccgtaccctcgcccaagatcgcggatctacgcccgatgtgggcgtggggctgcgtccgagatcgtgaagccccatcgtgccctcgctcgagatctccccctcgccggtcctgctcgcgaagccctgccgtgatagtcgcgcccacttcacccgtcgtgacagccgcctccacgtccacacccatggggagcggatgcgggccacagatctccttccaaactgccaaactcggaggcgacagcccgacaagggccgaccttccatggtaggcgggccccttccatggtaggcgagatctgcggccatggtaggcagcccccttccatatttgactgacatggcacgcactgcagccccttccccgcccccattccaaaatcagccctcaaccacgcatgcacccacatcaatggattgttattgtctgcattagcagcgctattgttctggttggctggaacatggggaggtgtgcagaggtggtggtggtgagttcgttgttcatttttctgtaggtcaaagggccgttggggctggatttcgcagtcgcaacactgaactactgggtgcacaagggcattgccttcatctgcgagattaggaatcggatcctgtttaatatataagctactggccaatgattatggatcttgctggtagaacgatatgatccgcgcgtctgtattccgtaaagttcttacgatgatttttattttgtgtatctgatgccacattatgggtaaatccggagatctattttgtaaaaagtagtaatatggtctggtgctgctgggtaaatctggagatctattttgtaaaaagtagtaatctgaacacctttttggactgtcttataagtggcttctatatttcactgcacatttcaactaatggaaccagggaaacagataaaggtcatgaaaggattctagaaacgatcaacacagttggacatgatggtaataacattgacactgctgatttttgtttatgttacttgaaagtttaaagatctcctgtgtcatataatttatgctatagacatgaattattggctgccttttccccctgcccctgccttttcaaatcctttttgttgagccacttccctagcttgacaatctattgttacctccggcaaaaggtgagttcttggctgccttttccccccgcccctgccttttcaacctatgttcttttcatgggtagcttgattcagtcggtgaattgagcttccggcttcgacaggagactcagagcacactcacggctgctttgttgtttaatcacaccgctaatcgtgttatgaagagaacacatggaaagcataccaactcaattcttgagacttctattgtaaatgcttctttttgaagatctcagctatttacgtggcaacaaactcactagacatataacccaggactagggaacatgagtaaacttagctacttgtagctggatgactagatgggcaattagcaggagcagaaggatcccacatcgctaatcatcaattgctgatgctagaggctaagctatttttgggtgctttttcctcctatgatcggcatagagacatgcagatggatattgataatatgtcttatgaggcccagaacatctgcaatttagtttttgataagtcctccaagatttggcagtgctctttctgttagctctggatgtcagggcaatgaacaaacacgttgagtatgatagtgatgctaaaattactgcaatgggttgaagccctaccatgtggcaaccattgatccatgcccaaaatgtgcctgccactggtgttcctgtcccaacactcgatcaacatgcaagtaaaaaatgaagcatagagccaaacgatgcgagagaagtatggtctacacatgagccagttcacataaacccttcagacccaagcaggtaccagcagaatggcacgccagctaaagaaaggagtcaatgcactgtaatgcgaagaattcttcatgacatcctatgagataatggttttcttgaatgggctagctcaagttgtgcggtttggtgtcatggtgttgttcaaacttcgcagtggtgtgtgaaatagaagaatcccaattcccaagcatattatttgtcacgcttgtttgccggcaggtacaggggaaatacgacagcatcatcgtggaggtgaagagctactacatgtcgatgagcaggtacagggatgataaaaaaagaaaggtatatcttcacgtcgatgagcgggtacagggatgacaaaaaaagaaagggtgagattatgaaggtttatgccaatgatcaaataaaaacatgtgttgagtttccagagtgttttgtataggattgctggtcaaacatgagctgttagtgagagaagaattgtgccctcttccctctggttctccctgattctcacaggaagactcatgtggtcggaagagggctgatgagcacgatcaccatggatgtggacaccacggcaagggtggacgagttcttggttaccacctttgtaggcccattggtggaggaagacttgacgagaggaccaatgaatactctcttttaa

SEQ ID NO: 33433 - DNA, 2632 bp, Zea Mays
cacggttctgccgtcgcgctccctccgcgctccctcccgagtcccaagcgggtcaaagggccgttggggctggatttcgcagtcgcaacactgaactactgggtgcacaagggcattgccttcatctgcgagattaggaatcggatcctgtttaatatataagctactggccaatgattatggatcttgctggtagaacgatatgatccgcgcgtctgtattccgtaaagttcttacgatgatttttattttgtgtatctgatgccacattatgggtaaatccggagatctattttgtaaaaagtagtaatatggtctggtgctgctgggtaaatctggagatctattttgtaaaaagtagtaatctgaacacctttttggactgtcttataagtggcttctatatttcactgcacatttcaactaatggaaccagggaaacagataaaggtcatgaaaggattctagaaacgatcaacacagttggacatgatggtaataacattgacactgctgatttttgtttatgttacttgaaagtttaaagatctcctgtgtcatataatttatgctatagacatgaattattggctgccttttccccctgcccctgccttttcaaatcctttttgttgagccacttccctagcttgacaatctattgttacctccggcaaaaggtgagttcttggctgccttttccccccgcccctgccttttcaacctatgttcttttcatgggtagcttgattcagtcggtgaattgagcttccggcttcgacaggagactcagagcacactcacggctgctttgttgtttaatcacaccgctaatcgtgttatgaagagaacacatggaaagcataccaactcaattcttgagacttctattgtaaatgcttctttttgaagatctcagtcagctatttacgtggcaacaaactcactagacatataacccaggactagggaacatgagtaaacttagctacttgtagctggatgactagatgggcaattagcaggagcagaaggatcccacatcgctaatcatcaattgctgatgctagaggctaagctatttttgggtgctttttcctcctatgatcggcatagagacatgcagatggatattgataatatgtcttatgaggcccagaacatctgcaatttagtttttgataagtcctccaagatttgtattctagaatttgctaccctacaactcatatgattatttgactatgcacatgtctccaagaatattgtagggaaactacaacagatttgtgccatgttttactctgattttggagttttctgcttaactgaggcgaagcgcaaccaccaggttggctgttttagatctgtctcctagactgccctttgctcaagggaaatccctccttttcatttaacgcaaaagaaacttattctatttatttgtatctacgaaatctggcgtcaaatgttcagttgaactcagatgtgtgagactcaactgaagatcccaaatcatcacattatttccccgtcgaaatcatttgtgtttcttagagagaaaaaatgttttatgcttctgtctcctagactgacctttgctcaagggcaatccctccttttcatttaacgcaaaagaaatttattctgttgaacagtattttcatctttatacttatttggtactgcaacagcaatgagaggagcaatatccttgacaccttaattttgtattgccttacaaaggattttttagctgtcgcttgccaagtataggtcgtattgtgggtagtcacaccaaaactaaaactaatggcaattggtttgcaataggcagtgctctttctgttagctctggatgtcagggcaatgaacaaacacgttgagtatgatagtgatgctaaaattactgcaatgggttgaagccctaccatgtggcaaccattgatccatgcccaaaatgtgcctgccactggtgttcctgtcccaacactcgatcaacatgcaagtaaaaaatgaagcatagagccaaacgatgcgagagaagtatggtctacacatgagccagttcacataaacccttcagacccaagcagctcaagttgtgcggtttggtgtcatggtgttgttcaaacttcgcagtggtgtgtgaaatagaagaatcccaattcccaagcatattatttgtcacgcttggtacaggggaaatacgacagcatcatcgtggaggtgaagagctactacatgtcgatgagcaggtacagggatgataaaaaaagaaaggtatatcttcacgtcgatgagcgggtacagggatgacaaaaaaagaaagggtgagattatgaaggtttatgccaatgatcaaataaaaacatgtgttgagtttccagagtgttttgtataggattgctggtcaaacatgagctgttagtgagagaagaattgtgccctcttccctctggttctccctgattctcacaggaagactcatgtggtcggaagagggctgatgagcacgatcaccatggatgtggacaccacggcaagggtggacgagttcttggttaccacctttgtaggcccattggtggaggaagacttgacgagaggaccaatgaatactctcttttaa

SEQ ID NO: 33434 - DNA, 2043 bp, Zea Mays
cgagtcccaagcgggtatccgcgccccctctccctgacgccgcgatggccgcgcccctctccctccccgcggcgtgatgcccgcagcccccctcccctggtgccctcgcccccgcgccccctctccgtgacgctgcgatggccgcgccccctctccctcccccggcgtgaagcccgcagccccctcccccggtgccatggtgccctcgcctctgcccccgagattgtcgccgagcgcccacccctcattcccgtaccctcgcccaagatcgcggatctacgcccgatgtgggcgtggggctgcgtccgagatcgtgaagccccatcgtgccctcgctcgagatctccccctcgccggtcctgctcgcgaagccctgccgtgatagtcgcgcccacttcacccgtcgtgacagccgcctccacgtccacacccatggggagcggatgcgggccacagatctccttccaaactgccaaactcggaggcgacagcccgacaagggccgaccttccatggtaggcgggccccttccatggtaggcgagatctgcggccatggtcaaagggccgttggggctggatttcgcagtcgcaacactgaactactgggtgcacaagggcattgccttcatctgcgagattaggaatcggatcctgtttaatatataagctactggccaatgattatggatcttgctggtagaacgatatgatccgcgcgtctgtattccgtaaagttcttacgatgatttttattttgtgtatctgatgccacattatgggtaaatccggagatctattttgtaaaaagtagtaatatggtctggtgctgctgggtaaatctggagatctattttgtaaaaagtagtaatctgaacacctttttggactgtcttataagtggcttctatatttcactgcacatttcaactaatggaaccagggaaacagataaaggtcatgaaaggattctagaaacgatcaacacagttggacatgatggtaataacattgacactgctgatttttgtttatgttacttgaaagtttaaagatctcctgtgtcatataatttatgctatagacatgaattattggctgccttttccccctgcccctgccttttcaaatcctttttgttgagccacttccctagcttgacaatctattgttacctccggcaaaaggtgagttcttggctgccttttccccccgcccctgccttttcaacctatgttcttttcatgggtagcttgattcagtcggtgaattgagcttccggcttcgacaggagactcagagcacactcacggctgctttgttgtttaatcacaccgctaatcgtgttatgaagagaacacatggaaagcataccaactcaattcttgagacttctattgtaaatgcttctttttgaagatctcaggtgagctgtgtacatgtaatttgtttttgtttttaagtgttttcaatcttaagcgaagtacttatcaatttgttattatcttgtttaatcacaccgccaatcgtgttctgaagggaactagaccatcagagcatccactgtatttggacttgttcacatttaacttccgtctgctagatttttggtataacatgtgttctctgcaacaattactttatacctacgtaccataacatgagatcgaaaagatttattttcacaactatatagatttgtaaagagtttcatgagaaaggtggttacctttctgcccagctcctcttagtggcctcctttccatttcccacatctttgcactgctgctgctgactgaatttcatccacgtataattcactgtttcactacttcctcactatgattcacctgctggtgctgctgcaatctacattcagtggacacaaaccagacaattcacctggacacaaaactacagcaacaacaacagtgaaccattcatttcaatttagacaaagcagcaacagttttagtcgatcattctaactcaaaccaagcagcagcagcagcagtgtcgaccattcttacaaattcagagcaag

SEQ ID NO: 33435 - DNA, 2568 bp, Zea Mays
ttcaatcgtgtttcggtcactacttgctatggattcttgggaagccctgtacctgactactggatccactaccaagctcttcaagttccaggatccattcctctttgtcgggcaagagctcttggcctctgtggattatcagcctgattcacaactctctgcaagaattcgagcgcagatgggccaagaaagcgcggctgacgcgattcctggtttgatggtttctgttggtgtttcgggctaacagactctcttttttttgtttacttcctcaaagttccacttcaacatatggatccgggcttcccgagttggaatctgatcactcgcgtcagtgcttcttagcttccttcatttgccgtcatggaggagcagaactcatggcttattaggaccaagttctcccatactgtctacactagagtggatccacgaagagtagcagctgttgctccggtgggcaaagatgtggtgctgccttttgctccgcttagtaaggatgttgagcggaagctgcagaaaattttcagtatgaagaagtctgcatcgatgcctgttgatcgggatgatgaagacacagggactgcattcaagcactgcgctagcttgccgctagtccggtcctcgcctcagcttgatagggacaaggtcaacaagcccaggagggcgggcctggaggttcctgcaagccccccgatgaactcagagagttgcaagacaccaaaggcaaggagcctggtcaagagcccaagttcgatgatgctcctgagctacttgaacaaggcaccatcaaaccaaggctacagtccgcaaaaggcttatggatctcggcccagaccgagatcaaagtccccccttcccagtatcgcgccttcggaagtgttcagggaagcgaagtctaccagcaagaggtttgcaagccctcctccacagcgaagaggatctgaaaagagtatctatggcaaatcgtttgctagacaggtgtcggatattggtcagagtcctgattggtgttcaactccagtggtatctggtaagcacaagtctcaaaagaatagtgcttggtcaaggaaatccagcggtggaaggaggattagcgcagtaaaccctgcggatgatcgtagggcgcagatggttagaatgaatcaggcggtgcagacgacgttcgattggacgctcgatccatccaagctgcttgttgggcacaggtttgctagtggagcgtgtagccggctgtacaaggggttctatgatgagaagccagttgcaattaaatttatccgccaacctgatgatgacgacaatgggaagacggctgcaaagcttgagaagcagtataacagtgagatcaattcgttgtctcacctgtaccataggaacgtgatcaagcttgtagcagcctacaaatgcccaccggttttttacatcatcaccgagttccttcccggaggctcgttaaggtcatacctaaacaacacggagaaccacccaatccctctggagaagaccatatccatcgctctcgacatcgctcgaggtctggagtacgtacactctcaagggatcgttcaccgcgacatcaagcccgagaacatcctcttcgacgaggactcgtgcgtgaaggtcgctgatttcggtatcgcctgcgaggagaccttgtgtgacgtgcttgtggaggatgaaggcacctacaggtggatggcgcctgagatgatcaagcagaaggcgtacaaccggaaggtggacgtctacagcttcgggctggtcatgtgggagatggtgtccggtagagttccttacgagaacctgacccctttccaggtggcttacgcagtggccaacaggaacttgaggccaacgatttctccagaatgcccatcggccctcgggcccctgatcgagcagtgctgcgccttgcagcctgacaagaggcccgacttctggcagatcgtcaaagtcctggagcagtcccactccatcctctcgcagggtggctgcctcgacgcgcagaagagcggcacctgccaggaccccaagaagcggctcatgcagtggatccagaagctgaaaccaacgcatggcgcctgagtaaccgagttcttacaggctatagcatcgtttcagccgcagttttttttttcttttctgtctagttgggtatgctctcagtagtttagacctgttaaggaggatccttggtttaaggaaccagcgttctaaggcggatgctcgtagctgtgtgaccaaccactggtctgcgagcatagatcttgcagtagctgtacatggttatgcttttgcatctcgtctccccatcatgttaaaacttccctgcaggttgttctcatggatggtaccatagtgtgtgcggtgtgcggtgtgccccctcactcgttgagctgaaagcgagaggaaaatcatacgacgcagagttgactcctgaggccgtctttcgggaaagggtcgtatgctaacacaattattgcgcctttcccttctattgttagcagctgccctgccgtgcttattgtcatcatgatgctgatatctgagacagcaacatctgat

SEQ ID NO: 33436 - DNA, 2563 bp, Zea Mays
caaaggccctcaattttgaattgctggattcttgggaagccctgtacctgactactggatccactaccaagctcttcaagttccaggatccattcctctttgtcgggcaagagctcttggcctctgtggattatcagcctgattcacaactctctgcaagaattcgagcgcagatgggccaagaaagcgcggctgacgcgattcctggtttgatggtttctgttggtgtttcgggctaacagactctcttttttttgtttacttcctcaaagttccacttcaacatatggatccgggcttcccgagttggaatctgatcactcgcgtcagtgcttcttagcttccttcatttgccgtcatggaggagcagaactcatggcttattaggaccaagttctcccatactgtctacactagagtggatccacgaagagtagcagctgttgctccggtgggcaaagatgtggtgctgccttttgctccgcttagtaaggatgttgagcggaagctgcagaaaattttcagtatgaagaagtctgcatcgatgcctgttgatcgggatgatgaagacacagggactgcattcaagcactgcgctagcttgccgctagtccggtcctcgcctcagcttgatagggacaaggtcaacaagcccaggagggcgggcctggaggttcctgcaagccccccgatgaactcagagagttgcaagacaccaaaggcaaggagcctggtcaagagcccaagttcgatgatgctcctgagctacttgaacaaggcaccatcaaaccaaggctacagtccgcaaaaggcttatggatctcggcccagaccgagatcaaagtccccccttcccagtatcgcgccttcggaagtgttcagggaagcgaagtctaccagcaagaggtttgcaagccctcctccacagcgaagaggatctgaaaagagtatctatggcaaatcgtttgctagacaggtgtcggatattggtcagagtcctgattggtgttcaactccagtggtatctggtaagcacaagtctcaaaagaatagtgcttggtcaaggaaatccagcggtggaaggaggattagcgcagtaaaccctgcggatgatcgtagggcgcagatggttagaatgaatcaggcggtgcagacgacgttcgattggacgctcgatccatccaagctgcttgttgggcacaggtttgctagtggagcgtgtagccggctgtacaaggggttctatgatgagaagccagttgcaattaaatttatccgccaacctgatgatgacgacaatgggaagacggctgcaaagcttgagaagcagtataacagtgagatcaattcgttgtctcacctgtaccataggaacgtgatcaagcttgtagcagcctacaaatgcccaccggttttttacatcatcaccgagttccttcccggaggctcgttaaggtcatacctaaacaacacggagaaccacccaatccctctggagaagaccatatccatcgctctcgacatcgctcgaggtctggagtacgtacactctcaagggatcgttcaccgcgacatcaagcccgagaacatcctcttcgacgaggactcgtgcgtgaaggtcgctgatttcggtatcgcctgcgaggagaccttgtgtgacgtgcttgtggaggatgaaggcacctacaggtggatggcgcctgagatgatcaagcagaaggcgtacaaccggaaggtggacgtctacagcttcgggctggtcatgtgggagatggtgtccggtagagttccttacgagaacctgacccctttccaggtggcttacgcagtggccaacaggaacttgaggccaacgatttctccagaatgcccatcggccctcgggcccctgatcgagcagtgctgcgccttgcagcctgacaagaggcccgacttctggcagatcgtcaaagtcctggagcagtcccactccatcctctcgcagggtggctgcctcgacgcgcagaagagcggcacctgccaggaccccaagaagcggctcatgcagtggatccagaagctgaaaccaacgcatggcgcctgagtaaccgagttcttacaggctatagcatcgtttcagccgcagttttttttttcttttctgtctagttgggtatgctctcagtagtttagacctgttaaggaggatccttggtttaaggaaccagcgttctaaggcggatgctcgtagctgtgtgaccaaccactggtctgcgagcatagatcttgcagtagctgtacatggttatgcttttgcatctcgtctccccatcatgttaaaacttccctgcaggttgttctcatggatggtaccatagtgtgtgcggtgtgcggtgtgccccctcactcgttgagctgaaagcgagaggaaaatcatacgacgcagagttgactcctgaggccgtctttcgggaaagggtcgtatgctaacacaattattgcgcctttcccttctattgttagcagctgccctgccgtgcttattgtcatcatgatgctgatatctgagacagcaacatctgat

SEQ ID NO: 33437 - DNA, 2608 bp, Zea Mays
ctttcatcttcgtacgcagtggggggcgattggtcaaatcgcagacagtgtctcggacgtcgccgtgcttggattcttgggaagccctgtacctgactactggatccactaccaagctcttcaagttccaggatccattcctctttgtcgggcaagagctcttggcctctgtggattatcagcctgattcacaactctctgcaagaattcgagcgcagatgggccaagaaagcgcggctgacgcgattcctggtttgatggtttctgttggtgtttcgggctaacagactctcttttttttgtttacttcctcaaagttccacttcaacatatggatccgggcttcccgagttggaatctgatcactcgcgtcagtgcttcttagcttccttcatttgccgtcatggaggagcagaactcatggcttattaggaccaagttctcccatactgtctacactagagtggatccacgaagagtagcagctgttgctccggtgggcaaagatgtggtgctgccttttgctccgcttagtaaggatgttgagcggaagctgcagaaaattttcagtatgaagaagtctgcatcgatgcctgttgatcgggatgatgaagacacagggactgcattcaagcactgcgctagcttgccgctagtccggtcctcgcctcagcttgatagggacaaggtcaacaagcccaggagggcgggcctggaggttcctgcaagccccccgatgaactcagagagttgcaagacaccaaaggcaaggagcctggtcaagagcccaagttcgatgatgctcctgagctacttgaacaaggcaccatcaaaccaaggctacagtccgcaaaaggcttatggatctcggcccagaccgagatcaaagtccccccttcccagtatcgcgccttcggaagtgttcagggaagcgaagtctaccagcaagaggtttgcaagccctcctccacagcgaagaggatctgaaaagagtatctatggcaaatcgtttgctagacaggtgtcggatattggtcagagtcctgattggtgttcaactccagtggtatctggtaagcacaagtctcaaaagaatagtgcttggtcaaggaaatccagcggtggaaggaggattagcgcagtaaaccctgcggatgatcgtagggcgcagatggttagaatgaatcaggcggtgcagacgacgttcgattggacgctcgatccatccaagctgcttgttgggcacaggtttgctagtggagcgtgtagccggctgtacaaggggttctatgatgagaagccagttgcaattaaatttatccgccaacctgatgatgacgacaatgggaagacggctgcaaagcttgagaagcagtataacagtgagatcaattcgttgtctcacctgtaccataggaacgtgatcaagcttgtagcagcctacaaatgcccaccggttttttacatcatcaccgagttccttcccggaggctcgttaaggtcatacctaaacaacacggagaaccacccaatccctctggagaagaccatatccatcgctctcgacatcgctcgaggtctggagtacgtacactctcaagggatcgttcaccgcgacatcaagcccgagaacatcctcttcgacgaggactcgtgcgtgaaggtcgctgatttcggtatcgcctgcgaggagaccttgtgtgacgtgcttgtggaggatgaaggcacctacaggtggatggcgcctgagatgatcaagcagaaggcgtacaaccggaaggtggacgtctacagcttcgggctggtcatgtgggagatggtgtccggtagagttccttacgagaacctgacccctttccaggtggcttacgcagtggccaacaggaacttgaggccaacgatttctccagaatgcccatcggccctcgggcccctgatcgagcagtgctgcgccttgcagcctgacaagaggcccgacttctggcagatcgtcaaagtcctggagcagtcccactccatcctctcgcagggtggctgcctcgacgcgcagaagagcggcacctgccaggaccccaagaagcggctcatgcagtggatccagaagctgaaaccaacgcatggcgcctgagtaaccgagttcttacaggctatagcatcgtttcagccgcagttttttttttcttttctgtctagttgggtatgctctcagtagtttagacctgttaaggaggatccttggtttaaggaaccagcgttctaaggcggatgctcgtagctgtgtgaccaaccactggtctgcgagcatagatcttgcagtagctgtacatggttatgcttttgcatctcgtctccccatcatgttaaaacttccctgcaggttgttctcatggatggtaccatagtgtgtgcggtgtgcggtgtgccccctcactcgttgagctgaaagcgagaggaaaatcatacgacgcagagttgactcctgaggccgtctttcgggaaagggtcgtatgctaacacaattattgcgcctttcccttctattgttagcagctgccctgccgtgcttattgtcatcatgatgctgatatctgagacagcaacatctgat

SEQ ID NO: 33438 - DNA, 2638 bp, Zea Mays
ccgcctctgtgctccggatcggttttcctttgggcggcaatcgcgttcgcactcctcctcgcttttccccatgccatttgtgcgcagctccgttcgaggttgattcttgggaagccctgtacctgactactggatccactaccaagctcttcaagttccaggatccattcctctttgtcgggcaagagctcttggcctctgtggattatcagcctgattcacaactctctgcaagaattcgagcgcagatgggccaagaaagcgcggctgacgcgattcctggtttgatggtttctgttggtgtttcgggctaacagactctcttttttttgtttacttcctcaaagttccacttcaacatatggatccgggcttcccgagttggaatctgatcactcgcgtcagtgcttcttagcttccttcatttgccgtcatggaggagcagaactcatggcttattaggaccaagttctcccatactgtctacactagagtggatccacgaagagtagcagctgttgctccggtgggcaaagatgtggtgctgccttttgctccgcttagtaaggatgttgagcggaagctgcagaaaattttcagtatgaagaagtctgcatcgatgcctgttgatcgggatgatgaagacacagggactgcattcaagcactgcgctagcttgccgctagtccggtcctcgcctcagcttgatagggacaaggtcaacaagcccaggagggcgggcctggaggttcctgcaagccccccgatgaactcagagagttgcaagacaccaaaggcaaggagcctggtcaagagcccaagttcgatgatgctcctgagctacttgaacaaggcaccatcaaaccaaggctacagtccgcaaaaggcttatggatctcggcccagaccgagatcaaagtccccccttcccagtatcgcgccttcggaagtgttcagggaagcgaagtctaccagcaagaggtttgcaagccctcctccacagcgaagaggatctgaaaagagtatctatggcaaatcgtttgctagacaggtgtcggatattggtcagagtcctgattggtgttcaactccagtggtatctggtaagcacaagtctcaaaagaatagtgcttggtcaaggaaatccagcggtggaaggaggattagcgcagtaaaccctgcggatgatcgtagggcgcagatggttagaatgaatcaggcggtgcagacgacgttcgattggacgctcgatccatccaagctgcttgttgggcacaggtttgctagtggagcgtgtagccggctgtacaaggggttctatgatgagaagccagttgcaattaaatttatccgccaacctgatgatgacgacaatgggaagacggctgcaaagcttgagaagcagtataacagtgagatcaattcgttgtctcacctgtaccataggaacgtgatcaagcttgtagcagcctacaaatgcccaccggttttttacatcatcaccgagttccttcccggaggctcgttaaggtcatacctaaacaacacggagaaccacccaatccctctggagaagaccatatccatcgctctcgacatcgctcgaggtctggagtacgtacactctcaagggatcgttcaccgcgacatcaagcccgagaacatcctcttcgacgaggactcgtgcgtgaaggtcgctgatttcggtatcgcctgcgaggagaccttgtgtgacgtgcttgtggaggatgaaggcacctacaggtggatggcgcctgagatgatcaagcagaaggcgtacaaccggaaggtggacgtctacagcttcgggctggtcatgtgggagatggtgtccggtagagttccttacgagaacctgacccctttccaggtggcttacgcagtggccaacaggaacttgaggccaacgatttctccagaatgcccatcggccctcgggcccctgatcgagcagtgctgcgccttgcagcctgacaagaggcccgacttctggcagatcgtcaaagtcctggagcagtcccactccatcctctcgcagggtggctgcctcgacgcgcagaagagcggcacctgccaggaccccaagaagcggctcatgcagtggatccagaagctgaaaccaacgcatggcgcctgagtaaccgagttcttacaggctatagcatcgtttcagccgcagttttttttttcttttctgtctagttgggtatgctctcagtagtttagacctgttaaggaggatccttggtttaaggaaccagcgttctaaggcggatgctcgtagctgtgtgaccaaccactggtctgcgagcatagatcttgcagtagctgtacatggttatgcttttgcatctcgtctccccatcatgttaaaacttccctgcaggttgttctcatggatggtaccatagtgtgtgcggtgtgcggtgtgccccctcactcgttgagctgaaagcgagaggaaaatcatacgacgcagagttgactcctgaggccgtctttcgggaaagggtcgtatgctaacacaattattgcgcctttcccttctattgttagcagctgccctgccgtgcttattgtcatcatgatgctgatatctgagacagcaacatctgat

SEQ ID NO: 33439 - DNA, 2712 bp, Zea Mays
ctctctctggcgccagcgcgcaggatttttcttcttcttcttcttcttttggcatgggggtgggggttcatcggtcttcccgaaccgctccaggtgtttcagtactctgcgacgtaccagcttagttcttcagggctggggttttggtcgatccgcttctctcctcaaaaggaaggattcttgggaagccctgtacctgactactggatccactaccaagctcttcaagttccaggatccattcctctttgtcgggcaagagctcttggcctctgtggattatcagcctgattcacaactctctgcaagaattcgagcgcagatgggccaagaaagcgcggctgacgcgattcctggtttgatggtttctgttggtgtttcgggctaacagactctcttttttttgtttacttcctcaaagttccacttcaacatatggatccgggcttcccgagttggaatctgatcactcgcgtcagtgcttcttagcttccttcatttgccgtcatggaggagcagaactcatggcttattaggaccaagttctcccatactgtctacactagagtggatccacgaagagtagcagctgttgctccggtgggcaaagatgtggtgctgccttttgctccgcttagtaaggatgttgagcggaagctgcagaaaattttcagtatgaagaagtctgcatcgatgcctgttgatcgggatgatgaagacacagggactgcattcaagcactgcgctagcttgccgctagtccggtcctcgcctcagcttgatagggacaaggtcaacaagcccaggagggcgggcctggaggttcctgcaagccccccgatgaactcagagagttgcaagacaccaaaggcaaggagcctggtcaagagcccaagttcgatgatgctcctgagctacttgaacaaggcaccatcaaaccaaggctacagtccgcaaaaggcttatggatctcggcccagaccgagatcaaagtccccccttcccagtatcgcgccttcggaagtgttcagggaagcgaagtctaccagcaagaggtttgcaagccctcctccacagcgaagaggatctgaaaagagtatctatggcaaatcgtttgctagacaggtgtcggatattggtcagagtcctgattggtgttcaactccagtggtatctggtaagcacaagtctcaaaagaatagtgcttggtcaaggaaatccagcggtggaaggaggattagcgcagtaaaccctgcggatgatcgtagggcgcagatggttagaatgaatcaggcggtgcagacgacgttcgattggacgctcgatccatccaagctgcttgttgggcacaggtttgctagtggagcgtgtagccggctgtacaaggggttctatgatgagaagccagttgcaattaaatttatccgccaacctgatgatgacgacaatgggaagacggctgcaaagcttgagaagcagtataacagtgagatcaattcgttgtctcacctgtaccataggaacgtgatcaagcttgtagcagcctacaaatgcccaccggttttttacatcatcaccgagttccttcccggaggctcgttaaggtcatacctaaacaacacggagaaccacccaatccctctggagaagaccatatccatcgctctcgacatcgctcgaggtctggagtacgtacactctcaagggatcgttcaccgcgacatcaagcccgagaacatcctcttcgacgaggactcgtgcgtgaaggtcgctgatttcggtatcgcctgcgaggagaccttgtgtgacgtgcttgtggaggatgaaggcacctacaggtggatggcgcctgagatgatcaagcagaaggcgtacaaccggaaggtggacgtctacagcttcgggctggtcatgtgggagatggtgtccggtagagttccttacgagaacctgacccctttccaggtggcttacgcagtggccaacaggaacttgaggccaacgatttctccagaatgcccatcggccctcgggcccctgatcgagcagtgctgcgccttgcagcctgacaagaggcccgacttctggcagatcgtcaaagtcctggagcagtcccactccatcctctcgcagggtggctgcctcgacgcgcagaagagcggcacctgccaggaccccaagaagcggctcatgcagtggatccagaagctgaaaccaacgcatggcgcctgagtaaccgagttcttacaggctatagcatcgtttcagccgcagttttttttttcttttctgtctagttgggtatgctctcagtagtttagacctgttaaggaggatccttggtttaaggaaccagcgttctaaggcggatgctcgtagctgtgtgaccaaccactggtctgcgagcatagatcttgcagtagctgtacatggttatgcttttgcatctcgtctccccatcatgttaaaacttccctgcaggttgttctcatggatggtaccatagtgtgtgcggtgtgcggtgtgccccctcactcgttgagctgaaagcgagaggaaaatcatacgacgcagagttgactcctgaggccgtctttcgggaaagggtcgtatgctaacacaattattgcgcctttcccttctattgttagcagctgccctgccgtgcttattgtcatcatgatgctgatatctgagacagcaacatctgat

SEQ ID NO: 33440 - DNA, 2871 bp, Zea Mays
atttacacaccaatgccctcgcctgcctgcgcttccgtatttgcgcaggcgggcccagcaagagaagaaaggaaacccgcggcgctctcgaattctgatttctgcagcctgcgccgccctttgctttgctgccatcggtggaagagatagagagagagagaacaaaggggagcggcaggcggcaggcagcccgtacggcggtgcggggggagcggcgtactaccgtatcccaccaccacccccaccggcacggggccgcgtttaccgggtgcgcggcactaccacgcacgggcccttttttctggtgcgcgccctcaatgcgctattgatacaccccctgggctctggctggctagctggctggccaggctcctcctcctcggcctcgatccgcttctcctcctctgcccgcctacctggagcggggagcgggaagagcggcggcgggagcccggcattctgatccgcttctccgcgcgcaacaccggcctgccgcaaatgattcttgggaagccctgtacctgactactggatccactaccaagctcttcaagttccaggatccattcctctttgtcggttccacttcaacatatggatccgggcttcccgagttggaatctgatcactcgcgtcagtgcttcttagcttccttcatttgccgtcatggaggagcagaactcatggcttattaggaccaagttctcccatactgtctacactagagtggatccacgaagagtagcagctgttgctccggtgggcaaagatgtggtgctgccttttgctccgcttagtaaggatgttgagcggaagctgcagaaaattttcagtatgaagaagtctgcatcgatgcctgttgatcgggatgatgaagacacagggactgcattcaagcactgcgctagcttgccgctagtccggtcctcgcctcagcttgatagggacaaggtcaacaagcccaggagggcgggcctggaggttcctgcaagccccccgatgaactcagagagttgcaagacaccaaaggcaaggagcctggtcaagagcccaagttcgatgatgctcctgagctacttgaacaaggcaccatcaaaccaaggctacagtccgcaaaaggcttatggatctcggcccagaccgagatcaaagtccccccttcccagtatcgcgccttcggaagtgttcagggaagcgaagtctaccagcaagaggtttgcaagccctcctccacagcgaagaggatctgaaaagagtatctatggcaaatcgtttgctagacaggtgtcggatattggtcagagtcctgattggtgttcaactccagtggtatctggtaagcacaagtctcaaaagaatagtgcttggtcaaggaaatccagcggtggaaggaggattagcgcagtaaaccctgcggatgatcgtagggcgcagatggttagaatgaatcaggcggtgcagacgacgttcgattggacgctcgatccatccaagctgcttgttgggcacaggtttgctagtggagcgtgtagccggctgtacaaggggttctatgatgagaagccagttgcaattaaatttatccgccaacctgatgatgacgacaatgggaagacggctgcaaagcttgagaagcagtataacagtgagatcaattcgttgtctcacctgtaccataggaacgtgatcaagcttgtagcagcctacaaatgcccaccggttttttacatcatcaccgagttccttcccggaggctcgttaaggtcatacctaaacaacacggagaaccacccaatccctctggagaagaccatatccatcgctctcgacatcgctcgaggtctggagtacgtacactctcaagggatcgttcaccgcgacatcaagcccgagaacatcctcttcgacgaggactcgtgcgtgaaggtcgctgatttcggtatcgcctgcgaggagaccttgtgtgacgtgcttgtggaggatgaaggcacctacaggtggatggcgcctgagatgatcaagcagaaggcgtacaaccggaaggtggacgtctacagcttcgggctggtcatgtgggagatggtgtccggtagagttccttacgagaacctgacccctttccaggtggcttacgcagtggccaacaggaacttgaggccaacgatttctccagaatgcccatcggccctcgggcccctgatcgagcagtgctgcgccttgcagcctgacaagaggcccgacttctggcagatcgtcaaagtcctggagcagtcccactccatcctctcgcagggtggctgcctcgacgcgcagaagagcggcacctgccaggaccccaagaagcggctcatgcagtggatccagaagctgaaaccaacgcatggcgcctgagtaaccgagttcttacaggctatagcatcgtttcagccgcagttttttttttcttttctgtctagttgggtatgctctcagtagtttagacctgttaaggaggatccttggtttaaggaaccagcgttctaaggcggatgctcgtagctgtgtgaccaaccactggtctgcgagcatagatcttgcagtagctgtacatggttatgcttttgcatctcgtctccccatcatgttaaaacttccctgcaggttgttctcatggatggtaccatagtgtgtgcggtgtgcggtgtgccccctcactcgttgagctgaaagcgagaggaaaatcatacgacgcagagttgactcctgaggccgtctttcgggaaagggtcgtatgctaacacaattattgcgcctttcccttctattgttagcagctgccctgccgtgcttattgtcatcatgatgctgatatctgagacagcaacatctgat

SEQ ID NO: 33441 - DNA, 1245 bp, Zea Mays
ccacagagagtcgtcctgcacacaccgtaccggcggccgcctcagatttggacgacgccggcagggttcgtcatcgatctctagactctactactatatatatagcaacactgcacgacgctagattgctagctagataggcgatagatattatatatctcgctagctattggcagtggcactggtttgtggtcactagctagtatatagtaggacccacagcgatccatcggcgggatcgggtccgtgttcttggtgcaaggatggcgcggcggatcgccggagtggcggctctgaacctgctctccgtgctcatggcggcgacctgcgccgccggccgcgacttctacgtcggcggccgcgccggctgggcacccaaccccgccgagcccttcaacgcctgggcggagcgcaaccggttccaggtcaacgacaccctcggtacagcaaggacgcggacgccgtgctgctggtgagccagggccactacgacgcctgcaacgccgcgcagccagcccaacggctcgacggcggcgactcccgcttcgtgttcgaccactccgggccctactacttcatcagccccgacgcggcgcggtgcagggccggcgagcggctcgtcgtcgtcgtcctcgccgtccgcggcgacggcgacggcgacggcacgccctcttcctcgccgcctcccgtcgccacacctgctccgagtgccctgcctacaccgccgccgccgccccatcatgttccgggcaagaacgcctcgtcgccgtcgcaggggccggcgccgtcacccgccctcgcgcctgcgcctgcgcctgacgcgaacgggacgtcttcgtcaccgccgtcgccgtcgtccgccgtagcagccttcaggggtggcttcctgctggcgtgcctgctatccgtaaccgctggagcagcaattattctcgtctgatgtggcaacgtcgtcgtcgtccgtggctaaacttgcatcgatcgtgttgatttccgtctagttcgtgacttagatttgcttctaagttgtagggatcggtcaaaataatttcctgtttgtttgtttgggtcgatcttctactagaatccttcaaagtggaacatgtaaatctttgttagaaggaagggatctccaactttaattataagagctagccaaaatggtgtatcttgcttgttcaagatttgttgccaggatttcaatgaatatttatttttcagttccagtttttcacttgttgtgtc

SEQ ID NO: 33442 - DNA, 1408 bp, Zea Mays
aacagacacaactgcatctgcatacagctgctgggtgctgctaactgcatcaccggcctcacctcacataccttcccctcccttcaccaccaccacctttaatacctcaccctcctctcctcttccccttcccggcctgctcctccccggccctcacatcctctttcagttccctctctggatctcttcctgaagagaggcactgccacaccaccacgccacccatgctcaacatgatgaccgatctgagctgcgggccgtcgtccaaggcgaaaggagggcagccggcggcggcgccgggctccggcggcgacaggcaggggaggggcaagatcgagatcaagcgcatcgagaacacgacgaaccggcaggtcaccttctgcaagcgccgcaacggcctgctcaagaaggcgtacgagctctcggtgctctgcgacgccgaggtcgcgctcgtcgtcttctccagccgcggccgcctctacgagtacgccaacaacagtgtgaagtccaccattgagaggtacaagaaggccaacagtgacacctccaactctggcacagttgcagaagtcaatgctcagcactaccagcaggagtcctccaagctgcgccaggcgatcgatagcttgcaaaacgcaaacaggaccatagtgggagattcaatccacaccatgggcctcagggagcttaagcagatggagggcaagctggagaaggccataaacaagattagagctagaaagaatgagctcttgtatgctgaagttgaatatatgcaaagaagggagatggatctgcagactgacaacatgtacctgaggagcaagatcgccgagaataataatgaaacggggcagccagcgatgaacatgattggagtgccgtcgacgagcgagtacgatcacatggcctcttttgttgactcgagaaactttcttcaggtgaacatgcagcagcagcagcctcagcactactcccatcagctgcaaccaacgaccctccaactcggatgatgaaattaagaatcttcggccaacaatccatgcacgcaagcacgcagtaaatcatgtgtgtccaactcagataaaaaaatctactctagcgtttgtataattattaataatcgtgactagtaaactgttatatatatatgtatagccatgtgtgtggtggcgcctacatatatgtcatgtggctgtacggcgagtttttttttcacaagcgtttgcagcagcatttggtgttgctcatcgatcaattaatcgcaagaaattaaacttgtcaccactgtgggtgtacgtgttaatgcagttgttgtatctgttaattgtaccctccatcagataaacgcgggtgcgcgtatgcatacttatttatgtgtatgattatttgtgtggtttatatcgcc

SEQ ID NO: 33443 - DNA, 1413 bp, Zea Mays
ggaacagacacaactgcatctgcatacagctgctgggtgctgctaactgcatcaccggcctcacctcacataccttcccctcccttcaccaccaccacctttaatacctcaccctcctctcctcttccccttcccggcctgctcctccccggccctcacatcctctttcagttccctctctggatctcttcctgaagagaggcactgccacaccaccacgccacccatgctcaacatgatgaccgatctgagctgcgggccgtcgtccaaggcgaaaggagggcagccggcggcggcgccgggctccggcggcgacaggcaggggaggggcaagatcgagatcaagcgcatcgagaacacgacgaaccggcaggtcaccttctgcaagcgccgcaacggcctgctcaagaaggcgtacgagctctcggtgctctgcgacgccgaggtcgcgctcgtcgtcttctccagccgcggccgcctctacgagtacgccaacaacagtgtgaagtccaccattgagaggtacaagaaggccaacagtgacacctccaactctggcacagttgcagaagtcaatgctcagcactaccagcaggagtcctccaagctgcgccaggcgatcgatagcttgcaaaacgcaaacagtaggaccatagtgggagattcaatccacaccatgggcctcagggagcttaagcagatggagggcaagctggagaaggccataaacaagattagagctagaaagaatgagctcttgtatgctgaagttgaatatatgcaaagaagggagatggatctgcagactgacaacatgtacctgaggagcaagatcgccgagaataataatgaaacggggcagccagcgatgaacatgattggagtgccgtcgacgagcgagtacgatcacatggcctcttttgttgactcgagaaactttcttcaggtgaacatgcagcagcagcagcctcagcactactcccatcagctgcaaccaacgaccctccaactcggatgatgaaattaagaatcttcggccaacaatccatgcacgcaagcacgcagtaaatcatgtgtgtccaactcagataaaaaaatctactctagcgtttgtataattattaataatcgtgactagtaaactgttatatatatatgtatagccatgtgtgtggtggcgcctacatatatgtcatgtggctgtacggcgagtttttttttcacaagcgtttgcagcagcatttggtgttgctcatcgatcaattaatcgcaagaaattaaacttgtcaccactgtgggtgtacgtgttaatgcagttgttgtatctgttaattgtaccctccatcagataaacgcgggtgcgcgtatgcatacttatttatgtgtatgattatttgtgtggtttatatcgcc

SEQ ID NO: 33444 - DNA, 438 bp, Zea Mays
atggtatggaagggtaaaaaattgcatctgagaatggattcgaacatttacgacaaaaaaaagtgggcatcattattatattgcagtgtgaagtccaccattgagaggtacaagaaggccaacagtgacacctccaactctggcacagttgcagaagtcaatgctcagcactaccagcaggagtcctccaagctgcgccaggcgatcgatagcttgcaaaacgcaaacaggaccatagtgggagattcaatccacaccatgggcctcagggagcttaagcagatggagggcaagctggagaaggccataaacaagattagagctagaaagaatgagctcttgtatgctgaagttgaatatatgcaaagaagggagatggatctgcagactgacaacatgtacctgaggagcaagtaaccacacaggatttttcacatg

SEQ ID NO: 33445 - DNA, 3050 bp, Zea Mays
ctgtaaacaaattcgccgcgaggggatcgaaaattttctcctccccaaatttctttatttattcggcttggaaactagtgcctcctttatatacacaaacatcgctgctgcccccctccgctctctcacctctctccccccttccgtttcctctctctcctcgcccgagaggccaaaaacccagcctcgagtcctcactccccgcagattcgcgtcatagcgcggcggcggcgatggcgtacggcttctccatcaggggatacgcggcgagcatgcggggcacggccgagctcggcccgtttagtttggcggcccgggaactgcagcccatggaggtgcgcgccttccggtggtgggaggacgagctcgcgtccatcaaggcggcggaggcggaggcggagaaggagaaggagaaggaagcggtggcgggggcgggggcggagggggaggaggaagaagaggaagaggaggcgtcggggaacggccgggcgccgaagaaacgctccatcaccgacctgttcgctgaggcgcctgccgtgggcgccggcagcggacccgacgctgtcgtggacgacgaggaggaggttcttcgctccatcgtccgccggagcaaggagctgcgaagaaagaggcgtctggagcaagctgcgttggcgtcggtagcggaggagccggagacgtcggcggcaggcgaacggcgtgcggccgaggggaatttccccagaaagaaatcagctgacaaaccaagtttgggagatgaattggatacttctggtccatcaaaggaacatcagaatgatctcattacagagaagcaaaagatcccagatcttaagagaaggaagcatggaagactcagtaatagtttacagaagaaggctgagaggctaaagtaccttgagagtagaaaggctgtcaaggttggaaaacagcgagatattaaaaaagtgctccctttgcacagcattctgaagaagtacacaaaacatacgtctgttaaaatggttaaggaaaaacatgggaattcaaaaggcactggagtcatacaactctgtcgcaaatcagtcaagcgtgtcaaattctcagaaacagatgatgccaaaaagcaatgttccaaaagaccaccactggaaagcatccgcgagcttctctctgctattagttcttcttcgtcgtcatctatagagatgtcaagtgaagaggaacatgttattgcggaaagtagtagttctcacatgacagagaaagctgtcactatggctagcgaagcaaatgagaacacaaatcatgacaatcaatatgagctcagcagtaccagattgtccaccggtttgcttgatctgaatcaagctcttccagaacctacggacttaaacaatccatatgttccaaattcagaggtttcaaatcttgagcaggcacaggtaggaacttggaatctggatcaacaagttcttggtaatggaagaaaaaacatagactcatcttttgatctgcatggacaggaacaactgagacattctactgagttggacaccacatcaaaaggcaagtccccttgtactctgtcaaacggattccaggattcagtgcatctccaacagaattggagctctatgactttgcatcatggtgtctctcaactctcaactggaggtgaaccatcttcctttgaagttcgagaaagtaatatatcacacagtgagaaacgaaattttagttctgaaacgaacgtggaacaagagttgaggccttctgctggacaaaccttgcgcttgatgggtcatgatcttacagtatccgatactagagttgactatttatctgacgcggcacagaatcacacaaataatactgcagaccatcttaccacaaaggtggtgttggaattgccacgacaaggtcagcctttcctagcattacaaactcagagtattcccagtgtttcagcaagttctgcaaggacagctcaggcacattttggatacagaacaacacataacatcagccacccgttgctcgctgccaatgtgttctctggtgatccatcagtatatgaagacaggtgcagggacttcacaaacttgcaatcacatcgaaattctatattgggatatcctcctctttccaatcatggcagtgctgcatttcttcagaattcaccaccttggcgttattactctgatcattccaccaggagagattcactctcagcgccatttacaccaacagtgatgcagcatgtggcaacaccttcagattaccgtgccaatctgcctcatcagtcatatggtgtgtactctggaagctcaacagttcgacctcttaactctgcaagttttacatgcacaaaccagatagtacaagcagttgacagtagggctactgcaaaccttccgtccagaagtccaacaactggaacgacaagaactcatcacaactccaatacttcatctagcagccgtttggttctgagatcaggccctgtaaagctcagtgccggggcgaagcatatcctgataccaaatgagaatacggaggacgacaattctgcaccaatgtactcttgtgtgtcctttggcagcagtggtgggaatgtttcggcagcttatcagaataaaggagcaggttcccataggcatcagaataaaggagcaggttcccgtaggttctgatccaaaagctggattatcttgctcgttcgttttctggacagctgctgggcaagaggctgcatgttttgaaggaactgaagctgatgacctaggcaatgctgagatgaagatgcaatgcgcagttcggaggatacctgagaccgtgttaattaaaggaggggcatacctggagtgtctatgtagctaccggtgatgaagtagaatgttaatgcgactcaaaagctggttgattgtacaacctgtgtcatcaggagttccctatttcatttgagccagctagatcatttttatttagcggtcatctaatataatatatcctcaatatatagatattatgttagctcaatattgtttttacaagtattattgagagag

SEQ ID NO: 33446 - DNA, 2714 bp, Zea Mays
tagtgcctcctttatatacacaaacatcgctgctgcccccctccgctctctcacctctctccccccttccgtttcctctctctcctcgcccgagaggccaaaaacccagcctcgagtcctcactccccgcagattcgcgtcatagcgcggcggcggcgatggcgtacggcttctccatcaggggatacgcggcgagcatgcggggcacggccgagctcggcccgtttagtttggcggcccgggaactgcagcccatggaggtgcgcgccttccggtggtgggaggacgagctcgcgtccatcaaggcggcggaggcggaggcggagaaggagaaggagaaggaagcggtggcgggggcgggggcggagggggaggaggaagaagaggaagaggaggcgtcggggaacggccgggcgccgaagaaacgctccatcaccgacctgttcgctgaggcgcctgccgtgggcgccggcagcggacccgacgctgtcgtggacgacgaggaggaggttcttcgctccatcgtccgccggagcaaggagctgcgaagaaagaggcgtctggagcaagctgcgttggcgtcggtagcggaggagccggagacgtcggcggcaggcgaacggcgtgcggccgaggggaatttccccagaaagaaatcagctgacaaaccaagtttgggagatgaattggatacttctggtccatcaaaggaacatcagaatgatctcattacagagaagcaaaagatcccagatcttaagagaaggaagcatggaagactcagtaatagtttacagaagaaggctgagaggctaaagtaccttgagagtagaaaggctgtcaaggttggaaaacagcgagatattaaaaaagtgctccctttgcacagcattctgaagaagtacacaaaacatacgtctgttaaaatggttaaggaaaaacatgggaattcaaaaggcactggagtcatacaactctgtcgcaaatcagtcaagcgtgtcaaattctcagaaacagatgatgccaaaaagcaatgttccaaaagaccaccactggaaagcatccgcgagcttctctctgctattagttcttcttcgtcgtcatctatagagatgtcaagtgaagaggaacatgttattgcggaaagtagtagttctcacatgacagagaaagctgtcactatggctagcgaagcaaatgagaacacaaatcatgacaatcaatatgagctcagcagtaccagattgtccaccggtttgcttgatctgaatcaagctcttccagaacctacggacttaaacaatccatatgttccaaattcagaggtttcaaatcttgagcaggcacaggtaggaacttggaatctggatcaacaagttcttggtaatggaagaaaaaacatagactcatcttttgatctgcatggacaggaacaactgagacattctactgagttggacaccacatcaaaaggcaagtccccttgtactctgtcaaacggattccaggattcagtgcatctccaacagaattggagctctatgactttgcatcatggtgtctctcaactctcaactggaggtgaaccatcttcctttgaagttcgagaaagtaatatatcacacagtgagaaacgaaattttagttctgaaacgaacgtggaacaagagttgaggccttctgctggacaaaccttgcgcttgatgggtcatgatcttacagtatccgatactagagttgactatttatctgacgcggcacagaatcacacaaataatactgcagaccatcttaccacaaaggtggtgttggaattgccacgacaaggtcagcctttcctagcattacaaactcagagtattcccagtgtttcagcaagttctgcaaggacagctcaggcacattttggatacagaacaacacataacatcagccacccgttgctcgctgccaatgtgttctctggtgatccatcagtatatgaagacaggtgcagggacttcacaaacttgcaatcacatcgaaattctatattgggatatcctcctctttccaatcatggcagtgctgcatttcttcagaattcaccaccttggcgttattactctgatcattccaccaggagagattcactctcagcgccatttacaccaacagtgatgcagcatgtggcaacaccttcagattaccgtgccaatctgcctcatcagtcatatggtgtgtactctggaagctcaacagttcgacctcttaactctgcaagttttacatgcacaaaccagatagtacaagcagttgacagtagggctactgcaaaccttccgtccagaagtccaacaactggaacgacaagaactcatcacaactccaatacttcatctagcagccgtttggttctgagatcaggccctgtaaagctcagtgccggggcgaagcatatcctgataccaaatgagaatacggaggacgacaattctgcaccaatgtactcttgtgtgtcctttggcagcagtggtgggaatgtttcggcagcttatcagaataaaggagcaggttcccataggcatcagaataaaggagcaggttcccgtaggttctgatccaaaagctggattatcttgctcgttcgttttctggacagctgctgggcaagaggctgcatgttttgaaggtacgtctctagtcagagttgttgcccatctgacgatcacggg

SEQ ID NO: 33447 - DNA, 964 bp, Zea Mays
atggcgagcggcggcggcgggggcctgggtgcggctggcgcgggaggccggatgcccacgtggagggagcgcgagaacaacaagcgccgggagcgccgccgccgcgcgatcgccgccaagatcttcgccggcctccgcgcgcacggcggctacaagctgcccaagcactgcgacaacaacgaggtgctcaaggcgctctgcaacgaggccggctgggtcgtcgagcccgacggcaccacctaccgccagctagctggctctagcttgcagggtttttttttctcctccatttttttgatgggtgggtgggttgggttgggtgtcgcacgtggacgatgcgcaaaaggtacgggatgccagtctggacgactggaccgcgcacgggtggtgtggggtgggtggagtgattgacgcgtccgtggagaatcccctccaccaagcttcagactcccgccggagatggtgctcgcgagattctccggggattggtaaggaggctggctggcatggattgattgggcatccagttctgcttgcgctccgaccctccagctggccctgcttctccagcatttcgatgttggtcctgcaacgctgtttcgcgcattggattggataagcaaagatgtgttcaatttagttttggtaccggttcagttcattacctgttagggtctaagtcatgtcgctactcactaggttgtgtcgtgtgtggactgtcctgaggcatagtttcgagtatatcttacttgcttggcacttgtgtactgattgatgctcttccagctaaggagactgaaaaatatttgatttgcagagtgagccttgcacaagctgttgcttatgtggtggttaactgaactgttttgggcactactttgtcatcatagatattactagtattggcctttctcaactatgttgttcgacctgcacaaagagccttttggtttctctgtcacac

SEQ ID NO: 33448 - DNA, 775 bp, Zea Mays
gttgcttctacgcgtattgtttcaatgatggctgtcagggagtgatttgaagaagcttgccttgtttgggtgtcccactgttgagcgaagaacggtttttgcatcaaaaagattaagagccttcttcaacatccaggaagacaaaatatgcggttcctgtaaactgagaagttcgtgcaagtttgtgaaccaggaagtggccaggcataatagagtgattctatcagatacgatgagaattatctccttgtttgtactggacgcttgcccacaagagctcgagattaccgctgagttaaaagccagtgtctgcaagctgctaaaggacgccataaatctcagcagttaactgctgagcattacggagcagaagtttgctagttttcttgtccttgtagttctaatagcgtgctgtcagcatttatctggacttatggaggaaattgccgaggcccatgtttgacgttgcgctcgcaatcgctccctgtgaaggttggagtggtgaaccccagcgacttccttctgatccgtgttttcttttgtgcaactaatatgaagatgaagtacagagtatgtaaaaacttaagatgcatatcgctctgtagctccttttcaactaatatgaagatgaagtacagagtatgtaaaaacttaagatgcatatcgctctgtagctccttttctttttgatgtacgtagtcatataccatagtactgttatcgtttgctgcctcgcctccatttcgttaaactttggtgaactcaggttcaatct

SEQ ID NO: 33449 - DNA, 850 bp, Zea Mays
cgaagttggcgctggccggccggacggccgggaccatgagagcactccgccgtgttggtttggtcgggggacgcggcgaccgcgacaggaggagaaggtgaaatggctgtcagggagtgatttgaagaagcttgccttgtttgggtgtcccactgttgagcgaagaacggtttttgcatcaaaaagattaagagccttcttcaacatccaggaagacaaaatatgcggttcctgtaaactgagaagttcgtgcaagtttgtgaaccaggaagtggccaggcataatagagtgattctatcagatacgatgagaattatctccttgtttgtactggacgcttgcccacaagagctcgagattaccgctgagttaaaagccagtgtctgcaagctgctaaaggacgccataaatctcagcagttaactgctgagcattacggagcagaagtttgctagttttcttgtccttgtagttctaatagcgtgctgtcagcatttatctggacttatggaggaaattgccgaggcccatgtttgacgttgcgctcgcaatcgctccctgtgaaggttggagtggtgaaccccagcgacttccttctgatccgtgttttcttttgtgcaactaatatgaagatgaagtacagagtatgtaaaaacttaagatgcatatcgctctgtagctccttttcaactaatatgaagatgaagtacagagtatgtaaaaacttaagatgcatatcgctctgtagctccttttctttttgatgtacgtagtcatataccatagtactgttatcgtttgctgcctcgcctccatttcgttaaactttggtgaactcaggttcaatct

SEQ ID NO: 33450 - DNA, 2266 bp, Zea Mays
aaaccgtttcatttctcccgtggtggacagactggtggtggtggtggtgtgggaaatttcgcggccacgcccctccctgtttccacaaattagacgtccagccctctgcatcatcggtaggcgaaccacgcgtgcgcgcacgcacggtatacgtacgcgtacataggcaggccaaagcaggcgagaggccccaggcccggacggacgccacaagacacgaggacaggggggaagctgcaggagggagacgagcagccggcggtgagagcaacccggcccgccccaatggagacgcaagtggcggctccgccacaccagcagcagcaacagcagcagaaggcggccaacctggcgcgcaccttcaccaagctgctccgccgcaagcgcgccgaggccgcggcgcagggcggcgcgcccgaggcgcccgcttctgtggctccaggagacgcgctggaggaggagcggacggagcctccgcccgccatcccgtccctcagcaagctcaagctgtcggggaacctcgccgccgcctactccttcgacgccttcttccgcaacgccgccgagaagaaggcggcggcggcgggagggggagcggtccggcagcctgcgggtgcgggggaggtgacgctggaggccgcggcggatgcgctgctggccaacctcttcgcgggggtctcggcggtgaaggcggcgtacgcgcagctgcagctcgcgcagttcccctacgacgcggaggcgatccagtccgcggacgccgccgtggtcgccgagctgacgaggctctccgacaccaagcggaggtacctgagggaccccgccgccgcggcccggggcgcggcggcggcgggccacaccgcgctcgcggcgcacgccgaggagcagcgccacctcctcaagacgtaccagatcacggcgcgcaagctggagtcggacctccgggccagggacgccgaggccgagcgcgccaggagctccctgaccggcgagctccgcgccgagcgcgccctggaggcgcggctccacccggggcggaccctggcgtcgctggacgagctccacctctcgggcctgaacccgacccacttcctgaccgcgctgcggcacacggtgaagtcgatccggtccttctccaggtcgatgctgagctcgatgcagtccgccgggtgggatctgggcgcggcggccgccgccgtgcacccgggcgtcccgctccggcgcgccggcgacgccaagttcgtgttcgagtcgtacgtggcgatgaagatgttcgccaacttccaccgccgcgacttcaacttcagcttcctgggcgagcgggagttctacgagcggcggcgcttcttcgaggagttcacggagctgaaggcggagccggcgagcgcgttcctggacgcgaggagcccgcggtggggcgggctcggcaagttcctgcgcgccaagtacctgtcgctggtgcacgcgcggatggagacggccttcttcgggcggctggagcagcgcggcatcgtgagcgccgggcccgggttcccggagagctcgtggttcgcggacttcgcggagatggcgcgccgcgtgtggctgctgcactgcctcttcttcgcgttcgacggcggcgccgaggaggacggcgcgtccatcttccaggtgcgcacgggggcgcgcttctcggaggtgtacatggagagcgccagcgacgggagcgccggcgacgacgccgaggaccgcgtggtcggcttcaccgttctgccggggttcagagtcgggcggacactgatccagtgccgcgtctacctgtccaagccggggcggcggccgtgatcgatgatgggtcgtggctgtgagagaccgaagagagaagaagatgatgggggggggggggggggggaatagtgcccattttgggtcggccgtcgaggtctcccgccggcagccggccggggcagtggccattatgatgatgacgggggggtggctatgtatgtaaatctatccagacatgtagggatgttctaatccgtaatataaatggtattttcagttccagatgctgcactgccattgttctttgctctctgctctccctgtcatttgccattgttggatagatggtgctcccgtgttttctcgcggatctgggatcggaatgatccggtcctcgtccccggaatcgtaggctacaaaccaacggtagtgacaggaagctcctgggattgggttgctgaaatcatgcggtggatccgaccatggatggattgcaaccatt

SEQ ID NO: 33451 - DNA, 2136 bp, Zea Mays
gaataaatgagatctctacgtttgattctgttaagagtgactaaggaagactgttaccccaactcagtttcgtacaaatggctcagtcggaacttctctgtgtcatcaaatgatgccaagaggttgcttcaggactttgtcaacaaacatggaactgacctccaagtgatttacagtgtgtcggggtggttgaagagcaatccccaaaactattgtgtaaagctcatttcaggcccaaaacttgaagaagcaaggcaaattttcaaagattcttgttcagttcagatctacagtatccaggcctgtattccaaaagatacagctgtactttggaatcctgaatttgtgcaggcagaggagcttttcaaccagccttttgattatgagaactgtttgagagataataggttttgtggtgttttgaattcttttgtcaagcgaacatccaatggaaagcatgtgagttcattgccaccaaagcccttgaatagtgctgcagccgccgcgcagtctaagcctagtgttactccaaaggagcagtttgttactgctcgacggcaagatttgcctgtaagttcaaagcagggagcagacactaagtccgagaaggataattccacagtattagataaggctggcaatggtcctgttgtcaaagaacaatcagttgatgcccatgcaagcaaaagtaaagctcaaaatggaaaggccatgcctagtaatggtggatcactggctaacatgtggggccgtgcatcagcaaaacctaagcctccaagtaccactaattctacagctgtagcaagtgttgcagctactgctgatgcacaaatttgtgcaaaggaagaagcagatggaaatagcagcgatgatgaacatgggataaagtacaagaggggatccactaatgcaaataacagaaagagaagagcggtatttgattattcggatgatgaggaagatgacaatattgtaagcattgcatctcctgagctaccaaaacagcataccccagaccctgttgttggaattgctgaagacgctgaagtaaatcaaaagaacttggaaactgaacaccatgtaccaaacaatgggaaaggttcctcaacgggggtggattctgacttcacatctgaatgtaaaatcaaaacgatcgatcctatgaacgattctgggattactttaaaagaaaagagcagtgatcctccaatcaatgacaagaagcaggattctgctgctgagcctgcctccacctcaccaaagaggagaaaggttttgaagacacgcatagatgagaggggaagggaagttaccgaggttgtctgggagaatgaagcttctgcagatgacaaggcagagcagaatgtcaacactattgatgcgactgcaagcggggcgactgtcccaagcaaaccgaagcccgcaacaaacgctgacaaaagcaaagctccaagcaaaacagcagcaggcaacaagaaagctgcgaaggctggagccaagcaagggagcattatgtcgttcttcaagaaagcatgagccagcggggggtgcgcatgcaccaaaatgagacaggacttggttaagcaaactggcagtggcagttatacctgaacattgtcagtcaggccggcgagcaagaagggctgctccaagcaggcgaccgttagctgtatcgtttgttttagctagcgtagcgatggttgagtcaagcagcagagagcacgcattctagctgaggtagtactatcttgctgaagatgtacacgtacacatatacaataactgttgtctactgtgctgtctagaagagtaaaggtccaaggtggaagggcggaacagtttgagtacctgtgtctggttggtatggaccccactggaagagagtgcacacaccatcatggtcttggagggtgcgagctgggcaccggtggcgtagcaagccagcaaacggccgacagcaacgtagggagggagttggagagccagagccaccccatcgtatcggtatcgcgactcgtcaacacatgtttgctgttggtcctacaagatgacgattcatataccagcttggagttggagagccagagccacccctgcggccgaccgaagccagcggctaagcagctaaatgcctga

SEQ ID NO: 33452 - DNA, 2099 bp, Zea Mays
cctgctttaaactccccttcgatctcgcggtttcgtacaaatggctcagtcggaacttctctgtgtcatcaaatgatgccaagaggttgcttcaggactttgtcaacaaacatggaactgacctccaagtgatttacagtgtgtcggggtggttgaagagcaatccccaaaactattgtgtaaagctcatttcaggcccaaaacttgaagaagcaaggcaaattttcaaagattcttgttcagttcagatctacagtatccaggcctgtattccaaaagatacagctgtactttggaatcctgaatttgtgcaggcagaggagcttttcaaccagccttttgattatgagaactgtttgagagataataggttttgtggtgttttgaattcttttgtcaagcgaacatccaatggaaagcatgtgagttcattgccaccaaagcccttgaatagtgctgcagccgccgcgcagtctaagcctagtgttactccaaaggagcagtttgttactgctcgacggcaagatttgcctgtaagttcaaagcagggagcagacactaagtccgagaaggataattccacagtattagataaggctggcaatggtcctgttgtcaaagaacaatcagttgatgcccatgcaagcaaaagtaaagctcaaaatggaaaggccatgcctagtaatggtggatcactggctaacatgtggggccgtgcatcagcaaaacctaagcctccaagtaccactaattctacagctgtagcaagtgttgcagctactgctgatgcacaaatttgtgcaaaggaagaagcagatggaaatagcagcgatgatgaacatgggataaagtacaagaggggatccactaatgcaaataacagaaagagaagagcggtatttgattattcggatgatgaggaagatgacaatattgtaagcattgcatctcctgagctaccaaaacagcataccccagaccctgttgttggaattgctgaagacgctgaagtaaatcaaaagaacttggaaactgaacaccatgtaccaaacaatgggaaaggttcctcaacgggggtggattctgacttcacatctgaatgtaaaatcaaaacgatcgatcctatgaacgattctgggattactttaaaagaaaagagcagtgatcctccaatcaatgacaagaagcaggattctgctgctgagcctgcctccacctcaccaaagaggagaaaggttttgaagacacgcatagatgagaggggaagggaagttaccgaggttgtctgggagaatgaagcttctgcagatgacaaggcagagcagaatgtcaacactattgatgcgactgcaagcggggcgactgtcccaagcaaaccgaagcccgcaacaaacgctgacaaaagcaaagctccaagcaaaacagcagcaggcaacaagaaagctgcgaaggctggagccaagcaagggagcattatgtcgttcttcaagaaagcatgagccagcggggggtgcgcatgcaccaaaatgagacaggacttggttaagcaaactggcagtggcagttatacctgaacattgtcagtcaggccggcgagcaagaagggctgctccaagcaggcgaccgttagctgtatcgtttgttttagctagcgtagcgatggttgagtcaagcagcagagagcacgcattctagctgaggtagtactatcttgctgaagatgtacacgtacacatatacaataactgttgtctactgtgctgtctagaagagtaaaggtccaaggtggaagggcggaacagtttgagtacctgtgtctggttggtatggaccccactggaagagagtgcacacaccatcatggtcttggagggtgcgagctgggcaccggtggcgtagcaagccagcaaacggccgacagcaacgtagggagggagttggagagccagagccaccccatcgtatcggtatcgcgactcgtcaacacatgtttgctgttggtcctacaagatgacgattcatataccagcttggagttggagagccagagccacccctgcggccgaccgaagccagcggctaagcagctaaatgcctga

SEQ ID NO: 33453 - DNA, 686 bp, Zea Mays
tttttttttttttggcaggcaacaagaaagctgcgaaggctggagccaagcaagggagcattatgtcgttcttcaagaaagcatgagccagcggggggtgcgcatgcaccaaaatgagacaggacttggttaagcaaactggcagtggcagttatacctgaacattgtcagtcaggccggcgagcaagaagggctgctccaagcaggcgaccgttagctgtatcgtttgttttagctagcgtagcgatggttgagtcaagcagcagagagcacgcattctagctgaggtagtactatcttgctgaagatgtacacgtacacatatacaataactgttgtctactgtgctgtctagaagagtaaaggtccaaggtggaagggcggaacagtttgagtacctgtgtctggttggtatggaccccactggaagagagtgcacacaccatcatggtcttggagggtgcgagctgggcaccggtggcgtagcaagccagcaaacggccgacagcaacgtagggagggagttggagagccagagccaccccatcgtatcggtatcgcgactcgtcaacacatgtttgctgttggtcctacaagatgacgattcatataccagcttggagttggagagccagagccacccctgcggccgaccgaagccagcggctaagcagctaaatgcctga

SEQ ID NO: 33454 - DNA, 1398 bp, Zea Mays
ctggattctgttggttttggtctgcgttatcatggtttcgtacaaatggctcagtcggaacttctctgtgtcatcaaatgatgccaagaggttgcttcaggactttgtcaacaaacatggaactgacctccaagtgatttacagtgtgtcggggtggttgaagagcaatccccaaaactattgtgtaaagctcatttcaggcccaaaacttgaagaagcaaggcaaattttcaaagattcttgttcagttcagatctacagtatccaggcctgtattccaaaagatacagctgtactttggaatcctgaatttgtgcaggcagaggagcttttcaaccagccttttgattatgagaactgtttgagagataataggttttgtggtgttttgaattcttttgtcaagcgaacatccaatggaaagcatgtgagttcattgccaccaaagcccttgaatagtgctgcagccgccgcgcagtctaagcctagtgttactccaaaggagcagtttgttactgctcgacggcaagatttgcctgtaagttcaaagcagggagcagacactaagtccgagaaggataattccacagtattagataaggctggcaatggtcctgttgtcaaagaacaatcagttgatgcccatgcaagcaaaagtaaagctcaaaatggaaaggccatgcctagtaatggtggatcactggctaacatgtggggccgtgcatcagcaaaacctaagcctccaagtaccactaattctacagctgtagcaagtgttgcagctactgctgatgcacaaatttgtgcaaaggaagaagcagatggaaatagcagcgatgatgaacatgggataaagtacaagaggggatccactaatgcaaataacagaaagagaagagcggtatttgattattcggatgatgaggaagatgacaatattgtaagcattgcatctcctgagctaccaaaacagcataccccagaccctgttgttggaattgctgaagacgctgaagtaaatcaaaagaacttggaaactgaacaccatgtaccaaacaatgggaaaggttcctcaacgggggtggattctgacttcacatctgaatgtaaaatcaaaacgatcgatcctatgaacgattctgggattactttaaaagaaaagagcagtgatcctccaatcaatgacaagaagcaggattctgctgctgagcctgcctccacctcaccaaagaggagaaaggttttgaagacacgcatagatgagaggggaagggaagttaccgaggttgtctgggagaatgaagcttctgcagatgacaaggcagagcagaatgtcaacactattgatgcgactgcaagcggcaggccagcagctctgccaatcaattaagaggaagg

SEQ ID NO: 33455 - DNA, 1737 bp, Zea Mays
cttttagttctctagctaagtcagcaattactgggggccttgactcaaagctcgctgcatgggatttctccaaaggacgaacactgttttctattgattatggatcacctgaattgcaaaacggcagttcttccggtagtgcagggcaatgtttcaaccctgcttttgttcattcagtagcagtttctgaagagggtattttgggagggctctacaaggtttgtgctgttgcaaggggggatggtgctgttgatgtggttgatcttgagtatgaactggcccctgcgaaatcgaagggacctcctcgggcagctattttgacaacgagatcaaaaggcgctgaacttggagatgggagctgcaatcaaagtcgagcgaaaagaatccatcttgactacaccatgggcggccatactgcagctgtgtcttgtgtagcattttcagcatttggtgagaaggggaagttcctcatttcaggtggcaatgatgcatcagtgaagctgtgggattggtcgaaaggattttactctgaaacaaacagcaaagttgatttggttttggatattgatgtaaagaaaaagtctgagactctcagtggctgcaaactcttgttgtacccattggaacaggaggaagaagaggggagttcaaagcttgcctctttaccagcaatagctaagaaagttttatcttacgaggagggtatttatgcaaaactttccaggaagtggatagaagaaggcctcagaaccgtatccattggaagacaggaaccagggggttttgctgctgttctttggaggagaagagaaatgggaggcttgctcttgccgcatcaccgaacctttccaaattctttgcaagcttccatcccgggacctctctctcttcacaaaggcgaccgcaaaaaccttcattactttgcacctgatgtgcacctcttctgttccctgcggcaaggctttccacgctcatcttggtcggccgtcatcagatcagaagccagcggcaacgcggtggcgtcgccaggcacggtcatcaagcgtagcaaggaggagctcatcaccttcttcagagacatacagacatccattgccgagtgctcgcgtaaagcttccaagaggacgaggaagcagccgcctgatctgttccaagaggtccgcaggagggaggaacagtcacacggtggaggagatagcggcaccgacgacgtttcagagggaccgaggaaagtgaagagtcttgaggacatgaacgtggctggattgagagagttggcgagggccagaaggatgaggggttactccaagcttaagaagggcgagctcattgatcggttgagaggggctactacgtaataaactaccatgatgcagagcagcttcgcagttaatagggacacatgttcttttcgaacgtatgatgagattaccgatcaaaaaattgtatgatgatgagattaccgactttccaaacgatctagtcagttcattgataagaactagaacaatgtgtgtagttattatactatagaaccggtggagctgtattgttgtactacgccgaaacttttgtgtaggcatggcaatctcctgttgttacgtaagttactttgttatgtacggaattagtttctctaaatctaccatggattgtgtatttctacaacatctgtttggaatttgatgtacattctaactaggtggcaattggcaaataaagaagtttaaaatggcc

SEQ ID NO: 33456 - DNA, 2731 bp, Zea Mays
ctgctctccatttgatcatttggatggatgtctttgctggtttgatctgcgcaccaaagatgcacttttgaccatggaggcagcaaataaaccaatttcttcaatttgctttaaaccaggaaatgaagattttgtgtatatctctgctggaaatgaaatattgtcctttgatgttcgtatgtggttttcttgtagggaactcaatcaaagccattagagacatataactacaatagagatgaaatcaatcagattgctgtcagctctaaaggttttctcgctgctgcagatgatagtggggatgttaagattgtcaataccattcagaaatgcctgtataaaagattaagggaagcccacacaagtatttgcagcagcgtgcaattcattccttggagaccttggacagcaattactgggggccttgactcaaagctcgctgcatgggatttctccaaaggacgaacactgttttctattgattatggatcacctgaattgcaaaacggcagttcttccggtagtgcagggcaatgtttcaaccctgcttttgttcattcagtagcagtttctgaagagggtattttgggagggctctacaaggtttgtgctgttgcaaggggggatggtgctgttgatgtggttgatcttgagtatgaactggcccctgcgaaatcgaagggacctcctcgggcagctattttgacaacgagatcaaaaggcgctgaacttggagatgggagctgcaatcaaagtcgagcgaaaagaatccatcttgactacaccatgggcggccatactgcagctgtgtcttgtgtcatttggtgagaaggggaagttcctcatttcaggtggcaatgatgcatcagtgaagctgtgggattggtcgaaaggattttactctgaaacaaacagcaaagttgatttggttttggatattgatgtaaagaaaaaggtaaattggctgtgtactgctccaactgattcagataacttgattgtgtgtgacacatccaaggtggtcaaagtatatagtttccggtagatggatcaaggtgtagcctcagtttgtcaggcagttatctgagggagtgaagcttgtctgaccgttggaaccaatctggtcctgactctggtatccagatattacaagcctgccgcagacagttcctgaattgtgaggtcattggttagcaatttgcaatgtcagttgtggcgcagaacagatctgataaagtatatattattttgttactgtcagaactttttgtacaacttccagtctgctagcttagctggactcggcatgtatatctctgttgtacggtgaaatgaatttatgtgtttggagaaaataaggcttgtttgtgctggaagagattatcttgattgtgtttatccttttggtttctatagattgtaggcttgtagcttttatttctcggtatggtgcaacctgtggtagcacatataatataaggatgatgtatgacgaatgtttttctgcgctatactgacggcttgttgaaccgtctctgaatgatctttctgttgcactcttgggcaacttgtcagtctgagactctcagtggctgcaaactcttgttgtacccattggaacaggaggaagaagaggggagttcaaagcttgcctctttaccagcaatagctaagaaagttttatcttacgaggagggtatttatgcaaaactttccaggaagtggatagaagaaggcctcagaaccgtatccattggaagacaggaaccagggggttttgctgctgttctttggaggagaagagaaatgggaggcttgctcttgccgcatcaccgaacctttccaaattctttgcaagcttccatcccgggacctctctctcttcacaaaggcgaccgcaaaaaccttcattactttgcacctgatgtgcacctcttctgttccctgcggcaaggctttccacgctcatcttggtcggccgtcatcagatcagaagccagcggcaacgcggtggcgtcgccaggcacggtcatcaagcgtagcaaggaggagctcatcaccttcttcagagacatacagacatccattgccgagtgctcgcgtaaagcttccaagaggacgaggaagcagccgcctgatctgttccaagaggtccgcaggagggaggaacagtcacacggtggaggagatagcggcaccgacgacgtttcagagggaccgaggaaagtgaagagtcttgaggacatgaacgtggctggattgagagagttggcgagggccagaaggatgaggggttactccaagcttaagaagggcgagctcattgatcggttgagaggggctactacgtaataaactaccatgatgcagagcagcttcgcagttaatagggacacatgttcttttcgaacgtatgatgagattaccgatcaaaaaattgtatgatgatgagattaccgactttccaaacgatctagtcagttcattgataagaactagaacaatgtgtgtagttattatactatagaaccggtggagctgtattgttgtactacgccgaaacttttgtgtaggcatggcaatctcctgttgttacgtaagttactttgttatgtacggaattagtttctctaaatctaccatggattgtgtatttctacaacatctgtttggaatttgatgtacattctaactaggtggcaattggcaaataaagaagtttaaaatggcc

SEQ ID NO: 33457 - DNA, 2670 bp, Zea Mays
atcctccacctccactgctctccatttgatcatttggatggatgtctttgctggtttgatctgcgcaccaaagatgcacttttgaccatggaggcagcaaataaaccaatttcttcaatttgctttaaaccaggaaatgaagattttgtgtatatctctgctggaaatgaaatattgtcctttgatgttcgtatgtggttttcttgtagggaactcaatcaaagccattagagacatataactacaatagagatgaaatcaatcagattgctgtcagctctaaaggttttctcgctgctgcagatgatagtggggatgttaagattgtcaataccattcagaaatgcctgtataaaagattaagggaagcccacacaagtatttgcagcagcgtgcaattcattccttggagaccttggacagcaattactgggggccttgactcaaagctcgctgcatgggatttctccaaaggacgaacactgttttctattgattatgtagcagtttctgaagagggtattttgggagggctctacaaggtttgtgctgttgcaaggggggatggtgctgttgatgtggttgatcttgagtatgaactggcccctgcgaaatcgaagggacctcctcgggcagctattttgacaacgagatcaaaaggcgctgaacttggagatgggagctgcaatcaaagtcgagcgaaaagaatccatcttgactacaccatgggcggccatactgcagctgtgtcttgtgtcatttggtgagaaggggaagttcctcatttcaggtggcaatgatgcatcagtgaagctgtgggattggtcgaaaggattttactctgaaacaaacagcaaagttgatttggttttggatattgatgtaaagaaaaaggtaaattggctgtgtactgctccaactgattcagataacttgattgtgtgtgacacatccaaggtggtcaaagtatatagtttccggtagatggatcaaggtgtagcctcagtttgtcaggcagttatctgagggagtgaagcttgtctgaccgttggaaccaatctggtcctgactctggtatccagatattacaagcctgccgcagacagttcctgaattgtgaggtcattggttagcaatttgcaatgtcagttgtggcgcagaacagatctgataaagtatatattattttgttactgtcagaactttttgtacaacttccagtctgctagcttagctggactcggcatgtatatctctgttgtacggtgaaatgaatttatgtgtttggagaaaataaggcttgtttgtgctggaagagattatcttgattgtgtttatccttttggtttctatagattgtaggcttgtagcttttatttctcggtatggtgcaacctgtggtagcacatataatataaggatgatgtatgacgaatgtttttctgcgctatactgacggcttgttgaaccgtctctgaatgatctttctgttgcactcttgggcaacttgtcagtctgagactctcagtggctgcaaactcttgttgtacccattggaacaggaggaagaagaggggagttcaaagcttgcctctttaccagcaatagctaagaaagttttatcttacgaggagggtatttatgcaaaactttccaggaagtggatagaagaaggcctcagaaccgtatccattggaagacaggaaccagggggttttgctgctgttctttggaggagaagagaaatgggaggcttgctcttgccgcatcaccgaacctttccaaattctttgcaagcttccatcccgggacctctctctcttcacaaaggcgaccgcaaaaaccttcattactttgcacctgatgtgcacctcttctgttccctgcggcaaggctttccacgctcatcttggtcggccgtcatcagatcagaagccagcggcaacgcggtggcgtcgccaggcacggtcatcaagcgtagcaaggaggagctcatcaccttcttcagagacatacagacatccattgccgagtgctcgcgtaaagcttccaagaggacgaggaagcagccgcctgatctgttccaagaggtccgcaggagggaggaacagtcacacggtggaggagatagcggcaccgacgacgtttcagagggaccgaggaaagtgaagagtcttgaggacatgaacgtggctggattgagagagttggcgagggccagaaggatgaggggttactccaagcttaagaagggcgagctcattgatcggttgagaggggctactacgtaataaactaccatgatgcagagcagcttcgcagttaatagggacacatgttcttttcgaacgtatgatgagattaccgatcaaaaaattgtatgatgatgagattaccgactttccaaacgatctagtcagttcattgataagaactagaacaatgtgtgtagttattatactatagaaccggtggagctgtattgttgtactacgccgaaacttttgtgtaggcatggcaatctcctgttgttacgtaagttactttgttatgtacggaattagtttctctaaatctaccatggattgtgtatttctacaacatctgtttggaatttgatgtacattctaactaggtggcaattggcaaataaagaagtttaaaatggcc

SEQ ID NO: 33458 - DNA, 2736 bp, Zea Mays
cagccatcctccacctccactgctctccatttgatcatttggatggatgtctttgctggtttgatctgcgcaccaaagatgcacttttgaccatggaggcagcaaataaaccaatttcttcaatttgctttaaaccaggaaatgaagattttgtgtatatctctgctggaaatgaaatattgtcctttgatgttcgtatgggaactcaatcaaagccattagagacatataactacaatagagatgaaatcaatcagattgctgtcagctctaaaggttttctcgctgctgcagatgatagtggggatgttaagattgtcaataccattcagaaatgcctgtataaaagattaagggaagcccacacaagtatttgcagcagcgtgcaattcattccttggagaccttggacagcaattactgggggccttgactcaaagctcgctgcatgggatttctccaaaggacgaacactgttttctattgattatggatcacctgaattgcaaaacggcagttcttccggtagtgcagggcaatgtttcaaccctgcttttgttcattcagtagcagtttctgaagagggtattttgggagggctctacaaggtttgtgctgttgcaaggggggatggtgctgttgatgtggttgatcttgagtatgaactggcccctgcgaaatcgaagggacctcctcgggcagctattttgacaacgagatcaaaaggcgctgaacttggagatgggagctgcaatcaaagtcgagcgaaaagaatccatcttgactacaccatgggcggccatactgcagctgtgtcttgtgtcatttggtgagaaggggaagttcctcatttcaggtggcaatgatgcatcagtgaagctgtgggattggtcgaaaggattttactctgaaacaaacagcaaagttgatttggttttggatattgatgtaaagaaaaaggtaaattggctgtgtactgctccaactgattcagataacttgattgtgtgtgacacatccaaggtggtcaaagtatatagtttccggtagatggatcaaggtgtagcctcagtttgtcaggcagttatctgagggagtgaagcttgtctgaccgttggaaccaatctggtcctgactctggtatccagatattacaagcctgccgcagacagttcctgaattgtgaggtcattggttagcaatttgcaatgtcagttgtggcgcagaacagatctgataaagtatatattattttgttactgtcagaactttttgtacaacttccagtctgctagcttagctggactcggcatgtatatctctgttgtacggtgaaatgaatttatgtgtttggagaaaataaggcttgtttgtgctggaagagattatcttgattgtgtttatccttttggtttctatagattgtaggcttgtagcttttatttctcggtatggtgcaacctgtggtagcacatataatataaggatgatgtatgacgaatgtttttctgcgctatactgacggcttgttgaaccgtctctgaatgatctttctgttgcactcttgggcaacttgtcagtctgagactctcagtggctgcaaactcttgttgtacccattggaacaggaggaagaagaggggagttcaaagcttgcctctttaccagcaatagctaagaaagttttatcttacgaggagggtatttatgcaaaactttccaggaagtggatagaagaaggcctcagaaccgtatccattggaagacaggaaccagggggttttgctgctgttctttggaggagaagagaaatgggaggcttgctcttgccgcatcaccgaacctttccaaattctttgcaagcttccatcccgggacctctctctcttcacaaaggcgaccgcaaaaaccttcattactttgcacctgatgtgcacctcttctgttccctgcggcaaggctttccacgctcatcttggtcggccgtcatcagatcagaagccagcggcaacgcggtggcgtcgccaggcacggtcatcaagcgtagcaaggaggagctcatcaccttcttcagagacatacagacatccattgccgagtgctcgcgtaaagcttccaagaggacgaggaagcagccgcctgatctgttccaagaggtccgcaggagggaggaacagtcacacggtggaggagatagcggcaccgacgacgtttcagagggaccgaggaaagtgaagagtcttgaggacatgaacgtggctggattgagagagttggcgagggccagaaggatgaggggttactccaagcttaagaagggcgagctcattgatcggttgagaggggctactacgtaataaactaccatgatgcagagcagcttcgcagttaatagggacacatgttcttttcgaacgtatgatgagattaccgatcaaaaaattgtatgatgatgagattaccgactttccaaacgatctagtcagttcattgataagaactagaacaatgtgtgtagttattatactatagaaccggtggagctgtattgttgtactacgccgaaacttttgtgtaggcatggcaatctcctgttgttacgtaagttactttgttatgtacggaattagtttctctaaatctaccatggattgtgtatttctacaacatctgtttggaatttgatgtacattctaactaggtggcaattggcaaataaagaagtttaaaatggcc

SEQ ID NO: 33459 - DNA, 2763 bp, Zea Mays
gaccagcactagcagccagccatcctccacctccactgctctccatttgatcatttggatggatgtctttgctggtttgatctgcgcaccaaagatgcacttttgaccatggaggcagcaaataaaccaatttcttcaatttgctttaaaccaggaaatgaagattttgtgtatatctctgctggaaatgaaatattgtcctttgatgttcgtatgggaactcaatcaaagccattagagacatataactacaatagagatgaaatcaatcagattgctgtcagctctaaaggttttctcgctgctgcagatgatagtggggatgttaagattgtcaataccattcagaaatgcctgtataaaagattaagggaagcccacacaagtatttgcagcagcgtgcaattcattccttggagaccttggacagcaattactgggggccttgactcaaagctcgctgcatgggatttctccaaaggacgaacactgttttctattgattatggatcacctgaattgcaaaacggcagttcttccggtagtgcagggcaatgtttcaaccctgcttttgttcattcagtagcagtttctgaagagggtattttgggagggctctacaaggtttgtgctgttgcaaggggggatggtgctgttgatgtggttgatcttgagtatgaactggcccctgcgaaatcgaagggacctcctcgggcagctattttgacaacgagatcaaaaggcgctgaacttggagatgggagctgcaatcaaagtcgagcgaaaagaatccatcttgactacaccatgggcggccatactgcagctgtgtcttgtgtagcattttcagcatttggtgagaaggggaagttcctcatttcaggtggcaatgatgcatcagtgaagctgtgggattggtcgaaaggattttactctgaaacaaacagcaaagttgatttggttttggatattgatgtaaagaaaaaggtaaattggctgtgtactgctccaactgattcagataacttgattgtgtgtgacacatccaaggtggtcaaagtatatagtttccggtagatggatcaaggtgtagcctcagtttgtcaggcagttatctgagggagtgaagcttgtctgaccgttggaaccaatctggtcctgactctggtatccagatattacaagcctgccgcagacagttcctgaattgtgaggtcattggttagcaatttgcaatgtcagttgtggcgcagaacagatctgataaagtatatattattttgttactgtcagaactttttgtacaacttccagtctgctagcttagctggactcggcatgtatatctctgttgtacggtgaaatgaatttatgtgtttggagaaaataaggcttgtttgtgctggaagagattatcttgattgtgtttatccttttggtttctatagattgtaggcttgtagcttttatttctcggtatggtgcaacctgtggtagcacatataatataaggatgatgtatgacgaatgtttttctgcgctatactgacggcttgttgaaccgtctctgaatgatctttctgttgcactcttgggcaacttgtcagtctgagactctcagtggctgcaaactcttgttgtacccattggaacaggaggaagaagaggggagttcaaagcttgcctctttaccagcaatagctaagaaagttttatcttacgaggagggtatttatgcaaaactttccaggaagtggatagaagaaggcctcagaaccgtatccattggaagacaggaaccagggggttttgctgctgttctttggaggagaagagaaatgggaggcttgctcttgccgcatcaccgaacctttccaaattctttgcaagcttccatcccgggacctctctctcttcacaaaggcgaccgcaaaaaccttcattactttgcacctgatgtgcacctcttctgttccctgcggcaaggctttccacgctcatcttggtcggccgtcatcagatcagaagccagcggcaacgcggtggcgtcgccaggcacggtcatcaagcgtagcaaggaggagctcatcaccttcttcagagacatacagacatccattgccgagtgctcgcgtaaagcttccaagaggacgaggaagcagccgcctgatctgttccaagaggtccgcaggagggaggaacagtcacacggtggaggagatagcggcaccgacgacgtttcagagggaccgaggaaagtgaagagtcttgaggacatgaacgtggctggattgagagagttggcgagggccagaaggatgaggggttactccaagcttaagaagggcgagctcattgatcggttgagaggggctactacgtaataaactaccatgatgcagagcagcttcgcagttaatagggacacatgttcttttcgaacgtatgatgagattaccgatcaaaaaattgtatgatgatgagattaccgactttccaaacgatctagtcagttcattgataagaactagaacaatgtgtgtagttattatactatagaaccggtggagctgtattgttgtactacgccgaaacttttgtgtaggcatggcaatctcctgttgttacgtaagttactttgttatgtacggaattagtttctctaaatctaccatggattgtgtatttctacaacatctgtttggaatttgatgtacattctaactaggtggcaattggcaaataaagaagtttaaaatggcc

SEQ ID NO: 33460 - DNA, 2936 bp, Zea Mays
cccacttggaatctggaatttgactgaggggatgtagaccgttcgatttccaatcgcacggtccgcgttcgtttgacgtccttctggcggttatgctgctgcgaccaagtcgagggctttcgtgccttcagcccttcagtcttcaccagtcgcgcgccgccatgtcggagaccgaatcggcggcagcggcgccggtggctgcggctgaatcgaagcctcggcgactgcgggggcacaagaagggcgccgtcacctgctgcgtcgcctcctccgcccgccccggcgtcgtcgcgtcctccggcgaggatggatgtctttgctggtttgatctgcgcaccaaagatgcacttttgaccatggaggcagcaaataaaccaatttcttcaatttgctttaaaccaggaaatgaagattttgtgtatatctctgctggaaatgaaatattgtcctttgatgttcgtatgggaactcaatcaaagccattagagacatataactacaatagagatgaaatcaatcagattgctgtcagctctaaaggttttctcgctgctgcagatgatagtggggatgttaagattgtcaataccattcagaaatgcctgtataaaagattaagggaagcccacacaagtatttgcagcagcgtgcaattcattccttggagaccttggacagcaattactgggggccttgactcaaagctcgctgcatgggatttctccaaaggacgaacactgttttctattgattatgtagcagtttctgaagagggtattttgggagggctctacaaggtttgtgctgttgcaaggggggatggtgctgttgatgtggttgatcttgagtatgaactggcccctgcgaaatcgaagggacctcctcgggcagctattttgacaacgagatcaaaaggcgctgaacttggagatgggagctgcaatcaaagtcgagcgaaaagaatccatcttgactacaccatgggcggccatactgcagctgtgtcttgtgtagcattttcagcatttggtgagaaggggaagttcctcatttcaggtggcaatgatgcatcagtgaagctgtgggattggtcgaaaggattttactctgaaacaaacagcaaagttgatttggttttggatattgatgtaaagaaaaaggtaaattggctgtgtactgctccaactgattcagataacttgattgtgtgtgacacatccaaggtggtcaaagtatatagtttccggtagatggatcaaggtgtagcctcagtttgtcaggcagttatctgagggagtgaagcttgtctgaccgttggaaccaatctggtcctgactctggtatccagatattacaagcctgccgcagacagttcctgaattgtgaggtcattggttagcaatttgcaatgtcagttgtggcgcagaacagatctgataaagtatatattattttgttactgtcagaactttttgtacaacttccagtctgctagcttagctggactcggcatgtatatctctgttgtacggtgaaatgaatttatgtgtttggagaaaataaggcttgtttgtgctggaagagattatcttgattgtgtttatccttttggtttctatagattgtaggcttgtagcttttatttctcggtatggtgcaacctgtggtagcacatataatataaggatgatgtatgacgaatgtttttctgcgctatactgacggcttgttgaaccgtctctgaatgatctttctgttgcactcttgggcaacttgtcagtctgagactctcagtggctgcaaactcttgttgtacccattggaacaggaggaagaagaggggagttcaaagcttgcctctttaccagcaatagctaagaaagttttatcttacgaggagggtatttatgcaaaactttccaggaagtggatagaagaaggcctcagaaccgtatccattggaagacaggaaccagggggttttgctgctgttctttggaggagaagagaaatgggaggcttgctcttgccgcatcaccgaacctttccaaattctttgcaagcttccatcccgggacctctctctcttcacaaaggcgaccgcaaaaaccttcattactttgcacctgatgtgcacctcttctgttccctgcggcaaggctttccacgctcatcttggtcggccgtcatcagatcagaagccagcggcaacgcggtggcgtcgccaggcacggtcatcaagcgtagcaaggaggagctcatcaccttcttcagagacatacagacatccattgccgagtgctcgcgtaaagcttccaagaggacgaggaagcagccgcctgatctgttccaagaggtccgcaggagggaggaacagtcacacggtggaggagatagcggcaccgacgacgtttcagagggaccgaggaaagtgaagagtcttgaggacatgaacgtggctggattgagagagttggcgagggccagaaggatgaggggttactccaagcttaagaagggcgagctcattgatcggttgagaggggctactacgtaataaactaccatgatgcagagcagcttcgcagttaatagggacacatgttcttttcgaacgtatgatgagattaccgatcaaaaaattgtatgatgatgagattaccgactttccaaacgatctagtcagttcattgataagaactagaacaatgtgtgtagttattatactatagaaccggtggagctgtattgttgtactacgccgaaacttttgtgtaggcatggcaatctcctgttgttacgtaagttactttgttatgtacggaattagtttctctaaatctaccatggattgtgtatttctacaacatctgtttggaatttgatgtacattctaactaggtggcaattggcaaataaagaagtttaaaatggcc

SEQ ID NO: 33461 - DNA, 2879 bp, Zea Mays
cccacttggaatctggaatttgactgaggggatgtagaccgttcgatttccaatcgcacggtccgcgttcgtttgacgtccttctggcggttatgctgctgcgaccaagtcgagggctttcgtgccttcagcccttcagtcttcaccagtcgcgcgccgccatgtcggagaccgaatcggcggcagcggcgccggtggctgcggctgaatcgaagcctcggcgactgcgggggcacaagaagggcgccgtcacctgctgcgtcgcctcctccgcccgccccggcgtcgtcgcgtcctccggcgaggatggatgtctttgctggtttgatctgcgcaccaaagatgcacttttgaccatggaggcagcaaataaaccaatttcttcaatttgctttaaaccaggaaatgaagattttgtgtatatctctgctggaaatgaaatattgtcctttgatgttcgtatgggaactcaatcaaagccattagagacatataactacaatagagatgaaatcaatcagattgctgtcagctctaaaggttttctcgctgctgcagatgatagtggggatgttaagatttgcagcagcgtgcaattcattccttggagaccttggacagcaattactgggggccttgactcaaagctcgctgcatgggatttctccaaaggacgaacactgttttctattgattatgtagcagtttctgaagagggtattttgggagggctctacaaggtttgtgctgttgcaaggggggatggtgctgttgatgtggttgatcttgagtatgaactggcccctgcgaaatcgaagggacctcctcgggcagctattttgacaacgagatcaaaaggcgctgaacttggagatgggagctgcaatcaaagtcgagcgaaaagaatccatcttgactacaccatgggcggccatactgcagctgtgtcttgtgtagcattttcagcatttggtgagaaggggaagttcctcatttcaggtggcaatgatgcatcagtgaagctgtgggattggtcgaaaggattttactctgaaacaaacagcaaagttgatttggttttggatattgatgtaaagaaaaaggtaaattggctgtgtactgctccaactgattcagataacttgattgtgtgtgacacatccaaggtggtcaaagtatatagtttccggtagatggatcaaggtgtagcctcagtttgtcaggcagttatctgagggagtgaagcttgtctgaccgttggaaccaatctggtcctgactctggtatccagatattacaagcctgccgcagacagttcctgaattgtgaggtcattggttagcaatttgcaatgtcagttgtggcgcagaacagatctgataaagtatatattattttgttactgtcagaactttttgtacaacttccagtctgctagcttagctggactcggcatgtatatctctgttgtacggtgaaatgaatttatgtgtttggagaaaataaggcttgtttgtgctggaagagattatcttgattgtgtttatccttttggtttctatagattgtaggcttgtagcttttatttctcggtatggtgcaacctgtggtagcacatataatataaggatgatgtatgacgaatgtttttctgcgctatactgacggcttgttgaaccgtctctgaatgatctttctgttgcactcttgggcaacttgtcagtctgagactctcagtggctgcaaactcttgttgtacccattggaacaggaggaagaagaggggagttcaaagcttgcctctttaccagcaatagctaagaaagttttatcttacgaggagggtatttatgcaaaactttccaggaagtggatagaagaaggcctcagaaccgtatccattggaagacaggaaccagggggttttgctgctgttctttggaggagaagagaaatgggaggcttgctcttgccgcatcaccgaacctttccaaattctttgcaagcttccatcccgggacctctctctcttcacaaaggcgaccgcaaaaaccttcattactttgcacctgatgtgcacctcttctgttccctgcggcaaggctttccacgctcatcttggtcggccgtcatcagatcagaagccagcggcaacgcggtggcgtcgccaggcacggtcatcaagcgtagcaaggaggagctcatcaccttcttcagagacatacagacatccattgccgagtgctcgcgtaaagcttccaagaggacgaggaagcagccgcctgatctgttccaagaggtccgcaggagggaggaacagtcacacggtggaggagatagcggcaccgacgacgtttcagagggaccgaggaaagtgaagagtcttgaggacatgaacgtggctggattgagagagttggcgagggccagaaggatgaggggttactccaagcttaagaagggcgagctcattgatcggttgagaggggctactacgtaataaactaccatgatgcagagcagcttcgcagttaatagggacacatgttcttttcgaacgtatgatgagattaccgatcaaaaaattgtatgatgatgagattaccgactttccaaacgatctagtcagttcattgataagaactagaacaatgtgtgtagttattatactatagaaccggtggagctgtattgttgtactacgccgaaacttttgtgtaggcatggcaatctcctgttgttacgtaagttactttgttatgtacggaattagtttctctaaatctaccatggattgtgtatttctacaacatctgtttggaatttgatgtacattctaactaggtggcaattggcaaataaagaagtttaaaatggcc

SEQ ID NO: 33462 - DNA, 2316 bp, Zea Mays
cccacttggaatctggaatttgactgaggggatgtagaccgttcgatttccaatcgcacggtccgcgttcgtttgacgtccttctggcggttatgctgctgcgaccaagtcgagggctttcgtgccttcagcccttcagtcttcaccagtcgcgcgccgccatgtcggagaccgaatcggcggcagcggcgccggtggctgcggctgaatcgaagcctcggcgactgcgggggcacaagaagggcgccgtcacctgctgcgtcgcctcctccgcccgccccggcgtcgtcgcgtcctccggcgaggatggatgtctttgctggtttgatctgcgcaccaaagatgcacttttgaccatggaggcagcaaataaaccaatttcttcaatttgctttaaaccaggaaatgaagattttgtgtatatctctgctggaaatgaaatattgtcctttgatgttcgtatgggaactcaatcaaagccattagagacatataactacaatagagatgaaatcaatcagattgctgtcagctctaaaggttttctcgctgctgcagatgatagtggggatgttaagattgtcaataccattcagaaatgcctgtataaaagattaagggaagcccacacaagtatttgcagcagcgtgcaattcattccttggagaccttggacagcaattactgggggccttgactcaaagctcgctgcatgggatttctccaaaggacgaacactgttttctattgattatgtagcagtttctgaagagggtattttgggagggctctacaaggtttgtgctgttgcaaggggggatggtgctgttgatgtggttgatcttgagtatgaactggcccctgcgaaatcgaagggacctcctcgggcagctattttgacaacgagatcaaaaggcgctgaacttggagatgggagctgcaatcaaagtcgagcgaaaagaatccatcttgactacaccatgggcggccatactgcagctgtgtcttgtgtagcattttcagcatttggtgagaaggggaagttcctcatttcaggtggcaatgatgcatcagtgaagctgtgggattggtcgaaaggattttactctgaaacaaacagcaaagttgatttggttttggatattgatgtaaagaaaaagtctgagactctcagtggctgcaaactcttgttgtacccattggaacaggaggaagaagaggggagttcaaagcttgcctctttaccagcaatagctaagaaagttttatcttacgaggagggtatttatgcaaaactttccaggaagtggatagaagaaggcctcagaaccgtatccattggaagacaggaaccagggggttttgctgctgttctttggaggagaagagaaatgggaggcttgctcttgccgcatcaccgaacctttccaaattctttgcaagcttccatcccgggacctctctctcttcacaaaggcgaccgcaaaaaccttcattactttgcacctgatgtgcacctcttctgttccctgcggcaaggctttccacgctcatcttggtcggccgtcatcagatcagaagccagcggcaacgcggtggcgtcgccaggcacggtcatcaagcgtagcaaggaggagctcatcaccttcttcagagacatacagacatccattgccgagtgctcgcgtaaagcttccaagaggacgaggaagcagccgcctgatctgttccaagaggtccgcaggagggaggaacagtcacacggtggaggagatagcggcaccgacgacgtttcagagggaccgaggaaagtgaagagtcttgaggacatgaacgtggctggattgagagagttggcgagggccagaaggatgaggggttactccaagcttaagaagggcgagctcattgatcggttgagaggggctactacgtaataaactaccatgatgcagagcagcttcgcagttaatagggacacatgttcttttcgaacgtatgatgagattaccgatcaaaaaattgtatgatgatgagattaccgactttccaaacgatctagtcagttcattgataagaactagaacaatgtgtgtagttattatactatagaaccggtggagctgtattgttgtactacgccgaaacttttgtgtaggcatggcaatctcctgttgttacgtaagttactttgttatgtacggaattagtttctctaaatctaccatggattgtgtatttctacaacatctgtttggaatttgatgtacattctaactaggtggcaattggcaaataaagaagtttaaaatggcc

SEQ ID NO: 33463 - DNA, 2468 bp, Zea Mays
aagtaataatgagagggcaccaaatcgatgagcacattcgtaaattctatcgtataaggaggggtgaagaagagcacatatatgggctttgagaaatggtggttgccacctgcgccagtggtgaagaaaccccgatcgctctacagtgcggtgtcactggcttacttgggagactgcatatatgaagtgagagtcaggccgtgtgaacactgatgtacaagtgtactagttgtcaagttgaagcttgctttccataggaagatctgattctttctcttttggtgtacagctttatgctcggaggcacttcttctttccacctctgagcatcaatgagtacaacaaacgtgtgatggatgttgtgaagtgtgagtcacaggaccttttgttgaacaagcttcttggagaagattttctaactgaagaagaaaggtgaatattagattgctaaacttatacaatttatgcaacattaccaggaatataatttctacagagaaatgttcgacggtagtcttaagatgcatgcctgcacttttacggaatgttagcattttgacatttgtcaagactagcataggtatttggatgttaccgtatttgtttttgggaaaatgctgtatctctctactttttctacactgtccaggtccagggcctcgagcctattcagtaatgagccttgaagacgtactttgagttacatgattaagcacatttgtagggacatacttcgttgggggcggaatattgttagcagcaaaactcgcaccaggaagcgtgcaggaattgctgtctacaaccgggcatcttcactcgaaacactaattggatatctttacctcacaaatttcaaacggttggaacaactgatgtttcaattgggcttcacaagtggtgcctcatcacagcatattgcagacgagctgcgctcaagtttccagaaaacaacccccgcttcggccacacctccacaacctgcaacacagtgaacaggtctgaggtgtaacggtattggatcgtgctcccacaaaggttatctttagtcttcgaccctaacgacggagaaaggacgcaagagtcacggcgtattcagatgcaatagcgaggctgggagcagatggttagcgaacaccaccaccgtatattcatcagcatgtttctgcgaatggagcaacatagatatgctcaaactctgaagatatgcgaaaattaagactcagaatgtctgggctgacctggggtttgcgagtaggatagcttgatgtttgcaaagaagctcgagtgtgggagataggcccgacttggggtgttgtaatcgacctaaattcgtgtaggtaattaaccacttcatgttacttgttgccaaaaaaaaagtgatgattctgcttgtacacacgccttgtttttttttcctgttccctgtgacttctgttgaacagcaaaagctatgagcgctaagatgctgtgggaatgaatagaacaaaataccaaacctgtgggcgttactataaatccaattgatccaattgcttcattcggggtagtaattttacaaagcccagttatggggatacattggtttcaaaaaaaaaaactcgaaattctcccgcctatccaccttgaattggattggatttgcttcgagcagtcagtcttgccgaagtttttaggagttctccgacctcgtagtcaatcactcagtctcggagacacacattgccactgcgatggccgcccaccaggactcggcggcatcggggagcgggcctcctcgtcgtcctcgcgtcctcctggcagcctccggcagcgtggccgccatcaagttcgaggtcctctgccgcagcgtcgccgagtgggcggatgtccacgcggtggcgaccgcgtccgcgctggaattcatcgacgtggcctccttccccggcggcgtccctctctacaccgacgaccaggagtggtctagctggaagcgggtcggcgacaaggtcctgcacatcgagctgcgccggtgggccgacgtcctggtcatcgcgccgctctcggccaacaccctcgcaaaggtcgccggcgggctgtgcgacaacctcctcacctgcgtcgtgcgcgcctgggactacagcaagcccgtttacgtcgcgccggccatgaacaccttcatgtggggcaaccccttcacggcgcgccacctcgccgtcctgcgcgacctcggcatgtccgtcgtcccgccggtcaatggcgcgatggcggagccgtcggagatctgcaagaccctcatgctcttcttcggtccgcaacatctttagcagtcgccaagctcctcagttctttgctcctttatgtatgatgagatgtgtcccttgcttgacctagcatagcaatcttgccacaaaccacggggtagaattagatggcaattgttctacgcaatgcttgcaatgacatcatacatggcagtggagcgcttctcg

SEQ ID NO: 33464 - DNA, 2481 bp, Zea Mays
gccacggataaaggtggggaaaagatctttgacggctgtgttatccagtccagtatcctcgacggtcgacgccggcgcgagcagcaaatggccaccgcggcggtgacgatgaccatggcgacgcacaacccccgcgcccgcgcacccctccgcgtctgcgccgcctgggacatgaacccgggagccgccaccgtggccacgcccaagccctccaaggccaaggccaagccgccgccgccgcccgcgaccacaaccccggcccgcccgcctcctctgacccacgccgatctcttcgcgcgctccagcgaggcgcaaggaggggtgaagaagagcacatatatgggctttgagaaatggtggttgccacctgcgccagtggtgaagaaaccccgatcgctctacagtgcggtgtcactggcttacttgggagactgcatatatgaactttatgctcggaggcacttcttctttccacctctgagcatcaatgagtacaacaaacgtgtgatggatgttgtgaagtgtgagtcacaggaccttttgttgaacaagcttcttggagaagattttctaactgaagaagaaaggtccagggcctcgagcctattcagtaatgagccttgaagacgtactttgagttacatgattaagcacatttgtagggacatacttcgttgggggcggaatattgttagcagcaaaactcgcaccaggaagcgtgcaggaattgctgtctacaaccgggcatcttcactcgaaacactaattggatatctttacctcacaaatttcaaacggttggaacaactgatgtttcaattgggcttcacaagtggtgcctcatcacagcatattgcagacgagctgcgctcaagtttccagaaaacaacccccgcttcggccacacctccacaacctgcaacacagtgaacaggtctgaggtgtaacggtattggatcgtgctcccacaaaggttatctttagtcttcgaccctaacgacggagaaaggacgcaagagtcacggcgtattcagatgcaatagcgaggctgggagcagatggttagcgaacaccaccaccgtatattcatcagcatgtttctgcgaatggagcaacatagatatgctcaaactctgaagatatgcgaaaattaagactcagaatgtctgggctgacctggggtttgcgagtaggatagcttgatgtttgcaaagaagctcgagtgtgggagataggcccgacttggggtgttgtaatcgacctaaattcgtgtaggtaattaaccacttcatgttacttgttgccaaaaaaaaagtgatgattctgcttgtacacacgccttgtttttttttcctgttccctgtgacttctgttgaacagcaaaagctatgagcgctaagatgctgtgggaatgaatagaacaaaataccaaacctgtgggcgttactataaatccaattgatccaattgcttcattcggggtagtaattttacaaagcccagttatggggatacattggtttcaaaaaaaaaaactcgaaattctcccgcctatccaccttgaattggattggatttgcttcgagcagtcagtcttgccgaagtttttaggagttctccgacctcgtagtcaatcactcagtctcggagacacacattgccactgcgatggccgcccaccaggactcggcggcatcggggagcgggcctcctcgtcgtcctcgcgtcctcctggcagcctccggcagcgtggccgccatcaagttcgaggtcctctgccgcagcgtcgccgagtgggcggatgtccacgcggtggcgaccgcgtccgcgctggaattcatcgacgtggcctccttccccggcggcgtccctctctacaccgacgaccaggagtggtctagctggaagcgggtcggcgacaaggtcctgcacatcgagctgcgccggtgggccgacgtcctggtcatcgcgccgctctcggccaacaccctcgcaaaggtacgccgtacgcacgccagctggtcatcgcgctcgccctcaccggtcgccgctgacaactctgcctgctgccaggtcgccggcgggctgtgcgacaacctcctcacctgcgtcgtgcgcgcctgggactacagcaagcccgtttacgtcgcgccggccatgaacaccttcatgtggggcaaccccttcacggcgcgccacctcgccgtcctgcgcgacctcggcatgtccgtcgtcccgccggtcaatggcgcgatggcggagccgtcggagatctgcaagaccctcatgctcttcttcggtccgcaacatctttagcagtcgccaagctcctcagttctttgctcctttatgtatgatgagatgtgtcccttgcttgacctagcatagcaatcttgccacaaaccacggggtagaattagatggcaattgttctacgcaatgcttgcaatgacatcatacatggcagtggagcgcttctcg

SEQ ID NO: 33465 - DNA, 2406 bp, Zea Mays
gccacggataaaggtggggaaaagatctttgacggctgtgttatccagtccagtatcctcgacggtcgacgccggcgcgagcagcaaatggccaccgcggcggtgacgatgaccatggcgacgcacaacccccgcgcccgcgcacccctccgcgtctgcgccgcctgggacatgaacccgggagccgccaccgtggccacgcccaagccctccaaggccaaggccaagccgccgccgccgcccgcgaccacaaccccggcccgcccgcctcctctgacccacgccgatctcttcgcgcgctccagcgaggcgcaaggaggggtgaagaagagcacatatatgggctttgagaaatggtggttgccacctgcgccagtggtgaagaaaccccgatcgctctacagtgcggtgtcactggcttacttgggagactgcatatatgaactttatgctcggaggcacttcttctttccacctctgagcatcaatgagtacaacaaacgtgtgatggatgttgtgaagtgtgagtcacaggaccttttgttgaacaagcttcttggagaagattttctaactgaagaagaaagggacatacttcgttgggggcggaatattgttagcagcaaaactcgcaccaggaagcgtgcaggaattgctgtctacaaccgggcatcttcactcgaaacactaattggatatctttacctcacaaatttcaaacggttggaacaactgatgtttcaattgggcttcacaagtggtgcctcatcacagcatattgcagacgagctgcgctcaagtttccagaaaacaacccccgcttcggccacacctccacaacctgcaacacagtgaacaggtctgaggtgtaacggtattggatcgtgctcccacaaaggttatctttagtcttcgaccctaacgacggagaaaggacgcaagagtcacggcgtattcagatgcaatagcgaggctgggagcagatggttagcgaacaccaccaccgtatattcatcagcatgtttctgcgaatggagcaacatagatatgctcaaactctgaagatatgcgaaaattaagactcagaatgtctgggctgacctggggtttgcgagtaggatagcttgatgtttgcaaagaagctcgagtgtgggagataggcccgacttggggtgttgtaatcgacctaaattcgtgtaggtaattaaccacttcatgttacttgttgccaaaaaaaaagtgatgattctgcttgtacacacgccttgtttttttttcctgttccctgtgacttctgttgaacagcaaaagctatgagcgctaagatgctgtgggaatgaatagaacaaaataccaaacctgtgggcgttactataaatccaattgatccaattgcttcattcggggtagtaattttacaaagcccagttatggggatacattggtttcaaaaaaaaaaactcgaaattctcccgcctatccaccttgaattggattggatttgcttcgagcagtcagtcttgccgaagtttttaggagttctccgacctcgtagtcaatcactcagtctcggagacacacattgccactgcgatggccgcccaccaggactcggcggcatcggggagcgggcctcctcgtcgtcctcgcgtcctcctggcagcctccggcagcgtggccgccatcaagttcgaggtcctctgccgcagcgtcgccgagtgggcggatgtccacgcggtggcgaccgcgtccgcgctggaattcatcgacgtggcctccttccccggcggcgtccctctctacaccgacgaccaggagtggtctagctggaagcgggtcggcgacaaggtcctgcacatcgagctgcgccggtgggccgacgtcctggtcatcgcgccgctctcggccaacaccctcgcaaaggtacgccgtacgcacgccagctggtcatcgcgctcgccctcaccggtcgccgctgacaactctgcctgctgccaggtcgccggcgggctgtgcgacaacctcctcacctgcgtcgtgcgcgcctgggactacagcaagcccgtttacgtcgcgccggccatgaacaccttcatgtggggcaaccccttcacggcgcgccacctcgccgtcctgcgcgacctcggcatgtccgtcgtcccgccggtcaatggcgcgatggcggagccgtcggagatctgcaagaccctcatgctcttcttcggtccgcaacatctttagcagtcgccaagctcctcagttctttgctcctttatgtatgatgagatgtgtcccttgcttgacctagcatagcaatcttgccacaaaccacggggtagaattagatggcaattgttctacgcaatgcttgcaatgacatcatacatggcagtggagcgcttctcg

SEQ ID NO: 33466 - DNA, 2687 bp, Zea Mays
caacgcagttgttaaacgtattcgctcggatacgttttgctaatggcaggtggggcccgcaagtgccacggataaaggtggggaaaagatctttgacggctgtgttatccagtccagtatcctcgacggtcgacgccggcgcgagcagcaaatggccaccgcggcggtgacgatgaccatggcgacgcacaacccccgcgcccgcgcacccctccgcgtctgcgccgcctgggacatgaacccgggagccgccaccgtggccacgcccaagccctccaaggccaaggccaagccgccgccgccgcccgcgaccacaaccccggcccgcccgcctcctctgacccacgccgatctcttcgcgcgctccagcgaggcgcaaggaggggtgaagaagagcacatatatgggctttgagaaatggtggttgccacctgcgccagtggtgaagaaaccccgatcgctctacagtgcggtgtcactggcttacttgggagactgcatatatgaactttatgctcggaggcacttcttctttccacctctgagcatcaatgagtacaacaaacgtgtgatggatgttgtgaagtgtgagtcacaggaccttttgttgaacaagcttcttggagaagattttctaactgaagaagaaaggtgaatattagattgctaaacttatacaatttatgcaacattaccaggaatataatttctacagagaaatgttcgacggtagtcttaagatgcatgcctgcacttttacggaatgttagcattttgacatttgtcaagactagcataggtatttggatgttaccgtatttgtttttgggaaaatgctgtatctctctactttttctacactgtccaggtccagggcctcgagcctattcagtaatgagccttgaagacgtactttgagttacatgattaagcacatttgtagggacatacttcgttgggggcggaatattgttagcagcaaaactcgcaccaggaagcgtgcaggaattgctgtctacaaccgggcatcttcactcgaaacactaattggatatctttacctcacaaatttcaaacggttggaacaactgatgtttcaattgggcttcacaagtggtgcctcatcacagcatattgcagacgagctgcgctcaagtttccagaaaacaacccccgcttcggccacacctccacaacctgcaacacagtgaacaggtctgaggtgtaacggtattggatcgtgctcccacaaaggttatctttagtcttcgaccctaacgacggagaaaggacgcaagagtcacggcgtattcagatgcaatagcgaggctgggagcagatggttagcgaacaccaccaccgtatattcatcagcatgtttctgcgaatggagcaacatagatatgctcaaactctgaagatatgcgaaaattaagactcagaatgtctgggctgacctggggtttgcgagtaggatagcttgatgtttgcaaagaagctcgagtgtgggagataggcccgacttggggtgttgtaatcgacctaaattcgtgtaggtaattaaccacttcatgttacttgttgccaaaaaaaaagtgatgattctgcttgtacacacgccttgtttttttttcctgttccctgtgacttctgttgaacagcaaaagctatgagcgctaagatgctgtgggaatgaatagaacaaaataccaaacctgtgggcgttactataaatccaattgatccaattgcttcattcggggtagtaattttacaaagcccagttatggggatacattggtttcaaaaaaaaaaactcgaaattctcccgcctatccaccttgaattggattggatttgcttcgagcagtcagtcttgccgaagtttttaggagttctccgacctcgtagtcaatcactcagtctcggagacacacattgccactgcgatggccgcccaccaggactcggcggcatcggggagcgggcctcctcgtcgtcctcgcgtcctcctggcagcctccggcagcgtggccgccatcaagttcgaggtcctctgccgcagcgtcgccgagtgggcggatgtccacgcggtggcgaccgcgtccgcgctggaattcatcgacgtggcctccttccccggcggcgtccctctctacaccgacgaccaggagtggtctagctggaagcgggtcggcgacaaggtcctgcacatcgagctgcgccggtgggccgacgtcctggtcatcgcgccgctctcggccaacaccctcgcaaaggtcgccggcgggctgtgcgacaacctcctcacctgcgtcgtgcgcgcctgggactacagcaagcccgtttacgtcgcgccggccatgaacaccttcatgtggggcaaccccttcacggcgcgccacctcgccgtcctgcgcgacctcggcatgtccgtcgtcccgccggtcaatggcgcgatggcggagccgtcggagatctgcaagaccctcatgctcttcttcggtccgcaacatctttagcagtcgccaagctcctcagttctttgctcctttatgtatgatgagatgtgtcccttgcttgacctagcatagcaatcttgccacaaaccacggggtagaattagatggcaattgttctacgcaatgcttgcaatgacatcatacatggcagtggagcgcttctcg

SEQ ID NO: 33467 - DNA, 654 bp, Zea Mays
ctttgaccgtatgtctgacgacgacgacgtccaaggctcccagcactccagcagggtgggtggcggaggaggaccacatcgtcaacttcccaaccgtgcggctcaagcgaggcatgcccgtcaggctcaccagcaaagactagctagctagtcactacgacctgcttgtgcatgccatgcatgcagatttcagtcacgtcatatgcaatatatattggaccctggaggttgcacgtgtacagaagagaggatgcaggagctagcagatgatcggaggtatttaggcagactgaaattgaatcgaccgcgaagagtagcacactactataccacgagtatgatctgtagtagtagtaataagaggaatataatatcattagtgtggtagtatttacttattatactactctctcttttcgtttttatttatcgtgttttagtttaaaaatgaactagcgaggttagtcaataggcgtgcatgcatggcccatcatggtcatggatatataggccttgatggttatactagtataagcagtagtgttatgtcacaagggattactgggatctgggatgatgatccacaatcccatctaaaacgaaaagagttaataaagattgttaagtttactgctgggagcctgggactttgac

SEQ ID NO: 33468 - DNA, 659 bp, Zea Mays
attgatggatgagtcgtgcattagccaagttagcaggaatccaataatttgcgaatcgaggtgggtggcggaggaggaccacatcgtcaacttcccaaccgtgcggctcaagcgaggcatgcccgtcaggctcaccagcaaagactagctagctagtcactacgacctgcttgtgcatgccatgcatgcagatttcagtcacgtcatatgcaatatatattggaccctggaggttgcacgtgtacagaagagaggatgcaggagctagcagatgatcggaggtatttaggcagactgaaattgaatcgaccgcgaagagtagcacactactataccacgagtatgatctgtagtagtagtaataagaggaatataatatcattagtgtggtagtatttacttattatactactctctcttttcgtttttatttatcgtgttttagtttaaaaatgaactagcgaggttagtcaataggcgtgcatgcatggcccatcatggtcatggatatataggccttgatggttatactagtataagcagtagtgttatgtcacaagggattactgggatctgggatgatgatccacaatcccatctaaaacgaaaagagttaataaagattgttaagtttactgctgggagcctgggactttgac

SEQ ID NO: 33469 - DNA, 1021 bp, Zea Mays
cgtctttactgttagagaacaagggaggagaacatgcagctgaagaggcggaaaaccgacgtgggagagaccttgcagtggacggactacatgtcactgtcgttcacacaacatgtgataacggagacactgcggatggggaatatcatcaacgggatcatgcgcaaagcggtgcgggacgtggaggtgaaggggcacctcatccccaagggctggtgcgtgttcgtgtacttccggtcggtccacctcgacgacaagcgctacgacgagccctacaggttcaacccgtggaggtggaaggagaaggacacgagcaccatgggcttcaccccttttggcggtgggcagaggctgtgcccaggcctggatctggccaggctggaagcttccatctttctccatcacctggtgaccagcttcaggtgggtggcggaggaggaccacatcgtcaacttcccaaccgtgcggctcaagcgaggcatgcccgtcaggctcaccagcaaagactagctagctagtcactacgacctgcttgtgcatgccatgcatgcagatttcagtcacgtcatatgcaatatatattggaccctggaggttgcacgtgtacagaagagaggatgcaggagctagcagatgatcggaggtatttaggcagactgaaattgaatcgaccgcgaagagtagcacactactataccacgagtatgatctgtagtagtagtaataagaggaatataatatcattagtgtggtagtatttacttattatactactctctcttttcgtttttatttatcgtgttttagtttaaaaatgaactagcgaggttagtcaataggcgtgcatgcatggcccatcatggtcatggatatataggccttgatggttatactagtataagcagtagtgttatgtcacaagggattactgggatctgggatgatgatccacaatcccatctaaaacgaaaagagttaataaagattgttaagtttactgctgggagcctgggactttgac

SEQ ID NO: 33470 - DNA, 2186 bp, Zea Mays
cggctctccaccacttctctactctgtgcggctgtgcctgtcgtctctccctctctcctcgcctgtagtatgtagtgtactttctgcacttgccgattcgattccatgcttccattgacgccacgaccacgctacatataagtggcgtctgcggtgcctctcctccgaccctcgtcctcgtcctcgcgcagcctctgcttccatataactcgctcactgctcgcgcgcctcggtgggtgcaaacgcgcacagggacagaaacagagacagagccagccatgtcgaccaccaccctgcagctggttccgtggccgccggagccggcgccttcgggtggccgctggtgggcgagacgctggacttcgtgtcctgcgcctactcctcccgcccggaggccttcgtcgacaagcgccgcctgctgcacgggagcgcggtgttccggtcgcacctgttcggctcggcgacggtggtgacgtcggacgcggaggtgagccggttcgtgctgcacagcgacgcgcgcgccttcgtgccctggtacccgcggtcgctgacggagctcatgggcgagtcctccatcctgctcatcaacggcagcctgcagcggcgcgtgcacggcctcgtcggcgccttcttcaagtcgccgcagctcaaggcgcaggtcaccgccgacatgcagcgccgcctcgcgcccgcgctcgccgcctggaaggttcggtgcgcctccgcgccgccgctccgcatccaggaccacgccaagacgatcgtgttcgagatcctggtgaggggtctgatcgggctggaggcaggcccggagatgcagcagctcaagcaccagttccaggaattcattgtcggcctcatgtccctccccatcaagctgccggggactaggctctacaggtccctccaggccaagaagaggatggccacgctgatacaggggatcatacaggagaagaggcggcggcggagggccgcccttgaggatggcggagagggcgagggcgaggccggtcccccgcgcgacgtcatcgacgtgctcataagcggcggcgacgagctcaccgacgagctcatatccgacaacatgatcgacctgatgatccccgccgaggactctgtgcccgtgctcatcacgctcgccgtcaagtatctcagcgagtgcccgcttgctctgcaacaacttgaggaggagaacatgcagctgaagaggcggaaaaccgacgtgggagagaccttgcagtggacggactacatgtcactgtcgttcacacaacatgtgataacggagacactgcggatggggaatatcatcaacgggatcatgcgcaaagcggtgcgggacgtggaggtgaaggggcacctcatccccaagggctggtgcgtgttcgtgtacttccggtcggtccacctcgacgacaagcgctacgacgagccctacaggttcaacccgtggaggtggaaggagaaggacacgagcaccatgggcttcaccccttttggcggtgggcagaggctgtgcccaggcctggatctggccaggctggaagcttccatctttctccatcacctggtgaccagcttcaggtgggtggcggaggaggaccacatcgtcaacttcccaaccgtgcggctcaagcgaggcatgcccgtcaggctcaccagcaaagactagctagctagtcactacgacctgcttgtgcatgccatgcatgcagatttcagtcacgtcatatgcaatatatattggaccctggaggttgcacgtgtacagaagagaggatgcaggagctagcagatgatcggaggtatttaggcagactgaaattgaatcgaccgcgaagagtagcacactactataccacgagtatgatctgtagtagtagtaataagaggaatataatatcattagtgtggtagtatttacttattatactactctctcttttcgtttttatttatcgtgttttagtttaaaaatgaactagcgaggttagtcaataggcgtgcatgcatggcccatcatggtcatggatatataggccttgatggttatactagtataagcagtagtgttatgtcacaagggattactgggatctgggatgatgatccacaatcccatctaaaacgaaaagagttaataaagattgttaagtttactgctgggagcctgggactttgac

SEQ ID NO: 33471 - DNA, 1543 bp, Zea Mays
ctgcactttactatcgtcggcttcaaattttcagatcgtgttcgagatcctggtgaggggtctgatcgggctggaggcaggcccggagatgcagcagctcaagcaccagttccaggaattcattgtcggcctcatgtccctccccatcaagctgccggggactaggctctacaggtccctccaggccaagaagaggatggccacgctgatacaggggatcatacaggagaagaggcggcggcggagggccgcccttgaggatggcggagagggcgagggcgaggccggtcccccgcgcgacgtcatcgacgtgctcataagcggcggcgacgagctcaccgacgagctcatatccgacaacatgatcgacctgatgatccccgccgaggactctgtgcccgtgctcatcacgctcgccgtcaagtatctcagcgagtgcccgcttgctctgcaacaacttgagcgttgctaagaagactttctgtccaccttggtcagacttgacgccacgtgaatgaaacgatgggctcaatgaaacatctacatgaggagaacatgcagctgaagaggcggaaaaccgacgtgggagagaccttgcagtggacggactacatgtcactgtcgttcacacaacatgtgataacggagacactgcggatggggaatatcatcaacgggatcatgcgcaaagcggtgcgggacgtggaggtgaaggggcacctcatccccaagggctggtgcgtgttcgtgtacttccggtcggtccacctcgacgacaagcgctacgacgagccctacaggttcaacccgtggaggtggaaggagaaggacacgagcaccatgggcttcaccccttttggcggtgggcagaggctgtgcccaggcctggatctggccaggctggaagcttccatctttctccatcacctggtgaccagcttcaggtgggtggcggaggaggaccacatcgtcaacttcccaaccgtgcggctcaagcgaggcatgcccgtcaggctcaccagcaaagactagctagctagtcactacgacctgcttgtgcatgccatgcatgcagatttcagtcacgtcatatgcaatatatattggaccctggaggttgcacgtgtacagaagagaggatgcaggagctagcagatgatcggaggtatttaggcagactgaaattgaatcgaccgcgaagagtagcacactactataccacgagtatgatctgtagtagtagtaataagaggaatataatatcattagtgtggtagtatttacttattatactactctctcttttcgtttttatttatcgtgttttagtttaaaaatgaactagcgaggttagtcaataggcgtgcatgcatggcccatcatggtcatggatatataggccttgatggttatactagtataagcagtagtgttatgtcacaagggattactgggatctgggatgatgatccacaatcccatctaaaacgaaaagagttaataaagattgttaagtttactgctgggagcctgggactttgac

SEQ ID NO: 33472 - DNA, 1475 bp, Zea Mays
tggcacctcccacatctgcactttactatcgtcggcttcaaattttcagatcgtgttcgagatcctggtgaggggtctgatcgggctggaggcaggcccggagatgcagcagctcaagcaccagttccaggaattcattgtcggcctcatgtccctccccatcaagctgccggggactaggctctacaggtccctccaggccaagaagaggatggccacgctgatacaggggatcatacaggagaagaggcggcggcggagggccgcccttgaggatggcggagagggcgagggcgaggccggtcccccgcgcgacgtcatcgacgtgctcataagcggcggcgacgagctcaccgacgagctcatatccgacaacatgatcgacctgatgatccccgccgaggactctgtgcccgtgctcatcacgctcgccgtcaagtatctcagcgagtgcccgcttgctctgcaacaacttgaggaggagaacatgcagctgaagaggcggaaaaccgacgtgggagagaccttgcagtggacggactacatgtcactgtcgttcacacaacatgtgataacggagacactgcggatggggaatatcatcaacgggatcatgcgcaaagcggtgcgggacgtggaggtgaaggggcacctcatccccaagggctggtgcgtgttcgtgtacttccggtcggtccacctcgacgacaagcgctacgacgagccctacaggttcaacccgtggaggtggaaggagaaggacacgagcaccatgggcttcaccccttttggcggtgggcagaggctgtgcccaggcctggatctggccaggctggaagcttccatctttctccatcacctggtgaccagcttcaggtgggtggcggaggaggaccacatcgtcaacttcccaaccgtgcggctcaagcgaggcatgcccgtcaggctcaccagcaaagactagctagctagtcactacgacctgcttgtgcatgccatgcatgcagatttcagtcacgtcatatgcaatatatattggaccctggaggttgcacgtgtacagaagagaggatgcaggagctagcagatgatcggaggtatttaggcagactgaaattgaatcgaccgcgaagagtagcacactactataccacgagtatgatctgtagtagtagtaataagaggaatataatatcattagtgtggtagtatttacttattatactactctctcttttcgtttttatttatcgtgttttagtttaaaaatgaactagcgaggttagtcaataggcgtgcatgcatggcccatcatggtcatggatatataggccttgatggttatactagtataagcagtagtgttatgtcacaagggattactgggatctgggatgatgatccacaatcccatctaaaacgaaaagagttaataaagattgttaagtttactgctgggagcctgggactttgac

SEQ ID NO: 33473 - DNA, 1350 bp, Zea Mays
cgcacgttctgccagcccagtatcccagatccagtccactactccactcccgttcccccaagtctatcagccaaagcatcgcccgccgatggcgtctccgccccactcagtcgaggtccggacccccggcgactcgccgcggcccaccgccgctctcctctccccctccgtggccgcaccccagccctccaacgcctcccgcctcctgctcctcctcaccgcggccgtcgccgccgctacggccttcgtcctgctccgcccgcccatcaccgtcgtgaccgcggcgtccgccaccgcgcggccgctctccaagctctccaagcccgtggtgctgctcatttcctcggacggcttccgcttcgggtaccagtacaaggcccccctcccgcacatccgccgcctcttcgccaatggcacatccgccgccgagggcctgatccccgtcttccccacgctcaccttccccaaccactactccatcgtcaccggcctctacccctcctcccacggcatcatcaacaactacttccccgatcccatctcgggggactacttcaccatgaaaaaccacgatcccaagtggtggctcggggagccgctctgggccaccgctgccgcccagggggtcctgtctgccacattcttctggccgggttcggaggttacgaagggttcctggaactgccccgacaagtactgccgccactacaatggctcggtgccgtttgaggagagggtcgacaccatccttggctattttgatctcccgcctaaccaaatgccacagttcatgacgctgtactttgaggatcctgatcaccaggggcaccaggtgggtcctgacgatccctcaatcaccgatgcggtcgtacatatagatgagatgctcgggaggctcattgctggtttggaggctaggggaatgtttgaggatgtgaacattatattggtaggtgaccatggtatggttgggacctgcgataggaagcttgtgtttctcgaagagttggctccatggatcgagttgaagtcagattgggttctgtcagtgacgccattgctggcaatcaggccgccagatggtgtgtcgccagctgaggttgtggccaagatgaatgaggggcttggatctgggaaggtgaagaatggggaatatttgaaaatgtacttaaaagaggagttgcctactcgcctgcattattcagagagttacaggatcccaccaatcatcgggctggttggggaagggtataagatcgagatgaagcgctccaagagaaatgagtgtggaggagcccatgggttcattgtcattaatttgaatatggacaaaaaaaagagacctaaaac

SEQ ID NO: 33474 - DNA, 1389 bp, Zea Mays
tttccttcccacgtcgcccgcccatggagggacagcttcatcacgcacagggccttctgcgacgcgctcgcggaggagagcgcgagggcggtgaccgccgccgcggcggtcgcgggccagcaccatccgggaccggccgggatgctcttctcgcaggccgccggcgggggcgacggcggcgcggggttacacctgccgccaggcgtgcttgacccgtcgcagacgctgggcggcggccacggcatgtcgttgcaagagctgtgcctgaagagagagcagcagcagcagcagcagttcgcgccgtcgtcgtggctcacggcgcaacatcaccagcaggagctggagctgcccggatcggccgtgttcggattggcgaggccgctagaccagcaggagtacatggggaactccacaacggagagcacggcgggcctcagcggcttcgtcgggttctcgccgtccgccgccggtggagcggcggcctcggcgcacatgtcggcgaccgcgctgctgcagaaagcagcgcagatgggtgcaacgctgagccgaccgtcgaaccagggacagatggcgggcactcacagcagcagcaccaccaatgctggcactggcaccgccaacgccgcagcagctgctgcaagcaacgtgcctggcactggcgctgctggtgccctcggcttcgggtcaccacatcactttggagcggaggagaggaccacccggccggctgatcgcgacgccggcaatggcagcggcaatgccgccgccgtagcggccggaggcggcaatgaaggcctcaccagggacttcttggggctgagggccttctcccacggcgacatactcagcatggccggtttcgacccctgcatgtcgtcggcgtcgccggcggcgtacgagcaagggcaccaccacccgagcagcaagcagtggcatgtctagtctagacatcattacatcgtcatggcatcgtcgtcagtactgatcagtacaatacatcatcatggcagctcgccatatatggatgaatcattactatatatattctgaatgagctgcagcacgtacgcatgcatggactttgctcgatcatattgggtaagtcggatcatcgatcgaatccacttcacttttttgcttggctcttattttgatgttcatttgggggtgtactacggttatgggcatttcagttcttatatataaacttcattcattcaagaggtgcaatatatatatggaatgtttttgctattatttatatatcatagtcaacaatccgtgttcttagccagaatatatgcatgtgtttgtagtatgtagctacttaatctgtaaagcttcgtagctaatttgtacgagaagctctactacgtactactcaagttc

SEQ ID NO: 33475 - DNA, 1970 bp, Zea Mays
ggtgccggtgccccgtgccccgcaccgggcggcggcggcgaacgacgggagcggagacaaaaatcaaatcaaccaacagcgacgtcagcgggcgccacgggacagcgtgcgtggtgatgacgccacggcgcatgctttcccgtcgtgctgacgtaggacggcggtgcagcagcgcaagtactgtacagcgttgcattgcctgtctgtctccatttcggtcaattgtgaggcaatcagatttctttcgccacctctccactcgactagtactagaccggctggcaccgcttcgtggggggtgacgtggcaccgcgctggcctccctttccgtcccggccacgtgacgcaacctccggccccacgcgtcctcgtcacagcccgcgcctgacgtcaccttcccctcacccggcgggcatatgatggtgtgccgtgcccggctatatatgtgctgcgggcacgcgacgcctttcctcgctccccgcagccggcaggcgaggtcgtccctttcccttccggtccttttggcccgctgtagctaataagtagtgtactccgtaaccagcagcagcatgcaggcggtgggcatccggcgtggtctgaccatcgacccggccggggaggaggaggcccccgcggcgcgcgtgtggcggctggtccgcgagagccccgtggtgatcttcgcccggcgcggctgctgcatggcgcacgtgatgaggcggctgctggcggcggtgggcgcgcacgccaccgtgatcgagctggacgccggcgccgcggaggagcaggagctggcggcggcggtcgagggcggcggcgtcccggcgctcttcgtgggcggcgaccccgtcggtggcctcgagggcctcatggggctccacctcagcggccgcctcgtgccccggctcagggagctcggcgccctctgcgcctagctgagctcctccggtgctccgtccgtctgtctgtcggtccgcgtgccgggcgcccggactcgcgaagattcgcagtcgcatgccatgtgctggctgtacctgtacatactactacgctacgctagctacagggggggaaacggcagtgcaggaggagcagccagcaagcaaagcttctgtttttctttttgtttttgtttttgctaatactgtactccagagattcaaatcgaaaggtgcgtggatgtagtttagctagcataaaactatggcacatgattgaattgcagtgcagtgcagccgtgcgtgtatagtagcgacaaattaaagccgattattattcttatactgtatgcccggaggaccccggaagataacatacaaaaaccctggctagctttgcttaattagcgccgggccggggggcgagggcgacgtctagtgcagtgtacgcatgcacttatttattagtggaggccgacgtcgtcaccgcgatcctaatggcgccccgcgcccccggggccggggtgaggtgacgcgtgacggcggcaaaggcgatggggatctcttgctcctccattctttccctcggccgatctggaccgtcggtgttgcatggacgagacgatctctgctcgccgccgccgccggatgggcatctggggcagccgcggcccgcggggctacagctacacgtccgcgtcgcgacgactggcgcgagggagggagacgaacgacgggcgccgccgaatcgagggcgaaggtgggttttgggtcacatcgatggatgggcggccgtgcacaggatcccacactgtactacgcccgtgtactacgcgagaccggcccacagttctagcgttggatccaagggggtagggccgtagggggtagtagtgtgcacaacactctgctccatccgcgcaccccaataataatggggcagcatgcatgcagtaggaatacggcagtattctgaagcctagactacgtatttatttgtttgtttatactatctatttagcacggctccgtttc

SEQ ID NO: 33476 - DNA, 193 bp, Zea Mays
tggccagagctgagcgagcagagaggccagaggcagagagtttcctgggctcactctctccatctttgtacctggacgactggacaaggttctctcctgtgggctgtggcgaaggtgccaagcagatgcgtgccatgctcgctcggcacgcagtcgtcgtcgggtcaggttgcagttgcagcgacgcgaatgc

SEQ ID NO: 33477 - DNA, 653 bp, Zea Mays
ccagtgtagaagctgaagcatatgactggctaaccaacaacaccgtctcttaaaatctaagcaaaattcattgtcacaaacccacaatcgtgttgcagatagacatgcggtgggagtagtatgcaggctacgtctacgtacacaagtgtggcgtagcacaagtctaatgcagacgcaaacaagcccacatgctcgctaccatccagcaggcagcagcgtcaccagcgtgtgcatgcgacgattacaattcagcagggccacggactggtcgaagctggagctggcagccgtacgtagcgggcagttagctagccacgtcaagggtcgaagacggcggcgccgcacctgcacttccacccgacgggctcgtagttggcgcagcgcgggcggaggcggcgctccgccgcggcgccggcgccggcgcgcacctgcacggccttgcacggcgcgcacgcgccgcacttgcggtcgcagcacggcggcctggagcccagcctgctaagctgctgccgctgctctgcgtgctcgccgccatcgatctgtcagaaacacacacggtcgccagcatcatcagcgcgtgtcgttgttcttgttcccagcgcacgcacaggtgcgtactactgcatcagcagcagagaagcgcgagggcgaga

SEQ ID NO: 33478 - DNA, 2291 bp, Zea Mays
ctcttatcaatgatgatgggatgcttgtgatatcgacagttcctggttctccaccaaagctgtgcatcaaggctgttgcattagaaaacttctgtccaagagcattttcattgctgtcgatcgccggactatctgggttttgctaggccatgcagtgtcctagaaggcctattaattcaatttgcagcagactgaaagctaaagaagtccgtattagagtctgggctcatcaattagctgctcattctccagtacttcattcccttggtcccctacaactccgacctgactggctaattgctgctggagaaaggaacaaaggagaatggagcatgtagtggatgcgccaatgcaggtttcagttcctcaagtatatgttcctatcggacccctttgttcctcaagtgagtgatggcgctggggttgtcttactaagcgagacatttgcactgaacaattgcagttccgctgaactcatagagttcatgtcaatctctctattgaactttaatttttgaaagtttggtacagagattttcataaaaaaaacagatattgcctgattctgttggcacctgatttcctgaatttcatttcgaaaaaagagaagaaacagatatggtctcattctattttatttcaatattatcatgtggtatataagtcttatcacacttgtgtgctgcccatgggagcggtagttcagaagcagttgaacctggagttggtgttccagatcattttctctgaattacatcatattatctgtaccaggtccagatgcaaccagggcagccatcgatgtctgcgggtttattatcaaagatctttggttagggagattgaagcccggttaaaagccaagtgtgacacattagctgatctatttgctatggatgaaagattgttttgagcacatttttagtaaggtctcgttaagcgccgcgtttgagcaccatgtccttccctggatgcacagaagctactgacttcgtggttacaatcgccctttgctttacctcctcccatgatggaaaggttgaggtgagaatggaactattgatggccaaggcattgtgtggtgggatatgtggaagaaaggtacactgccctatacaagacctcaccaattgatctatttatgtggtgggatatgtggaagaaaggtttgtgatggaggtgataaaaactttgtggtgcgaaagggcctctagcgtaatggttaaggcttccaagtagcaactccaggtcccaggttcgatctctctcgggggcgaattttgggcttggttaaaataatcctctcgttgtgtcccgcccggtctcgggggtcgatatcctgcgcgccaccctccgtctgggctgttgcagagtggcctgttgatcggcccgttaaggctgggggcagagttcggggttttttttttcggtcgggaccatgtttcggtctcttcttaatataatattgagagggcagtcttttcatcccagccggagccgagttgataaaaactttgtggtgatcaatcagaagggcattgaccctccatctttggatctctttgctagagcgggggtaatctctcctctatttggtggttacatgacctaagttcattttgaaccctgaatggatttagattttcatttgagaacgtgaatctcatgaagttaagggttgaagaaggcattgactgattaaaactgctctgaaatgatcatttatgctcagattattgctcttcgagctatcacgtggtggtggagctatcaattcagttgatgacttgactgaaaattgtctaggctcatctgatcttgtctatgagtatgttctcgtagaagaaaagtacacatttgtggggaatgtgaaaaatccttgctcttgtactatactgattaaaggattcaaggatgatgttctgttaagaacacagttgaggatgaagcagttgtgttgttatcatccgtaaatttctttgtccaggaattaggaagaataaatttgtgttgatactgtgaaggtaccaggccgacacaaatttatttgataaaatacgtgttcccaaatgtgtgtatgtacgatcaggatcgaataatttatgtcctgtcccaatgtacagaggcactaaggaaacctgtcgcggttcacagcgaacgggtcttgaactcttggctcgctcattttaatattattatgtaaatttcctatcaagaaacgttcctgtgacattacatcgagaagacgagaatcatgactgcagaaatacatctttattcactactgtatc

SEQ ID NO: 33479 - DNA, 3165 bp, Zea Mays
ctccgccccgccacgcgttcatccaggtcgggggtccgtacgatgcaaaaaaatcgcgatgagtccaccacgactccaagcagctgcggacgcgccgctctaaccggagatccgttaagagtccgccgcccccatctcagcgcctgagtcagccgttctctccccgtgctcgcagccactggtttccgcgggtctagggttcgtggaggcagcgtggagcttagggtttcggcgggatgagctaccggaaggggttgaaggtttgggtggagaagggggaagggtgggtagaggcggtggtgacggaagcgaaggaccacgccgtcgccgtgctcacgagccagcgggaaaagacttctgcaatccgcgatgtgcaggcacggcagaggacgatggcaactgtccagcgcacacttcaggcaatggatgaggacaacatcagagatgagtctagaactggaaggctcgtcgtcttggcggcgctggccgccggcgccatcagcatcggcaagcgcatgcccctgctggcgccatctcccccgtcatcttggcggcgctggccgccggtgccatcagcgtcggcaagactgtcatagatgagattttcatgttctgaagactgaattcaagatgatgggatgcttgtgatatcgacagttcctggttctccaccaaagctgtgcatcaaggctgttgcattagaaaacttctgtccaagagcattttcattgctgtcgatcgccggactatctgggttttgctaggccatgcagtgtcctagaaggcctattaattcaatttgcagcagactgaaagctaaagaagtccgtattagagtctgggctcatcaattagctgctcattctccagtacttcattcccttggtcccctacaactccgacctgactggctaattgctgctggagaaaggaacaaaggagaatggagcatgtagtggatgcgccaatgcaggtttcagttcctcaagtatatgttcctatcggacccctttgttcctcaagtgagtgatggcgctggggttgtcttactaagcgagacatttgcactgaacaattgcagttccgctgaactcatagagttcatgtcaatctctctattgaactttaatttttgaaagtttggtacagagattttcataaaaaaaacagatattgcctgattctgttggcacctgatttcctgaatttcatttcgaaaaaagagaagaaacagatatggtctcattctattttatttcaatattatcatgtggtatataagtcttatcacacttgtgtgctgcccatgggagcggtagttcagaagcagttgaacctggagttggtgttccagatcattttctctgaattacatcatattatctgtaccaggtccagatgcaaccagggcagccatcgatgtctgcggtaagaacagttcaaatttttttctaagtcggccttgtttgatctgataaacgtaattccaatatgtaccttgcaaaatatggattaacatttttgctgaagagaaaatttaaataaaataaaataaaatggtcatctcaaccttgaagcatctgcttggtatggattgcagaacagggtttattatcaaagatctttggttagggagattgaagcccggttaaaagccaagtgtgacacattagctgatctatttgctatggatgaaaggtatggattaaaggtgtcagttactaaaacttgggatgaatagatattaaatttgcatataaattgtcaccatgtcttccatcagattgttttgagcacatttttagtaaggtctcgttaagcgccgcgtttgagcaccatgtccttccctggatgcacagaagctactgacttcgtggttacaatcgccctttgctttacctcctcccatgatggaaaggtgagaatggaactattgatggccaaggcattgtgtggtgggatatgtggaagaaaggtacactgccctatacaagacctcaccaattgatctatttatgtggtgggatatgtggaagaaaggtttgtgatggaggtgataaaaactttgtggtgcgaaagggcctctagcgtaatggttaaggcttccaagtagcaactccaggtcccaggttcgatctctctcgggggcgaattttgggcttggttaaaataatcctctcgttgtgtcccgcccggtctcgggggtcgatatcctgcgcgccaccctccgtctgggctgttgcagagtggcctgttgatcggcccgttaaggctgggggcagagttcggggttttttttttcggtcgggaccatgtttcggtctcttcttaatataatattgagagggcagtcttttcatcccagccggagccgagttgataaaaactttgtggtgatcaatcagaagggcattgaccctccatctttggatctctttgctagagcgggggtaatctctcctctatttggtggttacatgacctaagttcattttgaaccctgaatggatttagattttcatttgagaacgtgaatctcatgaagttaagggttgaagaaggcattgactgattaaaactgctctgaaatgatcatttatgctcagattattgctcttcgagctatcacgtggtggtggagctatcaattcagttgatgacttgactgaaaattgtctaggctcatctgatcttgtctatgagtatgttctcgtagaagaaaagtacacatttgtggggaatgtgaaaaatccttgctcttgtactatactgattaaaggattcaaggatgatgttctgttaagaacacagttgaggatgaagcagttgtgttgttatcatccgtaaatttctttgtccaggaattaggaagaataaatttgtgttgatactgtgaaggtaccaggccgacacaaatttatttgataaaatacgtgttcccaaatgtgtgtatgtacgatcaggatcgaataatttatgtcctgtcccaatgtacagaggcactaaggaaacctgtcgcggttcacagcgaacgggtcttgaactcttggctcgctcattttaatattattatgtaaatttcctatcaagaaacgttcctgtgacattacatcgagaagacgagaatcatgactgcagaaatacatctttattcactactgtatc

SEQ ID NO: 33480 - DNA, 2445 bp, Zea Mays
ctccgccccgccacgcgttcatccaggtcgggggtccgtacgatgcaaaaaaatcgcgatgagtccaccacgactccaagcagctgcggacgcgccgctctaaccggagatccgttaagagtccgccgcccccatctcagcgcctgagtcagccgttctctccccgtgctcgcagccactggtttccgcgggtctagggttcgtggaggcagcgtggagcttagggtttcggcgggatgagctaccggaaggggttgaaggtttgggtggagaagggggaagggtgggtagaggcggtggtgacggaagcgaaggaccacgccgtcgccgtgctcacgagccagcgggaaaagacttctgcaatccgcgatgtgcaggcacggcagaggacgatggcaactgtccagcgcacacttcaggcaatggatgaggacaacatcagagatgagtctagaactggaaggctcgtcgtcttggcggcgctggccgccggcgccatcagcatcggcaagcgcatgcccctgctggcgccatctcccccgtcatcttggcggcgctggccgccggtgccatcagcgtcggcaagactgtcatagatgagattttcatgttctgaagactgaattcaagatgatgggatgcttgtgatatcgacagttcctggttctccaccaaagctgtgcatcaaggctgttgcattagaaaacttctgtccaagagcattttcattgctgtcgatcgccggactatctgggttttgctaggccatgcagtgtcctagaaggcctattaattcaatttgcagcagactgaaagctaaagaagtccgtattagagtctgggctcatcaattagctgctcattctccagtacttcattcccttggtcccctacaactccgacctgactggctaattgctgctggagaaaggaacaaaggagaatggagcatgtagtggatgcgccaatgcaggtttcagttcctcaagtatatgttcctatcggacccctttgttcctcaagtccagatgcaaccagggcagccatcgatgtctgcgaacagggtttattatcaaagatctttggttagggagattgaagcccggttaaaagccaagtgtgacacattagctgatctatttgctatggatgaaagattgttttgagcacatttttagtaaggtctcgttaagcgccgcgtttgagcaccatgtccttccctggatgcacagaagctactgacttcgtggttacaatcgccctttgctttacctcctcccatgatggaaaggttgaggtgagaatggaactattgatggccaaggcattgtgtggtgggatatgtggaagaaaggtacactgccctatacaagacctcaccaattgatctatttatgtggtgggatatgtggaagaaaggtttgtgatggaggtgataaaaactttgtggtgcgaaagggcctctagcgtaatggttaaggcttccaagtagcaactccaggtcccaggttcgatctctctcgggggcgaattttgggcttggttaaaataatcctctcgttgtgtcccgcccggtctcgggggtcgatatcctgcgcgccaccctccgtctgggctgttgcagagtggcctgttgatcggcccgttaaggctgggggcagagttcggggttttttttttcggtcgggaccatgtttcggtctcttcttaatataatattgagagggcagtcttttcatcccagccggagccgagttgataaaaactttgtggtgatcaatcagaagggcattgaccctccatctttggatctctttgctagagcgggggtaatctctcctctatttggtggttacatgacctaagttcattttgaaccctgaatggatttagattttcatttgagaacgtgaatctcatgaagttaagggttgaagaaggcattgactgattaaaactgctctgaaatgatcatttatgctcagattattgctcttcgagctatcacgtggtggtggagctatcaattcagttgatgacttgactgaaaattgtctaggctcatctgatcttgtctatgagtatgttctcgtagaagaaaagtacacatttgtggggaatgtgaaaaatccttgctcttgtactatactgattaaaggattcaaggatgatgttctgttaagaacacagttgaggatgaagcagttgtgttgttatcatccgtaaatttctttgtccaggaattaggaagaataaatttgtgttgatactgtgaagaggcactaaggaaacctgtcgcggttcacagcgaacgggtcttgaactcttggctcgctcattttaatattattatgtaaatttcctatcaagaaacgttcctgtgacattacatcgagaagacgagaatcatgactgcagaaatacatctttattcactactgtatc

SEQ ID NO: 33481 - DNA, 1994 bp, Zea Mays
ctccgccccgccacgcgttcatccaggtcgggggtccgtacgatgcaaaaaaatcgcgatgagtccaccacgactccaagcagctgcggacgcgccgctctaaccggagatccgttaagagtccgccgcccccatctcagcgcctgagtcagccgttctctccccgtgctcgcagccactggtttccgcgggtctagggttcgtggaggcagcgtggagcttagggtttcggcgggatgagctaccggaaggggttgaaggtttgggtggagaagggggaagggtgggtagaggcggtggtgacggaagcgaaggaccacgccgtcgccgtgctcacgagccagcgggaaaaggcacggcagaggacgatggcaactgtccagcgcacacttcaggcaatggatgaggacaacatcagagatgagtctagaactggaaggctcgtcgtcttggcggcgctggccgccggcgccatcagcatcggcaagcgcatgcccctgctggcgccatctcccccgtcatcttggcggcgctggccgccggtgccatcagcgtcggcaagactgtcatagatgagattttcatgttctgaagactgaattcaagatgatgggatgcttgtgatatcgacagttcctggttctccaccaaagctgtgcatcaaggctgttgcattagaaaacttctgtccaagagcattttcattgctgtcgatcgccggactatctgggttttgctaggccatgcagtgtcctagaaggcctattaattcaatttgcagcagactgaaagctaaagaagtccgtattagagtctgggctcatcaattagctgctcattctccagtacttcattcccttggtcccctacaactccgacctgactggctaattgctgctggagaaaggaacaaaggagaatggagcatgtagtggatgcgccaatgcaggtccagatgcaaccagggcagccatcgatgtctgcgaacagggtttattatcaaagatctttggttagggagattgaagcccggttaaaagccaagtgtgacacattagctgatctatttgctatggatgaaagattgttttgagcacatttttagtaaggtctcgttaagcgccgcgtttgagcaccatgtccttccctggatgcacagaagctactgacttcgtggttacaatcgccctttgctttacctcctcccatgatggaaaggttgaggtgagaatggaactattgatggccaaggcattgtgtggtgggatatgtggaagaaaggtacactgccctatacaagacctcaccaattgatctatttatgtggtgggatatgtggaagaaaggtttgtgatggaggtgataaaaactttgtggtgcgaaagggcctctagcgtaatggttaaggcttccaagtagcaactccaggtcccagattattgctcttcgagctatcacgtggtggtggagctatcaattcagttgatgacttgactgaaaattgtctaggctcatctgatcttgtctatgagtatgttctcgtagaagaaaagtacacatttgtggggaatgtgaaaaatccttgctcttgtactatactgattaaaggattcaaggatgatgttctgttaagaacacagttgaggatgaagcagttgtgttgttatcatccgtaaatttctttgtccaggaattaggaagaataaatttgtgttgatactgtgaaggtaccaggccgacacaaatttatttgataaaatacgtgttcccaaatgtgtgtatgtacgatcaggatcgaataatttatgtcctgtcccaatgtacagaggcactaaggaaacctgtcgcggttcacagcgaacgggtcttgaactcttggctcgctcattttaatattattatgtaaatttcctatcaagaaacgttcctgtgacattacatcgagaagacgagaatcatgactgcagaaatacatctttattcactactgtatc

SEQ ID NO: 33482 - DNA, 2067 bp, Zea Mays
ctccgccccgccacgcgttcatccaggtcgggggtccgtacgatgcaaaaaaatcgcgatgagtccaccacgactccaagcagctgcggacgcgccgctctaaccggagatccgttaagagtccgccgcccccatctcagcgcctgagtcagccgttctctccccgtgctcgcagccactggtttccgcgggtctagggttcgtggaggcagcgtggagcttagggtttcggcgggatgagctaccggaaggggttgaaggtttgggtggagaagggggaagggtgggtagaggcggtggtgacggaagcgaaggaccacgccgtcgccgtgctcacgagccagcgggaaaagacttctgcaatccgcgatgtgcaggcacggcagaggacgatggcaactgtccagcgcacacttcaggcaatggatgaggacaacatcagagatgagtctagaactggaaggctcgtcgtcttggcggcgctggccgccggcgccatcagcatcggcaagcgcatgcccctgctggcgccatctcccccgtcatcttggcggcgctggccgccggtgccatcagcgtcggcaagactgtcatagatgagattttcatgttctgaagactgaattcaagatgatgggatgcttgtgatatcgacagttcctggttctccaccaaagctgtgcatcaaggctgttgcattagaaaacttctgtccaagagcattttcattgctgtcgatcgccggactatctgggttttgctaggccatgcagtgtcctagaaggcctattaattcaatttgcagcagactgaaagctaaagaagtccgtattagagtctgggctcatcaattagctgctcattctccagtacttcattcccttggtcccctacaactccgacctgactggctaattgctgctggagaaaggaacaaaggagaatggagcatgtagtggatgcgccaatgcaggtttcagttcctcaagtatatgttcctatcggacccctttgttcctcaagtccagatgcaaccagggcagccatcgatgtctgcgaacagggtttattatcaaagatctttggttagggagattgaagcccggttaaaagccaagtgtgacacattagctgatctatttgctatggatgaaagattgttttgagcacatttttagtaaggtctcgttaagcgccgcgtttgagcaccatgtccttccctggatgcacagaagctactgacttcgtggttacaatcgccctttgctttacctcctcccatgatggaaaggttgaggtgagaatggaactattgatggccaaggcattgtgtggtgggatatgtggaagaaaggtacactgccctatacaagacctcaccaattgatctatttatgtggtgggatatgtggaagaaaggtttgtgatggaggtgataaaaactttgtggtgcgaaagggcctctagcgtaatggttaaggcttccaagtagcaactccaggtcccagattattgctcttcgagctatcacgtggtggtggagctatcaattcagttgatgacttgactgaaaattgtctaggctcatctgatcttgtctatgagtatgttctcgtagaagaaaagtacacatttgtggggaatgtgaaaaatccttgctcttgtactatactgattaaaggattcaaggatgatgttctgttaagaacacagttgaggatgaagcagttgtgttgttatcatccgtaaatttctttgtccaggaattaggaagaataaatttgtgttgatactgtgaaggtaccaggccgacacaaatttatttgataaaatacgtgttcccaaatgtgtgtatgtacgatcaggatcgaataatttatgtcctgtcccaatgtacagaggcactaaggaaacctgtcgcggttcacagcgaacgggtcttgaactcttggctcgctcattttaatattattatgtaaatttcctatcaagaaacgttcctgtgacattacatcgagaagacgagaatcatgactgcagaaatacatctttattcactactgtatc

SEQ ID NO: 33483 - DNA, 3081 bp, Zea Mays
tctcactccgccccgccacgcgttcatccaggtcgggggtccgtacgatgcaaaaaaatcgcgatgagtccaccacgactccaagcagctgcggacgcgccgctctaaccggagatccgttaagagtccgccgcccccatctcagcgcctgagtcagccgttctctccccgtgctcgcagccactggtttccgcgggtctagggttcgtggaggcagcgtggagcttagggtttcggcgggatgagctaccggaaggggttgaaggtttgggtggagaagggggaagggtgggtagaggcggtggtgacggaagcgaaggaccacgccgtcgccgtgctcacgagccagcgggaaaaggcacggcagaggacgatggcaactgtccagcgcacacttcaggcaatggatgaggacaacatcagagatgagtctagaactggaaggctcgtcgtcttggcggcgctggccgccggcgccatcagcatcggcaagcgcatgcccctgctggcgccatctcccccgtcatcttggcggcgctggccgccggtgccatcagcgtcggcaagactgtcatagatgagattttcatgttctgaagactgaattcaagatgatgggatgcttgtgatatcgacagttcctggttctccaccaaagctgtgcatcaaggctgttgcattagaaaacttctgtccaagagcattttcattgctgtcgatcgccggactatctgggttttgctaggccatgcagtgtcctagaaggcctattaattcaatttgcagcagactgaaagctaaagaagtccgtattagagtctgggctcatcaattagctgctcattctccagtacttcattcccttggtcccctacaactccgacctgactggctaattgctgctggagaaaggaacaaaggagaatggagcatgtagtggatgcgccaatgcaggtttcagttcctcaagtatatgttcctatcggacccctttgttcctcaagtgagtgatggcgctggggttgtcttactaagcgagacatttgcactgaacaattgcagttccgctgaactcatagagttcatgtcaatctctctattgaactttaatttttgaaagtttggtacagagattttcataaaaaaaacagatattgcctgattctgttggcacctgatttcctgaatttcatttcgaaaaaagagaagaaacagatatggtctcattctattttatttcaatattatcatgtggtatataagtcttatcacacttgtgtgctgcccatgggagcggtagttcagaagcagttgaacctggagttggtgttccagatcattttctctgaattacatcatattatctgtaccaggtccagatgcaaccagggcagccatcgatgtctgcggtaagaacagttcaaatttttttctaagtcggccttgtttgatctgataaacgtaattccaatatgtaccttgcaaaatatggattaacatttttgctgaagagaaaatttaaataaaataaaataaaatggtcatctcaaccttgaagcatctgcttggtatggattgcagaacagggtttattatcaaagatctttggttagggagattgaagcccggttaaaagccaagtgtgacacattagctgatctatttgctatggatgaaaggtatggattaaaggtgtcagttactaaaacttgggatgaatagatattaaatttgcatataaattgtcaccatgtcttccatcagattgttttgagcacatttttagtaaggtctcgttaagcgccgcgtttgagcaccatgtccttccctggatgcacagaagctactgacttcgtggttacaatcgccctttgctttacctcctcccatgatggaaaggtgagaatggaactattgatggccaaggcattgtgtggtgggatatgtggaagaaaggtttgtgatggaggtgataaaaactttgtggtgcgaaagggcctctagcgtaatggttaaggcttccaagtagcaactccaggtcccaggttcgatctctctcgggggcgaattttgggcttggttaaaataatcctctcgttgtgtcccgcccggtctcgggggtcgatatcctgcgcgccaccctccgtctgggctgttgcagagtggcctgttgatcggcccgttaaggctgggggcagagttcggggttttttttttcggtcgggaccatgtttcggtctcttcttaatataatattgagagggcagtcttttcatcccagccggagccgagttgataaaaactttgtggtgatcaatcagaagggcattgaccctccatctttggatctctttgctagagcgggggtaatctctcctctatttggtggttacatgacctaagttcattttgaaccctgaatggatttagattttcatttgagaacgtgaatctcatgaagttaagggttgaagaaggcattgactgattaaaactgctctgaaatgatcatttatgctcagattattgctcttcgagctatcacgtggtggtggagctatcaattcagttgatgacttgactgaaaattgtctaggctcatctgatcttgtctatgagtatgttctcgtagaagaaaagtacacatttgtggggaatgtgaaaaatccttgctcttgtactatactgattaaaggattcaaggatgatgttctgttaagaacacagttgaggatgaagcagttgtgttgttatcatccgtaaatttctttgtccaggaattaggaagaataaatttgtgttgatactgtgaaggtaccaggccgacacaaatttatttgataaaatacgtgttcccaaatgtgtgtatgtacgatcaggatcgaataatttatgtcctgtcccaatgtacagaggcactaaggaaacctgtcgcggttcacagcgaacgggtcttgaactcttggctcgctcattttaatattattatgtaaatttcctatcaagaaacgttcctgtgacattacatcgagaagacgagaatcatgactgcagaaatacatctttattcactactgtatc

SEQ ID NO: 33484 - DNA, 2142 bp, Zea Mays
cgcgcatccacgcccccgccgtctcactccgccccgccacgcgttcatccaggtcgggggtccgtacgatgcaaaaaaatcgcgatgagtccaccacgactccaagcagctgcggacgcgccgctctaaccggagatccgttaagagtccgccgcccccatctcagcgcctgagtcagccgttctctccccgtgctcgcagccactggtttccgcgggtctagggttcgtggaggcagcgtggagcttagggtttcggcgggatgagctaccggaaggggttgaaggtttgggtggagaagggggaagggtgggtagaggcggtggtgacggaagcgaaggaccacgccgtcgccgtgctcacgagccagcgggaaaaggcacggcagaggacgatggcaactgtccagcgcacacttcaggcaatggatgaggacaacatcagagatgagtctagaactggaaggctcgtcgtcttggcggcgctggccgccggcgccatcagcatcggcaagcgcatgcccctgctggcgccatctcccccgtcatcttggcggcgctggccgccggtgccatcagcgtcggcaagactgtcatagatgagattttcatgttctgaagactgaattcaagatgatgggatgcttgtgatatcgacagttcctggttctccaccaaagctgtgcatcaaggctgttgcattagaaaacttctgtccaagagcattttcattgctgtcgatcgccggactatctgggttttgctaggccatgcagtgtcctagaaggcctattaattcaatttgcagcagactgaaagctaaagaagtccgtattagagtctgggctcatcaattagctgctcattctccagtacttcattcccttggtcccctacaactccgacctgactggctaattgctgctggagaaaggaacaaaggagaatggagcatgtagtggatgcgccaatgcaggtttcagttcctcaagtatatgttcctatcggacccctttgttcctcaattcagaagcagttgaacctggagttggtgttccagatcattttctctgaattacatcatattatctgtaccaggtccagatgcaaccagggcagccatcgatgtctgcgaacagggtttattatcaaagatctttggttagggagattgaagcccggttaaaagccaagtgtgacacattagctgatctatttgctatggatgaaagattgttttgagcacatttttagtaaggtctcgttaagcgccgcgtttgagcaccatgtccttccctggatgcacagaagctactgacttcgtggttacaatcgccctttgctttacctcctcccatgatggaaaggttgaggtgagaatggaactattgatggccaaggcattgtgtggtgggatatgtggaagaaaggtacactgccctatacaagacctcaccaattgatctatttatgtggtgggatatgtggaagaaaggtttgtgatggaggtgataaaaactttgtggtgcgaaagggcctctagcgtaatggttaaggcttccaagtagcaactccaggtcccagattattgctcttcgagctatcacgtggtggtggagctatcaattcagttgatgacttgactgaaaattgtctaggctcatctgatcttgtctatgagtatgttctcgtagaagaaaagtacacatttgtggggaatgtgaaaaatccttgctcttgtactatactgattaaaggattcaaggatgatgttctgttaagaacacagttgaggatgaagcagttgtgttgttatcatccgtaaatttctttgtccaggaattaggaagaataaatttgtgttgatactgtgaaggtaccaggccgacacaaatttatttgataaaatacgtgttcccaaatgtgtgtatgtacgatcaggatcgaataatttatgtcctgtcccaatgtacagaggcactaaggaaacctgtcgcggttcacagcgaacgggtcttgaactcttggctcgctcattttaatattattatgtaaatttcctatcaagaaacgttcctgtgacattacatcgagaagacgagaatcatgactgcagaaatacatctttattcactactgtatc

SEQ ID NO: 33485 - DNA, 2886 bp, Zea Mays
cgcgcatccacgcccccgccgtctcactccgccccgccacgcgttcatccaggtcgggggtccgtacgatgcaaaaaaatcgcgatgagtccaccacgactccaagcagctgcggacgcgccgctctaaccggagatccgttaagagtccgccgcccccatctcagcgcctgagtcagccgttctctccccgtgctcgcagccactggtttccgcgggtctagggttcgtggaggcagcgtggagcttagggtttcggcgggatgagctaccggaaggggttgaaggtttgggtggagaagggggaagggtgggtagaggcggtggtgacggaagcgaaggaccacgccgtcgccgtgctcacgagccagcgggaaaaggcacggcagaggacgatggcaactgtccagcgcacacttcaggcaatggatgaggacaacatcagagatgagtctagaactggaaggctcgtcgtcttggcggcgctggccgccggcgccatcagcatcggcaagcgcatgcccctgctggcgccatctcccccgtcatcttggcggcgctggccgccggtgccatcagcgtcggcaagactgtcatagatgagattttcatgttctgaagactgaattcaagatgatgggatgcttgtgatatcgacagttcctggttctccaccaaagctgtgcatcaaggctgttgcattagaaaacttctgtccaagagcattttcattgctgtcgatcgccggactatctgggttttgctaggccatgcagtgtcctagaaggcctattaattcaatttgcagcagactgaaagctaaagaagtccgtattagagtctgggctcatcaattagctgctcattctccagtacttcattcccttggtcccctacaactccgacctgactggctaattgctgctggagaaaggaacaaaggagaatggagcatgtagtggatgcgccaatgcaggtttcagttcctcaagtatatgttcctatcggacccctttgttcctcaagtgagtgatggcgctggggttgtcttactaagcgagacatttgcactgaacaattgcagttccgctgaactcatagagttcatgtcaatctctctattgaactttaatttttgaaagtttggtacagagattttcataaaaaaaacagatattgcctgattctgttggcacctgatttcctgaatttcatttcgaaaaaagagaagaaacagatatggtctcattctattttatttcaatattatcatgtggtatataagtcttatcacacttgtgtgctgcccatgggagcggtagttcagaagcagttgaacctggagttggtgttccagatcattttctctgaattacatcatattatctgtaccaggtccagatgcaaccagggcagccatcgatgtctgcgaacagggtttattatcaaagatctttggttagggagattgaagcccggttaaaagccaagtgtgacacattagctgatctatttgctatggatgaaagattgttttgagcacatttttagtaaggtctcgttaagcgccgcgtttgagcaccatgtccttccctggatgcacagaagctactgacttcgtggttacaatcgccctttgctttacctcctcccatgatggaaaggttgaggtattgtagttctttccttgaatttcaccatgttcctttctgttttcctgatctgtgtatattttgggtagtccactgaaaattgatgatagtcatccatcaattatatttctgtcaccaacccgtgcagctgatatgtttgcttgctctccactgcttgcttgctcaagctcctatttttgatatctgattttaagcgatgtctcaatttagaaaacttgttatgattattgtttcagtcatattcccaagaaatatgctatggagaaattactaagatgcaaaaatatcacaattctcaatctccaatcacaagcatttaataaaatgctataaacaaaatgatctgggcaaactcacaaaataacattattcataataaaggaaatcaacagctaggttgttcgcaagaatgatagtttgttattgcaatcgtgatctatgtaggtgagaatggaactattgatggccaaggcattgtgtggtgggatatgtggaagaaaggtacactgccctatacaagacctcaccaattgatctatttatgtggtgggatatgtggaagaaaggtttgtgatggaggtgataaaaactttgtggtgcgaaagggcctctagcgtaatggttaaggcttccaagtagcaactccaggtcccagattattgctcttcgagctatcacgtggtggtggagctatcaattcagttgatgacttgactgaaaattgtctaggctcatctgatcttgtctatgagtatgttctcgtagaagaaaagtacacatttgtggggaatgtgaaaaatccttgctcttgtactatactgattaaaggattcaaggatgatgttctgttaagaacacagttgaggatgaagcagttgtgttgttatcatccgtaaatttctttgtccaggaattaggaagaataaatttgtgttgatactgtgaaggtaccaggccgacacaaatttatttgataaaatacgtgttcccaaatgtgtgtatgtacgatcaggatcgaataatttatgtcctgtcccaatgtacagaggcactaaggaaacctgtcgcggttcacagcgaacgggtcttgaactcttggctcgctcattttaatattattatgtaaatttcctatcaagaaacgttcctgtgacattacatcgagaagacgagaatcatgactgcagaaatacatctttattcactactgtatc

SEQ ID NO: 33486 - DNA, 2445 bp, Zea Mays
ccgccacgcgcatccacgcccccgccgtctcactccgccccgccacgcgttcatccaggtcgggggtccgtacgatgcaaaaaaatcgcgatgagtccaccacgactccaagcagctgcggacgcgccgctctaaccggagatccgttaagagtccgccgcccccatctcagcgcctgagtcagccgttctctccccgtgctcgcagccactggtttccgcgggtctagggttcgtggaggcagcgtggagcttagggtttcggcgggatgagctaccggaaggggttgaaggtttgggtggagaagggggaagggtgggtagaggcggtggtgacggaagcgaaggaccacgccgtcgccgtgctcacgagccagcgggaaaaggcacggcagaggacgatggcaactgtccagcgcacacttcaggcaatggatgaggacaacatcagagatgagtctagaactggaaggctcgtcgtcttggcggcgctggccgccggcgccatcagcatcggcaagcgcatgcccctgctggcgccatctcccccgtcatcttggcggcgctggccgccggtgccatcagcgtcggcaagactgtcatagatgagattttcatgttctgaagactgaattcaagatgatgggatgcttgtgatatcgacagttcctggttctccaccaaagctgtgcatcaaggctgttgcattagaaaacttctgtccaagagcattttcattgctgtcgatcgccggactatctgggttttgctaggccatgcagtgtcctagaaggcctattaattcaatttgcagcagactgaaagctaaagaagtccgtattagagtctgggctcatcaattagctgctcattctccagtacttcattcccttggtcccctacaactccgacctgactggctaattgctgctggagaaaggaacaaaggagaatggagcatgtagtggatgcgccaatgcaggtttcagttcctcaagtatatgttcctatcggacccctttgttcctcaagtgagtgatggcgctggggttgtcttactaagcgagacatttgcactgaacaattgcagttccgctgaactcatagagttcatgtcaatctctctattgaactttaatttttgaaagtttggtacagagattttcataaaaaaaacagatattgcctgattctgttggcacctgatttcctgaatttcatttcgaaaaaagagaagaaacagatatggtctcattctattttatttcaatattatcatgtggtatataagtcttatcacacttgtgtgctgcccatgggagcggtagttcagaagcagttgaacctggagttggtgttccagatcattttctctgaattacatcatattatctgtaccaggtccagatgcaaccagggcagccatcgatgtctgcgaacagggtttattatcaaagatctttggttagggagattgaagcccggttaaaagccaagtgtgacacattagctgatctatttgctatggatgaaagattgttttgagcacatttttagtaaggtctcgttaagcgccgcgtttgagcaccatgtccttccctggatgcacagaagctactgacttcgtggttacaatcgccctttgctttacctcctcccatgatggaaaggttgaggtgagaatggaactattgatggccaaggcattgtgtggtgggatatgtggaagaaaggtacactgccctatacaagacctcaccaattgatctatttatgtggtgggatatgtggaagaaaggtttgtgatggaggtgataaaaactttgtggtgcgaaagggcctctagcgtaatggttaaggcttccaagtagcaactccaggtcccagattattgctcttcgagctatcacgtggtggtggagctatcaattcagttgatgacttgactgaaaattgtctaggctcatctgatcttgtctatgagtatgttctcgtagaagaaaagtacacatttgtggggaatgtgaaaaatccttgctcttgtactatactgattaaaggattcaaggatgatgttctgttaagaacacagttgaggatgaagcagttgtgttgttatcatccgtaaatttctttgtccaggaattaggaagaataaatttgtgttgatactgtgaaggtaccaggccgacacaaatttatttgataaaatacgtgttcccaaatgtgtgtatgtacgatcaggatcgaataatttatgtcctgtcccaatgtacagaggcactaaggaaacctgtcgcggttcacagcgaacgggtcttgaactcttggctcgctcattttaatattattatgtaaatttcctatcaagaaacgttcctgtgacattacatcgagaagacgagaatcatgactgcagaaatacatctttattcactactgtatc

SEQ ID NO: 33487 - DNA, 2463 bp, Zea Mays
cgccgccatgccgccacgcgcatccacgcccccgccgtctcactccgccccgccacgcgttcatccaggtcgggggtccgtacgatgcaaaaaaatcgcgatgagtccaccacgactccaagcagctgcggacgcgccgctctaaccggagatccgttaagagtccgccgcccccatctcagcgcctgagtcagccgttctctccccgtgctcgcagccactggtttccgcgggtctagggttcgtggaggcagcgtggagcttagggtttcggcgggatgagctaccggaaggggttgaaggtttgggtggagaagggggaagggtgggtagaggcggtggtgacggaagcgaaggaccacgccgtcgccgtgctcacgagccagcgggaaaaggcacggcagaggacgatggcaactgtccagcgcacacttcaggcaatggatgaggacaacatcagagatgagtctagaactggaaggctcgtcgtcttggcggcgctggccgccggcgccatcagcatcggcaagcgcatgcccctgctggcgccatctcccccgtcatcttggcggcgctggccgccggtgccatcagcgtcggcaagactgtcatagatgagattttcatgttctgaagactgaattcaagatgatgggatgcttgtgatatcgacagttcctggttctccaccaaagctgtgcatcaaggctgttgcattagaaaacttctgtccaagagcattttcattgctgtcgatcgccggactatctgggttttgctaggccatgcagtgtcctagaaggcctattaattcaatttgcagcagactgaaagctaaagaagtccgtattagagtctgggctcatcaattagctgctcattctccagtacttcattcccttggtcccctacaactccgacctgactggctaattgctgctggagaaaggaacaaaggagaatggagcatgtagtggatgcgccaatgcaggtttcagttcctcaagtatatgttcctatcggacccctttgttcctcaagtccagatgcaaccagggcagccatcgatgtctgcgaacagggtttattatcaaagatctttggttagggagattgaagcccggttaaaagccaagtgtgacacattagctgatctatttgctatggatgaaagattgttttgagcacatttttagtaaggtctcgttaagcgccgcgtttgagcaccatgtccttccctggatgcacagaagctactgacttcgtggttacaatcgccctttgctttacctcctcccatgatggaaaggttgaggtgagaatggaactattgatggccaaggcattgtgtggtgggatatgtggaagaaaggtacactgccctatacaagacctcaccaattgatctatttatgtggtgggatatgtggaagaaaggtttgtgatggaggtgataaaaactttgtggtgcgaaagggcctctagcgtaatggttaaggcttccaagtagcaactccaggtcccaggttcgatctctctcgggggcgaattttgggcttggttaaaataatcctctcgttgtgtcccgcccggtctcgggggtcgatatcctgcgcgccaccctccgtctgggctgttgcagagtggcctgttgatcggcccgttaaggctgggggcagagttcggggttttttttttcggtcgggaccatgtttcggtctcttcttaatataatattgagagggcagtcttttcatcccagccggagccgagttgataaaaactttgtggtgatcaatcagaagggcattgaccctccatctttggatctctttgctagagcgggggtaatctctcctctatttggtggttacatgacctaagttcattttgaaccctgaatggatttagattttcatttgagaacgtgaatctcatgaagttaagggttgaagaaggcattgactgattaaaactgctctgaaatgatcatttatgctcagattattgctcttcgagctatcacgtggtggtggagctatcaattcagttgatgacttgactgaaaattgtctaggctcatctgatcttgtctatgagtatgttctcgtagaagaaaagtacacatttgtggggaatgtgaaaaatccttgctcttgtactatactgattaaaggattcaaggatgatgttctgttaagaacacagttgaggatgaagcagttgtgttgttatcatccgtaaatttctttgtccaggaattaggaagaataaatttgtgttgatactgtgaagaggcactaaggaaacctgtcgcggttcacagcgaacgggtcttgaactcttggctcgctcattttaatattattatgtaaatttcctatcaagaaacgttcctgtgacattacatcgagaagacgagaatcatgactgcagaaatacatctttattcactactgtatc

SEQ ID NO: 33488 - DNA, 2479 bp, Zea Mays
cgccgccatgccgccacgcgcatccacgcccccgccgtctcactccgccccgccacgcgttcatccaggtcgggggtccgtacgatgcaaaaaaatcgcgatgagtccaccacgactccaagcagctgcggacgcgccgctctaaccggagatccgttaagagtccgccgcccccatctcagcgcctgagtcagccgttctctccccgtgctcgcagccactggtttccgcgggtctagggttcgtggaggcagcgtggagcttagggtttcggcgggatgagctaccggaaggggttgaaggtttgggtggagaagggggaagggtgggtagaggcggtggtgacggaagcgaaggaccacgccgtcgccgtgctcacgagccagcgggaaaagacttctgcaatccgcgatgtgcaggcacggcagaggacgatggcaactgtccagcgcacacttcaggcaatggatgaggacaacatcagagatgagtctagaactggaaggctcgtcgtcttggcggcgctggccgccggcgccatcagcatcggcaagcgcatgcccctgctggcgccatctcccccgtcatcttggcggcgctggccgccggtgccatcagcgtcggcaagactgtcatagatgagattttcatgttctgaagactgaattcaagatgatgggatgcttgtgatatcgacagttcctggttctccaccaaagctgtgcatcaaggctgttgcattagaaaacttctgtccaagagcattttcattgctgtcgatcgccggactatctgggttttgctaggccatgcagtgtcctagaaggcctattaattcaatttgcagcagactgaaagctaaagaagtccgtattagagtctgggctcatcaattagctgctcattctccagtacttcattcccttggtcccctacaactccgacctgactggctaattgctgctggagaaaggaacaaaggagaatggagcatgtagtggatgcgccaatgcaggtttcagttcctcaagtatatgttcctatcggacccctttgttcctcaagtgagtgatggcgctggggttgtcttactaagcgagacatttgcactgaacaattgcagttccgctgaactcatagagttcatgtcaatctctctattgaactttaatttttgaaagtttggtacagagattttcataaaaaaaacagatattgcctgattctgttggcacctgatttcctgaatttcatttcgaaaaaagagaagaaacagatatggtctcattctattttatttcaatattatcatgtggtatataagtcttatcacacttgtgtgctgcccatgggagcggtagttcagaagcagttgaacctggagttggtgttccagatcattttctctgaattacatcatattatctgtaccaggtccagatgcaaccagggcagccatcgatgtctgcgaacagggtttattatcaaagatctttggttagggagattgaagcccggttaaaagccaagtgtgacacattagctgatctatttgctatggatgaaagattgttttgagcacatttttagtaaggtctcgttaagcgccgcgtttgagcaccatgtccttccctggatgcacagaagctactgacttcgtggttacaatcgccctttgctttacctcctcccatgatggaaaggttgaggtgagaatggaactattgatggccaaggcattgtgtggtgggatatgtggaagaaaggtacactgccctatacaagacctcaccaattgatctatttatgtggtgggatatgtggaagaaaggtttgtgatggaggtgataaaaactttgtggtgcgaaagggcctctagcgtaatggttaaggcttccaagtagcaactccaggtcccagattattgctcttcgagctatcacgtggtggtggagctatcaattcagttgatgacttgactgaaaattgtctaggctcatctgatcttgtctatgagtatgttctcgtagaagaaaagtacacatttgtggggaatgtgaaaaatccttgctcttgtactatactgattaaaggattcaaggatgatgttctgttaagaacacagttgaggatgaagcagttgtgttgttatcatccgtaaatttctttgtccaggaattaggaagaataaatttgtgttgatactgtgaaggtaccaggccgacacaaatttatttgataaaatacgtgttcccaaatgtgtgtatgtacgatcaggatcgaataatttatgtcctgtcccaatgtacagaggcactaaggaaacctgtcgcggttcacagcgaacgggtcttgaactcttggctcgctcattttaatattattatgtaaatttcctatcaagaaacgttcctgtgacattacatcgagaagacgagaatcatgactgcagaaatacatctttattcactactgtatc

SEQ ID NO: 33489 - DNA, 3012 bp, Zea Mays
cgccgccatgccgccacgcgcatccacgcccccgccgtctcactccgccccgccacgcgttcatccaggtcgggggtccgtacgatgcaaaaaaatcgcgatgagtccaccacgactccaagcagctgcggacgcgccgctctaaccggagatccgttaagagtccgccgcccccatctcagcgcctgagtcagccgttctctccccgtgctcgcagccactggtttccgcgggtctagggttcgtggaggcagcgtggagcttagggtttcggcgggatgagctaccggaaggggttgaaggtttgggtggagaagggggaagggtgggtagaggcggtggtgacggaagcgaaggaccacgccgtcgccgtgctcacgagccagcgggaaaaggcacggcagaggacgatggcaactgtccagcgcacacttcaggcaatggatgaggacaacatcagagatgagtctagaactggaaggctcgtcgtcttggcggcgctggccgccggcgccatcagcatcggcaagcgcatgcccctgctggcgccatctcccccgtcatcttggcggcgctggccgccggtgccatcagcgtcggcaagactgtcatagatgagattttcatgttctgaagactgaattcaagatgatgggatgcttgtgatatcgacagttcctggttctccaccaaagctgtgcatcaaggctgttgcattagaaaacttctgtccaagagcattttcattgctgtcgatcgccggactatctgggttttgctaggccatgcagtgtcctagaaggcctattaattcaatttgcagcagactgaaagctaaagaagtccgtattagagtctgggctcatcaattagctgctcattctccagtacttcattcccttggtcccctacaactccgacctgactggctaattgctgctggagaaaggaacaaaggagaatggagcatgtagtggatgcgccaatgcaggtttcagttcctcaagtatatgttcctatcggacccctttgttcctcaagtgagtgatggcgctggggttgtcttactaagcgagacatttgcactgaacaattgcagttccgctgaactcatagagttcatgtcaatctctctattgaactttaatttttgaaagtttggtacagagattttcataaaaaaaacagatattgcctgattctgttggcacctgatttcctgaatttcatttcgaaaaaagagaagaaacagatatggtctcattctattttatttcaatattatcatgtggtatataagtcttatcacacttgtgtgctgcccatgggagcggtagttcagaagcagttgaacctggagttggtgttccagatcattttctctgaattacatcatattatctgtaccaggtccagatgcaaccagggcagccatcgatgtctgcgggtttattatcaaagatctttggttagggagattgaagcccggttaaaagccaagtgtgacacattagctgatctatttgctatggatgaaaggtatggattaaaggtgtcagttactaaaacttgggatgaatagatattaaatttgcatataaattgtcaccatgtcttccatcagattgttttgagcacatttttagtaaggtctcgttaagcgccgcgtttgagcaccatgtccttccctggatgcacagaagctactgacttcgtggttacaatcgccctttgctttacctcctcccatgatggaaaggttgaggtgagaatggaactattgatggccaaggcattgtgtggtgggatatgtggaagaaaggtacactgccctatacaagacctcaccaattgatctatttatgtggtgggatatgtggaagaaaggtttgtgatggaggtgataaaaactttgtggtgcgaaagggcctctagcgtaatggttaaggcttccaagtagcaactccaggtcccaggttcgatctctctcgggggcgaattttgggcttggttaaaataatcctctcgttgtgtcccgcccggtctcgggggtcgatatcctgcgcgccaccctccgtctgggctgttgcagagtggcctgttgatcggcccgttaaggctgggggcagagttcggggttttttttttcggtcgggaccatgtttcggtctcttcttaatataatattgagagggcagtcttttcatcccagccggagccgagttgataaaaactttgtggtgatcaatcagaagggcattgaccctccatctttggatctctttgctagagcgggggtaatctctcctctatttggtggttacatgacctaagttcattttgaaccctgaatggatttagattttcatttgagaacgtgaatctcatgaagttaagggttgaagaaggcattgactgattaaaactgctctgaaatgatcatttatgctcagattattgctcttcgagctatcacgtggtggtggagctatcaattcagttgatgacttgactgaaaattgtctaggctcatctgatcttgtctatgagtatgttctcgtagaagaaaagtacacatttgtggggaatgtgaaaaatccttgctcttgtactatactgattaaaggattcaaggatgatgttctgttaagaacacagttgaggatgaagcagttgtgttgttatcatccgtaaatttctttgtccaggaattaggaagaataaatttgtgttgatactgtgaaggtaccaggccgacacaaatttatttgataaaatacgtgttcccaaatgtgtgtatgtacgatcaggatcgaataatttatgtcctgtcccaatgtacagaggcactaaggaaacctgtcgcggttcacagcgaacgggtcttgaactcttggctcgctcattttaatattattatgtaaatttcctatcaagaaacgttcctgtgacattacatcgagaagacgagaatcatgactgcagaaatacatctttattcactactgtatc

SEQ ID NO: 33490 - DNA, 1941 bp, Zea Mays
gcggggccacttgtgcgccactgccgttgccttctatccggcgccatctccaccgtccactgccccatccgcagttccacaccacactacgccgccgcagccaggcagacagaggcagccccctcatggctgcccacgccgtcaccccgctcaccatctgctgcctccgccgcggcgttcccctcaaccacagccgccgcctcctcgccgtagccgccgcagcgccagaatcgcccgcgcctacccccgcgccatcccagttgccgcttcccccggttcctcctcgcaagggctacttcccgaagcgtggcgagacagtcgagctcacctgcgaggcgctcgcctttaagggcaagggcgtctgcaaggtcgcgggctccacgttcgtcctgctctgcgatggtgcgctccctggcgagcgcctcatcgcccgcgtccgccgcctccgccgtggcgcctttgccgaggccgccaagctcaggaccctcgagccacaccacgacgccatcgaggcgccctgccccctcgccgctgactgcggcggctgcaagacccagtctctcgcgtacgccgcgcagatccgccacaagcatcaccaggttcgcgacttgctcgtgaactttggcaagtttgatcccaagcgcctggagagctcggagccggatgatatcctcaaacccaccgtgcagtgtgacgagatattccgatggagttctcgtttgggacgaagagatgggtgcaaaaagagttgaaggacaagggtgaggaggtggaggtgaagcaggaaacgaatgaaactgatggatatgcgcttggactgcacgcaccagggttcttcgacaaggtgctacatgtgcagaaatgttttctgcagagtgagccagcagataaggttcttgcagttgttcaagaaacctggatggatcctgccataggcctcacaccttatgatgtccataagcatgttgggtttctcaagcatctgatgataagaactggaagaaacatcagcactggaactccagaagtaatggtcaattttgtgacgtcatgttataagccagatgtattgatgcctcttgttgataaaatcacaaaaatacctgaagtggctgatgttctttacaagcttattgaagattctgctgggcttaaaggagatggctctgaaattgttcttgatctgttttgtggaactggaaccattggtttgacctttgcccgaagggcaaagcacatttatggatatgaagttgtccctgaagccattgaagatgcgcgaaagaatgccaagttgaacggtatcaacaatgcaacatttgttcaaggggacctcaataaaatcaatgaatcattcgggaaggaatttccaaagcctgacataatcatctcagatcctaatcgccctgggatgcacatgaagttaatcaagtggctgttagaagttaaagctcctcgaatagtgtatgtctcatgtaatccagctacttgtgctcgggatttggactacctatgtcatggcgtggaggagaaagatttgagaggattctatgaactgaagagtgtaattcctgtggatatgtttcctcatactcctcatattgagtgtgtatgcttattggagctgcgttgattttcagttttggtcaggtaaacccactggagccttgtttgggtgacgagtattcacctcaatccatataaggcattgttcggcactctagtatttaatacatattgggatccaatacatggtgggattgagtgaatccatcccatgtcacttaaaccatgtgtgtttcaattacagctgagatttaatacatggctaattttccattgtttagttacaccacatggatacattaatttgttgcatgtatttaaaaacatcagtgtccatcatattaggtctctgaagcggatgaaatttgaagcatc

SEQ ID NO: 33491 - DNA, 1747 bp, Zea Mays
gcggggccacttgtgcgccactgccgttgccttctatccggcgccatctccaccgtccactgccccatccgcagttccacaccacactacgccgccgcagccaggcagacagaggcagccccctcatggctgcccacgccgtcaccccgctcaccatctgctgcctccgccgcggcgttcccctcaaccacagccgccgcctcctcgccgtagccgccgcagcgccagaatcgcccgcgcctacccccgcgccatcccagttgccgcttcccccggttcctcctcgcaagggctacttcccgaagcgtggcgagacagtcgtcctgctctgcgatggtccgccgcctccgccgtggcgcctttgccgaggccgccaagctcaggaccctcgagccacaccacgacgccatcgaggcgccctgccccctcgccgctgactgcggcggctgcaagacccagtctctcgcgtacgccgcgcagatccgccacaagcatcaccaggttcgcgacttgctcgtgaactttggcaagtttgatcccaagcgcctggagagctcggagccggatgatatcctcaaacccaccgtgcagtgtgacgagatattccggtacaggaacaaaatggagttctcgtttgggacgaagagatgggtgcaaaaagagttgaaggacaagggtgaggaggtggaggtgaagcaggaaacgaatgaaactgatggatatgcgcttggactgcacgcaccagggttcttcgacaaggtgctacatgtgcagaaatgttttctgcagagtgagccagcagataaggttcttgcagttgttcaagaaacctggatggatcctgccataggcctcacaccttatgatgtccataagcatgttgggtttctcaagcatctgatgataagaactggaaggctgatgttctttacaagcttattgaagattctgctgggcttaaaggagatggctctgaaattgttcttgatctgttttgtggaactggaaccattggtttgacctttgcccgaagggcaaagcacatttatggatatgaagttgtccctgaagccattgaagatgcgcgaaagaatgccaagttgaacggtatcaacaatgcaacatttgttcaaggggacctcaataaaatcaatgaatcattcgggaaggaatttccaaagcctgacataatcatctcagatcctaatcgccctgggatgcacatgaagttaatcaagtggctgttagaagttaaagctcctcgaatagtgtatgtctcatgtaatccagctacttgtgctcgggatttggactacctatgtcatggcgtggaggagaaagatttgagaggattctatgaactgaagagtgtaattcctgtggatatgtttcctcatactcctcatattgagtgtgtatgcttattggagctgcgttgattttcagttttggtcaggtaaacccactggagccttgtttgggtgacgagtattcacctcaatccatataaggcattgttcggcactctagtatttaatacatattgggatccaatacatggtgggattgagtgaatccatcccatgtcacttaaaccatgtgtgtttcaattacagctgagatttaatacatggctaattttccattgtttagttacaccacatggatacattaatttgttgcatgtatttaaaaacatcagtgtccatcatattaggtctctgaagcggatgaaatttgaagcatc

SEQ ID NO: 33492 - DNA, 1893 bp, Zea Mays
gcggggccacttgtgcgccactgccgttgccttctatccggcgccatctccaccgtccactgccccatccgcagttccacaccacactacgccgccgcagccaggcagacagaggcagccccctcatggctgcccacgccgtcaccccgctcaccatctgctgcctccgccgcggcgttcccctcaaccacagccgccgcctcctcgccgtagccgccgcagcgccagaatcgcccgcgcctacccccgcgccatcccagttgccgcttcccccggttcctcctcgcaagggctacttcccgaagcgtggcgagacagtcgagctcacctgcgaggcgctcgcctttaagggcaagggcgtctgcaaggtcgcgggctccacgttcgtcctgctctgcgatggtgcgccctgccccctcgccgctgactgcggcggctgcaagacccagtctctcgcgtacgccgcgcagatccgccacaagcatcaccaggttcgcgacttgctcgtgaactttggcaagtttgatcccaagcgcctggagagctcggagccggatgatatcctcaaacccaccgtgcagtgtgacgagatattccggtacaggaacaaaatggagttctcgtttgggacgaagagatgggtgcaaaaagagttgaaggacaagggtgaggaggtggaggtgaagcaggaaacgaatgaaactgatggatatgcgcttggactgcacgcaccagggttcttcgacaaggtgctacatgtgcagaaatgttttctgcagagtgagccagcagataaggttcttgcagttgttcaagaaacctggatggatcctgccataggcctcacaccttatgatgtccataagcatgttgggtttctcaagcatctgatgataagaactggaaggttagtgtcataaataatgtgaactcgtctgttggtaattcatctgtgggtgaacaagaatatactttgtacgggaagccaaacattacagaaatgttgagaggacttgcgttccagatatctgccaactccttttttcagactaatacaaaacaggctgatgttctttacaagcttattgaagattctgctgggcttaaaggagatggctctgaaattgttcttgatctgttttgtggaactggaaccattggtttgacctttgcccgaagggcaaagcacatttatggatatgaagttgtccctgaagccattgaagatgcgcgaaagaatgccaagttgaacggtatcaacaatgcaacatttgttcaaggggacctcaataaaatcaatgaatcattcgggaaggaatttccaaagcctgacataatcatctcagatcctaatcgccctgggatgcacatgaagttaatcaagtggctgttagaagttaaagctcctcgaatagtgtatgtctcatgtaatccagctacttgtgctcgggatttggactacctatgtcatggcgtggaggagaaagatttgagaggattctatgaactgaagagtgtaattcctgtggatatgtttcctcatactcctcatattgagtgtgtatgcttattggagctgcgttgattttcagttttggtcaggtaaacccactggagccttgtttgggtgacgagtattcacctcaatccatataaggcattgttcggcactctagtatttaatacatattgggatccaatacatggtgggattgagtgaatccatcccatgtcacttaaaccatgtgtgtttcaattacagctgagatttaatacatggctaattttccattgtttagttacaccacatggatacattaatttgttgcatgtatttaaaaacatcagtgtccatcatattaggtctctgaagcggatgaaatttgaagcatc

SEQ ID NO: 33493 - DNA, 2097 bp, Zea Mays
gcggggccacttgtgcgccactgccgttgccttctatccggcgccatctccaccgtccactgccccatccgcagttccacaccacactacgccgccgcagccaggcagacagaggcagccccctcatggctgcccacgccgtcaccccgctcaccatctgctgcctccgccgcggcgttcccctcaaccacagccgccgcctcctcgccgtagccgccgcagcgccagaatcgcccgcgcctacccccgcgccatcccagttgccgcttcccccggttcctcctcgcaagggctacttcccgaagcgtggcgagacagtcgagctcacctgcgaggcgctcgcctttaagggcaagggcgtctgcaaggtcgcgggctccacgttcgtcctgctctgcgatggtgcgctccctggcgagcgcctcatcgcccgcgtccgccgcctccgccgtggcgcctttgccgaggccgccaagctcaggaccctcgagccacaccacgacgccatcgaggcgccctgccccctcgccgctgactgcggcggctgcaagacccagtctctcgcgtacgccgcgcagatccgccacaagcatcaccaggttcgcgacttgctcgtgaactttggcaagtttgatcccaagcgcctggagagctcggagccggatgatatcctcaaacccaccgtgcagtgtgacgagatattccgatggagttctcgtttgggacgaagagatgggtgcaaaaagagttgaaggacaagggtgaggaggtggaggtgaagcaggaaacgaatgaaactgatggatatgcgcttggactgcacgcaccagggttcttcgacaaggtgctacatgtgcagaaatgttttctgcagagtgagccagcagataaggttcttgcagttgttcaagaaacctggatggatcctgccataggcctcacaccttatgatgtccataagcatgttgggtttctcaagcatctgatgataagaactggaagaaacatcagcactggaactccagaagtaatggtcaattttgtgacgtcatgttataagccagatgtattgatgcctcttgttgataaaatcacaaaaatacctgaagtggttagtgtcataaataatgtgaactcgtctgttggtaattcatctgtgggtgaacaagaatatactttgtacgggaagccaaacattacagaaatgttgagaggacttgcgttccagatatctgccaactccttttttcagactaatacaaaacaggctgatgttctttacaagcttattgaagattctgctgggcttaaaggagatggctctgaaattgttcttgatctgttttgtggaactggaaccattggtttgacctttgcccgaagggcaaagcacatttatggatatgaagttgtccctgaagccattgaagatgcgcgaaagaatgccaagttgaacggtatcaacaatgcaacatttgttcaaggggacctcaataaaatcaatgaatcattcgggaaggaatttccaaagcctgacataatcatctcagatcctaatcgccctgggatgcacatgaagttaatcaagtggctgttagaagttaaagctcctcgaatagtgtatgtctcatgtaatccagctacttgtgctcgggatttggactacctatgtcatggcgtggaggagaaagatttgagaggattctatgaactgaagagtgtaattcctgtggatatgtttcctcatactcctcatattgagtgtgtatgcttattggagctgcgttgattttcagttttggtcaggtaaacccactggagccttgtttgggtgacgagtattcacctcaatccatataaggcattgttcggcactctagtatttaatacatattgggatccaatacatggtgggattgagtgaatccatcccatgtcacttaaaccatgtgtgtttcaattacagctgagatttaatacatggctaattttccattgtttagttacaccacatggatacattaatttgttgcatgtatttaaaaacatcagtgtccatcatattaggtctctgaagcggatgaaatttgaagcatc

SEQ ID NO: 33494 - DNA, 2044 bp, Zea Mays
gcggggccacttgtgcgccactgccgttgccttctatccggcgccatctccaccgtccactgccccatccgcagttccacaccacactacgccgccgcagccaggcagacagaggcagccccctcatggctgcccacgccgtcaccccgctcaccatctgctgcctccgccgcggcgttcccctcaaccacagccgccgcctcctcgccgtagccgccgcagcgccagaatcgcccgcgcctacccccgcgccatcccagttgccgcttcccccggttcctcctcgcaagggctacttcccgaagcgtggcgagacagtcgtcctgctctgcgatggtgcgctccctggcgagcgcctcatcgcccgcgtccgccgcctccgccgtggcgcctttgccgaggccgccaagctcaggaccctcgagccacaccacgacgccatcgaggcgccctgccccctcgccgctgactgcggcggctgcaagacccagtctctcgcgtacgccgcgcagatccgccacaagcatcaccaggttcgcgacttgctcgtgaactttggcaagtttgatcccaagcgcctggagagctcggagccggatgatatcctcaaacccaccgtgcagtgtgacgagatattccggtacaggaacaaaatggagttctcgtttgggacgaagagatgggtgcaaaaagagttgaaggacaagggtgaggaggtggaggtgaagcaggaaacgaatgaaactgatggatatgcgcttggactgcacgcaccagggttcttcgacaaggtgctacatgtgcagaaatgttttctgcagagtgagccagcagataaggttcttgcagttgttcaagaaacctggatggatcctgccataggcctcacaccttatgatgtccataagcatgttgggtttctcaagcatctgatgataagaactggaagaaacatcagcactggaactccagaagtaatggtcaattttgtgacgtcatgttataagccagatgtattgatgcctcttgttgataaaatcacaaaaatacctgaagtggttagtgtcataaataatgtgaactcgtctgttggtaattcatctgtgggtgaacaagaatatactttgtacgggaagccaaacattacagaaatgttgagaggacttgcgttccagatatctgccaactccttttttcagactaatacaaaacaggctgatgttctttacaagcttattgaagattctgctgggcttaaaggagatggctctgaaattgttcttgatctgttttgtggaactggaaccattggtttgacctttgcccgaagggcaaagcacatttatggatatgaagttgtccctgaagccattgaagatgcgcgaaagaatgccaagttgaacggtatcaacaatgcaacatttgttcaaggggacctcaataaaatcaatgaatcattcgggaaggaatttccaaagcctgacataatcatctcagatcctaatcgccctgggatgcacatgaagttaatcaagtggctgttagaagttaaagctcctcgaatagtgtatgtctcatgtaatccagctacttgtgctcgggatttggactacctatgtcatggcgtggaggagaaagatttgagaggattctatgaactgaagagtgtaattcctgtggatatgtttcctcatactcctcatattgagtgtgtatgcttattggagctgcgttgattttcagttttggtcaggtaaacccactggagccttgtttgggtgacgagtattcacctcaatccatataaggcattgttcggcactctagtatttaatacatattgggatccaatacatggtgggattgagtgaatccatcccatgtcacttaaaccatgtgtgtttcaattacagctgagatttaatacatggctaattttccattgtttagttacaccacatggatacattaatttgttgcatgtatttaaaaacatcagtgtccatcatattaggtctctgaagcggatgaaatttgaagcatc

SEQ ID NO: 33495 - DNA, 1990 bp, Zea Mays
gcggggccacttgtgcgccactgccgttgccttctatccggcgccatctccaccgtccactgccccatccgcagttccacaccacactacgccgccgcagccaggcagacagaggcagccccctcatggctgcccacgccgtcaccccgctcaccatctgctgcctccgccgcggcgttcccctcaaccacagccgccgcctcctcgccgtagccgccgcagcgccagaatcgcccgcgcctacccccgcgccatcccagttgccgcttcccccggttcctcctcgcaagggctacttcccgaagcgtggcgagacagtcgagctcacctgcgaggcgctcgcctttaagggcaagggcgtctgcaaggtcgcgggctccacgttcgtcctgctctgcgatggtgcgctccctggcgagcgcctcatcgcccgcgtccgccgcctccgccgtggcgcctttgccgaggccgccaagctcaggaccctcgagccacaccacgacgccatcgaggcgccctgccccctcgccgctgactgcggcggctgcaagacccagtctctcgcgtacgccgcgcagatccgccacaagcatcaccagatggagttctcgtttgggacgaagagatgggtgcaaaaagagttgaaggacaagggtgaggaggtggaggtgaagcaggaaacgaatgaaactgatggatatgcgcttggactgcacgcaccagggttcttcgacaaggtgctacatgtgcagaaatgttttctgcagagtgagccagcagataaggttcttgcagttgttcaagaaacctggatggatcctgccataggcctcacaccttatgatgtccataagcatgttgggtttctcaagcatctgatgataagaactggaagaaacatcagcactggaactccagaagtaatggtcaattttgtgacgtcatgttataagccagatgtattgatgcctcttgttgataaaatcacaaaaatacctgaagtggttagtgtcataaataatgtgaactcgtctgttggtaattcatctgtgggtgaacaagaatatactttgtacgggaagccaaacattacagaaatgttgagaggacttgcgttccagatatctgccaactccttttttcagactaatacaaaacaggctgatgttctttacaagcttattgaagattctgctgggcttaaaggagatggctctgaaattgttcttgatctgttttgtggaactggaaccattggtttgacctttgcccgaagggcaaagcacatttatggatatgaagttgtccctgaagccattgaagatgcgcgaaagaatgccaagttgaacggtatcaacaatgcaacatttgttcaaggggacctcaataaaatcaatgaatcattcgggaaggaatttccaaagcctgacataatcatctcagatcctaatcgccctgggatgcacatgaagttaatcaagtggctgttagaagttaaagctcctcgaatagtgtatgtctcatgtaatccagctacttgtgctcgggatttggactacctatgtcatggcgtggaggagaaagatttgagaggattctatgaactgaagagtgtaattcctgtggatatgtttcctcatactcctcatattgagtgtgtatgcttattggagctgcgttgattttcagttttggtcaggtaaacccactggagccttgtttgggtgacgagtattcacctcaatccatataaggcattgttcggcactctagtatttaatacatattgggatccaatacatggtgggattgagtgaatccatcccatgtcacttaaaccatgtgtgtttcaattacagctgagatttaatacatggctaattttccattgtttagttacaccacatggatacattaatttgttgcatgtatttaaaaacatcagtgtccatcatattaggtctctgaagcggatgaaatttgaagcatc

SEQ ID NO: 33496 - DNA, 2087 bp, Zea Mays
gcggggccacttgtgcgccactgccgttgccttctatccggcgccatctccaccgtccactgccccatccgcagttccacaccacactacgccgccgcagccaggcagacagaggcagccccctcatggctgcccacgccgtcaccccgctcaccatctgctgcctccgccgcggcgttcccctcaaccacagccgccgcctcctcgccgtagccgccgcagcgccagaatcgcccgcgcctacccccgcgccatcccagttgccgcttcccccggttcctcctcgcaagggctacttcccgaagcgtggcgagacagtcgagctcacctgcgaggcgctcgcctttaagggcaagggcgtctgcaaggtcgcgggctccacgttcgtcctgctctgcgatggtgcgctccctggcgagcgcctcatcgcccgcgtccgccgcctccgccgtggcgcctttgccgaggccgccaagctcaggaccctcgagccacaccacgacgccatcgaggcgccctgccccctcgccgctgactgcggcggctgcaagacccagtctctcgcgtacgccgcgcagatccgccacaagcatcaccaggttcgcgacttgctcgtgaactttggcaagtttgatcccaagcgcctggagagctcggagccggatgatatcctcaaacccaccgtgcagtgtgacgagatattccgatggagttctcgtttgggacgaagagatgggtgcaaaaagagttgaaggacaagggtgaggaggtggaggtgaagcaggaaacgaatgaaactgatggatatgcgcttggactgcacgcaccagggttcttcgacaaggtgctacatgtgcagaaatgttttctgcagagtgagccagcagataagttgttcaagaaacctggatggatcctgccataggcctcacaccttatgatgtccataagcatgttgggtttctcaagcatctgatgataagaactggaagaaacatcagcactggaactccagaagtaatggtcaattttgtgacgtcatgttataagccagatgtattgatgcctcttgttgataaaatcacaaaaatacctgaagtggttagtgtcataaataatgtgaactcgtctgttggtaattcatctgtgggtgaacaagaatatactttgtacgggaagccaaacattacagaaatgttgagaggacttgcgttccagatatctgccaactccttttttcagactaatacaaaacaggctgatgttctttacaagcttattgaagattctgctgggcttaaaggagatggctctgaaattgttcttgatctgttttgtggaactggaaccattggtttgacctttgcccgaagggcaaagcacatttatggatatgaagttgtccctgaagccattgaagatgcgcgaaagaatgccaagttgaacggtatcaacaatgcaacatttgttcaaggggacctcaataaaatcaatgaatcattcgggaaggaatttccaaagcctgacataatcatctcagatcctaatcgccctgggatgcacatgaagttaatcaagtggctgttagaagttaaagctcctcgaatagtgtatgtctcatgtaatccagctacttgtgctcgggatttggactacctatgtcatggcgtggaggagaaagatttgagaggattctatgaactgaagagtgtaattcctgtggatatgtttcctcatactcctcatattgagtgtgtatgcttattggagctgcgttgattttcagttttggtcaggtaaacccactggagccttgtttgggtgacgagtattcacctcaatccatataaggcattgttcggcactctagtatttaatacatattgggatccaatacatggtgggattgagtgaatccatcccatgtcacttaaaccatgtgtgtttcaattacagctgagatttaatacatggctaattttccattgtttagttacaccacatggatacattaatttgttgcatgtatttaaaaacatcagtgtccatcatattaggtctctgaagcggatgaaatttgaagcatc

SEQ ID NO: 33497 - DNA, 1986 bp, Zea Mays
gcggggccacttgtgcgccactgccgttgccttctatccggcgccatctccaccgtccactgccccatccgcagttccacaccacactacgccgccgcagccaggcagacagaggcagccccctcatggctgcccacgccgtcaccccgctcaccatctgctgcctccgccgcggcgttcccctcaaccacagccgccgcctcctcgccgtagccgccgcagcgccagaatcgcccgcgcctacccccgcgccatcccagttgccgcttcccccggttcctcctcgcaagggctacttcccgaagcgtggcgagacagtcgagctcacctgcgaggcgctcgcctttaagggcaagggcgtctgcaaggtcgcgggctccacgttcgtcctgctctgcgatggtgcgctccctggcgagcgcctcatcgcccgcgtccgccgcctccgccgtggcgcctttgccgaggccgccaagctcaggaccctcgagccacaccacgacgccatcgaggcgccctgccccctcgccgctgactgcggcggctgcaagacccagtctctcgcgtacgccgcgcagatccgccacaagcatcaccaggttcgcgacttgctcgtgaactttggcaagtttgatcccaagcgcctggagagctcggagccggatgatatcctcaaacccaccgtgcagtgtgacgagatattccggtacaggaacaaaatggagttctcgtttgggacgaagagatgggtgcaaaaagagttgaaggacaagggtgaggaggtggaggtgaagcaggaaacgaatgaaactgatggatatgcgcttggactgcacgcaccagggttcttcgacaaggtgctacatgtgcagaaatgttttctgcagagtgagccagcagataagttgttcaagaaacctggatggatcctgccataggcctcacaccttatgatgtccataagcatgttgggtttctcaagcatctgatgataagaactggaagtgtcataaataatgtgaactcgtctgttggtaattcatctgtgggtgaacaagaatatactttgtacgggaagccaaacattacagaaatgttgagaggacttgcgttccagatatctgccaactccttttttcagactaatacaaaacaggctgatgttctttacaagcttattgaagattctgctgggcttaaaggagatggctctgaaattgttcttgatctgttttgtggaactggaaccattggtttgacctttgcccgaagggcaaagcacatttatggatatgaagttgtccctgaagccattgaagatgcgcgaaagaatgccaagttgaacggtatcaacaatgcaacatttgttcaaggggacctcaataaaatcaatgaatcattcgggaaggaatttccaaagcctgacataatcatctcagatcctaatcgccctgggatgcacatgaagttaatcaagtggctgttagaagttaaagctcctcgaatagtgtatgtctcatgtaatccagctacttgtgctcgggatttggactacctatgtcatggcgtggaggagaaagatttgagaggattctatgaactgaagagtgtaattcctgtggatatgtttcctcatactcctcatattgagtgtgtatgcttattggagctgcgttgattttcagttttggtcaggtaaacccactggagccttgtttgggtgacgagtattcacctcaatccatataaggcattgttcggcactctagtatttaatacatattgggatccaatacatggtgggattgagtgaatccatcccatgtcacttaaaccatgtgtgtttcaattacagctgagatttaatacatggctaattttccattgtttagttacaccacatggatacattaatttgttgcatgtatttaaaaacatcagtgtccatcatattaggtctctgaagcggatgaaatttgaagcatc

SEQ ID NO: 33498 - DNA, 483 bp, Zea Mays
agatgagctattttactttgaagttcgtgaaggagcacccggaatgggagattaagaacggtgctgtcttcttccagaaggcgaaggaatcacagccctgcaaggagatcccatccttgcagcttatcaaccagacgctcagctacgccagggagctggagcgtattgtatgatttaaaccaatccctggtggttctttccccccctgtggccgcttggcatggcttgtactgtcctttgcatttgggatgatctttgatcgcagctctcatctgactgaaacatcatgtgaatctctgaagggctcagtctctccggcattggtctgttaactccatttgtatttcaccacattaactgcattgcttgaaaaatgccggcattcactgctgctgtgaacttttgatgggcttgatattgaattactgcctcggaattccactgacctctgcaggcttctgacgtcacgttttcttctgcatc

SEQ ID NO: 33499 - DNA, 885 bp, Zea Mays
ctggattgcaccttggcttcaacttcaagaggaagcacgtagtcaacctgtgcaccattggcataattcccgcctcgccagaggagtacccaattttgggactcaatcttctgaggctgttggttcagaatagaattgccgaattccacactgagctggagcttttacctgccaaggcactcgagcatccttgcatcaagcatgctgtagagcttgagcaatccttcatggagggtgcctacaaccgagtgttaagcgctcggcaggctgtgccacatgagacctacgtttacttcatcgaccttctcgccaaaacagttagagatgagatcgctgggtgcagcgaaaaggggtatgattctctatctgtgagtgatgcaaagcaaatgcttatgttcagttctgaccaagatctgcacgagtacatcactgaggagcacccggaatgggagattaagaacggtgctgtcttcttccagaaggcgaaggaatcacagccctgcaaggagatcccatccttgcagcttatcaaccagacgctcagctacgccagggagctggagcgtattgtatgatttaaaccaatccctggtggttctttccccccctgtggccgcttggcatggcttgtactgtcctttgcatttgggatgatctttgatcgcagctctcatctgactgaaacatcatgtgaatctctgaagggctcagtctctccggcattggtctgttaactccatttgtatttcaccacattaactgcattgcttgaaaaatgccggcattcactgctgctgtgaacttttgatgggcttgatattgaattactgcctcggaattccactgacctctgcaggcttctgacgtcacgttttcttctgcatc

SEQ ID NO: 33500 - DNA, 1149 bp, Zea Mays
cggagacgttggtttgataggttttgtcgtgtttgggctgctttcgatttatttttagggtttgtttcgtggatgtcgtccgcgccggagcagtttgcactctgaagcgggttacagggagaaaggacatagtttagcaggtccatctcacccaattccccagccttccgcccttgtttcagcagacaccgaacattgtggaggagctcaaacttgcaagggacatttatgagcatgctgttgttttgagtgtgaaacttgaggaccaagatgcgtttgaacgcgatttctgccagctgaagccttattacatggatacatgtggcataattcccgcctcgccagaggagtacccaattttgggactcaatcttctgaggctgttggttcagaatagaattgccgaattccacactgagctggagcttttacctgccaaggcactcgagcatccttgcatcaagcatgctgtagagcttgagcaatccttcatggagggtgcctacaaccgagtgttaagcgctcggcaggctgtgccacatgagacctacgtttacttcatcgaccttctcgccaaaacagttagagatgagatcgctgggtgcagcgaaaaggggtatgattctctatctgtgagtgatgcaaagcaaatgcttatgttcagttctgaccaagatctgcacgagtacatcactgaggagcacccggaatgggagattaagaacggtgctgtcttcttccagaaggcgaaggaatcacagccctgcaaggagatcccatccttgcagcttatcaaccagacgctcagctacgccagggagctggagcgtattgtatgatttaaaccaatccctggtggttctttccccccctgtggccgcttggcatggcttgtactgtcctttgcatttgggatgatctttgatcgcagctctcatctgactgaaacatcatgtgaatctctgaagggctcagtctctccggcattggtctgttaactccatttgtatttcaccacattaactgcattgcttgaaaaatgccggcattcactgctgctgtgaacttttgatgggcttgatattgaattactgcctcggaattccactgacctctgcaggcttctgacgtcacgttttcttctgcatc

SEQ ID NO: 33501 - DNA, 1464 bp, Zea Mays
tttcgccctcgccccgtctgccccattccaataacaggaatacgtcaggtgatagtgtttgatagctagagttaggtgttagctgagaaaatataagcacaaattgtttttttactcatttgccgtggacatttcagcagatagaggaagttagccactgtgtgtttgacaaaaaaaaggcaaaggaaaacctcatggtaacatcaattatagcccacgtaatgaagtccacccggcccatctagccctttgtgtgagccgccgtcgcgcactcgccgctccgcccctacgcgcagtcgccacgggagctcgttcctctccggcggcagcaccctccactataacccaacccgcaagaaaaaacccgcagcagagaagaggagtcgccgcgaccgagagctccagagcacgcccccgccacagcctccgacgatggatccaaagatgacagaggtgacccagatgttcgcccgcttcaaggcggcctacgcccgcaacgacctcaacacctgcgtcaccctcctctcgcagctcaaggtccatctcacccaattccccagccttccgcccttgtttcagcagacaccgaacattgtggaggagctcaaacttgcaagggacatttatgagcatgctgttgttttgagtgtgaaacttgaggaccaagatgcgtttgaacgcgatttctgccagctgaagccttattacatggatacatgtggcataattcccgcctcgccagaggagtacccaattttgggactcaatcttctgaggctgttggttcagaatagaattgccgaattccacactgagctggagcttttacctgccaaggcactcgagcatccttgcatcaagcatgctgtagagcttgagcaatccttcatggagggtgcctacaaccgagtgttaagcgctcggcaggctgtgccacatgagacctacgtttacttcatcgaccttctcgccaaaacagttagagatgagatcgctgggtgcagcgaaaaggggagcacccggaatgggagattaagaacggtgctgtcttcttccagaaggcgaaggaatcacagccctgcaaggagatcccatccttgcagcttatcaaccagacgctcagctacgccagggagctggagcgtattgtatgatttaaaccaatccctggtggttctttccccccctgtggccgcttggcatggcttgtactgtcctttgcatttgggatgatctttgatcgcagctctcatctgactgaaacatcatgtgaatctctgaagggctcagtctctccggcattggtctgttaactccatttgtatttcaccacattaactgcattgcttgaaaaatgccggcattcactgctgctgtgaacttttgatgggcttgatattgaattactgcctcggaattccactgacctctgcaggcttctgacgtcacgttttcttctgcatc

SEQ ID NO: 33502 - DNA, 1798 bp, Zea Mays
agtcgagcaggccgggcgcgctagggacgcggggggagattgggccgcgcgccaaggccggctagagaagatggtgctgggccgcggggggagattgggccaacgtaggccgagagggggagagaaagaaaggtgggcttctttgttgttttccattttgctattttctcttcctttttattcatattcaaatctaaatatagtaattgaaccaaagattcaaatatatttaatgagtttgaattgatgcacgaacacaacaatttgacataagaaaaactcgccatgatgtgcaacaatcaaggattctttttatggtttcattttactaggcttacatatatataaaacaaaataatttctccatttttaggaaaaagagaagaaaagcaaagaactgagagagtaacacctgaatttggtggattttagaaaagaaattttatacccctaaattcagggtgttacaggaaaagccgaaggcttgatcaaggcatggaggaatggtcaggcatgatgatcctgctatgttatggctgcggcgtggtggtaggcgaggggtatgcaggggagagtggaggaggagagcggcttgagaacaagaacgcagaacgtagcgcggaggtctgtcgtcgccggcggctgaaggcgccaccgtcgaagaacagcccacctctaggaggtaactgtattattcttcgatgccttattacaaactagcagccagcctttatagtataggcggcagggaacacacccaatcaacttattactttctataatggaaataggaaactctactgtctgctatagcagaaataggaaactactgattgatatactggagataggactcgcctgattgcttccaattcggctgcctgattgcttgcttcctttcctattcttccagctcttctagctcggttgccttattggtggaggttcccttcttgtgcctgcgcccataggtgttcctgtagaagaatgagtccacaacatgctaggtgaataacaggagcacaacagggctctatttgtactcctttctgtggtaagactggaacctagaaggggaaaacaaggggtaatatgttccacttatccactgcatgtcttccacgcaaggcatgacacagggagatagtagttgtgtccaaccgcacatggacagcagcaatatagcagcagacagcctagccagcatttggataagttttccacctcctcatcacttctttgtgtgtgcatgggtgccaagtacccccccttcagtaacatatctccttagatgccaaactccggaagtccctcgagcagatagtggatacagatattttctcggatatttctggagcagcactgaactggtactacttgactgcatactctacttcctcccctttgatctctcagttttccataacaactcccctttgatctctcagttttccataacaacagtgggagcacacataagggaatctgtccaccaaacaaccctctaccaactagtcataaggattatagctttatacctcatggatcagtcacaaaatagctccaaaaatttggaaaatcacactggaccaaagctagagttaactgaataatcttcagtttccgtagactgaaagtccaactttggacaaccattacttcacttttggtgcgggatcatgccccaacacaattaaagacacttattcactaacatatggtcttcaaactttctacaaaaacatcagtccaaaaccttatttattaagcagaacaagctccccaaacagcactccca

SEQ ID NO: 33503 - DNA, 1424 bp, Zea Mays
atggcggttgtcgacgccatggccctctccacgcccacaccagcgcgagcagagcagcctgacatcaccagggatactcctctgtatttggagtgtgcacctgaaaacatattgtctcctacctcagcaccggtggatgaggaagtaaataacgaagttggcgagcgtattcttactaaagctaatatagatcaaactgtagaaggagtaagcgctgaagatattgatccagatagagtggagttgcgaagagaatctcaaataaacaacctatcgggcttaaatttattcatcaaatcctttttgggaggcttgaaaaggcaacaaatattatcactttgtatgatgtttccaatatctggcacattcgtttgttgctacaggtaagttacatcagttttctttcaatggttcgacgatgtacagatataacttgaaggttcctccatggtaccacagagaccctacataaaagaaagggggggggttggttcagaaactttgaaagggttcttttatatagccccctttgaaaggggggctggagagagtactttgcagtttagcgtcaatacataaaagaaaggggagcttcttttatacagatacaacttgtagcatttccaaacagtccaggcagaggtatacaaggtatacaactgcttatttcatcacacgaccgcatatatgtcttgtagtatattaggtgtaatttagaatgtcttgtggcaaaggcaattttttaagtggcctaaggcaaagctcacattttgatgacaaatttggctttatttttttttgcagtagtcttgtactcttgtgtgcccatcatccatgttccacaataaataaactagaaacaaagccacgcttgcatatacatatttagtgtgatacttttctaatttatttgcacttaatatttgttcgtattgtagaatagtattgtactgtgaatctgtgatgaagttattctttatttgttcataaagagaacaagcaaaacagtggtactttttatgtttacctcctatcataatagattttactgcgaactcacaatgcggacttggatataccaattaaaaggtcagtcaattaacctgctttttaataaccatcagtaaggaggttatattgtttgatgtgttgcctctttttacattacacgatgacacacgtcattttgcttgtataaaaagggcaaacatagtggccgaggctcccaagtgagtggagtcaaatcaagattacatttcaatttgtgaattagatggacgattgtttataagaggtacaaaaactctttggttagatcctatctctggaaagctgactgtcttggcaggcaatgcaaatttctaggttgttggttttgaagatgatttcttacagttaagtatacacaagatgtggagtgcgag

SEQ ID NO: 33504 - DNA, 2426 bp, Zea Mays
atagtcatgtaacctgccgcctggcccctacattcaacggtcatctccgctccgctccgctcctccgctccacgccgccaccgctcctccgctcctcgcggctcaaacggtcaaatcgcatatccacaggaaaccccaagcggcggccgtccctgctgcggctctgcctccctctgctctccgattcgagcggattccatggccagagatgacgacggcgcgcccgcgcccggcgttccgggccaggtgtacctgcccgcgtggcgccgcgcgtacgaccgactcgtgaagatgctgcgccaggcgtacgcgcaggccgaggagctctccgtcgagcgcgagcatctcatctccgagctccagttcctgcagagcgccagccgcgagcgccaggagatctcccaggtccgcctccagcagatctgcaaggacaaggagctcagcaagagagtccttgaggctgagacggcggcgcgtcttggcggcaaggagcttcagattcactgccatcagaaactcgcagaacttgccgagagtgatttggagaacttcaaaagttgtatttcgaatttggctgctgaaaatactgagctaaaggaaaaactgaagatggttgaaagtcaggtgcagattagcaccgacaattcagatcacgagaaaagtgggaaatatactaaggaagagttacagaaattaaagaaagcttacaagacaatgagatcagaaaaggacaaggaaatttcagcattacaagcagaaaagaattttgtttggaaccagctcaaaaatatggaaaaagattacactggaactattaagagcaagcacatagaggtaaagcaggctaccgaagcggcacaaaagcttctacagaatgtagatgagctgcaagcggcagcccaaaagaaggatggtgaaattgataaattacaaatagaggtgtcaaatgccaaacagaggatctcaattcttgaggatgagctgcaaaacttgcgctccttggttaaggataaagatcataaaactggtaaaaatgaagatggtgaaccggagactcggaggatgttgaagaaggatgctaataaggcaaacagaaaatctaagtctgaatggctacctttagaggatatatcaagaacttcccaggtcacacctgataggcgagaagtgaagactacaagagcacttgcgtctgagactaatcagaagcgcaagcgtagctccttcaagtcctccatgtcgtgtggtaaccagagatgttacacaaggcttctgcaagttaaagctgctgtgtcacctgtgctcctcccgccaagtttcactgttccaaggctaaaaaccccacctcctccccaatcggatgaaatcactagcagctgtagtctgatgtgctgacaattgaaattgtcccaacacgccctactctgacatgacagatcttcgaacgctaggtgccgaaaggcatcaaaactgtgtctgcacaactcagcccaaggagtcttcactttcatgagctgagctgtggttgtcaagccatggccatccgagatccacccatgctaaacgttaagcgagatgcgcgtcttgatgggcttcagcttcacccccatgctctccggtgacagaagctcgggtgatatgcagaacgggctcagtgtgctccgggggctgctttcctgctgcgatggcctgtagagcccgtaccccatgaggaagtattccatcgggatcaccatcgcatggggctgctcttctgtgacaagtgaaccacaagcctgaacctgcacagttttggccacgaaaaaccaccttggccatcagccgttttactcctgtgtgtactgaagggatcaagttttttgaactgtatgttacctcgactagagcgcagtatctccggtccagctttgtggtcatgtggacagcgtccgcatggaactgtgagttttctccaacaaagatcagcgtccggcacttgagcttcttcagcgattccgttaagtcatgccgcctgatggacagagtcgtcagcttttgatgtatcccccatttctttatctgttcaggtcatgcacagcaagggctggatatgttcttgttacctgctaattgcctgaaggaaccgccagacgttagctccctgcctctcgtcaagtaactgcacagaagaagatttatcatgtttttaattttacatgttcaagtagcagataagataatagtcatcccagtttaacaacaccaggagaaaatagtggagataaatactaacacttctgcaggcttggacaatctctgactcaggatcttgcccgttaccacgaacgtcctgcacgaagcatcagaaaggagcggccctgagtggatgtggataataagcaaagcactatacgtagggctgggcaaaaaacccgaaacccgaaccc

SEQ ID NO: 33505 - DNA, 2010 bp, Zea Mays
cgagcgatccgatctcgattcctcgacctcggctgtagcctgtaggctcctcatagtcatgtaacctgccgcctggcccctacattcaacggtcatctccgctccgctccgctcctccgctccacgccgccaccgctcctccgctcctcgcggctcaaacggtcaaatcgcatatccacaggaaaccccaagcggcggccgtccctgctgcggctctgcctccctctgctctccgattcgagcggattccatggccagagatgacgacggcgcgcccgcgcccggcgttccgggccaggtgtacctgcccgcgtggcgccgcgcgtacgaccgactcgtgaagatgctgcgccaggcgtacgcgcaggccgaggagctctccgtcgagcgcgagcatctcatctccgagctccagttcctgcagagcgccagccgcgagcgccaggagatctcccaggtccgcctccagcagatctgcaaggacaaggagctcagcaagagagtccttgaggctgagacggcggcgcgtcttggcggcaaggagcttcagattcactgccatcagaaactcgcagaacttgccgagagtgatttggagaacttcaaaagttgtatttcgaatttggctgctgaaaatactgagctaaaggaaaaactgaagatggttgaaagtcaggtgcagattagcaccgacaattcagatcacgagaaaagtgggaaatatactaaggaagagttacagaaattaaagaaagcttacaagacaatgagatcagaaaaggacaaggaaatttcagcattacaagcagaaaagaattttgtttggaaccagctcaaaaatatggaaaaagattacactggaactattaagagcaagcacatagaggtaaagcaggctaccgaagcggcacaaaagcttctacagaatgtagatgagctgcaagcggcagcccaaaagaaggatggtgaaattgataaattacaaatagaggtgtcaaatgccaaacagaggatctcaattcttgaggatgagctgcaaaacttgcgctccttggttaaggataaagatcataaaactggtaaaaatgaagatggtgaaccggagactcggaggatgttgaagaaggatgctaataaggcaaacagaaaatctaagtctgaatggctacctttagaggatatatcaagaacttcccaggtcacacctgataggcgagaagtgaagactacaagagcacttgcgtctgagactaatcagaagcgcaagcgtagctccttcaagtcctccatgtcgtgtatcttcgaacgctaggtgccgaaaggcatcaaaactgtgtctgcacaactcagcccaaggagtcttcactttcatgagctgagctgtggttgtcaagccatggccatccgagatccacccatgctaaacgttaagcgagatgcgcgtcttgatgggcttcagcttcacccccatgctctccggtgacagaagctcgggtgatatgcagaacgggctcagtgtgctccgggggctgctttcctgctgcgatggcctgtagagcccgtaccccatgaggaagtattccatcgggatcaccatcgcatggggctgctcttctgtgacaagtgaaccacaagcctgaacctgcacagttttggccacgaaaaaccaccttggccatcagccgttttactcctgtgtgtactgaagggatcaagttttttgaactgtatgttacctcgactagagcgcagtatctccggtccagctttgtggtcatgtggacagcgtccgcatggaactgtcatgcacagcaagggctggatatgttcttgttacctgctaattgcctgaaggaaccgccagacgcttggacaatctctgactcaggatcttgcccgttaccacgaacgtcctgcacgaagcatcagaaaggagcggccctgagtggatgtggataataagcaaagcactatacgtagggctgggcaaaaaacccgaaacccgaaccc

SEQ ID NO: 33506 - DNA, 1707 bp, Zea Mays
atagtcatgtaacctgccgcctggcccctacattcaacggtcatctccgctccgctccgctcctccgctccacgccgccaccgctcctccgctcctcgcggctcaaacggtcaaatcgcatatccacaggaaaccccaagcggcggccgtccctgctgcggctctgcctccctctgctctccgattcgagcggattccatggccagagatgacgacggcgcgcccgcgcccggcgttccgggccaggtgtacctgcccgcgtggcgccgcgcgtacgaccgactcgtgaagatgctgcgccaggcgtacgcgcaggccgaggagctctccgtcgagcgcgagcatctcatctccgagctccagttcctgcagagcgccagccgcgagcgccaggagatctcccaggtccgcctccagcagatctgcaaggacaaggagctcagcaagagagtccttgaggctgagacggcggcgcgtcttggcggcaaggagcttcagattcactgccatcagaaactcgcagaacttgccgagagtgatttggagaacttcaaaagttgtatttcgaatttggctgctgaaaatactgagctaaaggaaaaactgaagatggttgaaagtcaggtgcagattagcaccgacaattcagatcacgagaaaagtgggaaatatactaaggaagagttacagaaattaaagaaagcttacaagacaatgagatcagaaaaggacaaggaaatttcagcattacaagcagaaaagaattttgtttggaaccagctcaaaaatatggaaaaagattacactggaactattaagagcaagcacatagaggtaaagcaggctaccgaagcggcacaaaagcttctacagaatgtagatgagctgcaagcggcagcccaaaagaaggatggtgaaattgataaattacaaatagaggtgtcaaatgccaaacagaggatctcaattcttgaggatgagctgcaaaacttgcgctccttggttaaggataaagatcataaaactggtaaaaatgaagatggtgaaccggagactcggaggatgttgaagaaggatgctaataaggcaaacagaaaatctaagtctgaatggctacctttagaggatatatcaagaacttcccaggtcacacctgataggcgagaagtgaagactacaagagcacttgcgtctgagactaatcagaagcgcaagcgtagctccttcaagtcctccatgtcgtgggtaaccagagatgttacacaaggcttctgcaagttaaagctgctgtgtcacctgtgctcctcccgccaagtttcactgttccaaggctaaaaaccccacctcctccccaatcggatgaaatcactagcagctgtagtctgatgtgctgacaattgaaattgtcccaacacgccctactctgacatgacaggtaggtgaggctaagtctatcagttggtgctgcagagcagcattgtatagttgattaactgtgtctgtagcatatttattctctcatctctgtgttggagtgcttgcaacatattgggtgctgtgaaacggatacggaaggtgtccatgtgtgttgtttaaggaacatatgacttgctggtagaacataacaacagcgtacttttgtgattcctgtgaatgaatgcagatcataaaactgtgaaagatgcaaagttcttttttttttgtttg

SEQ ID NO: 33507 - DNA, 1597 bp, Zea Mays
gttttttttttgagagaaaaagtttcttctgtgtttcctgatccgtgcttaatgttttcgtttccttttctgtgcggatgtgcgaattggttgtcgattttaggaaatttctggatcgttcccaaggttggagaaaccgtcgcctttgagagaaccggttggcagctcattgctctcgtgccatctcggttccgttgcgggcgtagagagagccggcatcggctctggatctctgtctgctccgtcccatccttcgcacaccatgtaccctagcgagatggcagacgggtttcccgaacagatctttatcgttttcggatttcagattcgtctcttccgagtgagaactgggcagggccacgcagttttctttcgtgttcacggtggtcatcggcaatcccagacgagttttcgctcggatctgtgagtctcttttggaagcccccgtcgatccgcctctcttggatcggcttttagtttgatctgctgattcgcgtccatggcctccataatcccggatttacttgcttagctgttcttccgattcatgggaggccgagatcgatgttccctgggagtttcgctgatagcgccttcttccccgtggaggtgcttcattagtaactcaccacacattacaactgtttcttgctgttatcccacgtattgccctgaatttacatcctatttaatctttttttgggaaaccgtatcgcttaagcattcatgtaatatgattctcaaggacatatccctttttcaaattagtcatatttttaatccagatcaaataaaaaacacaaaagaacataattcagcatccaatgataaaatatttctgggactgtaacatgttgccttcaaatggtaccaactttaaaccgacttgacttaggggtgtttggtttgcccctgctaaaatttagcccctatcacatcgaatgtttgaacctccgttcggggtattaaatgtagttggattataaaactaatttctcagccgaagattaaaaagtgagacgaatctagtacagttggttgggtctatatttcatactcatatttgaaagtcaaacgcttgatgtgatccgggctaaactttagtccacagaaccaaacacccccttactctctcatcctgggaccctagaacaaaattagccaaatgattaaatatgcacaataaaccaaatcaaactacattaggaatcaatgtgaggcaataacacatgaatagatatgtagaaatcaatgtgaggcaataacacatgaatagatggacaattcacagttcaaattgatttatactaatgaatttagtaaatttacacctgcctaaatcatataattggaaataattcaagagcggggcgtccatcgacaccctttggcatatatttgagagcagactgtctacctacatcgtaacatacattagcataccataagtactactcgtggaatcacaagagcttatcacacgtgctttaagttaccttatattattcctttttgttctatagaggtcgttatccctttattgagattaaagaattttgatattcaattcaaactttatttcttcttagaaatgttc

SEQ ID NO: 33508 - DNA, 2394 bp, Zea Mays
gtcgctactgccttagtcccagcctcgccccctctccgcggagcgcagccatctccctaccccgagctcaaatcgatgcccggacgccaacccgtccccaccgccgctgcgaagctggaggaaggggagcatgagctgagcatcgtcgacgtgctcctcgaggtgttgtcgggccgctgctagagagagattaggaagacgcccgaccaggtagtcgccattgccagggagatggtggcttacgctcgcagcctcggatgcactgacgtcgagttcagccccgaggacgccgacagattggagcaggttgtcgtcctcttgcccatggcagcgctaccattggaggtggacagtcgagctcccgggcatggcgtgggagcggccgcaaggtccggtcggcactcgacacacgcacacagaagaagcaaggttaaagctcggcggccgtcagccagcatccagtacgcggccaagacaggtccacttccaagcccgcccaactccaatctctagcaaggcagcaacagaaggtcaaatagagagttcttgtatcatattctaggggaagtcataaaagctggagctacgactctcaatatcccggacactgtcggatacaatcttccttatgaatttggaaagttgattgctgatataagggcaaacactcctggaattgaaaaggctatcatttccactcattgtcagaatgaccttggtcttgcgactgccaacacactagcgggcgctcgtgcaggagcacggcagttagaggttactattaatggtattggtgaaagggctggaaatgcttctttggaggaggttgtcatggcaattaaatgccgcagagaactgttagatggtctctatactggaatcgattcccgacatatcactttgacgagcaaaatggtgcaagagcatagtggacttcacgtgcagccacataaagctattgttggtgccaatttgttcgctcatgaaagtggaattcatcagggggttgttcaatgctgcattcagtggaataaagaattgtgaaagatgataaagataaactcgatcatcatcttccaccagtgcttgctgatctgttgtgcttcaccatcagggggccctggctattctcactttcttagcaaaatcggatgctccttcgttacggaagaccatgcagaacctatcaatcccattgccacatcagctaatattactacttctatggatatgcgtctaatgatgaataagatcaagattgttgagttcatctctgttctactatcaattggtagtgcagctgccaaaacacgactgattcaactaggagcaatcaagtacccgtttaacaacttcttgcaccaccatgtcgagaatatcatcggctcatgtttggagagtaagcaggatcgactgattgaccatgtccttgatgactgtaaacttgttacaagaattctggaagcagagaagaactctgctctgtcgtcagatttaacgaagcatacattgtcttcagagggaagatctccaccatgaataggaattgttggtcatatgacacggatagctaacatgctccttcagctggtcgacaccaacatcatggttcaatcacatttacagaggaggttgctctcttcggatgcctcaagcatggatcaaaagtcgggctcttcccgggttcatctcccgttcatgcttcacagtcccactgaatgcgtgctgcggaagtgacgctgcgtacaactgttccccttcaatactctgtgggcgtcctggatctacagtttgccctaacccatcaaatacatctcatgggatagtctgcacttcaccgaggcgggttacaaagttgtcatccaaggagtactaggggggtatgccaaacctcctctttcagaaacctgcaagggtgcggagttcaaagtttctcaacttcaccaatgtacagataagccaataaacaccttatcatacaatgccttgagctcttttatttgatctgatgaactcaagtacgtttagatttgtgctggtaaaaaagtacagtttagagttacaatgggcagtgtagatgctgcaggaccgagcatcttggacacttctcagagcggagaagagatccatcgatctagagtcatgtagttctacaatccacttggctgttgagaggaggtaaaaaaggtgaggattatactttgttttgtttgcttaagaattgcctgaaacgggagatggaggcgacaggtatagcgcccgatagggcgctactttttctagttgtatataattcatggagctggaatctcgttagctcggtttcggtgacgaggatctctacggtcctaagcaaagccatgaacttccagcaggatcagttgttacttttag

SEQ ID NO: 33509 - DNA, 2504 bp, Zea Mays
ccgtcgctactgccttagtcccagcctcgccccctctccgcggagcgcagccatctccctaccccgagctcaaatcgatgcccggacgccaacccgtccccaccgccgctgcgaagctggaggaaggggagcatgagctgagcatcgtcgacgtgctcctcgaggtgttgtcgggccgctgctagagagagattaggtgagagcttggttacccttcttgagaacagatccacaccttcatcgccaccagcgacattcacatgcagcataagctcaggaagacgcccgaccaggtagtcgccattgccagggagatggtggcttacgctcgcagcctcggatgcactgacgtcgagttcagccccgaggacgccgacaggttgtcgtcctcttgcccatggcagcgctaccattggaggtggacagtcgagctcccgggcatggcgtgggagcggccgcaaggtccggtcggcactcgacacacgcacacagaagaagcaaggttaaagctcggcggccgtcagccagcatccagtacgcggccaagacaggtccacttccaagcccgcccaactccaatctctagcaaggcagcaacagaaggtcaaatagagagttcttgtatcatattctaggggaagtcataaaagctggagctacgactctcaatatcccggacactgtcggatacaatcttccttatgaatttggaaagttgattgctgatataagggcaaacactcctggaattgaaaaggctatcatttccactcattgtcagaatgaccttggtcttgcgactgccaacacactagcgggcgctcgtgcaggagcacggcagttagaggttactattaatggtattggtgaaagggctggaaatgcttctttggaggaggttgtcatggcaattaaatgccgcagagaactgttagatggtctctatactggaatcgattcccgacatatcactttgacgagcaaaatggtgcaagagcatagtggacttcacgtgcagccacataaagctattgttggtgccaatttgttcgctcatgaaagtggaattcatcagggggttgttcaatgctgcattcagtggaataaagaattgtgaaagatgataaagataaactcgatcatcatcttccaccagtgcttgctgatctgttgtgcttcaccatcagggggccctggctattctcactttcttagcaaaatcgtaggtgcaggtgtgcagccacatgtttgaattgaagggatgctccttcgttacggaagaccatgcagaacctatcaatcccattgccacatcagctaatattactacttctatggatatgcgtctaatgatgaataagatcaagattgttgagttcatctctgttctactatcaattggtagtgcagctgccaaaacacgactgattcaactaggagcaatcaagtacccgtttaacaacttcttgcaccaccatgtcgagaatatcatcggctcatgtttggagagtaagcaggatcgactgattgaccatgtccttgatgactgtaaacttgttacaagaattctggaagcagagaagaactctgctctgtcgtcagatttaacgaagcatacattgtcttcagagggaagatctccaccatgaataggaattgttggtcatatgacacggatagctaacatgctccttcagctggtcgacaccaacatcatggttcaatcacatttacagaggaggttgctctcttcggatgcctcaagcatggatcaaaagtcgggctcttcccgggttcatctcccgttcatgcttcacagtcccactgaatgcgtgctgcggaagtgacgctgcgtacaactgttccccttcaatactctgtgggcgtcctggatctacagtttgccctaacccatcaaatacatctcatgggatagtctgcacttcaccgaggcgggttacaaagttgtcatccaaggagtactaggggggtatgccaaacctcctctttcagaaacctgcaagggtgcggagttcaaagtttctcaacttcaccaatgtacagataagccaataaacaccttatcatacaatgccttgagctcttttatttgatctgatgaactcaagtacgtttagatttgtgctggtaaaaaagtacagtttagagttacaatgggcagtgtagatgctgcaggaccgagcatcttggacacttctcagagcggagaagagatccatcgatctagagtcatgtagttctacaatccacttggctgttgagaggaggtaaaaaaggtgaggattatactttgttttgtttgcttaagaattgcctgaaacgggagatggaggcgacaggtatagcgcccgatagggcgctactttttctagttgtatataattcatggagctggaatctcgttagctcggtttcggtgacgaggatctctacggtcctaagcaaagccatgaacttccagcaggatcagttgttacttttag

SEQ ID NO: 33510 - DNA, 3275 bp, Zea Mays
catcccgtcgctactgccttagtcccagcctcgccccctctccgcggagcgcagccatctccctaccccgagctcaaatcgatgcccggacgccaacccgtccccaccgccgctgcgaagctggaggaaggggagcatgagctgagcatcgtcgacgtgctcctcgaggtgttgtcgggccgctgctagagagagattaggtgagagcttggttacccttcttgagaacagatccacaccttcatcgccaccagcgacattcacatgcagcataagctcaggaagacgcccgaccaggtagtcgccattgccagggagatggtggcttacgctcgcagcctcggatgcactgacgtcgagttcagccccgaggacgccgacagattggagcaggttgtcgtcctcttgcccatggcagcgctaccattggaggtggacagtcgagctcccgggcatggcgtgggagcggccgcaaggtccggtcggcactcgacacacgcacacagaagaagcaaggttaaagctcggcggccgtcagccagcatccagtacgcggccaagacaggtccacttccaagcccgcccaactccaatctctagcaaggcagcaacagaaggtcaaatagagagttcttgtatcatattctaggggaagtcataaaagctggagctacgactctcaatatcccggacactgtcggatacaatcttccttatgaatttggaaagttgattgctgatataagggcaaacactcctggaattgaaaaggctatcatttccactcattgtcagaatgaccttggtcttgcgactgccaacacactagcgggcgctcgtgcaggagcacggcagttagaggttactattaatggtattggtgaaagggctggaaatgcttctttggaggaggttgtcatggcaattaaatgccgcagagaactgttagatggtctctatactggaatcgattcccgacatatcactttgacgagcaaaatggtgcaagagcatagtggacttcacgtgcagccacataaagctattgttggtgccaatttgttcgctcatgaaagtggaattcatcagggggttgttcaatgctgcattcagtggaataaagaattgtgaaagatgataaagataaactcgatcatcatcttccaccagtgcttgctgatctgttgtgcttcaccatcagggggccctggctattctcactttcttagcaaaatcgtaggtgcaggtgtgcagccacatgtttgaattgaagggatgctccttcgttacggaagaccatgcagaacctatcaatcccattgccacatcagctaatattactacttctatggatatgcgtctaatgatgaataagatcaagattgttgagttcatctctgttctactatcaattggtagtgcagctgccaaaacacgactgattcaactaggagcaatcaagtacccgtttaacaacttcttgcaccaccatgtcgagaatatcatcggctcatgtttggagagtaagcaggatcgactgattgaccatgtccttgatgactgtaaacttgttacaagaattctggaagcagagaagaactctgctctgtcgtcagatttaacgaagcatacattgtcttcagagggaagatctccaccatgaataggaattgttggtcatatgacacggatagctaacatgctccttcagctggtcgacaccaacatcatggttcaatcacatttacaggtttgggttcgatgatcattgtatagagaggaaaacctgctattatttacatgttacagggtctgcaagcaatatcactaattcacttgtaatttgtcatgtacaatgctcaaaataaaataatgtcacctaaactttttttcgcttaattttgctatcttgattctatgggttgtattgagcttcgtgtgaagtcagagtttgagcaatatcacccctgaagttcatttgtgattcctgtatccgattaattagtgcacccatcccataatgaagctagccaatccggttagcctgaaatgcaatatgttgttcgttggattctgacccctactgggcgcccctttctactgcagaggaggttgctctcttcggatgcctcaagcatggatcaaaagtcgggctcttcccgggttcatctcccgttcatgtaaataggcagtggacgcatcttatataattcttatctactttggtccagtgctttattatgtatgcttagctcttattaaagtgtcaccttaaaccaaaatagctggaaataatcagatgttttgtaacaaattattggtcaaaattttagcatgatcctgtgttcccatttgaaatatattttagtatcataaaaatatattctctgcatccttaaatctttgtttctctttttgttgcttacatctgtggagcttatctcatcatctgcatgttatctgcactaacctagcacaaggaacctaacaactagagaagcttagagaaacaaagctattctatttaccatctctgttcttccatgttttatttactgagcaacaagagatgatcttgcaggcttcacagtcccactgaatgcgtgctgcggaagtgacgctgcgtacaactgttccccttcaatactctgtgggcgtcctggatctacagtttgccctaacccatcaaatacatctcatgggatagtctgcacttcaccgaggcgggttacaaagttgtcatccaaggagtactaggggggtatgccaaacctcctctttcagaaacctgcaagggtgcggagttcaaagtttctcaacttcaccaatgtacagataagccaataaacaccttatcatacaatgccttgagctcttttatttgatctgatgaactcaagtacgtttagatttgtgctggtaaaaaagtacagtttagagttacaatgggcagtgtagatgctgcaggaccgagcatcttggacacttctcagagcggagaagagatccatcgatctagagtcatgtagttctacaatccacttggctgttgagaggaggtaaaaaaggtgaggattatactttgttttgtttgcttaagaattgcctgaaacgggagatggaggcgacaggtatagcgcccgatagggcgctactttttctagttgtatataattcatggagctggaatctcgttagctcggtttcggtgacgaggatctctacggtcctaagcaaagccatgaacttccagcaggatcagttgttacttttag

SEQ ID NO: 33511 - DNA, 2766 bp, Zea Mays
tcccatcccgtcgctactgccttagtcccagcctcgccccctctccgcggagcgcagccatctccctaccccgagctcaaatcgatgcccggacgccaacccgtccccaccgccgctgcgaagctggaggaaggggagcatgagctgagcatcgtcgacgtgctcctcgaggtgttgtcgggccgctgctagagagagattaggtgagagcttggttacccttcttgagaacagatccacaccttcatcgccaccagcgacattcacatgcagcataagctcaggaagacgcccgaccaggtagtcgccattgccagggagatggtggcttacgctcgcagcctcggatgcactgacgtcgagttcagccccgaggacgccgacagattggagcaggttgtcgtcctcttgcccatggcagcgctaccattggaggtggacagtcgagctcccgggcatggcgtgggagcggccgcaaggtccggtcggcactcgacacacgcacacagaagaagcaaggttaaagctcggcggccgtcagccagcatccagtacgcggccaagacaggtccacttccaagcccgcccaactccaatctctagcaaggcagcaacagaaggtcaaatagagagttcttgtatcatattctaggggaagtcataaaagctggagctacgactctcaatatcccggacactgtcggatacaatcttccttatgaatttggaaagttgattgctgatataagggcaaacactcctggaattgaaaaggctatcatttccactcattgtcagaatgaccttggtcttgcgactgccaacacactagcgggcgctcgtgcaggagcacggcagttagaggttactattaatggtattggtgaaagggctggaaatgcttctttggaggaggttgtcatggcaattaaatgccgcagagaactgttagatggtctctatactggaatcgattcccgacatatcactttgacgagcaaaatggtgcaagagcatagtggacttcacgtgcagccacataaagctattgttggtgccaatttgttcgctcatgaaagtggaattcatcagggggttgttcaatgctgcattcagtggaataaagaattgtgaaagatgataaagataaactcgatcatcatcttccaccagtgcttgctgatctgttgtgcttcaccatcagggggccctggctattctcactttcttagcaaaatcgtaggtgcaggtgtgcagccacatgtttgaattgaagggatgctccttcgttacggaagaccatgcagaacctatcaatcccattgccacatcagctaatattactacttctatggatatgcgtctaatgatgaataagatcaaggtgaagtgatgctaccattagatgatcaatcattgagtagccatctatgtagagcagagttggaaatgtatcaaatccttcaaataggcagcgattcattatcaacctcatgcactttgacaaactaacatctctggtgtactttgtatatgcctgaaggagaatgatccaccaaaatccagtgtcgattgcattctcactaaaatctatttttttgttattaacactaactatttcatttccagattgttgagttcatctctgttctactatcaattggtagtgcagctgccaaaacacgactgattcaactaggagcaatcaagtacccgtttaacaacttcttgcaccaccatgtcgagaatatcatcggctcatgtttggagagtaagcaggatcgactgattgaccatgtccttgatgactgtaaacttgttacaagaattctggaagcagagaagaactctgctctgtcgtcagatttaacgaagcatacattgtcttcagagggaagatctccaccatgaataggaattgttggtcatatgacacggatagctaacatgctccttcagctggtcgacaccaacatcatggttcaatcacatttacagaggaggttgctctcttcggatgcctcaagcatggatcaaaagtcgggctcttcccgggttcatctcccgttcatgcttcacagtcccactgaatgcgtgctgcggaagtgacgctgcgtacaactgttccccttcaatactctgtgggcgtcctggatctacagtttgccctaacccatcaaatacatctcatgggatagtctgcacttcaccgaggcgggttacaaagttgtcatccaaggagtactaggggggtatgccaaacctcctctttcagaaacctgcaagggtgcggagttcaaagtttctcaacttcaccaatgtacagataagccaataaacaccttatcatacaatgccttgagctcttttatttgatctgatgaactcaagtacgtttagatttgtgctggtaaaaaagtacagtttagagttacaatgggcagtgtagatgctgcaggaccgagcatcttggacacttctcagagcggagaagagatccatcgatctagagtcatgtagttctacaatccacttggctgttgagaggaggtaaaaaaggtgaggattatactttgttttgtttgcttaagaattgcctgaaacgggagatggaggcgacaggtatagcgcccgatagggcgctactttttctagttgtatataattcatggagctggaatctcgttagctcggtttcggtgacgaggatctctacggtcctaagcaaagccatgaacttccagcaggatcagttgttacttttag

SEQ ID NO: 33512 - DNA, 3255 bp, Zea Mays
ccattcccatcccgtcgctactgccttagtcccagcctcgccccctctccgcggagcgcagccatctccctaccccgagctcaaatcgatgcccggacgccaacccgtccccaccgccgctgcgaagctggaggaaggggagcatgagctgagcatcgtcgacgtgctcctcgaggtgttgtcgggccgctgctagagagagattaggtgagagcttggttacccttcttgagaacagatccacaccttcatcgccaccagcgacattcacatgcagcataagctcaggaagacgcccgaccaggtagtcgccattgccagggagatggtggcttacgctcgcagcctcggatgcactgacgtcgagttcagccccgaggacgccgacagattggagcaggttgtcgtcctcttgcccatggcagcgctaccattggaggtggacagtcgagctcccgggcatggcgtgggagcggccgcaaggtccggtcggcactcgacacacgcacacagaagaagcaaggttaaagctcggcggccgtcagccagcatccagtacgcggccaagacaggtccacttccaagcccgcccaactccaatctctagcaaggcagcaacagaaggtcaaatagagagttcttgtatcatattctaggggaagtcataaaagctggagctacgactctcaatatcccggacactgtcggatacaatcttccttatgaatttggaaagttgattgctgatataagggcaaacactcctggaattgaaaaggctatcatttccactcattgtcagaatgaccttggtcttgcgactgccaacacactagcgggcgctcgtgcaggagcacggcagttagaggttactattaatggtattggtgaaagggctggaaatgcttctttggaggaggttgtcatggcaattaaatgccgcagagaactgttagatggtctctatactggaatcgattcccgacatatcactttgacgagcaaaatggtgcaagagcatagtggacttcacgtgcagccacataaagctattgttggtgccaatttgttcgctcatgaaagtggaattcatcagggggttgttcaatgctgcattcagtggaataaagaattgtgaaagatgataaagataaactcgatcatcatcttccaccagtgcttgctgatctgttgtgcttcaccatcagggggccctggctattctcactttcttagcaaaatcgtaggtgcagggatgctccttcgttacggaagaccatgcagaacctatcaatcccattgccacatcagctaatattactacttctatggatatgcgtctaatgatgaataagatcaagattgttgagttcatctctgttctactatcaattggtagtgcagctgccaaaacacgactgattcaactaggagcaatcaagtacccgtttaacaacttcttgcaccaccatgtcgagaatatcatcggctcatgtttggagagtaagcaggatcgactgattgaccatgtccttgatgactgtaaacttgttacaagaattctggaagcagagaagaactctgctctgtcgtcagatttaacgaagcatacattgtcttcagagggaagatctccaccatgaataggaattgttggtcatatgacacggatagctaacatgctccttcagctggtcgacaccaacatcatggttcaatcacatttacaggtttgggttcgatgatcattgtatagagaggaaaacctgctattatttacatgttacagggtctgcaagcaatatcactaattcacttgtaatttgtcatgtacaatgctcaaaataaaataatgtcacctaaactttttttcgcttaattttgctatcttgattctatgggttgtattgagcttcgtgtgaagtcagagtttgagcaatatcacccctgaagttcatttgtgattcctgtatccgattaattagtgcacccatcccataatgaagctagccaatccggttagcctgaaatgcaatatgttgttcgttggattctgacccctactgggcgcccctttctactgcagaggaggttgctctcttcggatgcctcaagcatggatcaaaagtcgggctcttcccgggttcatctcccgttcatgtaaataggcagtggacgcatcttatataattcttatctactttggtccagtgctttattatgtatgcttagctcttattaaagtgtcaccttaaaccaaaatagctggaaataatcagatgttttgtaacaaattattggtcaaaattttagcatgatcctgtgttcccatttgaaatatattttagtatcataaaaatatattctctgcatccttaaatctttgtttctctttttgttgcttacatctgtggagcttatctcatcatctgcatgttatctgcactaacctagcacaaggaacctaacaactagagaagcttagagaaacaaagctattctatttaccatctctgttcttccatgttttatttactgagcaacaagagatgatcttgcaggcttcacagtcccactgaatgcgtgctgcggaagtgacgctgcgtacaactgttccccttcaatactctgtgggcgtcctggatctacagtttgccctaacccatcaaatacatctcatgggatagtctgcacttcaccgaggcgggttacaaagttgtcatccaaggagtactaggggggtatgccaaacctcctctttcagaaacctgcaagggtgcggagttcaaagtttctcaacttcaccaatgtacagataagccaataaacaccttatcatacaatgccttgagctcttttatttgatctgatgaactcaagtacgtttagatttgtgctggtaaaaaagtacagtttagagttacaatgggcagtgtagatgctgcaggaccgagcatcttggacacttctcagagcggagaagagatccatcgatctagagtcatgtagttctacaatccacttggctgttgagaggaggtaaaaaaggtgaggattatactttgttttgtttgcttaagaattgcctgaaacgggagatggaggcgacaggtatagcgcccgatagggcgctactttttctagttgtatataattcatggagctggaatctcgttagctcggtttcggtgacgaggatctctacggtcctaagcaaagccatgaacttccagcaggatcagttgttacttttag

SEQ ID NO: 33513 - DNA, 1789 bp, Zea Mays
cccgtcgctactgccttagtcccagcctcgccccctctccgcggagcgcagccatctccctaccccgagctcaaatcgatgcccggacgccaacccgtccccaccgccgctgcgaagctggaggaaggggagcatgagctgagcatcgtcgacgtgctcctcgaggtgttgtcgggccgctgctagagagagattaggtgagagcttggttacccttcttgagaacagatccacaccttcatcgccaccagcgacattcacatgcagcataagctcaggaagacgcccgaccaggtagtcgccattgccagggagatggtggcttacgctcgcagcctcggatgcactgacgtcgagttcagccccgaggacgccgacagattggagcaggttgtcgtcctcttgcccatggcagcgctaccattggaggtggacagtcgagctcccgggcatggcgtgggagcggccgcaaggtccggtcggcactcgacacacgcacacagaagaagcaaggttaaagctcggcggccgtcagccagcatccagtacgcggccaagacaggtccacttccaagcccgcccaactccaatctctagcaaggcagcaacagaaggtcaaatagagagttcttgtatcatattctaggggaagtcataaaagctggagctacgactctcaatatcccggacactgtcggatacaatcttccttatgaatttggaaagttgattgctgatataagggcaaacactcctggaattgaaaaggctatcatttccactcattgtcagaatgaccttggtcttgcgactgccaacacactagcgggcgctcgtgcaggagcacggcagttagaggttactattaatggtattggtgaaagggctggaaatgcttctttggaggaggttgtcatggcaattaaatgccgcagagaactgttagatggtctctatactggaatcgattcccgacatatcactttgacgagcaaaatggtgcaagagcatagtggacttcacgtgcagccacataaagctattgttggtgccaatttgttcgctcatgaaagtggaattcatcagggggttgttcaatgctgcattcagtggaataaagaattgtgaaagatgataaagataaactcgatcatcatcttccaccagtgcttgctgatctgttgtgcttcaccatcagggggccctggctattctcactttcttagcaaaatcgtaggtgcaggtgtgcagccacatgtttgaattgaaggtgcacagatagcaaaattcctaaataagtttttgtctaaatttatgggagctctgtcaggcagtgctttgtatacaaaggattctatcataattgatgaagtgattactatgatttgtggtctatgagcttaaagaactactcatattcactttccatacataatagtaatatgatatatggtttatcttcgtccctgattgatccactttcatttagtggaatactattgtatttggtttggaattcgaatatttcacacctttatgaaagtatatgtacaaatttattttaaattcatgggcatgagagaagtaacatgatttttatacagggatgctccttcgttacggaagaccatgcagaacctatcaatcccattgccacatcagctaatattactacttctatggatatgcgtctaatgatgaataagatcaagattgttgagttcatctctgttctactatcaattggtagtgcagctgccaaaacacgactgattcaactaggagcaat

SEQ ID NO: 33514 - DNA, 1611 bp, Zea Mays
tttctcccctctccggtgtcctgtccttccctccctgccatattttaagcagggccgaggcgagctcccagatgcaaacatcctcctctcctcgcagacatcttatcccctcccgatcgaggcccccgtttcctcctcctccggccaccgcacctagctgtcttaacttgccgttcgcagcctcacgcccatggctaggaagtgctctagctgtgggaacaacggccacaactcgaggacctgcagcgggcacggcgccgggggcgggggcgtgaggctgttcggggtgcagctgcacgtggggtcctcgcccgtggccatgaagaagtgcttcagcatggagtgcctgtcgtcgtcggcgtccgccgcgccggcgtactacgcggccgctctcgccgcgaccaacagcgcctcgccgtcggcctcctcctcctcgtcgctcgtctcggtggaggaggcccccgagaagatggcccacgggtacctctccgacgggctcatgggcagggcggcgcaggagaggaagaaggcaggcgttccatggacggaggacgagcacaggcgattcctggcgggcctggagaagctcgggaagggcgactggcgaggcatctcccggcacttcgtgacgacgcggaccccgacgcaggtggccagccacgcccagaagtacttcctccggcagagcagcctgacgcacaagaagcgcaggtccagcctcttcgacgtggtggagaacgccgagagggcggcgacgagctccatcaagggcatggagcgcctgcggctcaaggacgccatcacgaccgcgaccgcgactggctccgcagaacccggaaccgggacgacggcacagctcccgccggccctgtcgctcggcgtcggcaggccaccagcgaggcccgaccacgccgcgctgcctccgagcagcctgctgtccctgcagctgccgcggtgctcggcgggaattggccgcacggcgccgagcctggccctggcgccgccgaaacacagccacccttcttcgtcgctgacggcggcaaaggctggtggcctggcgccggacctggagctgaagatctcgaccgcccggcagagcgagcaccagcagcaggtccagatggggccatcgctgccgccgccgccgccgccgccgcagaggacgccctttctggggaccatcagggtcacatgacatgaccggcaaagacggcggcggttagtagggaatatcctgctggtaggagaagagcttttgcccatctgaagctggagaaggttgcttcaaaagataggacggggtgggaaaactggaaagaaggaagcttttggcagcgtgtgcgtgtgtgtgtgttgctggcacctggcagtggcagccgagacgacgatggcgtcgtgtatcatgtgggtgttgtgtatatcatatcatcatcatccgaaagatggaaactttactggcctaatttttgtctttttttttgtctcttgcgaataaagaacggctgccgttgtctctcactgaaaaggaaactttactttttaacgtttgtaaaaagactaagttttaacgtttttttttcgcttctttaataaaaaatcctcagtagagac

SEQ ID NO: 33515 - DNA, 1609 bp, Zea Mays
tttctcccctctccggtgtcctgtccttccctccctgccatattttaagcagggccgaggcgagctcccagatgcaaacatcctcctctcctcgcagacatcttatcccctcccgatcgaggcccccgtttcctcctcctccggccaccgcacctagctgtcttaacttgccgttcgcagcctcacgcccatggctaggaagtgctctagctgtgggaacaacggccacaactcgaggacctgcagcgggcacggcgccgggggcgggggcgtgaggctgttcggggtgcagctgcacgtggggtcctcgcccgtggccatgaagaagtgcttcagcatggagtgcctgtcgtcgtcggcgtccgccgcgccggcgtactacgcggccgctctcgccgcgaccaacagcgcctcgccgtcggcctcctcctcctcgtcgctcgtctcggtggaggaggcccccgagaagatggcccacgggtacctctccgacgggctcatgggcagggcggcgcaggagaggaagaaggggcgttccatggacggaggacgagcacaggcgattcctggcgggcctggagaagctcgggaagggcgactggcgaggcatctcccggcacttcgtgacgacgcggaccccgacgcaggtggccagccacgcccagaagtacttcctccggcagagcagcctgacgcacaagaagcgcaggtccagcctcttcgacgtggtggagaacgccgagagggcggcgacgagctccatcaagggcatggagcgcctgcggctcaaggacgccatcacgaccgcgaccgcgactggctccgcagaacccggaaccgggacgacggcacagctcccgccggccctgtcgctcggcgtcggcaggccaccagcgaggcccgaccacgccgcgctgcctccgagcagcctgctgtccctgcagctgccgcggtgctcggcgggaattggccgcacggcgccgagcctggccctggcgccgccgaaacacagccacccttcttcgtcgctgacggcggcaaaggctggtggcctggcgccggacctggagctgaagatctcgaccgcccggcagagcgagcaccagcagcaggtccagatggggccatcgctgccgccgccgccgccgccgccgcagaggacgccctttctggggaccatcagggtcacatgacatgaccggcaaagacggcggcggttagtagggaatatcctgctggtaggagaagagcttttgcccatctgaagctggagaaggttgcttcaaaagataggacggggtgggaaaactggaaagaaggaagcttttggcagcgtgtgcgtgtgtgtgtgttgctggcacctggcagtggcagccgagacgacgatggcgtcgtgtatcatgtgggtgttgtgtatatcatatcatcatcatccgaaagatggaaactttactggcctaatttttgtctttttttttgtctcttgcgaataaagaacggctgccgttgtctctcactgaaaaggaaactttactttttaacgtttgtaaaaagactaagttttaacgtttttttttcgcttctttaataaaaaatcctcagtagagac

SEQ ID NO: 33516 - DNA, 1610 bp, Zea Mays
tttctcccctctccggtgtcctgtccttccctccctgccatattttaagcagggccgaggcgagctcccagatgcaaacatcctcctctcctcgcagacatcttatcccctcccgatcgaggcccccgtttcctcctcctccggccaccgcacctagctgtcttaacttgccgttcgcagcctcacgcccatggctaggaagtgctctagctgtgggaacaacggccacaactcgaggacctgcagcgggcacggcgccgggggcgggggcgtgaggctgttcggggtgcagctgcacgtggggtcctcgcccgtggccatgaagaagtgcttcagcatggagtgcctgtcgtcgtcggcgtccgccgcgccggcgtactacgcggccgctctcgccgcgaccaacagcgcctcgccgtcggcctcctcctcctcgtcgctcgtctcggtggaggaggcccccgagaagatggcccacgggtacctctccgacgggctcatgggcagggcggcgcaggagaggaagaagggtgcgttccatggacggaggacgagcacaggcgattcctggcgggcctggagaagctcgggaagggcgactggcgaggcatctcccggcacttcgtgacgacgcggaccccgacgcaggtggccagccacgcccagaagtacttcctccggcagagcagcctgacgcacaagaagcgcaggtccagcctcttcgacgtggtggagaacgccgagagggcggcgacgagctccatcaagggcatggagcgcctgcggctcaaggacgccatcacgaccgcgaccgcgactggctccgcagaacccggaaccgggacgacggcacagctcccgccggccctgtcgctcggcgtcggcaggccaccagcgaggcccgaccacgccgcgctgcctccgagcagcctgctgtccctgcagctgccgcggtgctcggcgggaattggccgcacggcgccgagcctggccctggcgccgccgaaacacagccacccttcttcgtcgctgacggcggcaaaggctggtggcctggcgccggacctggagctgaagatctcgaccgcccggcagagcgagcaccagcagcaggtccagatggggccatcgctgccgccgccgccgccgccgccgcagaggacgccctttctggggaccatcagggtcacatgacatgaccggcaaagacggcggcggttagtagggaatatcctgctggtaggagaagagcttttgcccatctgaagctggagaaggttgcttcaaaagataggacggggtgggaaaactggaaagaaggaagcttttggcagcgtgtgcgtgtgtgtgtgttgctggcacctggcagtggcagccgagacgacgatggcgtcgtgtatcatgtgggtgttgtgtatatcatatcatcatcatccgaaagatggaaactttactggcctaatttttgtctttttttttgtctcttgcgaataaagaacggctgccgttgtctctcactgaaaaggaaactttactttttaacgtttgtaaaaagactaagttttaacgtttttttttcgcttctttaataaaaaatcctcagtagagac

SEQ ID NO: 33517 - DNA, 1955 bp, Zea Mays
cttttttttatatatatgccgcaataatggcaagcaggaaacatgcgcaacagccccttttttttctctcccatatccagttgaccctgtcggaataaaaatctgtgccaaatatgcacgcaagattgcaacgagattcattcctgatatgagccacacaataaacatatgtagaagcttgacagcgaccgcaatattattggaggggatgggtttgcagattcctgtggattctaagcgcggtttaaccataagcagggcatgatgccaatgcgtcgccgtcatgggcgtccaggtgtgcggctgtgcgctccccagcaactcgctagtcccagccaggccacatctttctcccctctccggtgtcctgtccttccctccctgccatattttaagcagggccgaggcgagctcccagatgcaaacatcctcctctcctcgcagacatcttatcccctcccgatcgaggcccccgtttcctcctcctccggccaccgcacctagctgtcttaacttgccgttcgcagcctcacgcccatggctaggaagtgctctagctgtgggaacaacggccacaactcgaggacctgcagcgggcacggcgccgggggcgggggcgtgaggctgttcggggtgcagctgcacgtggggtcctcgcccgtggccatgaagaagtgcttcagcatggagtgcctgtcgtcgtcggcgtccgccgcgccggcgtactacgcggccgctctcgccgcgaccaacagcgcctcgccgtcggcctcctcctcctcgtcgctcgtctcggtggaggaggcccccgagaagatggcccacgggtacctctccgacgggctcatgggcagggcggcgcaggagaggaagaagggcgttccatggacggaggacgagcacaggcgattcctggcgggcctggagaagctcgggaagggcgactggcgaggcatctcccggcacttcgtgacgacgcggaccccgacgcaggtggccagccacgcccagaagtacttcctccggcagagcagcctgacgcacaagaagcgcaggtccagcctcttcgacgtggtggagaacgccgagagggcggcgacgagctccatcaagggcatggagcgcctgcggctcaaggacgccatcacgaccgcgaccgcgactggctccgcagaacccggaaccgggacgacggcacagctcccgccggccctgtcgctcggcgtcggcaggccaccagcgaggcccgaccacgccgcgctgcctccgagcagcctgctgtccctgcagctgccgcggtgctcggcgggaattggccgcacggcgccgagcctggccctggcgccgccgaaacacagccacccttcttcgtcgctgacggcggcaaaggctggtggcctggcgccggacctggagctgaagatctcgaccgcccggcagagcgagcaccagcagcaggtccagatggggccatcgctgccgccgccgccgccgccgccgcagaggacgccctttctggggaccatcagggtcacatgacatgaccggcaaagacggcggcggttagtagggaatatcctgctggtaggagaagagcttttgcccatctgaagctggagaaggttgcttcaaaagataggacggggtgggaaaactggaaagaaggaagcttttggcagcgtgtgcgtgtgtgtgtgttgctggcacctggcagtggcagccgagacgacgatggcgtcgtgtatcatgtgggtgttgtgtatatcatatcatcatcatccgaaagatggaaactttactggcctaatttttgtctttttttttgtctcttgcgaataaagaacggctgccgttgtctctcactgaaaaggaaactttactttttaacgtttgtaaaaagactaagttttaacgtttttttttcgcttctttaataaaaaatcctcagtagagac

SEQ ID NO: 33518 - DNA, 1763 bp, Zea Mays
gccgtatacgtacagcatacaggttccgtcgtcccgcaccgcacagccgctcaaaaaccctagttctcgccgccacctccgccgctcggcgcccgccgccagtccaccacttgcccacctcgtcgcgacgtcgcgcagatatcttcaccgcccgtcgcagcaggttcagctgctggcacgggacatttgaaccggcactacaaagcttgtttagcaaagctaggaaagactcaaggaggaggtacgcaaacccatcttaactttgctgctgatggtacaataagtacatgggtttacaacccacaggtagcacgtgatgaaatagccaaatttattgtttgtgaagatttaccgattatgttgggcgagagccaaaattttaaaaacttgattcaacgtgctttttgcccacaatatcagcctgtcactagaaaaactacaaaatctgatttgattgcaatatacaaaaataaacttgctgctcttaaagagtcttttaaaaaggttcagttctcatttgctttaacatcagacatttggacatcatcacaccaaaaaacatgttatgtttctgttgttgcccactacttggacgattcttatgctttaaacaagcgagtcatcggttttagaatgatggatgagtcacacactggagatgcaattgccaaccatatacttgaggtagttcgtgattttgagatagatggtaagattctctctataacccttgacaatgcttccgcaaacacaactgctattgatattctcacccctcggttgcagtcatatatacaaggttatattatccaccataggtgtgtgtgccacattataaatttggttgttcaagctggtataacagttgcaaataagtacttgaataatatccgtgctgctattcgtttcataacaagcacacctcaaatgatttctagatttgctgagtattgtaaagctcaggatatgagaccaagaaaatttggtcttgatatgaagatcagatggaattcaacctaccatatgcttaagagtttagaaggttatgaacaattaattactgtctttgtgaatgccaatggaggtaaagtttctaaaatactttgaacaaatatcacatgtatactgttttgcaactatttttgatccacgcaagaaactggatggtttgcaaattgcattggagggaataggtgatgcattggacatggatttttcagatgcttttaatcatgcaaaagatgacttgtttcgtgtctttggttactattacaaaaaatatggtgaaagtgagatagactcacctgctgttgagtttggtgcagaaatttcagatacctctcttacagctcacttatggaagagagcgaaggggaaagaaaatgtcgcctcatctcaaaggtggaatcctaatgctgaattaaatcactatctgtccactaactttgtaggtactgatcgcgcactaaggggtgagaagatttggacattgattagacaataatgtttagttgctgctacagattgaatttgctactatgaactttatgtggttgtaatatttagactttatttggacattgccggtctgtactcttttccttatagaggggccctgtaatggggtataaggtttttaatgagacaggccgaggaatatatttttgtttccctcaaaatgtgtgttgattcattagttcacatgtttgtaacatatagtctggtgctactgttttagtttgtaatgaaatactatcatgtat

SEQ ID NO: 33519 - DNA, 2570 bp, Zea Mays
cattttgccgtatacgtacagcatacaggttccgtcgtcccgcaccgcacagccgctcaaaaaccctagttctcgccgccacctccgccgctcggcgcccgccgccagtccaccacttgcccacctcgtcgcgacgtcgcgcagatatcttcaccgcccgtcgcagcaggtgagttccctggcccgttgcgtcactgcgtgttgtgacttgtgaggctaatacaccatactgcatacatcctgtgagggcgtgaggccaatacagcattcaatcttgtggatccgtggcccgtagcccgtggcgtcgctgcgtggagatcggagcggtcaagtttagtaaatggcgcgacaggccaactgtcccaacaaatggctcttcctcggacaactcagagcgcatggcacgagagcccgcccgcccttggtcaagtccagtaaatggcgcgacagagtgctgcttcgattcccattaagtgtgtgttgcttcgattttcagttagtcaattctataaaaccgaccctctctttgttaggctgccagagactttgatttggtgatccctgtgagtagatatggtgagaagacgtcctgtcatggcgtcgaagtccagagccagggctagtgaagccaaccgtaatcctagtagtagtagcgttggtgaaccagcacaaactgccgctaatgtgggtgtggctgctggtgaactaggtgtggatgctggtgaactgggtgtgggtgtgggttgtggggctgctggtgaatcagcaacaataccatttgtcgtctatgggggtgaattgggagatgcggttgctgctgaatgtgcaccaccgttggcatcatcaagcagtgcaaagtgtagttcgagggcagactgttggaaacatatggtgaagaaggaagtcattgaggatggtgtagtacatttttttgctgtatgtaattattgcaaaactgaattgagtgcaggttcagctgctggcacgggacatttgaaccggcactacaaagcttgtttagcaaagctaggaaagactcaaggaggaggtacgcaaacccatcttaactttgctgctgatggtacaataagtacatgggtttacaacccacaggtagcacgtgatgaaatagccaaatttattgtttgtgaagatttaccgattatgttgggcgagagccaaaattttaaaaacttgattcaacgtgctttttgcccacaatatcagcctgtcactagaaaaactacaaaatctgatttgattgcaatatacaaaaataaacttgctgctcttaaagagtcttttaaaaaggttcagttctcatttgctttaacatcagacatttggacatcatcacaccaaaaaacatgttatgtttctgttgttgcccactacttggacgattcttatgctttaaacaagcgagtcatcggttttagaatgatggatgagtcacacactggagatgcaattgccaaccatatacttgaggtagttcgtgattttgagatagatggtaagattctctctataacccttgacaatgcttccgcaaacacaactgctattgatattctcacccctcggttgcagtcatatatacaaggttatattatccaccataggtgtgtgtgccacattataaatttggttgttcaagctggtataacagttgcaaataagtacttgaataatatccgtgctgctattcgtttcataacaagcacacctcaaatgatttctagatttgctgagtattgtaaagctcaggatatgagaccaagaaaatttggtcttgatatgaagatcagatggaattcaacctaccatatgcttaagagtttagaaggttatgaacaattaattactgtctttgtgaatgccaatggaggtaaagtttctaaaatactttgaacaaatatcacatgtatactgttttgcaactatttttgatccacgcaagaaactggatggtttgcaaattgcattggagggaataggtgatgcattggacatggatttttcagatgcttttaatcatgcaaaagatgacttgtttcgtgtctttggttactattacaaaaaatatggtgaaagtgagatagactcacctgctgttgagtttggtgcagaaatttcagatacctctcttacagctcacttatggaagagagcgaaggggaaagaaaatgtcgcctcatctcaaaggtggaatcctaatgctgaattaaatcactatctgtccactaactttgtaggtactgatcgcgcactaaggggtgagaagatttggacattgattagacaataatgtttagttgctgctacagattgaatttgctactatgaactttatgtggttgtaatatttagactttatttggacattgccggtctgtactcttttccttatagaggggccctgtaatggggtataaggtttttaatgagacaggccgaggaatatatttttgtttccctcaaaatgtgtgttgattcattagttcacatgtttgtaacatatagtctggtgctactgttttagtttgtaatgaaatactatcatgtat

SEQ ID NO: 33520 - DNA, 1877 bp, Zea Mays
cattttgccgtatacgtacagcatacaggttccgtcgtcccgcaccgcacagccgctcaaaaaccctagttctcgccgccacctccgccgctcggcgcccgccgccagtccaccacttgcccacctcgtcgcgacgtcgcgcagatatcttcaccgcccgtcgcagcaggtgagttccctggcccgttgcgtcactgcgtgttgtgacttgtgaggctaatacaccatactgcatacatcctgtgagggcgtgaggccaatacagcattcaatcttgtggatccgtggcccgtagcccgtggcgtcgctgcgtggagatcggagcggtcaagtttagtaaatggcgcgacaggccaactgtcccaacaaatggctcttcctcggacaactcagagcgcatggcacgagagcccgcccgcccttggtcaagtccagtaaatggcgcgacagagtgctgcttcgattcccattaagtgtgtgttgcttcgattttcagttagtcaattctataaaaccgaccctctctttgttaggctgccagagactttgatttggtgatccctgtgagtagatatggtgagaagacgtcctgtcatggcgtcgaagtccagagccagggctagtgaagccaaccgtaatcctagtagtagtagcgttggtgaaccagcacaaactgccgctaatgtgggtgtggctgctggtgaactaggtgtggatgctggtgaactgggtgtgggtgtgggttgtggggctgctggtgaatcagcaacaataccatttgtcgtctatgggggtgaattgggagatgcggttgctgctgaatgtgcaccaccgttggcatcatcaagcagtgcaaagtgtagttcgagggcagactgttggaaacatatggtgaagaaggaagtcattgaggatggtgtagtacatttttttgctgtaaagtttctaaaatactttgaacaaatatcacatgtatactgttttgcaactatttttgatccacgcaagaaactggatggtttgcaaattgcattggagggaataggtgatgcattggacatggatttttcagatgcttttaatcatgcaaaagatgacttgtttcgtgtctttggttactattacaaaaaatatggtgaaagtgagatagactcacctgctgttgagtttggtgcagaaatttcagatacctctcttacagctcacttatggaagagagcgaaggggaaagaaaatgtcgcctcatctcaaaggtggaatcctaatgctgaattaaatcactatctgtccactaactttgtaggtactgatcgcgcactaaggggtgagaaggtaaagttacttgagtggtggagggaccacaagtatagttttcctgtcttgtctcagtttgctagagatatacttgttattcctgtctcaactgtttcctctgaagctacctttagcactgttgggagaataattgaggaacgaaggtcttctctagcacctaagacggtggaggcaatcacttgccttaaagattggaacagagccgaagagcggaagcaacatcaacttgaggatcctgagattgaatttgccgctgcagatttggacattgattagacaataatgtttagttgctgctacagattgaatttgctactatgaactttatgtggttgtaatatttagactttatttggacattgccggtctgtactcttttccttatagaggggccctgtaatggggtataaggtttttaatgagacaggccgaggaatatatttttgtttccctcaaaatgtgtgttgattcattagttcacatgtttgtaacatatagtctggtgctactgttttagtttgtaatgaaatactatcatgtat

SEQ ID NO: 33521 - DNA, 1845 bp, Zea Mays
gaatgcccaaaatcctggggaatattccactttccctatacattacattacatacacgccggagcggcatttctttcgtcctctccaaaccgtgtaaataaacgggaaccttctatcctcccccttttgggttcggtcctcctccgtccgtcgccgtcgtcaaacctcaagcgcgacgtgtgtaaacggcccgcgccttcggcagacgccaacaacagactcagactatactcgcagcagaaaggttagttagctgagctccgcggggggtcgaaccgagactcttcgtcgcgcgcgccgcagggccagcccagcaggcggcggacgcgaaagcttgctcagctctgtgttcaccggcggcacgggccgtcccggcgatggaatccttcggtgtccctcctgcgcccgtggcggcgccggagaagaggaagaagccgctcgacctcaaggaccccgtccccgccgccgccgccgccgccgccaacggcggcggcgccaccaaggcgtccccagcggcgaagtgggcggagaagaagaagctggtgggcggcgacgccggctacgtgctcgaggacgtgccgcacctcacggattacctgccccagctcccgacatacccgaaccccctccaagacaacccggcgtattcagtcgtcaagcagtacttcgtcaacccagacgacaccgtcacgcagaagatcgttgttcacaagaccagcgccaggggcacccacttccggcgcgccgggccacggcagcgggtgtacttccagcccgacgaggtgaacgccgccatcgtcacctgcggcgggctctgccccggcttgaacaccgtcatccgtgagcttgtctgcggcctgtatgacatgtacggcgtcaccagtgtcgttggcatagagggtggatacaagggtttctattccaaaaacacggtcgcgttgacaccgagatcagtgaacggcatccacaagagaggcgggacggtcctgggaacgtcgagaggagggcatgacactgccaagattgttgactgtcttcaggaccgtggtattaaccaggtctatattatcggcggcgacggtactcagaaaggcgcctctgtgatttacgagtccgtagacggggcctcaaatgcgctgtggtcggcgtcccaaagaccatcgataatgacatcgcggtgatcgacaagtcgttcggatttgacactgccgtggaggaggcccagagggccatcaacgctgctcatgtcgaggctgagagtgcagagaacggcatcggtgtcgtgaagctgatgggtcgcaacagcggatcatttcaagaagaagccccgtttcccgataactctcaagtacatcgacccgacttacatgatccgcgccgtcagttcaaacgcttccgacaacgtctactgcactctgctagcccacagcgcgctccatggcgccatggcggggtacaccggcttcatcgtcgctccggtcaatggcagacacgcctacatcccgttctataggatcaccgagaagcagaacaaggtggtgatcacggaccggatgtgggcgagggtgctgtgctcgacgaaccagccctgcttcctgagccacgaggacgtggagaacatgaagcacgacgacgacgagcaccacctgcacaacacgctgctcctggactcgccggaaaactcgtccaaatgaaatggggcacaagacttgttttgcttttttgggtgctggcgttgtagagattagcgaccgctatatgatagggttggataatgtgagcattttgtaataatataagcttcctgaagtaagctcgttttggctgttcgtgtattaatttcgg

SEQ ID NO: 33522 - DNA, 2074 bp, Zea Mays
gaatgcccaaaatcctggggaatattccactttccctatacattacattacatacacgccggagcggcatttctttcgtcctctccaaaccgtgtaaataaacgggaaccttctatcctcccccttttgggttcggtcctcctccgtccgtcgccgtcgtcaaacctcaagcgcgacgtgtgtaaacggcccgcgccttcggcagacgccaacaacagactcagactatactcgcagcagaaaggttagttagctgagctccgcggggggtcgaaccgagactcttcgtcgcgcgcgccgcagggccagcccagcaggcggcggacgcgaaagcttgctcagctctgtgttcaccggcggcacgggccgtcccggcgatggaatccttcggtgtccctcctgcgcccgtggcggcgccggagaagaggaagaagccgctcgacctcaaggaccccgtccccgccgccgccgccgccgccgccaacggcggcggcgccaccaaggcgtccccagcggcgaagtgggcggagaagaagaagctggtgggcggcgacgccggctacgtgctcgaggacgtgccgcacctcacggattacctgccccagctcccgacatacccgaaccccctccaagacaacccggcgtattcagtcgtcaagcagtacttcgtcaacccagacgacaccgtcacgcagaagatcgttgttcacaagaccagcgccaggggcacccacttccggcgcgccgggccacggcagcgggtgtacttccagcccgacgaggtgaacgccgccatcgtcacctgcggcgggctctgccccggcttgaacaccgtcatccgtgagcttgtctgcggcctgtatgacatgtacggcgtcaccagtgtcgttggcatagagggtggatacaagggtttctattccaaaaacacggtcgcgttgacaccgagatcagtgaacggcatccacaagagaggcgggacggtcctgggaacgtcgagaggagggcatgacactgccaagattgttgactgtcttcaggaccgtggtattaaccaggtctatattatcggcggcgacggtactcagaaaggcgcctctgtgatttacgaggaagtccgtagacggggcctcaaatgcgctgtggtcggcgtcccaaagaccatcgataatgacatcgcggtgatcgacaagtcgttcggatttgacactgccgtggaggaggcccagagggccatcaacgctgctcatgtcgaggctgagagtgcagagaacggcatcggtgtcgtgaagctgatgggtcgcaacagcggactgttgcttaatcccggagtcgcccttctaccttgaagggaagggagggctccttgagtttgtcgagagacggctcaaggacaacggacacatggtcatcgtggtggccgagggtgctggacaggatctcatcgcgaaaagcatgaattccgtggacacccaggatgcttcgggaaataagctgcttctggatgttggcctctggctatcccagaagataaaggatcatttcaagaagaagccccgtttcccgataactctcaagtacatcgacccgacttacatgatccgcgccgtcagttcaaacgcttccgacaacgtctactgcactctgctagcccacagcgcgctccatggcgccatggcggggtacaccggcttcatcgtcgctccggtcaatggcagacacgcctacatcccgttctataggatcaccgagaagcagaacaaggtggtgatcacggaccggatgtgggcgagggtgctgtgctcgacgaaccagccctgcttcctgagccacgaggacgtggagaacatgaagcacgacgacgacgagcaccacctgcacaacacgctgctcctggactcgccggaaaactcgtccaaatgaaatggggcacaagacttgttttgcttttttgggtgctggcgttgtagagattagcgaccgctatatgatagggttggataatgtgagcattttgtaataatataagcttcctgaagtaagctcgttttggctgttcgtgtattaatttcgg

SEQ ID NO: 33523 - DNA, 2037 bp, Zea Mays
gcagcagtgtgagagctcgattcgttgccgtccacttgtctcacggcctgtcgccatctccttcctggttttttcatccgaccatccccggctcctccgcgccgtcggcgacgactccatcgagtcactcggccgcagcaaccggcgaccatgtaccgagtcgcctccgggctcggcgccctcaagaggcatggggcaaatgctcaaatgatgaatgctgcaattaggtgtgccagcacaagtgttgcacagaggtcttcgggtggcttctggacctggttgactggtgcgcgttcaaatgaaatacctcctccagatttcacacttccaggagtgactattcctcctccgctgcctgaccatgtggaggctggcaaaacaagagtcacaacacttcccaatggtgttaaaatagcctctgagacatctgcgggatcatcttgttctgttggagtttatgttgattgtggttctgtatatgaagcacctgaaacaacaggcgccagtcaactgttgaagacaatggccttcacaaccactgccaacaggagtgagttgcgggttgtgcgtgaaattgaggcaataggtggcagtgccaaagcatctgctagccgtgagatgatgagctacacttacggagccctgaagacttacatgcctgaaatggttgaggtgcttattgattgtgtacgcaaccctgcttttcttgattgggaggtcaaggaacagattttgaggctacaggcagagcttgcaaaatcatcaagttttcctgaaaattttcttttggaggctcttcattctactggctattctggtgctttagcaaatccactaattgtgccagaatattcagttagcagattgaatgcagatgtcctggaacaatttataactgagaactacactgcttcccgaattgttctagctgcatcaggcgttgatcatgatgaattggtatctattgccgaaccccttctgtctgacattcccagtgtatctggaacaacaaggccaaaatcaacctacattggtggagaatacagaagaagtgcagattcatcgagcacagacgttgcattggcattcgaggtcccaagtggttggctcaaagaaaaagattgcgtcactgtatcagttcttcaggcacttctgggtggtggtggcaagttttcttggggaaggcaaggaaaggggttacattcacgtctaaaccgcctcgtaaatgaatttgatcagatcaagtcaatctctgctttcaaggatgttcacagtaatactggcatctttggaatccatacatctactgatgcatcatttgttcctaaagctattgacctagcagccagagagctcacttcccttgcaactcctggacaagttgaccaaagccaactggaccgcgctaaagcctcagctaaatatgcgatactggcaaatttggaatcacaggcatcgctaacagaggacatggggcgccaagttttggcatttggtgaaaggaaacctgctgagcaccttctcaaggctgtagatggtgttactatgaaagatataacgtctgttgctgaaaagatcatttcatccccattgacaatggcatctcatggaaacgttctgaatatgcctacttatgagtcggtcagtggcaagttccgctcaaaatgaggagtacatgacccttcccttcattttatcaccttgtttgctggacaagttttaccagtaccttgtcattcacgtctaggccatggttcttggtcagtttcagaagaaataagcaacctcatgcagttttgttcgtgaaacctgtgatcacttcacaattattcccttttctcattcttttgcggaacattcgtgtggttaatgctggtgatagaccagtaacgtgcttgtaaatttaaccgaaccctggcccctcattcggtaccaaggccccaagagaatgtacaaaattgtcgtaaaactcttgacaaaaatgttgtcgcacatgaataatgattctacagaactgaagtttgcatgaaaaaataa

SEQ ID NO: 33524 - DNA, 1893 bp, Zea Mays
tgcgtcagcctgggagctgagctgatggaggcatggggcaaatgctcaaatgatgaatgctgcaattaggtgtgccagcacaagtgttgcacagaggtcttcgggtggcttctggacctggttgactggtgcgcgttcaaatgaaatacctcctccagatttcacacttccaggagtgactattcctcctccgctgcctgaccatgtggaggctggcaaaacaagagtcacaacacttcccaatggtgttaaaatagcctctgagacatctgcgggatcatcttgttctgttggagtttatgttgattgtggttctgtatatgaagcacctgaaacaacaggcgccagtcaactgttgaagacaatggccttcacaaccactgccaacaggagtgagttgcgggttgtgcgtgaaattgaggcaataggtggcagtgccaaagcatctgctagccgtgagatgatgagctacacttacggagccctgaagacttacatgcctgaaatggttgaggtgcttattgattgtgtacgcaaccctgcttttcttgattgggaggtcaaggaacagattttgaggctacaggcagagcttgcaaaatcatcaagttttcctgaaaattttcttttggaggctcttcattctactggctattctggtgctttagcaaatccactaattgtgccagaatattcagttagcagattgaatgcagatgtcctggaacaatttataactgagaactacactgcttcccgaattgttctagctgcatcaggcgttgatcatgatgaattggtatctattgccgaaccccttctgtctgacattcccagtgtatctggaacaacaaggccaaaatcaacctacattggtggagaatacagaagaagtgcagattcatcgagcacagacgttgcattggcattcgaggtcccaagtggttggctcaaagaaaaagattgcgtcactgtatcagttcttcaggcacttctgggtggtggtggcaagttttcttggggaaggcaaggaaaggggttacattcacgtctaaaccgcctcgtaaatgaatttgatcagatcaagtcaatctctgctttcaaggatgttcacagtaatactggcatctttggaatccatacatctactgatgcatcatttgttcctaaagctattgacctagcagccagagagctcacttcccttgcaactcctggacaagttgaccaaagccaactggaccgcgctaaagcctcagctaaatatgcgatactggcaaatttggaatcacaggcatcgctaacagaggacatggggcgccaagttttggcatttggtgaaaggaaacctgctgagcaccttctcaaggctgtagatggtgttactatgaaagatataacgtctgttgctgaaaagatcatttcatccccattgacaatggcatctcatggaaacgttctgaatatgcctacttatgagtcggtcagtggcaagttccgctcaaaatgaggagtacatgacccttcccttcattttatcaccttgtttgctggacaagttttaccagtaccttgtcattcacgtctaggccatggttcttggtcagtttcagaagaaataagcaacctcatgcagttttgttcgtgaaacctgtgatcacttcacaattattcccttttctcattcttttgcggaacattcgtgtggttaatgctggtgatagaccagtaacgtgcttgtaaatttaaccgaaccctggcccctcattcggtaccaaggccccaagagaatgtacaaaattgtcgtaaaactcttgacaaaaatgttgtcgcacatgaataatgattctacagaactgaagtttgcatgagtcgtgtactcgtgttcgatgc

SEQ ID NO: 33525 - DNA, 1105 bp, Zea Mays
aatgactagcatagtagttctgataaaaaattctcatataacagacatgtctagggtataaaggagattcttagaagtcacatggattgaaattatcattttttttagtttacatcttctgctattcaagcaatatagttcccatgcctgtgagacctaactgatgttctgacagaagtaaacctgcatcttctcctactgtttgagcaatttatagcattcatattgtagacgaaaaggaggtgctgtgatacaaatttctttgaaagaaatcgtcgaacatttggattgaccttaactagcttaattttgtctcaaacgcgccagagagatacacatcattatattaagaaaaaagagtaaagttcaaaatagttaaaacaggagagctgtgcaccattatattaactagcataatttaaggagctctttagatttaaatagaaaattggaataatccccaaacctatagcacaggagttgggcgatgatatttaccctactgtaagctagtattcatcaacgctggcacctgaagtaattgcagaattgataaaacatcacctgcttccaccacttttattgcagtcctcgcatgaaagaactccaaaatatatgctttgtttcgttcaacttgcttctcatgtttatgctgcctagttcattctttttctagtgcactttggatgtaatgatcaaaagcaacatggggaaaatatagtgggataagctgagagcaaagaacaggaaccataaattcttatgcgacgtgtaatgtgatatgacagcaatgccattttatctggagagttggtgcttgttaacttctgtatagcagttctctatcatcacaactctgcgaccactacatttaacttcacagttgaaaatttaacctgagtattagttccgtgaggaattacttacagacaaacataatcattcctttcgctcatatgcttcaactgaggttttatattttgttttccctttcttctatttccagggacattattacacacaagactgcttgtctctttcttttcgttttggcgacacaattgttacgaattctgattcatcccatataagttccatgcacaac

SEQ ID NO: 33526 - DNA, 2384 bp, Zea Mays
cgttcacggttcatccctctgtccagagcatcattccgaattcccaacgaatccggacacgccgtgaagtgaagcccctcgtcgcttctcgtagtctcgcatccaccgctccaccgtctccatccacgcgcccgcgcgcggcccggcaacgggagccaaggaaaccgaagccccgatggcgagcttcttccgggacgcgcgcctcccgcagcagcgcgtcgtggagggcgtcccgttcccggcggtgctggtcccgagcgcccccgcgggcggcggcctcgacgagttcctggcggccgtgcgctccgagagggcgtcccggctggagccgctggtgcggcacgcgggggccctgctgctgcgcgggttccccgcgacgacggccgcggacttcgaccgcgccgtcgacgccttcgggtacgaggagctgccgtacgtcggcggcgccgcgccgcggaccaacgtcgtgggccgggtgttcaccgccaacgagtcgccgcccgatcagaagatccccttccaccacgagatggcccaggtaatcgagtcttgagcctcccctgcactctggcaccataagagcagcagcggggtaactgaaattcaggagacaacgcagtggccacgacatgtacatctgcaacgtgggcttgctttttaagcctagtacccatttttcaattcaaaattagattgatcttttttttcacgtagagctcagtttgatgaccaagctacaatacagcacgcacgctttgattttttaggttccaacgtttccgtccaaactgttcttcttctgtgaagtggagccaaagagtggcggggagacaccgatcgtactgagccattacgtctacaagaggatgcaggaagaattccccgaattcgtggagaaactggagaaggaggggctggtatatacaagggttctgggggagggcgatgacccgtcttcgccaatcggccgtggatggcagtcgacatttctcactaaagataaagccgttgctgaggaaagggccgccaagctcgggatgaagctggaatggaccggcgacggcgtgaggacggtcatggggcccatcccggcggtgaagtgggacgagagccgggggcggaaggtctggttcaacagcatggtggccgcctacacggggtggaaggacgcccggaacgacccggtgaaggcggtgaccttcggcgacggctcgcccctgcccgccgacgtcgtcgccgcgtgcggccgggtcctggaggaggagtgcgtggccgtgccgtggcggcgcggcgacatcctcctcctcgacaactgggccgtcctgcactcccggcgctccttcgagccaccgcgccgcatccttgcctcgctctgtaaatgatgtatgtatgtatgtaagtgccccgccatggtatgggttttttacttggcagtggaactaattctggatgggcgcggatttgctgctccgacgagcgatgaacgcctgaaactgagaataatttcacacgctggagagagcggtgtttagaaattccatagtgaagaaaaccgttcacccgttatgccacgtcgcctttccgtcagatatgcatcgcacgactgtgaatttcctactgctctgattgactctgctagactgctctcgctacttctggaagggggttctttacctagctttcaccatcggtgattttgcggacgacggcctagggttcccaaaccaccgaccgatcgacgatgacatccttctccccggcaacataaggagacatatcaagttgtttggtgataatggatccaaagcattcggctgaagtgtccaagtatttagacaagcaaaatcaagcactaatggaaacatatcgagcaatgtcccatgagttgcataaactgcaggtagaagaagagacaatcatgcgcaagttgtatgaactgatgtccgcggaagggcttcttccaaagcgcaagaaagaaaagcaacatggggaaaatatagtgggataagctgagagcaaagaacaggaaccataaattcttatgcgacgtgtaatgtgatatgacagcaatgccattttatctggagagttggtgcttgttaacttctgtatagcagttctctatcatcacaactctgcgaccactacatttaacttcacagttgaaaatttaacctgagtattagttccgtgaggaattacttacagacaaacataatcattcctttcgctcatatgcttcaactgaggttttatattttgttttccctttcttctatttccagggacattattacacacaagactgcttgtctctttcttttcgttttggcgacacaattgttacgaattctgattcatcccatataagttccatgcacaac

SEQ ID NO: 33527 - DNA, 1341 bp, Zea Mays
ggaaaactcccgcgaagccgtccacgttcacggttcatccctctgtccagagcatcattccgaattcccaacgaatccggacacgccgtgaagtgaagcccctcgtcgcttctcgtagtctcgcatccaccgctccaccgtctccatccacgcgcccgcgcgcggcccggcaacgggagccaaggaaaccgaagccccgatggcgagcttcttccgggacgcgcgcctcccgcagcagcgcgtcgtggagggcgtcccgttcccggcggtgctggtcccgagcgcccccgcgggcggcggcctcgacgagttcctggcggccgtgcgctccgagagggcgtcccggctggagccgctggtgcggcacgcgggggccctgctgctgcgcgggttccccgcgacgacggccgcggacttcgaccgcgccgtcgacgccttcgggtacgaggagctgccgtacgtcggcggcgccgcgccgcggaccaacgtcgtgggccgggtgttcaccgccaacgagtcgccgcccgatcagaagatccccttccaccacgagatggcccagtggagccaaagagtggcggggagacaccgatcgtactgagccattacgtctacaagaggatgcaggaagaattccccgaattcgtggagaaactggagaaggaggggctggtatatacaagggttctgggggagggcgatgacccgtcttcgccaatcggccgtggatggcagtcgacatttctcactaaagataaagccgttgctgaggaaagggccgccaagctcgggatgaagctggaatggaccggcgacggcgtgaggacggtcatggggcccatcccggcggtgaagtgggacgagagccgggggcggaaggtctggttcaacagcatggtggccgcctacacggggtggaaggacgcccggaacgacccggtgaaggcggtgaccttcggcgacggctcgcccctgcccgccgacgtcgtcgccgcgtgcggccgggtcctggaggaggagtgcgtggccgtgccgtggcggcgcggcgacatcctcctcctcgacaactgggccgtcctgcactcccggcgctccttcgagccaccgcgccgcatccttgcctcgctctgtaaatgatgtatgtatgtatgtaagtgccccgccatggtatgggttttttacttggcagtggaactaattctggatgggcgcggatttgctgctccgacgagcgatgaacgcctgaaactgagaataatttcacacgctggagagagcggtgtttagaaattccatagtgaagaaaaccgttcacccgttatgccacgtcgcctttccgtc

SEQ ID NO: 33528 - DNA, 1320 bp, Zea Mays
ttcttggaaacaaggacgtgaaaccccccattaagaatagcttaatataatggtacattttttggggcccatagttttgggcccagacggctgcccaccctaccgccctcgcggaacacgaggcttattataataactatttttaggagtctgaactctgaagctgaccacggccaggtttggctgtccacgtcatccctctgcccagagcatcgttccgaattcccaacgaaaccggagtaccggacacctctcgcaccgcacccaccgctgctccaccttctccacgagcccggcaacgggaaccaaggaaaccgaagccgcgatggcgagcttcttcagggacgcgcgcctcccgcagcagcgcgtcgtcgagggcgtccccttcccggcggtgctcgtcccgagcgctcgtgcgggctcctgcgccggcggggtcgacaagttcctggcggccgtgcgctgcgagagagcgtcccggctggagccgctagtgcgggacgcgggggccctgctgctgcgcgggttccccgcgacgacggccgccgacttcgaccgcgccgtcgacgccttcgggtacgaggagctgccgatcgtcggcagcgtcgcgccgcggaccaacgtcgtgggccgggtgttcaccgccaacgactcgccgcccgatcagaagatccccttccaccacgagatggctcaggttccaacatttccgtccaaattgttcttcttctgcgaagtggagccaaagagtggcggagagacgccggttgtaccgagccattatgtctacaagaggatgaaggagaaattccccggatttgtggagaaactggagaaggacatgattgtatatacaagggttttaggagagggcgataacccgtcctcgtcaatcggtcgtggatggcaatcgacatttctcactaaagataaagctgttgccgaggaaagaatgctgctgccggatcaatcgaagggggtgctggagtggaggaggaaagatctgtttgctcaggtctagatgtgcggaataaatgtgccatggccgatgctcagccggtaaattattatgtgtcaaaaaaaattatgtcctgcacccactcgttgtattagtttggtcgtatttagttttttgggcagatctgttcgcgttggtcgggtcagacaactcatgctcaagtctggatgtgaggaataaatgtgcatgtgcgagatgtgaggaactggagacgaaaataaataagaatatttttcttgggatagtcttttttccaaccatgactgtaaactaaaaaactatatctaagtgatcattctgtt

SEQ ID NO: 33529 - DNA, 1351 bp, Zea Mays
ttcttggaaacaaggacgtgaaaccccccattaagaatagcttaatataatggtacattttttggggcccatagttttgggcccagacggctgcccaccctaccgccctcgcggaacacgaggcttattataataactatttttaggagtctgaactctgaagctgaccacggccaggtttggctgtccacgtcatccctctgcccagagcatcgttccgaattcccaacgaaaccggagtaccggacacctctcgcaccgcacccaccgctgctccaccttctccacgagcccggcaacgggaaccaaggaaaccgaagccgcgatggcgagcttcttcagggacgcgcgcctcccgcagcagcgcgtcgtcgagggcgtccccttcccggcggtgctcgtcccgagcgctcgtgcgggctcctgcgccggcggggtcgacaagttcctggcggccgtgcgctgcgagagagcgtcccggctggagccgctagtgcgggacgcgggggccctgctgctgcgcgggttccccgcgacgacggccgccgacttcgaccgcgccgtcgacgccttcgggtacgaggagctgccgatcgtcggcagcgtcgcgccgcggaccaacgtcgtgggccgggtgttcaccgccaacgactcgccgcccgatcagaagatccccttccaccacgagatggctcaggttccaacatttccgtccaaattgttcttcttctgcgaagtggagccaaagagtggcggagagacgccggttgtaccgagccattatgtctacaagaggatgaaggagaaattccccggatttgtggagaaactggagaaggacatgattgtatatacaagggttttaggagagggcgataacccgtcctcgtcaatcggtcgtggatggcaatcgacatttctcactaaagataaagctgttgccgaggaaagacgcaagtaatgtccagattgaccttatcagaatgctgctgccggatcaatcgaagggggtgctggagtggaggaggaaagatctgtttgctcaggtctagatgtgcggaataaatgtgccatggccgatgctcagccggtaaattattatgtgtcaaaaaaaattatgtcctgcacccactcgttgtattagtttggtcgtatttagttttttgggcagatctgttcgcgttggtcgggtcagacaactcatgctcaagtctggatgtgaggaataaatgtgcatgtgcgagatgtgaggaactggagacgaaaataaataagaatatttttcttgggatagtcttttttccaaccatgactgtaaactaaaaaactatatctaagtgatcattctgtt

SEQ ID NO: 33530 - DNA, 1041 bp, Zea Mays
ttcttggaaacaaggacgtgaaaccccccattaagaatagcttaatataatggtacattttttggggcccatagttttgggcccagacggctgcccaccctaccgccctcgcggaacacgaggcttattataataactatttttaggagtctgaactctgaagctgaccacggccaggtttggctgtccacgtcatccctctgcccagagcatcgttccgaattcccaacgaaaccggagtaccggacacctctcgcaccgcacccaccgctgctccaccttctccacgagcccggcaacgggaaccaaggaaaccgaagccgcgatggcgagcttcttcagggacgcgcgcctcccgcagcagcgcgtcgtcgagggcgtccccttcccggcggtgctcgtcccgagcgctcgtgcgggctcctgcgccggcggggtcgacaagttcctggcggccgtgcgctgcgagagagcgtcccggctggagccgctagtgcgggacgcgggggccctgctgctgcgcgggttccccgcgacgacggccgccgacttcgaccgcgccgtcgacgccttcgggtacgaggagctgccgatcgtcggcagcgtcgcgccgcggaccaacgtcgtgggccgggtgttcaccgccaacgactcgccgcccgatcagaagatccccttccaccacgagatggctcagggggtgctggagtggaggaggaaagatctgtttgctcaggtctagatgtgcggaataaatgtgccatggccgatgctcagccggtaaattattatgtgtcaaaaaaaattatgtcctgcacccactcgttgtattagtttggtcgtatttagttttttgggcagatctgttcgcgttggtcgggtcagacaactcatgctcaagtctggatgtgaggaataaatgtgcatgtgcgagatgtgaggaactggagacgaaaataaataagaatatttttcttgggatagtcttttttccaaccatgactgtaaactaaaaaactatatctaagtgatcattctgtt

SEQ ID NO: 33531 - DNA, 771 bp, Zea Mays
ttcttggaaacaaggacgtgaaaccccccattaagaatagcttaatataatggtacattttttggggcccatagttttgggcccagacggctgcccaccctaccgccctcgcggaacacgaggcttattataataactatttttaggagtctgaactctgaagctgaccacggccaggtttggctgtccacgtcatccctctgcccagagcatcgttccgaattcccaacgaaaccggagtaccggacacctctcgcaccgcacccaccgctgctccaccttctccacgagcccggcaacgggaaccaaggaaaccgaagccgcgatggcgagcttcttcagggacgcgcgcctcccgcagcagcgcgtcgtcgagggcgtccccttcccggcggtgctcgtcccgagcgctcgtgcgggctcctgcgccggcggggtcgacaagttcctggcggccgtgcgctgcgagagagcgtcccggctggagccgctagtgcgggacgcgggggccctgctgctgcgcgggttccccgcgacgacggccgccgacttcgaccgcgccgtcgacgccttcgggtacgaggagctgccgatcgtcggcagcgtcgcgccgcggaccaacgtcgtgggccgggtgttcaccgccaacgactcgccgcccgatcagaagatccccttccaccacgagatggctcagcacgtacgtactcgcatgggcgtggggcgacgtcgttggacgctggctgcctagctcccaatggcatgagtgag

SEQ ID NO: 33532 - DNA, 4348 bp, Zea Mays
caaaaaccttatatagatgagtgccggttgccataaataaacgaggcaagtaccggcaataatgcgtgtaccgggcacgggcagccgcttgacgcgctcacgctcttctgtggttctgagccgtgcccgtgctcgcggtgttctcgctcaccgctgcaacgccactggcacaatgaggtgagagagaaagaaggtaggcatggcaccggcgtgcgcctggagaaccaaagagaaaatgtgtgtgtttgtgtgggcagattcctaatcgatcgggcgtgtgtgtcctgctaactgaagcagcgcacacatcatcgagggcagcgtgggcggggctgcccggccggctggggacatcctgacgaagaagacgacctgagaaagaagaaacaaggacgaagtgtgcgccgcccgtatctatagcgccgcgcgcgtcagcgcggcacgccggcgtccatcaacggatgatcgttcacctgtcagcccgcctgattccgtggccctggtgcaggccactaataatcaactcccgcgcagaggagattgaaaggatcatcctgtttctttcctcaccgatcactgcggtctgcgggagagagagaggccaacgccaacgccgatctgcctacagtacgcggctgtgttgtgtccaaaaccaggcaccctcctgttgccgccttgccggaccggacgggactgctggaagaagtgatgcctgcacagcgcacgcaggcacagaacagacagcacgtgacggctggcgacgagcgcggggcgccgggcccattcctcgcaccacctccccgccccacggcgcgcggttttccgagccgctacacgctccctcaggcacgcggtggtgttccccacatgtcagtggattgtgcagtgcagccaggcgagggttttgagcgagccggagttgaggccttccctgggtacccctaccaacacgccgcacatgcggccgccgcccgccgcttggacggtacgctgccgactgtcgcgtttgcttccctgttccctgctcattgccaggtaaggctagtttgctaacctcccattagggatttaagccgatttagtgaaaattagttcatttccctaaactctcttcaattcttaaaaactagtttggaagctcaaattcccttcgagatttgagatggcaataaaataatttctcttcgatcatctcaaatcctagaaatctcgattgaatttccaaactagttctaaaagataaatatgctattttttatcaaaaagataaacatatgatggctcgatgaattcttaagccgtgctacatgtagaatcccaacaagttgatgaggcagctgatttataatctagcgccggttcttagccttcgataccatctgacatctcattggttaatcgacaaataaaatttgatttattggtcaggttctattttttggatttcttttggacttcaaatggtgtaaaaaggcgacatggcgcacacaacatacgcggattaattagattatgtcacgtcactaaacatggttgccaccgaacggttcgtgtcagtatcgatgacaccatccaatgcaacccctcccccacggtcgacaacgaatctagttgggcctagccttagatcaataaatcgtcacaagatctcgccctaggtgttcgtgtcttttataagaccaatcacagtggaaattccgttataattttaatgcacattagataaacagtaaaacgttgttataccatacccttcaacggtggttaacgttgaaaatcacgggttatagcaaatagtgacgcctttttaggagtcataaagctgtagcaatgttattacatatgatgttttacatggaaaccataaaaatatgagcactaaggtgcatatttttggatctcgcctaacgactaattggggtttttttgggctataaatacgtctttagacgacctagacaaacaacaataattgtgctttcattcccaaacacttgtgcaacatctccaagcaattctaaaagttccaagcgccacattcgagtagaagtgcatagagatagtctttttagagtgaagagaaggctaatgtgcttaactttcaactctaatgttaaataaaaaaggcctcaactttcgatgattaataattaatctgtaagactgaaaaatacacatatataatataaggactaacactctatacgttatggctacaatcatctaactaacatgcactcagcgtgttgttgtgtcacgttataagtctacggcgatttgtttcctttatgactatgttagactcatcgatttatttattagattcctaacaaggtgcggctaacaaagggactaccgaataatgattgaaccgagactaattactaaaagtttatactccctccgttctaaaatatagttctttctagttctcttattttttgtcctcattcgaaataaatgattatatatatatatataatataaaatgaaatatattttgtaacgaaaggagtagtatacataaggctattctcaatggaatttcatggagaattttatggcattaattactatgacacatcaacatttttgatgacatgtcactgatttaatgagagaagagaaggaaccagtttcatccacatgaaaccctgccaacccatttccaaggcatgtgaaatcgtgtgaaactcttattgagacccatatcgtttcatcccgagatccagtacggcttctcctgtcccaccccgcacgattgttgcatgtgaactgaaatgtctgtgtgaactgaattgttttttagatgataagtctagtacgaactgaattatttctatgagatgaaaagcctagtgcgaactgaattatttttttcaagatgaaaagtctacctatatgtatatatacaggactgacatgtgtataccagtcctcaccatttgacgccaccacaagatgtcagatgtcccatctagtaatgctttgttagatgattttctcgctgaggatgacataatgaatgatgttgttactgaggtcactgttttttgaaagccactatcgaaactattcatgaagtggcatcaaatcatcatcttcgtccgaggaagtaatcagaagaccacagaagagattcaacgaaaaattgtatgatgattacttctccaaaaatcctctctaccctccatcttttttcgtagaagatatcgtatgtcgagaccactttttctgcacattattgaggagctaggcaagtggtctgactatttcactacaaggacatattgtactagtcgtcaaggcctgacaccattacaaaaatgtacagcagcaatacgccaattgaccaatggcagtgcagctgatcacctggatgaatatttgaagattggtgacacaactgcattagaagctttgaaaaaaattgtggaaggtattattgctgtttttagtgaaagctatttgcgacggactccggtggaagacattgaacgtttgctaaaagttggacagagtagaggatttcctggcatgttggggagtattgactatatgcactagcaatgggaaagatgtcctgttggatggaaaggtcaattcactcgaggtggtcaaaaagtaccaactctgattctcgaagcagtgacctcacatgatctttggatttggcatgcattctttggtgttgctggttctaataatgatatcaatgtcctacaacaatcatcaattttcatctgagaactcaaagggcaagttgctcgggtgaaatatacggttaatgggaataaatatgaccaaggttactgtctcgctgatggaatttatccggaatgggctatttttgttaagtaaatatccatgcctatcaatgacaaagatcaggaatttgctaatcatcaagaaggcgaaagaaaggatattgaacgagcatttggtgtcctacgacatcgatggtgtattttgaagcgaccagctcgtctacatgataaaaacagtttgagaacattatactagcttgcatcatacttcacaacatgatagtgcaagatgaaaagaaagagaatattgaagagaatcttgacttgaatgaggctgcaagttctgccatcgtcgaacaacccaaattctcctttggtgaatccattccatttgaaagagtgctagagaatcaaatagatcttcaagatcgtacaactcatctaaaattgaaggacttggttgagcatatttagcaaaaatatgggcgtcgttgaaaagtatttacaaactcatggtagatattatctttatatgttgaaaatgtgggcctcgtaaaaagaatatatctcatttgtttcag

SEQ ID NO: 33533 - DNA, 1422 bp, Zea Mays
aaataaacgaggcaagtaccggcaataatgcgtgtaccgggcacgggcagccgcttgacgcgctcacgctcttctgtggttctgagccgtgcccgtgctcgcggtgttctcgctcaccgctgcaacgccactggcacaatgaggtgagagagaaagaaggtaggcatggcaccggcgtgcgcctggagaaccaaagagaaaatgtgtgtgtttgtgtgggcagattcctaatcgatcgggcgtgtgtgtcctgctaactgaagcagcgcacacatcatcgagggcagcgtgggcggggctgcccggccggctggggacatcctgacgaagaagacgacctgagaaagaagaaacaaggacgaagtgtgcgccgcccgtatctatagcgccgcgcgcgtcaggacgagcgatcgagcgagctataataaaagaaccattttgctggctgagggaagacgagctgaggaagctataaaaaagggttagttggaaacatgccactcaaattcttgaaagattgaaaattagtttattttcatgccactctgtagcatcaaatgaactagccgtctaattttataaagttgagtggcatgtatataattaattctataaaaaaggtgttgtgttcattttcaactcatactttctcggctttttgctaaaataaagcgtaatatttgttctatcagtttactatcagatatggaccatatgtttacattaatattaatattaaatttattttttataattataaaatattatcgggtgtcataattaggggtacccccaatactcctaaacgctgctggaaaacatcttcagaacaaaccataaacagctgataaagcgcggttcaagtcagggcctcgtctaccaagggacgcaacctcatccgagcccaacctcggcctcgggcagaaacggtagtcccggacggattcacgcctcgcccgagggtcccctcagtcagcagacgcaccctcggctcacctgaagcccagctcgtgcagactttgtcgtgcagcgacctcggccggatcgccctaccaaccgaccgtatcgcatgcgcatttaatgcggggatcgcctgacaccttatcctgacacgcatgcctcagtcggcaaggtcgaagtgatcgcagtcacttcgcccctttactggccgatctgacaggaaaacaacgctattcaccccgctccggctactgtgccaaccactagggcaagactagcaacagtaagtcgtgacctctcccgagttcagcctcgagcgcagcagggagctctgcctcgcccgacctcaggcctcggcctcgggagaaggtctccgcctcgtccgacctcaggcctcggcctcagcctcggcctcgggaggagtcacaacctcgcccgacccagcctcggcctcaggagaag

SEQ ID NO: 33534 - DNA, 2040 bp, Zea Mays
aggaaaaaaaaggttttccggcctcgcgggagtgcagcgagatccgtgccgccggcaccgtccctcgccctcctcgtctggctcgcccgccgtgtcctgttctgagtcctgcacgccctgcagatcgccgaccaccgctcgaggggacgcgggacgccctccatgattctgcgctccgcgccgcgtcgcctccacctactccgcccgcaccacctccggctcctctccgccgccgcgctcgcttccgcggtcccgatcccggccccggcccagtccccaattgagtgggccgaggctccgcttgcctccgtgcgccctgccaccgccgacgcatcgctcttccacgtctccctcgacctctccgcgcaccgggggctcctcgcctcccacaccgccgccggccagttcctccgcttccgcctccccgcctcttcctaccacatcttcctcgccatcgcatcccctcctcccccacctgcgctcgagaccctagccctagccgggccaccttcctgcttcgaattcctcgtcaagcgcctcccgggaaccccctccgcgcgcctctgcgacctccgccccggcgaccttgtccatgttggcgccagcgtcgtcggccgcggatttgatgtcgccaggatatctgatgcccgcgacgttctcgtcttcgccaccggatccgggatcagccctatacggtcacttattgagtcaggttttgctgaaaacaaaaaaactgatgtaagactcttttatggggttagaaatcttcagaggatggcatatcaggaaaggtttgaggattgggaatccagaggagttaaaattgtacctgtcctctccagaccagatagtcaatggacaggggagagaggttatatccagaatgtgttctcaaggatgaagaatactgtaaaccctccatcagtgggagtaattttgtgtgggcataaacagatgagtgaggtatgttcattttgcttattttccgagtcatttgtatcttgacactctaactattagacaggttgatagcaccttctacaattagtggaatttccctctattacaagctttggttctgttcattgttattgttaggcacatcttcgcataaatcataatgctgcacaccattgtcatttttgaaaccatgttttttgtgctgttgctgatctatagttcgtagtgtatttttgacagcataaaatgactagaagtgcgagtctcgcagcatgtacatcttctaggattatgtatgcctcatacaatatttccacattgtatgatggttgtgtcattcaggattaacaatgtgcaattcaaatccaatttctttatgataaatgctgtcttccgtacttccttactgatcttatgcaaaacatttgatttgtatgatgtaggagatcacaagagttcttgttgccgatggtttgtcaaaagatagaatcttaactaacttctgatcgccagaaggacattgttccatcctttgtagaggttgtaccttttttttttgtaccacagtcaagcagctactctttacaaccgcacaatggcacaagtgcaaatcgcaacaggaagacagttgcgtgattacaaataagttcattttcttctccatgtgaccacattggcttattgctgaatgactggtgtagttctccttttttagaaaaagaatgcctgatgtgaatctcacatgcactggctctagctgagatgtgttctatagcatctgagacattgatcccctgtaaggctctgatgtacttcagagaaggccctttttggagaagtaagaaggggatatagatgtagcattattcaaaattttgaattaattgagtggaatgtaatggatgcatgctgtttaagtgagacgtgttgaacttctgaattcgttgcaccatatggcgtcttactataaaaaaatgctcgatagacgctatcaattaactgtgtccagcattcatggatgcggatacacaaatgtgccaaaggatgatacaagtgtgcaaataagatgttctctttaac

SEQ ID NO: 33535 - DNA, 1589 bp, Zea Mays
aggaaaaaaaaggttttccggcctcgcgggagtgcagcgagatccgtgccgccggcaccgtccctcgccctcctcgtctggctcgcccgccgtgtcctgttctgagtcctgcacgccctgcagatcgccgaccaccgctcgaggggacgcgggacgccctccatgattctgcgctccgcgccgcgtcgcctccacctactccgcccgcaccacctccggctcctctccgccgccgcgctcgcttccgcggtcccgatcccggccccggcccagtccccaattgagtgggccgaggctccgcttgcctccgtgcgccctgccaccgccgacgcatcgctcttccacgtctccctcgacctctccgcgcaccgggggctcctcgcctcccacaccgccgccggccagttcctccgcttccgcctccccgcctcttcctaccacatcttcctcgccatcgcatcccctcctcccccacctgcgctcgagaccctagccctagccgggccaccttcctgcttcgaattcctcgtcaagcgcctcccgggaaccccctccgcgcgcctctgcgacctccgccccggcgaccttgtccatgttggcgccagcgtcgtcggccgcggatttgatgtcgccaggatatctgatgcccgcgacgttctcgtcttcgccaccggatccgggatcagccctatacggtcacttattgagtcaggttttgctgaaaacaaaaaaactgatgtaagactcttttatggggttagaaatcttcagaggatggcatatcaggaaaggtttgaggattgggaatccagaggagttaaaattgtacctgtcctctccagaccagatagtcaatggacaggggagagagaatgtgttctcaaggatgaagaatactgtaaaccctccatcagtgggagtaattttgtgtgggcataaacagatgagtgaggagatcacaagagttcttgttgccgatggtttgtcaaaagatagaatcttaactaacttctgatcgccagaaggacattgttccatcctttgtagaggttgtaccttttttttttgtaccacagtcaagcagctactctttacaaccgcacaatggcacaagtgcaaatcgcaacaggaagacagttgcgtgattacaaataagttcattttcttctccatgtgaccacattggcttattgctgaatgactggtgtagttctccttttttagaaaaagaatgcctgatgtgaatctcacatgcactggctctagctgagatgtgttctatagcatctgagacattgatcccctgtaaggctctgatgtacttcagagaaggccctttttggagaagtaagaaggggatatagatgtagcattattcaaaattttgaattaattgagtggaatgtaatggatgcatgctgtttaagtgagacgtgttgaacttctgaattcgttgcaccatatggcgtcttactataaaaaaatgctcgatagacgctatcaattaactgtgtccagcattcatggatgcggatacacaaatgtgccaaaggatgatacaagtgtgcaaataagatgttctctttaac

SEQ ID NO: 33536 - DNA, 1500 bp, Zea Mays
aggaaaaaaaaggttttccggcctcgcgggagtgcagcgagatccgtgccgccggcaccgtccctcgccctcctcgtctggctcgcccgccgtgtcctgttctgagtcctgcacgccctgcagatcgccgaccaccgctcgaggggacgcgggacgccctccatgattctgcgctccgcgccgcgtcgcctccacctactccgcccgcaccacctccggctcctctccgccgccgcgctcgcttccgcggtcccgatcccggccccggcccagtccccaattgagtgggccgaggctccgcttgcctccgtgcgccctgccaccgccgacgcatcgctcttccacgtctccctcgacctctccgcgcaccgggggctcctcgcctcccacaccgccgccggccagttcctccgcttccgcctccccgcctcttcctaccacatcttcctcgccatcgcatcccctcctcccccacctgcgctcgagaccctagccctagccgggccaccttcctgcttcgaattcctcgtcaagcgcctcccgggaaccccctccgcgcgcctctgcgacctccgccccggcgaccttgtccatgttggcgccagcgtcgtcggccgcggatttgatgtcgccaggatatctgatgcccgcgacgttctcgtcttcgccaccggatccgggatcaggaaaggtttgaggattgggaatccagaggagttaaaattgtacctgtcctctccagaccagatagtcaatggacaggggagagaggttatatccagaatgtgttctcaaggatgaagaatactgtaaaccctccatcagtgggagtaattttgtgtgggcataaacagatgagtgaggagatcacaagagttcttgttgccgatggtttgtcaaaagatagaatcttaactaacttctgatcgccagaaggacattgttccatcctttgtagaggttgtaccttttttttttgtaccacagtcaagcagctactctttacaaccgcacaatggcacaagtgcaaatcgcaacaggaagacagttgcgtgattacaaataagttcattttcttctccatgtgaccacattggcttattgctgaatgactggtgtagttctccttttttagaaaaagaatgcctgatgtgaatctcacatgcactggctctagctgagatgtgttctatagcatctgagacattgatcccctgtaaggctctgatgtacttcagagaaggccctttttggagaagtaagaaggggatatagatgtagcattattcaaaattttgaattaattgagtggaatgtaatggatgcatgctgtttaagtgagacgtgttgaacttctgaattcgttgcaccatatggcgtcttactataaaaaaatgctcgatagacgctatcaattaactgtgtccagcattcatggatgcggatacacaaatgtgccaaaggatgatacaagtgtgcaaataagatgttctctttaac

SEQ ID NO: 33537 - DNA, 1937 bp, Zea Mays
gtcaaaccaaagatgcagtactggtcattttttttgattgccagtacaggttggacctggttctgttttacggggcccacttgtaaacagaagtagcgatgatgtggccccaaagctgaattgtgaagctgatagctgccctgtggaaataattcatccaccagaagattgcaatctaaattcttcattgtcatttacccttcaggtctgtcgtgttgaagatattgatgtctggggtctcgtacaaggaactgtaattcatttcaatagggcaagaagtgtcactgtgcatacatctggaaccatcagcgcatcaggcttgggctgtcgaactggagtagggcaagggaaaatgttaagcagaggtatatgtggtggtggtggacatggtggaaaaggcggggatggtttttataagggaaaccttgctgagggtggagctatctatggcaatgctgatctaccttgtgaacttggcagtggcagtgggaatgactctaccgagttgtccacagctggtgggggtataatagcgatgggctcatgggagtattctttgccaagtcttgccctctatggctcagtagaatcaaatggtggtagctatactaatggctctgttggaggacctggtggtggttctgggggcacaattcttctatttgtgcatactttgtccttagctgaaagctctgtcctctcaagtgttggtggcttcggaaatgctggtagtggtggaggtggagggggaaggattcatttccattggtctaacattcctactggagatgagtatgtgcctgttgcagctgttaagggatcaatacttgcaagtggaggagtcagcaaagggctgggatattctggtggcaatggaacggtcacaggaaaagcttgcccaaagggtctttatggaacattttgcaaggaatgccctttgggaacatacaaaaatgttactggatcttctaaatctttatgctttccatgccctcctggtgaactccctcaccgtgctatatacataaatgtcagagttcttagtggagggtctgttcttttttttggtggtcatgggtgtcatgagctcgcgtccgtgctgggcacgctgagcaacgtggaagggttcgcgttccagcgcgacgtgtcctacacggcgttccttgaccgggtgcacggcgaggaggtggcgctcaacaagctggggctgtggcgggtgccgcacccgtggctcaacatgttcgtgccgcgctcgcgcatcgccgacttcgaccgcggcgtcttcaagggcatcttgcagggcaccgacatcgtcggcccgctcatcgtctaccccctcaacaaatccatgtgggacgacggcatgtcggcggcgacgccgtcggaggacgtgttctacgcggtgtcgctgctcttctcgtcggtggcgcccaacgacctggcgaggctgcaggagcagaacaggaggatcctgcgcttctgcgacctcgccgggatccagtacaagacctacctggcgcggcacacggaccgcagtgactgggtccgccacttcggcgccgccaagtggaatcgcttcgtggagatgaagaacaagtacgaccccaagaggctgctctcccccggccaggacatcttcaactgatgatagcccatgcatgcatgcatgttttagtttcttgggacaataatgtgaataactcccagctagcggctattaattaatctgtatatagattgatcactgcactgattgtatgtcaaggtcattatttacgttatggtaaaaaaaataccctcgtcgtatattctcgtttcatctgcccaacccccagagttttaaaaatgcacgttgagagcaaaatttccacaccgtttatccatgtagattgggtgtatattgaatccgtttaaatatatagcaagacaaaatttat

SEQ ID NO: 33538 - DNA, 3520 bp, Zea Mays
cctctccaaaaaacgaacatcaaaatgcgcgagagaaacggagcaaagtcgaaaggggaaaaatgagttaaacccaaatcgacaccaaacccactccaggaacacccgcctccgccgccgccgccgccatcgccggcggccactacaagcgcggcgtccggagacagtactgcgctaccaacccctagagcctggattctgatgagccctccatggcctgtcatatctgtcccctcttcaatctccgactcttgctgctgctcggcgcggttctcgggaacggcggcctcggccggggcggcggagcggaggcttcagatcgggcggacccggacccgtactcgatcctgatgtggcacgactactcgccgccgtcgcccccgctcccgcccccggacccgccgtcgccgacggcgacatgtgagggggacctccacgggaagggtgacttccacacgcgctgcgaggtctccgaggaagtggagctggacggcgacgtctacatcacggggaacggcagcctcgtgctcctctctggcgcctccctgacctgcgagaagtacgggtgcgttatatccgccaatttctcaggcgaggtgcgcctcagccgcggcgtccgcgtcacagccggcagggtctcgctggttgccaccaacatcacggtcgccgacacggtcgtcgtgaataccaccgcgctcgctggtgatccgccagaccggaccagtggcgttcccacggggacgcacggcgacggtggcgggcacggtggtcgtggcgccagctgcttcgtcaaggaagggcagacgcaggaggattcatggggcggcgatgcctatgcatggtctgacctcgaacacccctggagctacgggagcaaagggggctcgaccagcgttgagaaggactatggtggtgacggtggtggcatcgtgtggctgtttgctgaggacctggtcatgaatggcacagttctcgccaacggtggggatagcaatgagaagggtggtggtggttctggagggagcatctttataagggctgcatcgatggggaaggagttcaggctgtccagataatgcaggagctgctggaactctttatgaagcagtaccaaaaagtcttattgtcagtaacaacaatctgagtacacaaacagacactcttcttttggagtttccaaatcaaccactgtggacaaatgtttttgtaagaaatcgtgccaaagttgctgtccccttgctctggagtcgcgttcaggtcgaagggcaacttagccttctttctggtgctattctaacttttggtctcactcgttatccatactcggagtttgaactgatggctgaggagcttcttatgagtgactcaacaatcaaggtgttcggtgctttgagaatgtctgtaaagatgctccttatgtggaactccagaatggaaattgatggcggtggagattcgatagttgcaacatctttgttggatgctagcaacctgatagttctgaaggaatcatctgtgatacactctaatgctaatcttggagttcggggccaaggtctcctaaatttgtctggggacggagacacaattgaggcgcaacaccttattctttcgctgttctacagcatacaagttggacctggttctgttttacggggcccacttgtaaacagaagtagcgatgatgtggccccaaagctgaattgtgaagctgatagctgccctgtggaaataattcatccaccagaagattgcaatctaaattcttcattgtcatttacccttcaggtctgtcgtgttgaagatattgatgtctggggtctcgtacaaggaactgtaattcatttcaatagggcaagaagtgtcactgtgcatacatctggaaccatcagcgcatcaggcttgggctgtcgaactggagtagggcaagggaaaatgttaagcagaggtatatgtggtggtggtggacatggtggaaaaggcggggatggtttttataagggaaaccttgctgagggtggagctatctatggcaatgctgatctaccttgtgaacttggcagtggcagtgggaatgactctaccgagttgtccacagctggtgggggtataatagcgatgggctcatgggagtattctttgccaagtcttgccctctatggctcagtagaatcaaatggtggtagctatactaatggctctgttggaggacctggtggtggttctgggggcacaattcttctatttgtgcatactttgtccttagctgaaagctctgtcctctcaagtgttggtggcttcggaaatgctggtagtggtggaggtggagggggaaggattcatttccattggtctaacattcctactggagatgagtatgtgcctgttgcagctgttaagggatcaatacttgcaagtggaggagtcagcaaagggctgggatattctggtggcaatggaacggtcacaggaaaagcttgcccaaagggtctttatggaacattttgcaaggaatgccctttgggaacatacaaaaatgttactggatcttctaaatctttatgctttccatgccctcctggtgaactccctcaccgtgctatatacataaatgtcagagttcttagtggagggtctgttcttttttttggtggtcatgggtgtcatgagctcgcgtccgtgctgggcacgctgagcaacgtggaagggttcgcgttccagcgcgacgtgtcctacacggcgttccttgaccgggtgcacggcgaggaggtggcgctcaacaagctggggctgtggcgggtgccgcacccgtggctcaacatgttcgtgccgcgctcgcgcatcgccgacttcgaccgcggcgtcttcaagggcatcttgcagggcaccgacatcgtcggcccgctcatcgtctaccccctcaacaaatccatgtgggacgacggcatgtcggcggcgacgccgtcggaggacgtgttctacgcggtgtcgctgctcttctcgtcggtggcgcccaacgacctggcgaggctgcaggagcagaacaggaggatcctgcgcttctgcgacctcgccgggatccagtacaagacctacctggcgcggcacacggaccgcagtgactgggtccgccacttcggcgccgccaagtggaatcgcttcgtggagatgaagaacaagtacgaccccaagaggctgctctcccccggccaggacatcttcaactgatgatagcccatgcatgcatgcatgttttagtttcttgggacaataatgtgaataactcccagctagcggctattaattaatctgtatatagattgatcactgcactgattgtatgtcaaggtcattatttacgttatggtaaaaaaaataccctcgtcgtatattctcgtttcatctgcccaacccccagagttttaaaaatgcacgttgagagcaaaatttccacaccgtttatccatgtagattgggtgtatattgaatccgtttaaatatatagcaagacaaaatttat

SEQ ID NO: 33539 - DNA, 3625 bp, Zea Mays
cttcctctccaaaaaacgaacatcaaaatgcgcgagagaaacggagcaaagtcgaaaggggaaaaatgagttaaacccaaatcgacaccaaacccactccaggaacacccgcctccgccgccgccgccgccatcgccggcggccactacaagcgcggcgtccggagacagtactgcgctaccaacccctagagcctggattctgatgagccctccatggcctgtcatatctgtcccctcttcaatctccgactcttgctgctgctcggcgcggttctcgggaacggcggcctcggccggggcggcggagcggaggcttcagatcgggcggacccggacccgtactcgatcctgatgtggcacgactactcgccgccgtcgcccccgctcccgcccccggacccgccgtcgccgacggcgacatgtgagggggacctccacgggaagggtgacttccacacgcgctgcgaggtctccgaggaagtggagctggacggcgacgtctacatcacggggaacggcagcctcgtgctcctctctggcgcctccctgacctgcgagaagtacgggtgcgttatatccgccaatttctcaggcgaggtgcgcctcagccgcggcgtccgcgtcacagccggcagggtctcgctggttgccaccaacatcacggtcgccgacacggtcgtcgtgaataccaccgcgctcgctggtgatccgccagaccggaccagtggcgttcccacggggacgcacggcgacggtggcgggcacggtggtcgtggcgccagctgcttcgtcaaggaagggcagacgcaggaggattcatggggcggcgatgcctatgcatggtctgacctcgaacacccctggagctacgggagcaaagggggctcgaccagcgttgagaaggactatggtggtgacggtggtggcatcgtgtggctgtttgctgaggacctggtcatgaatggcacagttctcgccaacggtggggatagcaatgagaagggtggtggtggttctggagggagcatctttataagggctgcatcgatgcatggtggtggcaagatcagtgcctctgggggtgatggtttggctgggggaggtggagggcgagtttctattaacgtttttagtagacatgatgacacccagatttttgttcacgggggaaggagttcaggctgtccagataatgcaggagctgctggaactctttatgaagcagtaccaaaaagtcttattgtcagtaacaacaatctgagtacacaaacagacactcttcttttggagtttccaaatcaaccactgtggacaaatgtttttgtaagaaatcgtgccaaagttgctgtccccttgctctggagtcgcgttcaggtcgaagggcaacttagccttctttctggtgctattctaacttttggtctcactcgttatccatactcggagtttgaactgatggctgaggagcttcttatgagtgactcaacaatcaaggtgttcggtgctttgagaatgtctgtaaagatgctccttatgtggaactccagaatggaaattgatggcggtggagattcgatagttgcaacatctttgttggatgctagcaacctgatagttctgaaggaatcatctgtgatacactctaatgctaatcttggagttcggggccaaggtctcctaaatttgtctggggacggagacacaattgaggcgcaacaccttattctttcgctgttctacagcatacaagttggacctggttctgttttacggggcccacttgtaaacagaagtagcgatgatgtggccccaaagctgaattgtgaagctgatagctgccctgtggaaataattcatccaccagaagattgcaatctaaattcttcattgtcatttacccttcaggtctgtcgtgttgaagatattgatgtctggggtctcgtacaaggaactgtaattcatttcaatagggcaagaagtgtcactgtgcatacatctggaaccatcagcgcatcaggcttgggctgtcgaactggagtagggcaagggaaaatgttaagcagaggtatatgtggtggtggtggacatggtggaaaaggcggggatggtttttataagggaaaccttgctgagggtggagctatctatggcaatgctgatctaccttgtgaacttggcagtggcagtgggaatgactctaccgagttgtccacagctggcgatgggctcatgggagtattctttgccaagtcttgccctctatggctcagtagaatcaaatggtggtagctatactaatggctctgttggaggacctggtggtggttctgggggcacaattcttctatttgtgcatactttgtccttagctgaaagctctgtcctctcaagtgttggtggcttcggaaatgctggtagtggtggaggtggagggggaaggattcatttccattggtctaacattcctactggagatgagtatgtgcctgttgcagctgttaagggatcaatacttgcaagtggaggagtcagcaaagggctgggatattctggtggcaatggaacggtcacaggaaaagcttgcccaaagggtctttatggaacattttgcaaggaatgccctttgggaacatacaaaaatgttactggatcttctaaatctttatgctttccatgccctcctggtgaactccctcaccgtgctatatacataaatgtcagagttcttagtggagggtctgttcttttttttggtggtcatgggtgtcatgagctcgcgtccgtgctgggcacgctgagcaacgtggaagggttcgcgttccagcgcgacgtgtcctacacggcgttccttgaccgggtgcacggcgaggaggtggcgctcaacaagctggggctgtggcgggtgccgcacccgtggctcaacatgttcgtgccgcgctcgcgcatcgccgacttcgaccgcggcgtcttcaagggcatcttgcagggcaccgacatcgtcggcccgctcatcgtctaccccctcaacaaatccatgtgggacgacggcatgtcggcggcgacgccgtcggaggacgtgttctacgcggtgtcgctgctcttctcgtcggtggcgcccaacgacctggcgaggctgcaggagcagaacaggaggatcctgcgcttctgcgacctcgccgggatccagtacaagacctacctggcgcggcacacggaccgcagtgactgggtccgccacttcggcgccgccaagtggaatcgcttcgtggagatgaagaacaagtacgaccccaagaggctgctctcccccggccaggacatcttcaactgatgatagcccatgcatgcatgcatgttttagtttcttgggacaataatgtgaataactcccagctagcggctattaattaatctgtatatagattgatcactgcactgattgtatgtcaaggtcattatttacgttatggtaaaaaaaataccctcgtcgtatattctcgtttcatctgcccaacccccagagttttaaaaatgcacgttgagagcaaaatttccacaccgtttatccatgtagattgggtgtatattgaatccgtttaaatatatagcaagacaaaatttat

SEQ ID NO: 33540 - DNA, 3597 bp, Zea Mays
cttcctctccaaaaaacgaacatcaaaatgcgcgagagaaacggagcaaagtcgaaaggggaaaaatgagttaaacccaaatcgacaccaaacccactccaggaacacccgcctccgccgccgccgccgccatcgccggcggccactacaagcgcggcgtccggagacagtactgcgctaccaacccctagagcctggattctgatgagccctccatggcctgtcatatctgtcccctcttcaatctccgactcttgctgctgctcggcgcggttctcgggaacggcggcctcggccggggcggcggagcggaggcttcagatcgggcggacccggacccgtactcgatcctgatgtggcacgactactcgccgccgtcgcccccgctcccgcccccggacccgccgtcgccgacggcgacatgtgagggggacctccacgggaagggtgacttccacacgcgctgcgaggtctccgaggaagtggagctggacggcgacgtctacatcacggggaacggcagcctcgtgctcctctctggcgcctccctgacctgcgagaagtacgggtgcgttatatccgccaatttctcaggcgaggtgcgcctcagccgcggcgtccgcgtcacagccggcagggtctcgctggttgccaccaacatcacggtcgccgacacggtcgtcgtgaataccaccgcgctcgctggtgatccgccagaccggaccagtggcgttcccacggggacgcacggcgacggtggcgggcacggtggtcgtggcgccagctgcttcgtcaaggaagggcagacgcaggaggattcatggggcggcgatgcctatgcatggtctgacctcgaacacccctggagctacgggagcaaagggggctcgaccagcgttgagaaggactatggtggtgacggtggtggcatcgtgtggctgtttgctgaggacctggtcatgaatggcacagttctcgccaacggtggggatagcaatgagaagggtggtggtggttctggagggagcatctttataagggctgcatcgatgcatggtggtggcaagatcagtgcctctgggggtgatggtttggctgggggaggtggagggcgagtttctattaacgtttttagtagacatgatgacacccagatttttgttcacgggggaaggagttcaggctgtccagataatgcaggagctgctggaactctttatgaagcagtaccaaaaagtcttattgtcagtaacaacaatctgagtacacaaacagacactcttcttttggagtttccaaatcaaccactgtggacaaatgtttttgtaagaaatcgtgccaaagttgctgtccccttgctctggagtcgcgttcaggtcgaagggcaacttagccttctttctggtgctattctaacttttggtctcactcgttatccatactcggagtttgaactgatggctgaggagcttcttatgagtgactcaacaatcaaggtgttcggtgctttgagaatgtctgtaaagatgctccttatgtggaactccagaatggaaattgatggcggtggagattcgatagttgcaacatctttgttggatgctagcaacctgatagttctgaaggaatcatctgtgatacactctaatgctaatcttggagttcggggccaaggtctcctaaatttgtctggggacggagacacaattgaggcgcaacaccttattctttcgctgttctacagcatacaagttggacctggttctgttttacggggcccacttgtaaacagaagtagcgatgatgtggccccaaagctgaattgtgaagctgatagctgccctgtggaaataattcatccaccagaagattgcaatctaaattcttcattgtcatttacccttcaggtctgtcgtgttgaagatattgatgtctggggtctcgtacaaggaactgtaattcatttcaatagggcaagaagtgtcactgtgcatacatctggaaccatcagcgcatcaggcttgggctgtcgaactggagtagggcaagggaaaatgttaagcagaggtatatgtggtggtggtggacatggtggaaaaggcggggatggtttttataagggaaaccttgctgagggtggagctatctatggcaatgctgatctaccttgtgaacttggcagtggcagtgggaatgactctaccgagttgtccacagctggtgggggtataatagcgatgggctcatgggagtattctttgccaagtcttgccctctatggctcagtagaatcaaatggtggtagctatactaatggctctgttggaggacctggtggtggttctgggggcacaattcttctatttgtgcatactttgtccttagctgaaagctctgtcctctcaagtgttggtggcttcggaaatgctggtagtggtggaggtggagggggaaggattcatttccattggtctaacattcctactggagatgatggaggagtcagcaaagggctgggatattctggtggcaatggaacggtcacaggaaaagcttgcccaaagggtctttatggaacattttgcaaggaatgccctttgggaacatacaaaaatgttactggatcttctaaatctttatgctttccatgccctcctggtgaactccctcaccgtgctatatacataaatgtcagagttcttagtggagggtctgttcttttttttggtggtcatgggtgtcatgagctcgcgtccgtgctgggcacgctgagcaacgtggaagggttcgcgttccagcgcgacgtgtcctacacggcgttccttgaccgggtgcacggcgaggaggtggcgctcaacaagctggggctgtggcgggtgccgcacccgtggctcaacatgttcgtgccgcgctcgcgcatcgccgacttcgaccgcggcgtcttcaagggcatcttgcagggcaccgacatcgtcggcccgctcatcgtctaccccctcaacaaatccatgtgggacgacggcatgtcggcggcgacgccgtcggaggacgtgttctacgcggtgtcgctgctcttctcgtcggtggcgcccaacgacctggcgaggctgcaggagcagaacaggaggatcctgcgcttctgcgacctcgccgggatccagtacaagacctacctggcgcggcacacggaccgcagtgactgggtccgccacttcggcgccgccaagtggaatcgcttcgtggagatgaagaacaagtacgaccccaagaggctgctctcccccggccaggacatcttcaactgatgatagcccatgcatgcatgcatgttttagtttcttgggacaataatgtgaataactcccagctagcggctattaattaatctgtatatagattgatcactgcactgattgtatgtcaaggtcattatttacgttatggtaaaaaaaataccctcgtcgtatattctcgtttcatctgcccaacccccagagttttaaaaatgcacgttgagagcaaaatttccacaccgtttatccatgtagattgggtgtatattgaatccgtttaaatatatagcaagacaaaatttat

SEQ ID NO: 33541 - DNA, 3128 bp, Zea Mays
cttcctctccaaaaaacgaacatcaaaatgcgcgagagaaacggagcaaagtcgaaaggggaaaaatgagttaaacccaaatcgacaccaaacccactccaggaacacccgcctccgccgccgccgccgccatcgccggcggccactacaagcgcggcgtccggagacagtactgcgctaccaacccctagagcctggattctgatgagccctccatggcctgtcatatctgtcccctcttcaatctccgactcttgctgctgctcggcgcggttctcgggaacggcggcctcggccggggcggcggagcggaggcttcagatcgggcggacccggacccgtactcgatcctgatgtggcacgactactcgccgccgtcgcccccgctcccgcccccggacccgccgtcgccgacggcgacatgtgagggggacctccacgggaagggtgacttccacacgcgctgcgaggtctccgaggaagtggagctggacggcgacgtctacatcacggggaacggcagcctcgtgctcctctctggcgcctccctgacctgcgagaagtacgggtgcgttatatccgccaatttctcaggcgaggtgcgcctcagccgcggcgtccgcgtcacagccggcagggtctcgctggttgccaccaacatcacggtcgccgacacggtcgtcgtgaataccaccgcgctcgctggtgatccgccagaccggaccagtggcgttcccacggggacgcacggcgacggtggcgggcacggtggtcgtggcgccagctgcttcgtcaaggaagggcagacgcaggaggattcatggggcggcgatgcctatgcatggtctgacctcgaacacccctggagctacgggagcaaagggggctcgaccagcgttgagaaggactatggtggtgacggtggtggcatcgtgtggctgtttgctgaggacctggtcatgaatggcacagttctcgccaacggtggggatagcaatgagaagggtggtggtggttctggagggagcatctttataagggctgcatcgatgcatggtggtggcaagatcagtgcctctgggggtgatggtttggctgggggaggtggagggcgagtttctattaacgtttttagtagacatgatgacacccagatttttgttcacgggggaaggagttcaggctgtccagataatgcaggagctgctggaactctttatgaagcagtaccaaaaagtcttattgtcagtaacaacaatctgagtacacaaacagacactcttcttttggagtttccaaatcaaccactgtggacaaatgtttttgtaagaaatcgtgccaaagttgctgtccccttgctctggagtcgcgttcaggtcgaagggcaacttagccttctttctggtgctattctaacttttggtctcactcgttatccatactcggagtttgaactgatggctgaggagcttcttatgagtgactcaacaatcaaggtgttcggtgctttgagaatgtctgtaaagatgctccttatgtggaactccagaatggaaattgatggcggtggagattcgatagttgcaacatctttgttggatgctagcaacctgatagttctgaaggaatcatctgtgatacactctaatgctaatcttggagttcggggccaaggtctcctaaatttgtctggggacggagacacaattgaggcgcaacaccttattctttcgctgttctacagcatacaagttggacctggttctgttttacggggcccacttgtaaacagaagtagcgatgatgtggccccaaagctgaattgtgaagctgatagctgccctgtggaaataattcatccaccagaagattgcaatctaaattcttcattgtcatttacccttcaggtctgtcgtgttgaagatattgatgtctggggtctcgtacaaggaactgtaattcatttcaatagggcaagaagtgtcactgtgcatacatctggaaccatcagcgcatcaggcttggtggaggagtcagcaaagggctgggatattctggtggcaatggaacggtcacaggaaaagcttgcccaaagggtctttatggaacattttgcaaggaatgccctttgggaacatacaaaaatgttactggatcttctaaatctttatgctttccatgccctcctggtgaactccctcaccgtgctatatacataaatgtcagagttcttagtggagggtctgttcttttttttggtggtcatgggtgtcatgagctcgcgtccgtgctgggcacgctgagcaacgtggaagggttcgcgttccagcgcgacgtgtcctacacggcgttccttgaccgggtgcacggcgaggaggtggcgctcaacaagctggggctgtggcgggtgccgcacccgtggctcaacatgttcgtgccgcgctcgcgcatcgccgacttcgaccgcggcgtcttcaagggcatcttgcagggcaccgacatcgtcggcccgctcatcgtctaccccctcaacaaatccatgtgggacgacggcatgtcggcggcgacgccgtcggaggacgtgttctacgcggtgtcgctgctcttctcgtcggtggcgcccaacgacctggcgaggctgcaggagcagaacaggaggatcctgcgcttctgcgacctcgccgggatccagtacaagacctacctggcgcggcacacggaccgcagtgactgggtccgccacttcggcgccgccaagtggaatcgcttcgtggagatgaagaacaagtacgaccccaagaggctgctctcccccggccaggacatcttcaactgatgatagcccatgcatgcatgcatgttttagtttcttgggacaataatgtgaataactcccagctagcggctattaattaatctgtatatagattgatcactgcactgattgtatgtcaaggtcattatttacgttatggtaaaaaaaataccctcgtcgtatattctcgtttcatctgcccaacccccagagttttaaaaatgcacgttgagagcaaaatttccacaccgtttatccatgtagattgggtgtatattgaatccgtttaaatatatagcaagacaaaatttat

SEQ ID NO: 33542 - DNA, 3711 bp, Zea Mays
ccgacgtcccgacccctgctatacgaatctagaggtgaatccaacggcgtaacacccttctccctccacacccttcctctccaaaaaacgaacatcaaaatgcgcgagagaaacggagcaaagtcgaaaggggaaaaatgagttaaacccaaatcgacaccaaacccactccaggaacacccgcctccgccgccgccgccgccatcgccggcggccactacaagcgcggcgtccggagacagtactgcgctaccaacccctagagcctggattctgatgagccctccatggcctgtcatatctgtcccctcttcaatctccgactcttgctgctgctcggcgcggttctcgggaacggcggcctcggccggggcggcggagcggaggcttcagatcgggcggacccggacccgtactcgatcctgatgtggcacgactactcgccgccgtcgcccccgctcccgcccccggacccgccgtcgccgacggcgacatgtgagggggacctccacgggaagggtgacttccacacgcgctgcgaggtctccgaggaagtggagctggacggcgacgtctacatcacggggaacggcagcctcgtgctcctctctggcgcctccctgacctgcgagaagtacgggtgcgttatatccgccaatttctcaggcgaggtgcgcctcagccgcggcgtccgcgtcacagccggcagggtctcgctggttgccaccaacatcacggtcgccgacacggtcgtcgtgaataccaccgcgctcgctggtgatccgccagaccggaccagtggcgttcccacggggacgcacggcgacggtggcgggcacggtggtcgtggcgccagctgcttcgtcaaggaagggcagacgcaggaggattcatggggcggcgatgcctatgcatggtctgacctcgaacacccctggagctacgggagcaaagggggctcgaccagcgttgagaaggactatggtggtgacggtggtggcatcgtgtggctgtttgctgaggacctggtcatgaatggcacagttctcgccaacggtggggatagcaatgagaagggtggtggtggttctggagggagcatctttataagggctgcatcgatgcatggtggtggcaagatcagtgcctctgggggtgatggtttggctgggggaggtggagggcgagtttctattaacgtttttagtagacatgatgacacccagatttttgttcacgggggaaggagttcaggctgtccagataatgcaggagctgctggaactctttatgaagcagtaccaaaaagtcttattgtcagtaacaacaatctgagtacacaaacagacactcttcttttggagtttccaaatcaaccactgtggacaaatgtttttgtaagaaatcgtgccaaagttgctgtccccttgctctggagtcgcgttcaggtcgaagggcaacttagccttctttctggtgctattctaacttttggtctcactcgttatccatactcggagtttgaactgatggctgaggagcttcttatgagtgactcaacaatcaaggtgttcggtgctttgagaatgtctgtaaagatgctccttatgtggaactccagaatggaaattgatggcggtggagattcgatagttgcaacatctttgttggatgctagcaacctgatagttctgaaggaatcatctgtgatacactctaatgctaatcttggagttcggggccaaggtctcctaaatttgtctggggacggagacacaattgaggcgcaacaccttattctttcgctgttctacagcatacaagttggacctggttctgttttacggggcccacttgtaaacagaagtagcgatgatgtggccccaaagctgaattgtgaagctgatagctgccctgtggaaataattcatccaccagaagattgcaatctaaattcttcattgtcatttacccttcaggtctgtcgtgttgaagatattgatgtctggggtctcgtacaaggaactgtaattcatttcaatagggcaagaagtgtcactgtgcatacatctggaaccatcagcgcatcaggcttgggctgtcgaactggagtagggcaagggaaaatgttaagcagaggtatatgtggtggtggtggacatggtggaaaaggcggggatggtttttataagggaaaccttgctgagggtggagctatctatggcaatgctgatctaccttgtgaacttggcagtggcagtgggaatgactctaccgagttgtccacagctggtgggggtataatagcgatgggctcatgggagtattctttgccaagtcttgccctctatggctcagtagaatcaaatggtggtagctatactaatggctctgttggaggacctggtggtggttctgggggcacaattcttctatttgtgcatactttgtccttagctgaaagctctgtcctctcaagtgttggtggcttcggaaatgctggtagtggtggaggtggagggggaaggattcatttccattggtctaacattcctactggagatgagtatgtgcctgttgcagctgttaagggatcaatacttgcaagtggaggagtcagcaaagggctgggatattctggtggcaatggaacggtcacaggaaaagcttgcccaaagggtctttatggaacattttgcaaggaatgccctttgggaacatacaaaaatgttactggatcttctaaatctttatgctttccatgccctcctggtgaactccctcaccgtgctatatacataaatgtcagagttcttagtggagggtctgttcttttttttggtggtcatgggtgtcatgagctcgcgtccgtgctgggcacgctgagcaacgtggaagggttcgcgttccagcgcgacgtgtcctacacggcgttccttgaccgggtgcacggcgaggaggtggcgctcaacaagctggggctgtggcgggtgccgcacccgtggctcaacatgttcgtgccgcgctcgcgcatcgccgacttcgaccgcggcgtcttcaagggcatcttgcagggcaccgacatcgtcggcccgctcatcgtctaccccctcaacaaatccatgtgggacgacggcatgtcggcggcgacgccgtcggaggacgtgttctacgcggtgtcgctgctcttctcgtcggtggcgcccaacgacctggcgaggctgcaggagcagaacaggaggatcctgcgcttctgcgacctcgccgggatccagtacaagacctacctggcgcggcacacggaccgcagtgactgggtccgccacttcggcgccgccaagtggaatcgcttcgtggagatgaagaacaagtacgaccccaagaggctgctctcccccggccaggacatcttcaactgatgatagcccatgcatgcatgcatgttttagtttcttgggacaataatgtgaataactcccagctagcggctattaattaatctgtatatagattgatcactgcactgattgtatgtcaaggtcattatttacgttatggtaaaaaaaataccctcgtcgtatattctcgtttcatctgcccaacccccagagttttaaaaatgcacgttgagagcaaaatttccacaccgtttatccatgtagattgggtgtatattgaatccgtttaaatatatagcaagacaaaatttat

SEQ ID NO: 33543 - DNA, 698 bp, Zea Mays
gtatttcaaaatattcccctgactgtattattctcttcagtacttttgacttggaacaagttcaaaaaataattttaatctttttcatgagatggccttagaaaaaaatgctgccttggtgtgcttgatcacagaacctacacaagagtataattatgcaactgcgatgagtgtgttgtgtttcccctttctttttacattggtttcctcacaacagctctaggctgttcccctaccgcttaagctttccgattatgttgcagggtttgcgcacactcttcggcatgcaccgagttgggaagacgccagttctcttgtgctccctccacaacagcaatcgcgtccgcttgctcgacttgccatcgttcgacgggattggaacactgttgtccacgaaggaagttaggaccatcgagcttgcggctggtgggctgctcttcaccggagactgctccggcgagctgaaagtgtggaggtgggcgcccaaggactaggaggcagtagctgatgtgcatcaaatagtgtagctgtagcctcattgaagaataatagccactgacgtgctccatcattgtattcgtttccatgtaaattatggctgctccccctgatgatgtagcacatacggccaattttgtgaggatgcaaccctggtatcatgttcccatgcgtctccctttaactgccctgacttgaga

SEQ ID NO: 33544 - DNA, 1859 bp, Zea Mays
gtgaactccctcaccgtgctatatacataaatgtcagagatatgaagatgcatttaatagatttgtcgatgagataaacacccttgcagcttatcaatggtgggaaggatctatttacagtattctttgtatacttgcgtaccccgtggcttggtcatggcagcagtggcgtaggagaaagaaattacagagacttcgtgaatttgttcgctctgaatatgatcattcatgcttacggtcttgccgttcacgtgcactctatgaaggcctcaaggtgactgcaaccccagatttaatgctagggtatttagatttcttccttgggggagatgaaaagaggcctgatcttccacctcgtcttcgtcaaaggtttccaatgtctcttatctttggaggcgatggaagttacatgactccgtttttacttaatagtgatagtgtgcttactagtcttatgagccaggctgttccctcatggatatggcaccgtcttgtagctggattgaatgcacagctgcgtttggttcgctgtggaaatctgaaagtaacgtgtcttccagtcatcaactggcttgaaactcacgcgaatccttctttagctgagaatggtatccgcgttgatcttgcctggtttcaagctacagcactagggtactgccaatttggtcttcttgtttatgctgttgaaggagatgctgcacttactgaacctgatgggagccctagaataaaaacagagcaacagacaccaacacaaaacatgcttgttgagactcaactcagtcagtccaggattaaggatgctctaatgcgcagaaggatcactggtggagttctcgatagtaatagcttaaggacgctaaacgacaggagagatttattttacccattttctcttatcttgcacaattcgaaaccagttgggcaccaggatcttgttggtctggtaatctcaatactgcttcttgcagatttcagcttagttttgcttacttttctccagctgtattcgtattctatggtcgatgttctcttggttttgttcattctacctcttgggattttgtcgccttttcctgctggtataaatgctctatttagtcatggaccgaggcgatcagcaggccttgctcgtgtatatgcattgtggaacataacttcactggtcaatgtcgttgtggctttcatatgtggttttgtacattataagtcatcaaccaaaacacacccaagcgtgcagccctggaacctgggaacggatgaaagcagttggtggctcttcccaactggactcatggtgttgaaatgcattcaagcaaggcttgttgattggcacgttgctaatttagagattcaagaccgtgcggtatatagcaacgacccaaacatcttttggcagtcatgacacctggtgtaactgaggtccttctggaaagctttttacaactcgattttttgtgagttgataaaaggaaagagtgcgggcagcaaggcctttctttattgaccagaccaaagaagcagctacagaggttatatagacgcatacttccgcatcccccgctgataatgtgcagttgcaaccggtgttctgttgtatatataaaaggtgttcttgatccattctttgtaggatttagacaccatagagtttataaacaatgtcaaaagctaacctaagagagacatcggagggatgtggatttgttgttctattgctaccgtgccctggcccttgatgtttgttgagatgggcagaggggggcaactaaaagtcagggagacgcaaaagcctcttgtatgtgatcagatgggtaaaacaagttattatattattaacatgctccagggttttcact

SEQ ID NO: 33545 - DNA, 2190 bp, Zea Mays
gggaacatacaaaaatgttactggatcttctaaatctttatgctttccatgccctcctggtgaactccctcaccgtgctatatacataaatgtcagaggaggtgctgctgaaactccatgtccctacagatgcatgtctgacagatatcgcatgcctcactgttatacagctctggaggagttaatatatacttttgggggaccttggctatttggtctttttctttcaggcctccttatcttgttagctcttgttttaagtgttgctcgtatgaaatttgttggcactgatgagttacctgggccagcaccaactcagcaagggtcccaaattgatcattcctttcccttcctagaatcactaaatgagatatgaagatgcatttaatagatttgtcgatgagataaacacccttgcagcttatcaatggtgggaaggatctatttacagtattctttgtatacttgcgtaccccgtggcttggtcatggcagcagtggcgtaggagaaagaaattacagagacttcgtgaatttgttcgctctgaatatgatcattcatgcttacggtcttgccgttcacgtgcactctatgaaggcctcaaggtgactgcaaccccagatttaatgctagggtatttagatttcttccttgggggagatgaaaagaggcctgatcttccacctcgtcttcgtcaaaggtttccaatgtctcttatctttggaggcgatggaagttacatgactccgtttttacttaatagtgatagtgtgcttactagtcttatgagccaggctgttccctcatggatatggcaccgtcttgtagctggattgaatgcacagctgcgtttggttcgctgtggaaatctgaaagtaacgtgtcttccagtcatcaactggcttgaaactcacgcgaatccttctttagctgagaatggtatccgcgttgatcttgcctggtttcaagctacagcactagggtactgccaatttggtcttcttgtttatgctgttgaaggagatgctgcacttactgaacctgatgggagccctagaataaaaacagagcaacagacaccaacacaaaacatgcttgttgagactcaactcagtcagtccaggattaaggatgctctaatgcgcagaaggatcactggtggagttctcgatagtaatagcttaaggacgctaaacgacaggagagatttattttacccattttctcttatcttgcacaattcgaaaccagttgggcaccaggatcttgttggtctggtaatctcaatactgcttcttgcagatttcagcttagttttgcttacttttctccagctgtattcgtattctatggtcgatgttctcttggttttgttcattctacctcttgggattttgtcgccttttcctgctggtataaatgctctatttagtcatggaccgaggcgatcagcaggccttgctcgtgtatatgcattgtggaacataacttcactggtcaatgtcgttgtggctttcatatgtggttttgtacattataagtcatcaaccaaaacacacccaagcgtgcagccctggaacctgggaacggatgaaagcagttggtggctcttcccaactggactcatggtgttgaaatgcattcaagcaaggcttgttgattggcacgttgctaatttagagattcaagaccgtgcggtatatagcaacgacccaaacatcttttggcagtcatgacacctggtgtaactgaggtccttctggaaagctttttacaactcgattttttgtgagttgataaaaggaaagagtgcgggcagcaaggcctttctttattgaccagaccaaagaagcagctacagaggttatatagacgcatacttccgcatcccccgctgataatgtgcagttgcaaccggtgttctgttgtatatataaaaggtgttcttgatccattctttgtaggatttagacaccatagagtttataaacaatgtcaaaagctaacctaagagagacatcggagggatgtggatttgttgttctattgctaccgtgccctggcccttgatgtttgttgagatgggcagaggggggcaactaaaagtcagggagacgcaaaagcctcttgtatgtgatcagatgggtaaaacaagttattatattattaacatgctccagggttttcact

SEQ ID NO: 33546 - DNA, 441 bp, Zea Mays
gggaacatacaaaaatgttactggatcttctaaatctttatgctttccatgccctcctggtgaactccctcaccgtgctatatacataaatgtcagaggaggtgctgctgaaactccatgtccctacagatgcatgtctgacagatatcgcatgcctcactgttatacagctctggaggagttaatatatacttttgggggaccttggctatttggtctttttctttcaggcctccttatcttgttagctcttgttttaagtgttgctcgtatgaaatttgttggcactgatgagttacctgggccagcaccaactcagcaagggtcccaaattgatcattcctttcccttcctagaatcactaaatgaggggctgaagagtcacacggtcatgtacacaggatgtatttcatgggtcccaacaccttcagtgaaccttgg

SEQ ID NO: 33547 - DNA, 440 bp, Zea Mays
gggaacatacaaaaatgttactggatcttctaaatctttatgctttccatgccctcctggtgaactccctcaccgtgctatatacataaatgtcagaggaggtgctgctgaaactccatgtccctacagatgcatgtctgacagatatcgcatgcctcactgttatacagctctggaggagttaatatatacttttgggggaccttggctatttggtctttttctttcaggcctccttatcttgttagctcttgttttaagtgttgctcgtatgaaatttgttggcactgatgagttacctgggccagcaccaactcagcaagggtcccaaattgatcattcctttcccttcctagaatcactaaatgagggctgaagagtcacacggtcatgtacacaggatgtatttcatgggtcccaacaccttcagtgaaccttgg

SEQ ID NO: 33548 - DNA, 594 bp, Zea Mays
gttgattcatacacaaaatggcctagatgttctatatcatgataatgtgtaatatcttggtttattttttggtttggtaaatattgagtaattccataagcataactgcataactattatttcccttagttctggagtggccagtggccatgtaactccagtgctactttatgctgtggtaattgtttttcataaattgcaggaatgccctttgggaacatacaaaaatgttactggatcttctaaatctttatgctttccatgccctcctggtgaactccctcaccgtgctatatacataaatgtcagaggaggtgctgctgaaactccatgtccctacagatgcatgtctgacagatatcgcatgcctcactgttatacagctctggaggagttaatatatacttttgggggaccttggctatttggtctttttctttcaggcctccttatcttgttagctcttgttttaagtgttgctcgtatgaaatttgttggcactgatgagttacctgggccagcaccaactcagcaagggtcccaaattgatcattcctttcccttcctagaatcactaaatgaggtcattgaaac

SEQ ID NO: 33549 - DNA, 2587 bp, Zea Mays
cttcctctccaaaaaacgaacatcaaaatgcgcgagagaaacggagcaaagtcgaaaggggaaaaatgagttaaacccaaatcgacaccaaacccactccaggaacacccgcctccgccgccgccgccgccatcgccggcggccactacaagcgcggcgtccggagacagtactgcgctaccaacccctagagcctggattctgatgagccctccatggcctgtcatatctgtcccctcttcaatctccgactcttgctgctgctcggcgcggttctcgggaacggcggcctcggccggggcggcggagcggaggcttcagatcgggcggacccggacccgtactcgatcctgatgtggcacgactactcgccgccgtcgcccccgctcccgcccccggacccgccgtcgccgacggcgacatgtgagggggacctccacgggaagggtgacttccacacgcgctgcgaggtctccgaggaagtggagctggacggcgacgtctacatcacggggaacggcagcctcgtgctcctctctggcgcctccctgacctgcgagaagtacgggtgcgttatatccgccaatttctcaggcgaggtgcgcctcagccgcggcgtccgcgtcacagccggcagggtctcgctggttgccaccaacatcacggtcgccgacacggtcgtcgtgaataccaccgcgctcgctggtgatccgccagaccggaccagtggcgttcccacggggacgcacggcgacggtggcgggcacggtggtcgtggcgccagctgcttcgtcaaggaagggcagacgcaggaggattcatggggcggcgatgcctatgcatggtctgacctcgaacacccctggagctacgggagcaaagggggctcgaccagcgttgagaaggactatggtggtgacggtggtggcatcgtgtggctgtttgctgaggacctggtcatgaatggcacagttctcgccaacggtggggatagcaatgagaagggtggtggtggttctggagggagcatctttataagggctgcatcgatgcatggtggtggcaagatcagtgcctctgggggtgatggtttggctgggggaggtggagggcgagtttctattaacgtttttagtagacatgatgacacccagatttttgttcacgggggaaggagttcaggctgtccagataatgcaggagctgctggaactctttatgaagcagtaccaaaaagtcttattgtcagtaacaacaatctgagtacacaaacagacactcttcttttggagtttccaaatcaaccactgtggacaaatgtttttgtaagaaatcgtgccaaagttgctgtccccttgctctggagtcgcgttcaggtcgaagggcaacttagccttctttctggtgctattctaacttttggtctcactcgttatccatactcggagtttgaactgatggctgaggagcttcttatgagtgactcaacaatcaaggtgttcggtgctttgagaatgtctgtaaagatgctccttatgtggaactccagaatggaaattgatggcggtggagattcgatagttgcaacatctttgttggatgctagcaacctgatagttctgaaggaatcatctgtgatacactctaatgctaatcttggagttcggggccaaggtctcctaaatttgtctggggacggagacacaattgaggcgcaacaccttattctttcgctgttctacagcatacaagttggacctggttctgttttacggggcccacttgtaaacagaagtagcgatgatgtggccccaaagctgaattgtgaagctgatagctgccctgtggaaataattcatccaccagaagattgcaatctaaattcttcattgtcatttacccttcaggtctgtcgtgttgaagatattgatgtctggggtctcgtacaaggaactgtaattcatttcaatagggcaagaagtgtcactgtgcatacatctggaaccatcagcgcatcaggcttgggctgtcgaactggagtagggcaagggaaaatgttaagcagaggtatatgtggtggtggtggacatggtggaaaaggcggggatggtttttataagggaaaccttgctgagggtggagctatctatggcaatgctgatctaccttgtgaacttggcagtggcagtgggaatgactctaccgagttgtccacagctggtgggggtataatagcgatgggctcatgggagtattctttgccaagtcttgccctctatggctcagtagaatcaaatggtggtagctatactaatggctctgttggaggacctggtggtggttctgggggcacaattcttctatttgtgcatactttgtccttagctgaaagctctgtcctctcaagtgttggtggcttcggaaatgctggtagtggtggaggtggagggggaaggattcatttccattggtctaacattcctactggagatgatggaggagtcagcaaagggctgggatattctggtggcaatggaacggtcacaggaaaagcttgcccaaagggtctttatggaacattttgcaa

SEQ ID NO: 33550 - DNA, 2118 bp, Zea Mays
cttcctctccaaaaaacgaacatcaaaatgcgcgagagaaacggagcaaagtcgaaaggggaaaaatgagttaaacccaaatcgacaccaaacccactccaggaacacccgcctccgccgccgccgccgccatcgccggcggccactacaagcgcggcgtccggagacagtactgcgctaccaacccctagagcctggattctgatgagccctccatggcctgtcatatctgtcccctcttcaatctccgactcttgctgctgctcggcgcggttctcgggaacggcggcctcggccggggcggcggagcggaggcttcagatcgggcggacccggacccgtactcgatcctgatgtggcacgactactcgccgccgtcgcccccgctcccgcccccggacccgccgtcgccgacggcgacatgtgagggggacctccacgggaagggtgacttccacacgcgctgcgaggtctccgaggaagtggagctggacggcgacgtctacatcacggggaacggcagcctcgtgctcctctctggcgcctccctgacctgcgagaagtacgggtgcgttatatccgccaatttctcaggcgaggtgcgcctcagccgcggcgtccgcgtcacagccggcagggtctcgctggttgccaccaacatcacggtcgccgacacggtcgtcgtgaataccaccgcgctcgctggtgatccgccagaccggaccagtggcgttcccacggggacgcacggcgacggtggcgggcacggtggtcgtggcgccagctgcttcgtcaaggaagggcagacgcaggaggattcatggggcggcgatgcctatgcatggtctgacctcgaacacccctggagctacgggagcaaagggggctcgaccagcgttgagaaggactatggtggtgacggtggtggcatcgtgtggctgtttgctgaggacctggtcatgaatggcacagttctcgccaacggtggggatagcaatgagaagggtggtggtggttctggagggagcatctttataagggctgcatcgatgcatggtggtggcaagatcagtgcctctgggggtgatggtttggctgggggaggtggagggcgagtttctattaacgtttttagtagacatgatgacacccagatttttgttcacgggggaaggagttcaggctgtccagataatgcaggagctgctggaactctttatgaagcagtaccaaaaagtcttattgtcagtaacaacaatctgagtacacaaacagacactcttcttttggagtttccaaatcaaccactgtggacaaatgtttttgtaagaaatcgtgccaaagttgctgtccccttgctctggagtcgcgttcaggtcgaagggcaacttagccttctttctggtgctattctaacttttggtctcactcgttatccatactcggagtttgaactgatggctgaggagcttcttatgagtgactcaacaatcaaggtgttcggtgctttgagaatgtctgtaaagatgctccttatgtggaactccagaatggaaattgatggcggtggagattcgatagttgcaacatctttgttggatgctagcaacctgatagttctgaaggaatcatctgtgatacactctaatgctaatcttggagttcggggccaaggtctcctaaatttgtctggggacggagacacaattgaggcgcaacaccttattctttcgctgttctacagcatacaagttggacctggttctgttttacggggcccacttgtaaacagaagtagcgatgatgtggccccaaagctgaattgtgaagctgatagctgccctgtggaaataattcatccaccagaagattgcaatctaaattcttcattgtcatttacccttcaggtctgtcgtgttgaagatattgatgtctggggtctcgtacaaggaactgtaattcatttcaatagggcaagaagtgtcactgtgcatacatctggaaccatcagcgcatcaggcttggtggaggagtcagcaaagggctgggatattctggtggcaatggaacggtcacaggaaaagcttgcccaaagggtctttatggaacattttgcaa

SEQ ID NO: 33551 - DNA, 2649 bp, Zea Mays
cacccttctccctccacacccttcctctccaaaaaacgaacatcaaaatgcgcgagagaaacggagcaaagtcgaaaggggaaaaatgagttaaacccaaatcgacaccaaacccactccaggaacacccgcctccgccgccgccgccgccatcgccggcggccactacaagcgcggcgtccggagacagtactgcgctaccaacccctagagcctggattctgatgagccctccatggcctgtcatatctgtcccctcttcaatctccgactcttgctgctgctcggcgcggttctcgggaacggcggcctcggccggggcggcggagcggaggcttcagatcgggcggacccggacccgtactcgatcctgatgtggcacgactactcgccgccgtcgcccccgctcccgcccccggacccgccgtcgccgacggcgacatgtgagggggacctccacgggaagggtgacttccacacgcgctgcgaggtctccgaggaagtggagctggacggcgacgtctacatcacggggaacggcagcctcgtgctcctctctggcgcctccctgacctgcgagaagtacgggtgcgttatatccgccaatttctcaggcgaggtgcgcctcagccgcggcgtccgcgtcacagccggcagggtctcgctggttgccaccaacatcacggtcgccgacacggtcgtcgtgaataccaccgcgctcgctggtgatccgccagaccggaccagtggcgttcccacggggacgcacggcgacggtggcgggcacggtggtcgtggcgccagctgcttcgtcaaggaagggcagacgcaggaggattcatggggcggcgatgcctatgcatggtctgacctcgaacacccctggagctacgggagcaaagggggctcgaccagcgttgagaaggactatggtggtgacggtggtggcatcgtgtggctgtttgctgaggacctggtcatgaatggcacagttctcgccaacggtggggatagcaatgagaagggtggtggtggttctggagggagcatctttataagggctgcatcgatgcatggtggtggcaagatcagtgcctctgggggtgatggtttggctgggggaggtggagggcgagtttctattaacgtttttagtagacatgatgacacccagatttttgttcacgggggaaggagttcaggctgtccagataatgcaggagctgctggaactctttatgaagcagtaccaaaaagtcttattgtcagtaacaacaatctgagtacacaaacagacactcttcttttggagtttccaaatcaaccactgtggacaaatgtttttgtaagaaatcgtgccaaagttgctgtccccttgctctggagtcgcgttcaggtcgaagggcaacttagccttctttctggtgctattctaacttttggtctcactcgttatccatactcggagtttgaactgatggctgaggagcttcttatgagtgactcaacaatcaaggtgttcggtgctttgagaatgtctgtaaagatgctccttatgtggaactccagaatggaaattgatggcggtggagattcgatagttgcaacatctttgttggatgctagcaacctgatagttctgaaggaatcatctgtgatacactctaatgctaatcttggagttcggggccaaggtctcctaaatttgtctggggacggagacacaattgaggcgcaacaccttattctttcgctgttctacagcatacaagttggacctggttctgttttacggggcccacttgtaaacagaagtagcgatgatgtggccccaaagctgaattgtgaagctgatagctgccctgtggaaataattcatccaccagaagattgcaatctaaattcttcattgtcatttacccttcaggtctgtcgtgttgaagatattgatgtctggggtctcgtacaaggaactgtaattcatttcaatagggcaagaagtgtcactgtgcatacatctggaaccatcagcgcatcaggcttgggctgtcgaactggagtagggcaagggaaaatgttaagcagaggtatatgtggtggtggtggacatggtggaaaaggcggggatggtttttataagggaaaccttgctgagggtggagctatctatggcaatgctgatctaccttgtgaacttggcagtggcagtgggaatgactctaccgagttgtccacagctggtgggggtataatagcgatgggctcatgggagtattctttgccaagtcttgccctctatggctcagtagaatcaaatggtggtagctatactaatggctctgttggaggacctggtggtggttctgggggcacaattcttctatttgtgcatactttgtccttagctgaaagctctgtcctctcaagtgttggtggcttcggaaatgctggtagtggtggaggtggagggggaaggattcatttccattggtctaacattcctactggagatgagtatgtgcctgttgcagctgttaagggatcaatacttgcaagtggaggagtcagcaaagggctgggatattctggtggcaatggaacggtcacaggaaaagcttgcccaaagggtctttatggaacattttgcaa

SEQ ID NO: 33552 - DNA, 2543 bp, Zea Mays
ccgacgtcccgacccctgctatacgaatctagaggtgaatccaacggcgtaacacccttctccctccacacccttcctctccaaaaaacgaacatcaaaatgcgcgagagaaacggagcaaagtcgaaaggggaaaaatgagttaaacccaaatcgacaccaaacccactccaggaacacccgcctccgccgccgccgccgccatcgccggcggccactacaagcgcggcgtccggagacagtactgcgctaccaacccctagagcctggattctgatgagccctccatggcctgtcatatctgtcccctcttcaatctccgactcttgctgctgctcggcgcggttctcgggaacggcggcctcggccggggcggcggagcggaggcttcagatcgggcggacccggacccgtactcgatcctgatgtggcacgactactcgccgccgtcgcccccgctcccgcccccggacccgccgtcgccgacggcgacatgtgagggggacctccacgggaagggtgacttccacacgcgctgcgaggtctccgaggaagtggagctggacggcgacgtctacatcacggggaacggcagcctcgtgctcctctctggcgcctccctgacctgcgagaagtacgggtgcgttatatccgccaatttctcaggcgaggtgcgcctcagccgcggcgtccgcgtcacagccggcagggtctcgctggttgccaccaacatcacggtcgccgacacggtcgtcgtgaataccaccgcgctcgctggtgatccgccagaccggaccagtggcgttcccacggggacgcacggcgacggtggcgggcacggtggtcgtggcgccagctgcttcgtcaaggaagggcagacgcaggaggattcatggggcggcgatgcctatgcatggtctgacctcgaacacccctggagctacgggagcaaagggggctcgaccagcgttgagaaggactatggtggtgacggtggtggcatcgtgtggctgtttgctgaggacctggtcatgaatggcacagttctcgccaacggtggggatagcaatgagaagggtggtggtggttctggagggagcatctttataagggctgcatcgatggggaaggagttcaggctgtccagataatgcaggagctgctggaactctttatgaagcagtaccaaaaagtcttattgtcagtaacaacaatctgagtacacaaacagacactcttcttttggagtttccaaatcaaccactgtggacaaatgtttttgtaagaaatcgtgccaaagttgctgtccccttgctctggagtcgcgttcaggtcgaagggcaacttagccttctttctggtgctattctaacttttggtctcactcgttatccatactcggagtttgaactgatggctgaggagcttcttatgagtgactcaacaatcaaggtgttcggtgctttgagaatgtctgtaaagatgctccttatgtggaactccagaatggaaattgatggcggtggagattcgatagttgcaacatctttgttggatgctagcaacctgatagttctgaaggaatcatctgtgatacactctaatgctaatcttggagttcggggccaaggtctcctaaatttgtctggggacggagacacaattgaggcgcaacaccttattctttcgctgttctacagcatacaagttggacctggttctgttttacggggcccacttgtaaacagaagtagcgatgatgtggccccaaagctgaattgtgaagctgatagctgccctgtggaaataattcatccaccagaagattgcaatctaaattcttcattgtcatttacccttcaggtctgtcgtgttgaagatattgatgtctggggtctcgtacaaggaactgtaattcatttcaatagggcaagaagtgtcactgtgcatacatctggaaccatcagcgcatcaggcttgggctgtcgaactggagtagggcaagggaaaatgttaagcagaggtatatgtggtggtggtggacatggtggaaaaggcggggatggtttttataagggaaaccttgctgagggtggagctatctatggcaatgctgatctaccttgtgaacttggcagtggcagtgggaatgactctaccgagttgtccacagctggtgggggtataatagcgatgggctcatgggagtattctttgccaagtcttgccctctatggctcagtagaatcaaatggtggtagctatactaatggctctgttggaggacctggtggtggttctgggggcacaattcttctatttgtgcatactttgtccttagctgaaagctctgtcctctcaagtgttggtggcttcggaaatgctggtagtggtggaggtggagggggaaggattcatttccattggtctaacattcctactggagatgatggaggagtcagcaaagggctgggatattctggtggcaatggaacggtcacaggaaaagcttgcccaaagggtctttatggaacattttgcaa

SEQ ID NO: 33553 - DNA, 605 bp, Zea Mays
atttgtttatgtgcgcacgctacttcgctaaagtgcggcccatcgggcccttcatcgaacatttggatgagccagcacaattgcttccttgcttgtggcagctagccagcttccctgccctaatcaactaatcgagatttcctcttagcggcgtgagggattgacagactgctgactacgggagccgggagggggcatcgtgcgccgtgcgcggtggcgaaggaagagcgaagcggcggaggccgagctgctacggcgctgactggccgggtcgcacggctacgccgctactcgacgcttgctgcggcttgtgggaagctggagaagaaagtttgtcgcctgtacagctgtcggagaagaaagctcgtgcttggcggcttgctatgggccgcgattgagaggagatctgaaaatggagaaaaggtgcgagctgcaatcaaagttaaggcattagtcatcatttgcttcacctcttctggacaggctgcaaggttgctctgacataacgaggaagtccctcttcatggtcggagaaattgggggcaatgactacaacctacctcttcaatcgagtgccatttgaaaagggtgttctggacaaagaa

SEQ ID NO: 33554 - DNA, 655 bp, Zea Mays
aaatttgtttatgtgcgcacgctacttcgctaaagtgcggcccatcgggcccttcatcgaacatttggatgagccagcacaattgcttccttgcttgtggcagctagccagcttccctgccctaatcaactaatcgagatttcctcttagcggcgtgagggattgacagactgctgactacgggagccgggagggggcatcgtgcgccgtgcgcggtggcgaaggaagagcgaagcggcggaggccgagctgctacggcgctgactggccgggtcgcacggctacgccgctactcgacgcttgctgcggcttgtgggaagctggagaagaaagtttgtcgcctgtacagctgtcggagaagaaagctcgtgcttggcggcttgctatgggccgcgattgagaggagatctgaaaatggagaaaaggtgaacatttttagcaagagctattggaaaaagaaacaaattgtataagtgcgagctgcaatcaaagttaaggcattagtcatcatttgcttcacctcttctggacaggctgcaaggttgctctgacataacgaggaagtccctcttcatggtcggagaaattgggggcaatgactacaacctacctcttcaatcgagtgccatttgaaaagggtgttctggacaaagaa

SEQ ID NO: 33555 - DNA, 589 bp, Zea Mays
caaatttgtttatgtgcgcacgctacttcgctaaagtgcggcccatcgggcccttcatcgaacatttggatgagccagcacaattgcttccttgcttgtggcagctagccagcttccctgccctaatcaactaatcgagatttcctcttagcggcgtgagggattgacagactgctgactacgggagccgggagggggcatcgtgcgccgtgcgcggtggcgaaggaagagcgaagcggcggaggccgagctgctacggcgctgactggccgggtcgcacggctacgccgctactcgacgcttgctgcggcttgtgggaagctggagaagaaagtttgtcgcctgtacagctgtcggagaagaaagctcgtgcttggcggcttgctatgggccgcgattgagaggaggtgcgagctgcaatcaaagttaaggcattagtcatcatttgcttcacctcttctggacaggctgcaaggttgctctgacataacgaggaagtccctcttcatggtcggagaaattgggggcaatgactacaacctacctcttcaatcgagtgccatttgaaaagggtgttctggacaaagaa

SEQ ID NO: 33556 - DNA, 700 bp, Zea Mays
atttgtttatgtgcgcacgctacttcgctaaagtgcggcccatcgggcccttcatcgaacatttggatgagccagcacaattgcttccttgcttgtggcagctagccagcttccctgccctaatcaactaatcgagatttcctcttagcggcgtgagggattgacagactgctgactacgggagccgggagggggcatcgtgcgccgtgcgcggtggcgaaggaagagcgaagcggcggaggccgagctgctacggcgctgactggccgggtcgcacggctacgccgctactcgacgcttgctgcggcttgtgggaagctggagaagaaagtttgtcgcctgtacagctgtcggagaagaaagctcgtgcttggcggcttgctatgggccgcgattgagaggagatctgaaaatggagaaaaggtgaacatttttagcaagagctattggaaaaagaaacaaattgtataagttagtgctcctcggatgcaattgatgatattacaatgccatgttgaaactagcaatgcaatttgtgcgagctgcaatcaaagttaaggcattagtcatcatttgcttcacctcttctggacaggctgcaaggttgctctgacataacgaggaagtccctcttcatggtcggagaaattgggggcaatgactacaacctacctcttcaatcgagtgccatttgaaaagg

SEQ ID NO: 33557 - DNA, 1100 bp, Zea Mays
atttgtttatgtgcgcacgctacttcgctaaagtgcggcccatcgggcccttcatcgaacatttggatgagccagcacaattgcttccttgcttgtggcagctagccagcttccctgccctaatcaactaatcgagatttcctcttagcggcgtgagggattgacagactgctgactacgggagccgggagggggcatcgtgcgccgtgcgcggtggcgaaggaagagcgaagcggcggaggccgagctgctacggcgctgactggccgggtcgcacggctacgccgctactcgacgcttgctgcggcttgtgggaagctggagaagaaagtttgtcgcctgtacagctgtcggagaagaaagctcgtgcttggcggcttgctatgggccgcgattgagaggagatctgaaaatggagaaaaggtgaacatttttagcaagagctattggaaaaagaaacaaattgtataagttagtgctcctcggatgcaattgatgatattacaatgccatgttgaaactagcaatgcaatttgtaatcttacttatgctatttaatgttgttctttatatatttaagcactagccacttggttatgtcaaacaattaatactttgatattttgagtaatgaataacatcatcttatgatctattttttgttgcgtgtgttatgatttagtttactagttgtgtaatatgtatgttcaattatatgttatatattttatatgctatgaaacaacttctatgtgatactataatcaattatatatgtctaaaggctactaaaataggctttaggctattatcttttttacactagtaaaatttcgaatacccattctctaaatcctgggcccgcccctgtctataggctaccaaatctaagaaattgattagttctgaactaatgcacttcgaccggagcatttttacacttattgcttactaatgggttcgagctgcaaagcctgactgttaggaactgaaagtggatttgctttacctttttgcacttgtttgttctgcaagactgatattttgagttccaacttttattgcacactattttaaaggacaccgttcattactttgac

SEQ ID NO: 33558 - DNA, 1583 bp, Zea Mays
ttaccactgagtatactataacagacggatccggcgccgctgtgtcgggcgggcctgacggcaccggcaccgggctggttcgtccttgtccggtaaccagacggcgctgctgatgtggtcccgcggaaggcggaagaatattatctcgtgcgatgcgatgtggtggcgcggaggcggagcggagatctgcacgcgagccgcggggcggcaatgccatgttggcatggcgcgccgcgcgagaaaataatgcggccggacagcctggtgcggacagccgggccggaagggcgggcggatccgcaggccgcagcgcaggtgcgtgcgtgccagcccacgcagctcagatgccagcacacacgaggaagcgggagcttttttttaacgctatactattatatgtccatcgccctcagctgtgctatgccagatgcccagatctgtattggattccgatcgatccatccgatcgttccagaactagttgaagctatgttggtggtggatgacgaaagacaagaacagatcgtggcggcgagggattgtagttataataatgtgtatcagtttatggatgaataaaaacttgcactttccgttcacctgacaaagggaatggcgcccctgggggcgattggcgccgccgccgccagccctgatcgcccgcatccggttcggggggtgctccgtcctttctccgcgggcggggctagcgctcctctccgtggtggcctcgggtcggccctccccgcggcggactcggtgtccggtcctctgcccaaacctcttctagagccggtaagtgctgagcgctcgttctctggcgggcaaactctgcgcagtgatgtgccccccacgagcgttcaagaccttctcttcctcggttctcctcaaccagatccgcagcgggccgttgcgggcggcattgatcacaggaggatttcactttcaagttccagatctgaaaagtgctctacgccggtgctgcctgaagatccgcatagtctgctttcggcgccgcgaatccaggcggctgaatcatccgactgtcactacacgacggttgatctttagcgacccttattaggtaccaactgttggttgctaaaggttagggaccgacggtcagtcgctaaatccttttgtagcaacggtcggttggtcgctaaaagtctagaaatttaacaacttatggttggtcgctatagatgtcgtcggggactagcggtgggtcgctatagagcaaggatcactatcaaatcttatagcctgaacgtacctgtagatgttagtgactaaaaattaattaaaacaagtaaacattgatcactaaattgcatggtgatttatttctttttaatattgcttgtatgtttatttcatggtttgtttatgtatggacatgactatagtatgcaactgtgttctttgtacttatatgatattagattcgagttgaaagtcgtttcaaatgtttattatttatttgcattcgtaataatttattcaaatgtttattatttatttggtaaaattttatgaattttgagtaatttaaaaatgcatttcgaaataaataaaaaaag

SEQ ID NO: 33559 - DNA, 1707 bp, Zea Mays
gtgggttgggtgattgggtcggtcgtccacgaacaccaagtgcacgcacattatttgaagtactgcaactctgaggtgcccatggcgccgtggacggtgttacaaaatattgtatattgtatatgtgaccaattcaaagggtgtgacagattctccctaagggacatatcccttgggatacatcccttcacatgtatataatcaggactccctgcaataataaaggctcgctgtcatttgtctctctctcaatctcgttaccactgagtatactataacacgttatcagcacgactcgcgagaaaacggagagaaattgctggtaggaagaaaacagatcgctcctagttggagaaggataatggtatggaacctactcttcctctccgctttcactgtatgcgtgaaatttttatgtcgtcggtggccacaactataccacaccggacggcgccgcgacggcaaggctcggcgcggacaagccctgtccccagcgcaccgacggtgcgggccatgcacaacaaggccatgcgcagagcagcgcgcctcggccatgcgcggtgcgtctgcctgcctacacagggccatgcggctcatgcacagggagggccatgcaggctccccacacgaagccatgcggccagcccaccggacatggcaccggccgctgcgagcccttggccgcatgtgcccaggtgcacttcggcgcgggtgaggcacgaccccggccagtccaatggacacggcacggccgttgcgagcccttggccgctcgcgaccaagcgcagtccggcaagaaccgaccacggcgcgggacagcctcggttacgcgcggtcgagccccagtgcgggcaagccccggccgccgagcgccccggccgccgagcgccccggcgcgggcacgctgcggccgtcccccggctcggacgcggccagttgccagcgtgggcacggacgctcggccgtcaacgggtggacgcctgaacgggtgctctgcatctctgcgcaagcggcacgtccctgccacaccgaccgccggtgcggatccggcaacgtcgggcgcggtcggcctctcgcggagttcggcgtggccgcctcctggtgcggggttggctgacaccggcacgcatgacgaggacgcccaggcgctgctgctcctggcgccggatggagcagactgcgggcggcccgacggaggccgtggcggctctccaaggcggtcgcggaccacggcgcatggcgagcgcctggatcccggcgagggcgcggtcgccccttgcctggtcgcggctaccggccccagccagggcacagtccggcctcggacggggcggcggctccctggtggcggctactgcaggagctgtgggcggttagggtttgaaaccctagccgcccctcataataggcgttttggacccttgttgggcctcctgggccggccagccaggctgggccggtgcctggtccgcctggcatgtcgcttgggctgttttccagggtccagaatagtctattttaccatttttaaattttaaatttaagtataagtctctgttttatatgtaatttcagttcaaaattatcttaggcatctagattcgttatttagattgctaaagatatatgtaactgtacatatttgtccattttattatggaaattacagacttgttaatgaattatattttatttatatttataatt

SEQ ID NO: 33560 - DNA, 1455 bp, Zea Mays
gatgaatcatgtttgatgtaatctagatcagatatgcagcataaaagttagatcgagcttcgatctccaaattatgttgttttccatacatcaatgagaaatagcaactctgcaaaaaggatgtttctaaaatatgctaacagaaaccctactacaaatgtgaaaattcctgatacatatcaaacaacaacactaactcccccccatgagaattcctgccgcaacaacaccatcttatttcccttccctgatcaaatgttagcggaccgggaactgccacaagagaaggccgcaatttgctctaccaacctgggcagccagccgcaaggtgcaatttctccagaaaaaaactgtcccggtgtctgatgatgagcccttagtacatgggacctttgttaaagtccgtggaatactattttacaactagaaactctggtggatttctacaaaccgcttgcccacgattgagaaagcagaaacctggctaaaaatgagcaggttatccagctggagccacatcatccaggcgtttgcatgctgatttagttcagaaatttgccgaggacaaacagcactgcaggttagggaatcattggatcaccagatgaaactgtgtgcatatgtgtgcccctcccgtttggttccatgggagaatccatgcctggtggacctgagattgataatatatcgaattagataagggcctgtttattttaacttatagattatataatctaagattatacataagatcaaataatctggattatataatctagattaaacaatctagttgtagctgtttggcaacccagcttattggaactttgattattcattttagtcatgtgttacgtggcggaagtaaggaaaaataaatgaaataaatgaaactttttttgtaaggagtggcaattgtgggtaatttctcctaaagttgccatggttagtgggtcttttgtcaaaaataatctcaaataaggacctcttcagcagattatgagattatgataatctggcctccaggttatataatctgacctaataatctgtctgtttgttttccatctagattatttaagctggattatataatctggacagattataatctgaaacaaacagccctgagcagatgcaggatgtgatcaaaataaaggttacatgtcactggcagaagtatgttaccgaatattgaaccaatggaaggccttgttagagatgaattcctttgcagatctgcatgcatttatagtttcagtcttccagaagtagcattagaacataatgtcccatttaaatgccatttgacacttagcatgtaaatgctggtaactcaattgaacaattaaggttactgaaaaatgtctgcttgcaggattcaacactcaacttctcaatacggcaacagtgtcatatgctgttaaggattaagggggcaaacctgaaattttt

SEQ ID NO: 33561 - DNA, 1260 bp, Zea Mays
ttatggcccaaactacgccagtgtgatctaccatctacccctgtgtctgtgtgttatatatacacagcgccgcagccttccggttcagggtcatccgagttgccagccaattttgcatccccaccacccacacccagtgacagagacagaaggccgggcagggccacgcgacgcgacggagatggagcacacgaatcatcgccgccgccgtcaagctttggccaccgtgtcggcgacgacgacgctcctgctgcttctcctctgcctcgcggcgttgacgacggcagaggcgctgcgcgagcacagggatgagggcggcgctagcagcagtggcggaagcggaagcggctgcggcagcaacgccgccggcggcaagcaatcgccggccgtgtgggtgttcggggactcgtacgcggacacggggaacctgggcgacctcgggcgggagctgacccgcgagtggtacgacccgtacgggaccaccttccccggccggcccgccggccgcttctccgacggccgcgtcctcaccgacttcatagcctccgcgatgggagtgccaacgccggtggcgtacaagctgcgcaggggcgctgcgcgcgggctcgtggcgcgcggcatgaacttcgccgtcggcggcgcgggcgtgctggacaccggcaacttccagcgcaacatcggcgagcagatcgacctgttccaggcgcagcgcccgccgtcgccgccctccgcccgcggctgcgacgccggggtcgccgtcgtcgtcgtctccggcaacgactactcctacgccgccgacaaggacaacagcacaagcgccgcgatcgcctacatcccggcggtggtgcggcagctccgggagcagctgctgcggctgcgcgacgaggcgggcatgcgcaaggtggtggtcaccaacctgcaccccatggggtgcacgccgctcttcacccgcgctctcaactacacggcctgcgacccgctggccaacgcgggcgccgcgcagcacaacgcggcgctccagtccgtgctcgccgcgctcgacccggccaaccgtaccttcctcctcctcgacctcaacacgcccttcgccgccttagtcgacggcgcggcggcggcgacggcggaggagaggttcgcggagccgaggcggccgtgctgcgagagcttcagcgccgacggccactgcgggcagcaggacgacagcggcaggcggcagtacagatcggttttacctggatcggtgcgtagagggagtagttc

SEQ ID NO: 33562 - DNA, 1252 bp, Zea Mays
cgccacgccagtacttttcgcagccgtcgtgcaaagctctctccaagccctcgccctttcacgctcccttgagggctttgatgcgggtggagtccagcggcggcctcccactcccagagctggaaagacagcaggcgggcgccaagagacgccgccggcgggcacgggcggcggcggcggcggcggcaccccgaacgatggccgcgcccgccaccgccgtgcagcggctcttcgaggcgtgccgcgaggtcttcaccggagctggtccaggcgcggttccaccgccggccggcgtcgagaggatcaagtccgttctagatagtatcacagcagcagatgttcgtctaacatccagcatgccatatttccgacgtgttgacccctacggcactccaaaaatcacttacttgcacctatacaagtgcgaggctttctcgatcggcatcttttgtttgccatcgaggggtgtcattcctctccacaatcaccctggcatgactgtgttcagcaagcttttgtttggtgccatgcatataaaatcttatgactgggctgcttctcaacaagacacacctgatgttcagttgcaagcaggaccacgtttggcaaaggtgaaggttgatggcatcttgactgcacctcatgaaacggcggtactatatccagaagatggtggtaatatgcattgctttaccgcacagaatgcttgtgcagtgcttgatgtccttggccctccatatgatgatggcagcggaaggcactgccagtactacaatgtccgttcctctgcaatttctgttggctcaactatattgcctggaggtgacagatatgaatggctggaggagagcgagccatctcgagatttttatcttgttggatcaacatatatgggcccgaaaattttggaccactgaacttctatgcttgtgagataggatgtgcctatagctgttcggctgctagaaaagttgctgcacccacagcgtttcctgagaggaaaaaaaagcctactgctcacttcaacagttcaacagcatcgttacctgcctcttcagcagttcaacagcttttaacagatcagtatatgttggttttggaggaagtgattaggaagaagaaacgatggaccacaatgctacgcgccccacacggcctcacactcctcgtcactgccatccatgacccacccttcgatgcgttcaccagtatggactctagaggtggcaatgacccgatatccgatgagtag

SEQ ID NO: 33563 - DNA, 1750 bp, Zea Mays
ctatacatccatagacacactgaaatacatcagatgaaatttggtgaccccatatcagctctttattacttagatcctgcgggaacaacaccaagtcatgtaatgatggataggaactccatctggttttgtcaagtgagttgaaatataacctttttttgtctgaacctgcacacgatgtataatttcttctttgcagggtccagcagccaaaaaactgaatattgatttgccagaaactgaaattgtagaaacacacaggaaccatagtgcaaggatcacttgtctgaggctatttcctctgattgatacgccactgtttcgaagtgatacacaaaaaaatgaaaaagcattagtcacttcaagcacagacagaacaatccgtctttgttggaagggctactcacgctgttacaagggccattcagcgcctgtgactgctctggctgacagattgcttatggatggtgaatctaaactacttgcaagtggaggggaagactgcaccattcgtctatggtctatgagtacgagggcgaaaaatcacccactaatagcaacatttcatgggcatgaaaaggcactgtcatttttatctgttgcgtggcataaatcgtccctgttggtgagctgttccaaagactcaaaggttaaagtttgggacacagtgtctccttcgagtggttcatcatcatgtgtaggcagtgctcacctcaactcaaacgggccaccaattgctatgaaatgccatgaatccctttgctatatcgctgctggagctgaagtgacagcgattgacttgaggacaatgaagaaggcttctgtccttgcactccagaaccacagaatactttcttgtgagatgatgccttctgaatggttaatatgtactggcacgaaagacagggctcttctatgggacatccgcaaggctcaggagctcccaaacacagtggcggagatgcaatcgagcggcccggtgacattgcttcacttggaccaatacaagctccaaagcttcgtggaacaaccagacaaggtgatggtcacagaccttttctccattggaatcctgtggggacgagcgagcactcacggtcacggccatgggcacggggggatcctgggttctgcatggcacgtacatgacaaaataggcaagcaacaagaaggcaggaaggaccccagctgcccagcagcccaccctgcaggttttccacagctgtttggcctggctgcccagcccacaggaatgcctgatgcgatggttcctctgcctctccggccggcaggcggcagcagcttataaaacttgagaggggactcaattttcattggtttgtgtacaccggcggcggcaacagagtggagtaggacgacgacgacaacacgaaagcgaagagggagcaggctgtgccttactatataacaacatgcatgcatgggcgctttgtcatgtatgtatatagcagttgaaatctgattagaattctgggatgcaaaagttccagatgatcaataactatttttgaacgtaaggaaatttagaaggtatttgaatacagtagagataatagttagttagctaaaaatatactagtagaattagctagctaataactagttagctaactagtagctaatttactaagaataactaatagttgggtgtttggatatctctagttaattttagccactaactattatctctagtgcattcaaacaccccctagatagtggtattagg

SEQ ID NO: 33564 - DNA, 3149 bp, Zea Mays
tcatcatccgctggtacatcccgttgcgcgtttgccttcgactagggcaaaatttagggagcaatggattatcggtgattgctatttggactttggagatggggcagggttgaaccttgtgaagacttttgttactttccggggtcatatgctagttctggtggcagctgggcataggaaagtaggaaggcacaaacaaggaggggaggacaattatttgtgtttcttaattttagttatttggaccggcgtttattctagggctatccaatttgcagttcgtaaaatgtagtgggacaaatctttcaattctacgatattttggatttcagggattgtactattgcatctgtagagggtcatccttgtgaaacttgcgatttattcattgattgccagaacaagatcagtttttttttcagcactgaccaagtgaccatgcatttgagtgccctgttgcgaagtgcctatatgttagggatagggaatgacaacggcagtgctgttttccatgataaattaggatgctgaagcttcaaattagcagtgaacaatgtcaaatggattatgtaattctgtccagggattgagatgttgtttttaatgactatgcacatggtttacttttaatgctaagatacatgaaatttgatagtgacatatattaacaagaaaaccattgggggtccaatggtccatcattcgtagcaaatcaacctatctataccactttagattttatatcctcattttttgtgtctcttgttgggtctcatatgtaggctgtagcctaccccaacttgcttgggaatggaaggctttcttgttgctgataaaaaaacaatgttcatcttatagcctacttatatttgtttcatataattatttattaaacattcagggatcaatggccatttgagaaagtgccttgtgatgctttggggctaagagaactatacatccatagacacactgaaatacatcagatgaaatttggtgaccccatatcagctctttattacttagatcctgcgggaacaacaccaagtcatgtaatgatggataggaactccatctggttttgtcaaggtccagcagccaaaaaactgaatattgatttgccagaaactgaaattgtagaaacacacaggaaccatagtgcaaggatcacttgtctgaggctatttcctctgattgatacgccactgtttcgaagtgatacacaaaaaaatgaaaaagcattagtcacttcaagcacagacagaacaatccgtctttgttggaagggctactcacgctgttacaagggccattcagcgcctgtgactgctctggctgacagattgcttatggatggtgaatctaaactacttgcaagtggaggggaagactgcaccattcgtctatggtctatgagtacgagggcgaaaaatcacccactaatagcaacatttcatgggcatgaaaaggcactgtcatttttatctgttgcgtggcataaatcgtccctgttggtgagctgttccaaagactcaaaggttaaagtttgggacacagtgtctccttcgagtggttcatcatcatgtgtaggcagtgctcacctcaactcaaacgggccaccaattgctatgaaatgccatgaatccctttgctatatcgctgctggagctgaagtgacagcgattgacttgaggacaatgaagaaggcttctgtccttgcactccagaaccacagaatactttcttgtgagatgatgccttctgaatggttaatatgtactggcacgaaagacagggctcttctatgggacatccgcaaggctcaggagctcccaaacacagtggcggagatgcaatcgagcggcccggtgacattgcttcacttggaccaatacaaggtggtgaccggagtgccgtcggacggccaggtccacgtctgggaaacacggacggggcactcgctgaacacgttgggctgtggcgaaccttcgagactgggtgtgcggagcagggtgtcggccatggccgtggacgggtgcaggatcgccatggcgggcagctctccggaaggctgcatgctgcactaccgtgacttcgcgacggcttctgcccctgtagtgtccttgccaggcaaggagaaggaggtctccaggttctggaggccccaggaattcgacgacagcgaggaagaggagtattgattaatcattacatccccagttccaaattataagtcactttgacttttttttacgtaaattttgccatgcatagtaaaattgatgtaccaaaaaaagagtcaaagctacatagtttggaactgaattagtattacgctatctcggtgagcttccagttctgctacatgcagacaagagaaaagcttgtatatataaaaagaaagaaagctccaaagcttcgtggaacaaccagacaaggtgatggtcacagaccttttctccattggaatcctgtggggacgagcgagcactcacggtcacggccatgggcacggggggatcctgggttctgcatggcacgtacatgacaaaataggcaagcaacaagaaggcaggaaggaccccagctgcccagcagcccaccctgcaggttttccacagctgtttggcctggctgcccagcccacaggaatgcctgatgcgatggttcctctgcctctccggccggcaggcggcagcagcttataaaacttgagaggggactcaattttcattggtttgtgtacaccggcggcggcaacagagtggagtaggacgacgacgacaacacgaaagcgaagagggagcaggctgtgccttactatataacaacatgcatgcatgggcgctttgtcatgtatgtatatagcagttgaaatctgattagaattctgggatgcaaaagttccagatgatcaataactatttttgaacgtaaggaaatttagaaggtatttgaatacagtagagataatagttagttagctaaaaatatactagtagaattagctagctaataactagttagctaactagtagctaatttactaagaataactaatagttgggtgtttggatatctctagttaattttagccactaactattatctctagtgcattcaaacaccccctagatagtggtattagg

SEQ ID NO: 33565 - DNA, 2196 bp, Zea Mays
ccagcctcgccatggcctgccgccccctgcgcgccgccgcgtattgcgacgcggtctggtaccgcctcttcagatcctgcgggaacaacaccaagtcatgtaatgatggataggaactccatctggttttgtcaaggtccagcagccaaaaaactgaatattgatttgccagaaactgaaattgtagaaacacacaggaaccatagtgcaaggatcacttgtctgaggctatttcctctgattgatacgccactgtttcgaagtgatacacaaaaaaatgaaaaagcattagtcacttcaagcacagacagaacaatccgtctttgttggaagggctactcacgctgttacaagggccattcagcgcctgtgactgctctggctgacagattgcttatggatggtgaatctaaactacttgcaagtggaggggaagactgcaccattcgtctatggtctatgagtacgagggcgaaaaatcacccactaatagcaacatttcatgggcatgaaaaggcactgtcatttttatctgttgcgtggcataaatcgtccctgttggtgagctgttccaaagactcaaaggttaaagtttgggacacagtgtctccttcgagtggttcatcatcatgtgtaggcagtgctcacctcaactcaaacgggccaccaattgctatgaaatgccatgaatccctttgctatatcgctgctggagctgaagtgacagcgattgacttgaggacaatgaagaaggcttctgtccttgcactccagaaccacagaatactttcttgtgagatgatgccttctgaatggttaatatgtactggcacgaaagacagggctcttctatgggacatccgcaaggctcaggagctcccaaacacagtggcggagatgcaatcgagcggcccggtgacattgcttcacttggaccaatacaaggtggtgaccggagtgccgtcggacggccaggtccacgtctgggaaacacggacggggcactcgctgaacacgttgggctgtggcgaaccttcgagactgggtgtgcggagcagggtgtcggccatggccgtggacgggtgcaggatcgccatggcgggcagctctccggaaggctgcatgctgcactaccgtgacttcgcgacggcttctgcccctgtagtgtccttgccaggcaaggagaaggaggtctccaggttctggaggccccaggaattcgacgacagcgaggaagaggagtattgattaatcattacatccccagttccaaattataagtcactttgacttttttttacgtaaattttgccatgcatagtaaaattgatgtaccaaaaaaagagtcaaagctacatagtttggaactgaattagtattacgctatctcggtgagcttccagttctgctacatgcagacaagagaaaagcttgtatatataaaaagaaagaaagctccaaagcttcgtggaacaaccagacaaggtgatggtcacagaccttttctccattggaatcctgtggggacgagcgagcactcacggtcacggccatgggcacggggggatcctgggttctgcatggcacgtacatgacaaaataggcaagcaacaagaaggcaggaaggaccccagctgcccagcagcccaccctgcaggttttccacagctgtttggcctggctgcccagcccacaggaatgcctgatgcgatggttcctctgcctctccggccggcaggcggcagcagcttataaaacttgagaggggactcaattttcattggtttgtgtacaccggcggcggcaacagagtggagtaggacgacgacgacaacacgaaagcgaagagggagcaggctgtgccttactatataacaacatgcatgcatgggcgctttgtcatgtatgtatatagcagttgaaatctgattagaattctgggatgcaaaagttccagatgatcaataactatttttgaacgtaaggaaatttagaaggtatttgaatacagtagagataatagttagttagctaaaaatatactagtagaattagctagctaataactagttagctaactagtagctaatttactaagaataactaatagttgggtgtttggatatctctagttaattttagccactaactattatctctagtgcattcaaacaccccctagatagtggtattagg

SEQ ID NO: 33566 - DNA, 2512 bp, Zea Mays
ccgggcccgccgccagacccccggtgttctcctcgccggcgatgtcggcgccgcctgtgcgtacgctcgccgaccttgatggcgacgtgctggctcactgcgccggctacctcggcgcccgcgacgtcgccagcctcgccatggcctgccgccccctgcgcgccgccgcgtattgcgacgcggtctggtaccgcctcttcagggtccagcagccaaaaaactgaatattgatttgccagaaactgaaattgtagaaacacacaggaaccatagtgcaaggatcacttgtctgaggctatttcctctgattgatacgccactgtttcgaagtgatacacaaaaaaatgaaaaagcattagtcacttcaagcacagacagaacaatccgtctttgttggaagggctactcacgctgttacaagggccattcagcgcctgtgactgctctggctgacagattgcttatggatggtgaatctaaactacttgcaagtggaggggaagactgcaccattcgtctatggtctatgagtacgagggcgaaaaatcacccactaatagcaacatttcatgggcatgaaaaggcactgtcatttttatctgttgcgtggcataaatcgtccctgttggtgagctgttccaaagactcaaaggttaaagtttgggacacagtgtctccttcgagtggttcatcatcatgtgtaggcagtgctcacctcaactcaaacgggccaccaattgctatgaaatgccatgaatccctttgctatatcgctgctggagctgaagtgacagcgattgacttgaggacaatgaagaaggcttctgtccttgcactccagaaccacagaatactttcttgtgagatgatgccttctgaatggttaatatgtactggcacgaaagacagggctcttctatgggacatccgcaaggctcaggagctcccaaacacagtggcggagatgcaatcgagcggcccggtgacattgcttcacttggaccaatacaaggtggtgaccggagtgccgtcggacggccaggtccacgtctgggaaacacggacggggcactcgctgaacacgttgggctgtggcgaaccttcgagactgggtgtgcggagcagggtgtcggccatggccgtggacgggtgcaggatcgccatggcgggcagctctccggaaggctgcatgctgcactaccgtgacttcgcgacggcttctgcccctgtagtgtccttgccaggcaaggagaaggaggtctccaggttctggaggccccaggaattcgacgacagcgaggaagaggagtattgattaatcattacatccccagttccaaattataagtcactttgacttttttttacgtaaattttgccatgcatagtaaaattgatgtaccaaaaaaagagtcaaagctacatagtttggaactgaattagtattacgctatctcggtgagcttccagttctgctacatgcagacaagagaaaagcttgtatatataaaaagaaagaaaggtatgtcaactgggcctgggtgcgcggcgtgattgcatcatgcatcccacagctgcagcctgcaggatactacagaatgctagaggtagaagtgataccagaggttgcattaccatgggcgccgcatgtgttggtcgctataccgctgttgcttgtgttgtttgtgtcgcctttggacttggtgaggataatgccgatgctacgggcaattaatgcgcctatgctttgctgtttgttttatgcctgcagctccaaagcttcgtggaacaaccagacaaggtgatggtcacagaccttttctccattggaatcctgtggggacgagcgagcactcacggtcacggccatgggcacggggggatcctgggttctgcatggcacgtacatgacaaaataggcaagcaacaagaaggcaggaaggaccccagctgcccagcagcccaccctgcaggttttccacagctgtttggcctggctgcccagcccacaggaatgcctgatgcgatggttcctctgcctctccggccggcaggcggcagcagcttataaaacttgagaggggactcaattttcattggtttgtgtacaccggcggcggcaacagagtggagtaggacgacgacgacaacacgaaagcgaagagggagcaggctgtgccttactatataacaacatgcatgcatgggcgctttgtcatgtatgtatatagcagttgaaatctgattagaattctgggatgcaaaagttccagatgatcaataactatttttgaacgtaaggaaatttagaaggtatttgaatacagtagagataatagttagttagctaaaaatatactagtagaattagctagctaataactagttagctaactagtagctaatttactaagaataactaatagttgggtgtttggatatctctagttaattttagccactaactattatctctagtgcattcaaacaccccctagatagtggtattagg

SEQ ID NO: 33567 - DNA, 3660 bp, Zea Mays
gggaactgtggccaccgggcccgccgccagacccccggtgttctcctcgccggcgatgtcggcgccgcctgtgcgtacgctcgccgaccttgatggcgacgtgctggctcactgcgccggctacctcggcgcccgcgacgtcgccagcctcgccatggcctgccgccccctgcgcgccgccgcgtattgcgacgcggtctggtaccgcctcttcaggtcgtgactccaacgcttccctcttgtgtgattcagaatctgggattcatcatccgctggtacatcccgttgcgcgtttgccttcgactagggcaaaatttagggagcaatggattatcggtgattgctatttggactttggagatggggcagggttgaaccttgtgaagacttttgttactttccggggtcatatgctagttctggtggcagctgggcataggaaagtaggaaggcacaaacaaggaggggaggacaattatttgtgtttcttaattttagttatttggaccggcgtttattctagggctatccaatttgcagttcgtaaaatgtagtgggacaaatctttcaattctacgatattttggatttcagggattgtactattgcatctgtagagggtcatccttgtgaaacttgcgatttattcattgattgccagaacaagatcagtttttttttcagcactgaccaagtgaccatgcatttgagtgccctgttgcgaagtgcctatatgttagggatagggaatgacaacggcagtgctgttttccatgataaattaggatgctgaagcttcaaattagcagtgaacaatgtcaaatggattatgtaattctgtccagggattgagatgttgtttttaatgactatgcacatggtttacttttaatgctaagatacatgaaatttgatagtgacatatattaacaagaaaaccattgggggtccaatggtccatcattcgtagcaaatcaacctatctataccactttagattttatatcctcattttttgtgtctcttgttgggtctcatatgtaggctgtagcctaccccaacttgcttgggaatggaaggctttcttgttgctgataaaaaaacaatgttcatcttatagcctacttatatttgtttcatataattatttattaaacattcagggatcaatggccatttgagaaagtgccttgtgatgctttggggctaagagaactatacatccatagacacactgaaatacatcagatgaaatttggtgaccccatatcagctctttattacttagatcctgcgggaacaacaccaagtcatgtaatgatggataggaactccatctggttttgtcaaggtccagcagccaaaaaactgaatattgatttgccagaaactgaaattgtagaaacacacaggaaccatagtgcaaggatcacttgtctgaggctatttcctctgattgatacgccactgtttcgaagtgatacacaaaaaaatgaaaaagcattagtcacttcaagcacagacagaacaatccgtctttgttggaagggctactcacgctgttacaagggccattcagcgcctgtgactgctctggctgacagattgcttatggatggtgaatctaaactacttgcaagtggaggggaagactgcaccattcgtctatggtctatgagtacgagggcgaaaaatcacccactaatagcaacatttcatgggcatgaaaaggcactgtcatttttatctgttgcgtggcataaatcgtccctgttggtgagctgttccaaagactcaaaggttaaagtttgggacacagtgtctccttcgagtggttcatcatcatgtgtaggcagtgctcacctcaactcaaacgggccaccaattgctatgaaatgccatgaatccctttgctatatcgctgctggagctgaagtgacagcgattgacttgaggacaatgaagaaggcttctgtccttgcactccagaaccacagaatactttcttgtgagatgatgccttctgaatggttaatatgtactggcacgaaagacagggctcttctatgggacatccgcaaggctcaggagctcccaaacacagtggcggagatgcaatcgagcggcccggtgacattgcttcacttggaccaatacaaggtggtgaccggagtgccgtcggacggccaggtccacgtctgggaaacacggacggggcactcgctgaacacgttgggctgtggcgaaccttcgagactgggtgtgcggagcagggtgtcggccatggccgtggacgggtgcaggatcgccatggcgggcagctctccggaaggctgcatgctgcactaccgtgacttcgcgacggcttctgcccctgtagtgtccttgccaggcaaggagaaggaggtctccaggttctggaggccccaggaattcgacgacagcgaggaagaggagtattgattaatcattacatccccagttccaaattataagtcactttgacttttttttacgtaaattttgccatgcatagtaaaattgatgtaccaaaaaaagagtcaaagctacatagtttggaactgaattagtattacgctatctcggtgagcttccagttctgctacatgcagacaagagaaaagcttgtatatataaaaagaaagaaaggtatgtcaactgggcctgggtgcgcggcgtgattgcatcatgcatcccacagctgcagcctgcaggatactacagaatgctagaggtagaagtgataccagaggttgcattaccatgggcgccgcatgtgttggtcgctataccgctgttgcttgtgttgtttgtgtcgcctttggacttggtgaggataatgccgatgctacgggcaattaatgcgcctatgctttgctgtttgttttatgcctgcagctccaaagcttcgtggaacaaccagacaaggtgatggtcacagaccttttctccattggaatcctgtggggacgagcgagcactcacggtcacggccatgggcacggggggatcctgggttctgcatggcacgtacatgacaaaataggcaagcaacaagaaggcaggaaggaccccagctgcccagcagcccaccctgcaggttttccacagctgtttggcctggctgcccagcccacaggaatgcctgatgcgatggttcctctgcctctccggccggcaggcggcagcagcttataaaacttgagaggggactcaattttcattggtttgtgtacaccggcggcggcaacagagtggagtaggacgacgacgacaacacgaaagcgaagagggagcaggctgtgccttactatataacaacatgcatgcatgggcgctttgtcatgtatgtatatagcagttgaaatctgattagaattctgggatgcaaaagttccagatgatcaataactatttttgaacgtaaggaaatttagaaggtatttgaatacagtagagataatagttagttagctaaaaatatactagtagaattagctagctaataactagttagctaactagtagctaatttactaagaataactaatagttgggtgtttggatatctctagttaattttagccactaactattatctctagtgcattcaaacaccccctagatagtggtattagg

SEQ ID NO: 33568 - DNA, 3285 bp, Zea Mays
cttgcttcgctgcgctgcgctgccgggaactgtggccaccgggcccgccgccagacccccggtgttctcctcgccggcgatgtcggcgccgcctgtgcgtacgctcgccgaccttgatggcgacgtgctggctcactgcgccggctacctcggcgcccgcgacgtcgccagcctcgccatggcctgccgccccctgcgcgccgccgcgtattgcgacgcggtctggtaccgcctcttcaggtcgtgactccaacgcttccctcttgtgtgattcagaatctgggattcatcatccgctggtacatcccgttgcgcgtttgccttcgactagggcaaaatttagggagcaatggattatcggtgattgctatttggactttggagatggggcagggttgaaccttgtgaagacttttgttactttccggggtcatatgctagttctggtggcagctgggcataggaaagtaggaaggcacaaacaaggaggggaggacaattatttgtgtttcttaattttagttatttggaccggcgtttattctagggctatccaatttgcagttcgtaaaatgtagtgggacaaatctttcaattctacgatattttggatttcagggattgtactattgcatctgtagagggtcatccttgtgaaacttgcgatttattcattgattgccagaacaagatcagtttttttttcagcactgaccaagtgaccatgcatttgagtgccctgttgcgaagtgcctatatgttagggatagggaatgacaacggcagtgctgttttccatgataaattaggatgctgaagcttcaaattagcagtgaacaatgtcaaatggattatgtaattctgtccagggattgagatgttgtttttaatgactatgcacatggtttacttttaatgctaagatacatgaaatttgatagtgacatatattaacaagaaaaccattgggggtccaatggtccatcattcgtagcaaatcaacctatctataccactttagattttatatcctcattttttgtgtctcttgttgggtctcatatgtaggctgtagcctaccccaacttgcttgggaatggaaggctttcttgttgctgataaaaaaacaatgttcatcttatagcctacttatatttgtttcatataattatttattaaacattcagggatcaatggccatttgagaaagtgccttgtgatgctttggggctaagagaactatacatccatagacacactgaaatacatcagatgaaatttggtgaccccatatcagctctttattacttagatcctgcgggaacaacaccaagtcatgtaatgatggataggaactccatctggttttgtcaagtgagttgaaatataacctttttttgtctgaacctgcacacgatgtataatttcttctttgcagggtccagcagccaaaaaactgaatattgatttgccagaaactgaaattgtagaaacacacaggaaccatagtgcaaggatcacttgtctgaggctatttcctctgattgatacgccactgtttcgaagtgatacacaaaaaaatgaaaaagcattagtcacttcaagcacagacagaacaatccgtctttgttggaagggctactcacgctgttacaagggccattcagcgcctgtgactgctctggctgacagattgcttatggatggtgaatctaaactacttgcaagtggaggggaagactgcaccattcgtctatggtctatgagtacgagggcgaaaaatcacccactaatagcaacatttcatgggcatgaaaaggcactgtcatttttatctgttgcgtggcataaatcgtccctgttggtgagctgttccaaagactcaaaggttaaagtttgggacacagtgtctccttcgagtggttcatcatcatgtgtaggcagtgctcacctcaactcaaacgggccaccaattgctatgaaatgccatgaatccctttgctatatcgctgctggagctgaagtgacagcgattgacttgaggacaatgaagaaggcttctgtccttgcactccagaaccacagaatactttcttgtgagatgatgccttctgaatggttaatatgtactggcacgaaagacagggctcttctatgggacatccgcaaggctcaggagctcccaaacacagtggcggagatgcaatcgagcggcccggtgacattgcttcacttggaccaatacaaggtggtgaccggagtgccgtcggacggccaggtccacgtctgggaaacacggacggggcactcgctgaacacgttgggctgtggcgaaccttcgagactgggtgtgcggagcagggtgtcggccatggccgtggacgggtgcaggatcgccatggcgggcagctctccggaaggctgcatgctgcactaccgtgacttcgcgacggcttctgcccctgtagtgtccttgccaggcaaggagaaggaggtctccaggttctggaggccccaggaattcgacgacagcgaggaagaggactccaaagcttcgtggaacaaccagacaaggtgatggtcacagaccttttctccattggaatcctgtggggacgagcgagcactcacggtcacggccatgggcacggggggatcctgggttctgcatggcacgtacatgacaaaataggcaagcaacaagaaggcaggaaggaccccagctgcccagcagcccaccctgcaggttttccacagctgtttggcctggctgcccagcccacaggaatgcctgatgcgatggttcctctgcctctccggccggcaggcggcagcagcttataaaacttgagaggggactcaattttcattggtttgtgtacaccggcggcggcaacagagtggagtaggacgacgacgacaacacgaaagcgaagagggagcaggctgtgccttactatataacaacatgcatgcatgggcgctttgtcatgtatgtatatagcagttgaaatctgattagaattctgggatgcaaaagttccagatgatcaataactatttttgaacgtaaggaaatttagaaggtatttgaatacagtagagataatagttagttagctaaaaatatactagtagaattagctagctaataactagttagctaactagtagctaatttactaagaataactaatagttgggtgtttggatatctctagttaattttagccactaactattatctctagtgcattcaaacaccccctagatagtggtattagg

SEQ ID NO: 33569 - DNA, 2688 bp, Zea Mays
ccgctgtatagcgtggagatataggggagagagattgctgacgtgacacgtgagtgagatatagggggataaatttaggggaaccgctgaagacagtcttatcagctccaaagcgcttgcttcgctgcgctgcgctgccgggaactgtggccaccgggcccgccgccagacccccggtgttctcctcgccggcgatgtcggcgccgcctgtgcgtacgctcgccgaccttgatggcgacgtgctggctcactgcgccggctacctcggcgcccgcgacgtcgccagcctcgccatggcctgccgccccctgcgcgccgccgcgtattgcgacgcggtctggtaccgcctcttcagggatcaatggccatttgagaaagtgccttgtgatgctttggggctaagagaactatacatccatagacacactgaaatacatcagatgaaatttggtgaccccatatcagctctttattacttagatcctgcgggaacaacaccaagtcatgtaatgatggataggaactccatctggttttgtcaaggtccagcagccaaaaaactgaatattgatttgccagaaactgaaattgtagaaacacacaggaaccatagtgcaaggatcacttgtctgaggctatttcctctgattgatacgccactgtttcgaagtgatacacaaaaaaatgaaaaagcattagtcacttcaagcacagacagaacaatccgtctttgttggaagggctactcacgctgttacaagggccattcagcgcctgtgactgctctggctgacagattgcttatggatggtgaatctaaactacttgcaagtggaggggaagactgcaccattcgtctatggtctatgagtacgagggcgaaaaatcacccactaatagcaacatttcatgggcatgaaaaggcactgtcatttttatctgttgcgtggcataaatcgtccctgttggtgagctgttccaaagactcaaaggttaaagtttgggacacagtgtctccttcgagtggttcatcatcatgtgtaggcagtgctcacctcaactcaaacgggccaccaattgctatgaaatgccatgaatccctttgctatatcgctgctggagctgaagtgacagcgattgacttgaggacaatgaagaaggcttctgtccttgcactccagaaccacagaatactttcttgtgagatgatgccttctgaatggttaatatgtactggcacgaaagacagggctcttctatgggacatccgcaaggctcaggagctcccaaacacagtggcggagatgcaatcgagcggcccggtgacattgcttcacttggaccaatacaaggtggtgaccggagtgccgtcggacggccaggtccacgtctgggaaacacggacggggcactcgctgaacacgttgggctgtggcgaaccttcgagactgggtgtgcggagcagggtgtcggccatggccgtggacgggtgcaggatcgccatggcgggcagctctccggaaggctgcatgctgcactaccgtgacttcgcgacggcttctgcccctgtagtgtccttgccaggcaaggagaaggaggtctccaggttctggaggccccaggaattcgacgacagcgaggaagaggagtattgattaatcattacatccccagttccaaattataagtcactttgacttttttttacgtaaattttgccatgcatagtaaaattgatgtaccaaaaaaagagtcaaagctacatagtttggaactgaattagtattacgctatctcggtgagcttccagttctgctacatgcagacaagagaaaagcttgtatatataaaaagaaagaaaggtatgtcaactgggcctgggtgcgcggcgtgattgcatcatgcatcccacagctgcagcctgcaggatactacagaatgctagagctccaaagcttcgtggaacaaccagacaaggtgatggtcacagaccttttctccattggaatcctgtggggacgagcgagcactcacggtcacggccatgggcacggggggatcctgggttctgcatggcacgtacatgacaaaataggcaagcaacaagaaggcaggaaggaccccagctgcccagcagcccaccctgcaggttttccacagctgtttggcctggctgcccagcccacaggaatgcctgatgcgatggttcctctgcctctccggccggcaggcggcagcagcttataaaacttgagaggggactcaattttcattggtttgtgtacaccggcggcggcaacagagtggagtaggacgacgacgacaacacgaaagcgaagagggagcaggctgtgccttactatataacaacatgcatgcatgggcgctttgtcatgtatgtatatagcagttgaaatctgattagaattctgggatgcaaaagttccagatgatcaataactatttttgaacgtaaggaaatttagaaggtatttgaatacagtagagataatagttagttagctaaaaatatactagtagaattagctagctaataactagttagctaactagtagctaatttactaagaataactaatagttgggtgtttggatatctctagttaattttagccactaactattatctctagtgcattcaaacaccccctagatagtggtattagg

SEQ ID NO: 33570 - DNA, 2389 bp, Zea Mays
ccgctgtatagcgtggagatataggggagagagattgctgacgtgacacgtgagtgagatatagggggataaatttaggggaaccgctgaagacagtcttatcagctccaaagcgcttgcttcgctgcgctgcgctgccgggaactgtggccaccgggcccgccgccagacccccggtgttctcctcgccggcgatgtcggcgccgcctgtgcgtacgctcgccgaccttgatggcgacgtgctggctcactgcgccggctacctcggcgcccgcgacgtcgccagcctcgccatggcctgccgccccctgcgcgccgccgcgtattgcgacgcggtctggtaccgcctcttcagggatcaatggccatttgagaaagtgccttgtgatgctttggggctaagagaactatacatccatagacacactgaaatacatcagatgaaatttggtgaccccatatcagctctttattacttagatcctgcgggaacaacaccaagtcatgtaatgatggataggaactccatctggttttgtcaaggtccagcagccaaaaaactgaatattgatttgccagaaactgaaattgtagaaacacacaggaaccatagtgcaaggatcacttgtctgaggctatttcctctgattgatacgccactgtttcgaagtgatacacaaaaaaatgaaaaagcattagtcacttcaagcacagacagaacaatccgtctttgttggaagggctactcacgctgttacaagggccattcagcgcctgtgactgctctggctgacagattgcttatggatggtgaatctaaactacttgcaagtggaggggaagactgcaccattcgtctatggtctatgagtacgagggcgaaaaatcacccactaatagcaacatttcatgggcatgaaaaggcactgtcatttttatctgttgcgtggcataaatcgtccctgttggtgagctgttccaaagactcaaaggttaaagtttgggacacagtgtctccttcgagtggttcatcatcatgtgtaggcagtgctcacctcaactcaaacgggccaccaattgctatgaaatgccatgaatccctttgctatatcgctgctggagctgaagtgacagcgattgacttgaggacaatgaagaaggcttctgtccttgcactccagaaccacagaatactttcttgtgagatgatgccttctgaatggttaatatgtactggcacgaaagacagggctcttctatgggacatccgcaaggctcaggagctcccaaacacagtggcggagatgcaatcgagcggcccggtgacattgcttcacttggaccaatacaaggtggtgaccggagtgccgtcggacggccaggtccacgtctgggaaacacggacggggcactcgctgaacacgttgggctgtggcgaaccttcgagactgggtgtgcggagcagggtgtcggccatggccgtggacgggtgcaggatcgccatggcgggcagctctccggaaggctgcatgctgcactaccgtgacttcgcgacggcttctgcccctgtagtgtccttgccaggcaaggagaaggaggtctccaggttctggaggccccaggaattcgacgacagcgaggaagaggactccaaagcttcgtggaacaaccagacaaggtgatggtcacagaccttttctccattggaatcctgtggggacgagcgagcactcacggtcacggccatgggcacggggggatcctgggttctgcatggcacgtacatgacaaaataggcaagcaacaagaaggcaggaaggaccccagctgcccagcagcccaccctgcaggttttccacagctgtttggcctggctgcccagcccacaggaatgcctgatgcgatggttcctctgcctctccggccggcaggcggcagcagcttataaaacttgagaggggactcaattttcattggtttgtgtacaccggcggcggcaacagagtggagtaggacgacgacgacaacacgaaagcgaagagggagcaggctgtgccttactatataacaacatgcatgcatgggcgctttgtcatgtatgtatatagcagttgaaatctgattagaattctgggatgcaaaagttccagatgatcaataactatttttgaacgtaaggaaatttagaaggtatttgaatacagtagagataatagttagttagctaaaaatatactagtagaattagctagctaataactagttagctaactagtagctaatttactaagaataactaatagttgggtgtttggatatctctagttaattttagccactaactattatctctagtgcattcaaacaccccctagatagtggtattagg

SEQ ID NO: 33571 - DNA, 3711 bp, Zea Mays
atgatccagtacttcaagattgctggctggtcggtggaagactcccaaattgagggtaaattccctagaaacagcaaccccaaggagattattgtaaaaattccaaacagcatgtttcttttctgcttgatcaacgattacaagatggctgttcaattctcaatggcttcgtcgcgaaaagtgaggaatgcaaataaacgctacaccaaaatcaacgaagattggcaggataaagatgagacaaatgtacataaaagtaaagtgcgaaagaaaaagttatctgacatgcttgggtctcaatggagcaaagatgagctcgagcgcttctatggagcctacagaaaatatggaaaagattggagaaaggttgctggtgcaatacgtgataggacatctgaaatggtggaggctctttacaacattaataaggcatatttatctcttccagagggaacagctactgctgcggggttaatagcaatgatgaccgatcactacaatattctggatggaagtaacagtgatcatgaaagcaatgattcaccaaaagcttcaaggaagccacagaagcgtggtcgtgctaggtttcaatctgtttctaagacatctgatgcacgttatgctgatctagggcaatctcagccttcttcatcaagctatggctgcctttcgttgttgacgaaaaaatgtgctggagatctgcttgtagggaacaggcctcgtgctgttggaaaaaggactccaagagtacctggtgcaagtatatactatcgagatgacaggggtgtaacagataggcgtgcaaaaacagttgctaacaatggtgatgatgaaggagctcatgtagctgcgcttgctctggcagaggtatttcaaagaggaggctcacctcaggtttctgaaacatccaaatggtgatcacatgttcctgtctcctgttaaaagtagtgacagaaaaaatgctgattcagagatgggaagctcaaagttgcatgggtttcatttggatgctgattaccccgaaggtagcttaggaagcagggaggccgagactggtgaatattgcaaaggttcatcatttttgacgaaaaatgaaggttctggtaagcctctgaagaagggaaaaaagtctcagaagaggaggaaaaaagctgcacataaaacaggtgatcagttcgaggatgacagagaggcttgtagtggaactgatgaagggcataggtcgataaagattaaagaagactcagagctggagtcattgggatggccgtctagcacgtcaaataaaagaagtcgtcaattgttttttggtgaatcttcagcccaaattaaggatgaaaacaaagatgttgattctgatgacaggcctggcatgcctgcggcagtatcagtgtatgagcagaaagttaactccaaaagcactgcaaggaaagttaaaaggcagcctgaaatttcaaattcagagatggtcactaggaaaaaagctaaagttactaaagatcctcatcacgatgggagcaccacttctgatgtaaagcagcaagcttgtacatgtggtgtcaaaacagagaaaaagaagaggaaatcatccacgacaaaggtttctgctgaagaagggaaggtgtcgtctaatatcgggacaaccacacaaggtgatacaacacaagctgacttatcatcaaagggtaaaagctgccgtaaaataggcattcagcaagcactaattgaagaatgcaaatcaaccaaggttgccaatgatactggaagtgataaattttctcactcagtgaataatgttattgatcttaaggacaaactctctcactgcttgtcctcacgtttgcttcggaggtggtgtatgtttgaatggttctatagtgcaattgattatccatggtttgcaaaaagtgaatttgtggagtacttgaatcatgtcaagctgggtcatgttccaaggctgactcgtgttgagtggggtgtcataaggagttctcttgggaagccccgccgattgtctaaacaatttttgcatgaggagagagagaagctttctcaatatcgcgattcagtcaggcaacactatgctgaacttcgatctggtgttagagaaggactacccacggatcttgcacgacctcttgcagttggacagcgtgttatagcctgtcatcctagaacaagggaacttcatgatgggaatattctgacagttgacaataatcgttgtcgggttcagtttgatcggcctgagctgggtgttgagtttgtgatggatattgattgtatgcccctccatcccatggaaaatgagtccctcaggcaaaaaaacatcgtgaataaatacttatccgaggtgaaacttgaggatcagatgaatgacttgggtagtgggggtgcagcaaggttcgcatcaaatgtgaatgtgaattgtggcgatgcagcgttccaaataccttctagccacccggtaaatagtttaacgaagcaagcaaaggccaaagctacagttaatgaggttgcaattgcagcacaacaagcaatgtacaatcagccatgcagtctctcacagatacaggaaagagaagctgatataagagctcttgctgaactatcacgtgcccttgataaaaaggaagctttattggtagagttgaggcacatgaatgaagaagtgtccagaaagcaaaaggatggtgagactgttagagttgaagcatttcaggacgcaatatgctatggtgcttgtgcagctaagagattctaatgatcaagtagcctcagctttgctttctctgcggcaacgtaacacgtatcatggaaatcaattaccgtcatatcctatttccatggaaaatggtggaaccattactggagcaccagatccatataaccgttttggttatattaatccagaatccggttcccaagtaatggaagttattgagacttcaaggtgcaaagcaaaaatgatggttgatgttgctgttcaggcgatgtgcaaagtgagggaaggagagaacgcctttgctaaaatcggtgaagcactagatgatctcgatagtcgtggcacaggctctggttcaagcatactaggaataagacggatacctcccgattcagggaaggcaaatacatcctttcaagataacggaacgcctgcccctgcagcaatcaactcttcaggtccaagattgcccaacgggtatgattctgaagctcaggttcctactgatttgatttcgtcctgcgtagccacgatacttatgattcagaactgcacggaaaagcagtatcatcctgccgaagttgcacacatccttgattcggccctgtcacgcctacaaccgtgcagctcccagaacatcccgatcttcagggagattgagatgtgcatgggcattataaagaatcaaatgttggcgttgatacccacaccaagcggctagttccttgctttcctgtgagctggccggaagaggggtaaatttcggaaagaaaccggaatactgtatgtggcgtgtattgttttttttttcccattttttactgatttgttgtgttgtacaagctgtatgtttttttactgtcgtacaagctgtatgttattgctttatacatgtataatagtaatcatgaaagttcattgttctggcaagcgcatgtacattcagcttgaaatactgaaccctttttccaaacggaaattttttc

SEQ ID NO: 33572 - DNA, 3760 bp, Zea Mays
atgatccagtacttcaagattgctggctggtcggtggaagactcccaaattgagggtaaattccctagaaacagcaaccccaaggagattattgtaaaaattccaaacagcatgtttcttttctgcttgatcaacgattacaagatggctgttcaattctcaatggcttcgtcgcgaaaagtgaggaatgcaaataaacgctacaccaaaatcaacgaagattggcaggataaagatgagacaaatgtacataaaagtaaagtgcgaaagaaaaagttatctgacatgcttgggtctcaatggagcaaagatgagctcgagcgcttctatggagcctacagaaaatatggaaaagattggagaaaggttgctggtgcaatacgtgataggacatctgaaatggtggaggctctttacaacattaataaggcatatttatctcttccagagggaacagctactgctgcggggttaatagcaatgatgaccgatcactacaatattctggatggaagtaacagtgatcatgaaagcaatgattcaccaaaagcttcaaggaagccacagaagcgtggtcgtgctaggtttcaatctgtttctaagacatctgatgcacgttatgctgatctagggcaatctcagccttcttcatcaagctatggctgcctttcgttgttgacgaaaaaatgtgctggagatctgcttgtagggaacaggcctcgtgctgttggaaaaaggactccaagagtacctggtgcaagtatatactatcgagatgacaggggtgtaacagataggcgtgcaaaaacagttgctaacaatggtgatgatgaaggagctcatgtagctgcgcttgctctggcagaggtatttcaaagaggaggctcacctcaggtttctgaaacatccaaatggtgatcacatgttcctgtctcctgttaaaagtagtgacagaaaaaatgctgattcagagatgggaagctcaaagttgcatgggtttcatttggatgctgattaccccgaaggtagcttaggaagcagggaggccgagactggtgaatattgcaaaggttcatcatttttgacgaaaaatgaaggttctggtaagcctctgaagaagggaaaaaagtctcagaagaggaggaaaaaagctgcacataaaacaggtgatcagttcgaggatgacagagaggcttgtagtggaactgatgaagggcataggtcgataaagattaaagaagactcagagctggagtcattgggatggccgtctagcacgtcaaataaaagaagtcgtcaattgttttttggtgaatcttcagcccaaattaaggatgaaaacaaagatgttgattctgatgacaggcctggcatgcctgcggcagtatcagtgtatgagcagaaagttaactccaaaagcactgcaaggaaagttaaaaggcagcctgaaatttcaaattcagagatggtcactaggaaaaaagctaaagttactaaagatcctcatcacgatgggagcaccacttctgatgtaaagcagcaagcttgtacatgtggtgtcaaaacagagaaaaagaagaggaaatcatccacgacaaaggtttctgctgaagaagggaaggtgtcgtctaatatcgaaaaaagccatgaatatcgcagggacaaccacacaaggtgatacaacacaagctgacttatcatcaaagggtaaaagctgccgtaaaataggcattcagcaagcactaattgaagaatgcaaatcaaccaaggttgccaatgatactggaagtgataaattttctcactcagtgaataatgttattgatcttaaggacaaactctctcactgcttgtcctcacgtttgcttcggaggtggtgtatgtttgaatggttctatagtgcaattgattatccatggtttgcaaaaagtgaatttgtggagtacttgaatcatgtcaagctgggtcatgttccaaggctgactcgtgttgagtggggtgtcataaggagttctcttgggaagccccgccgattgtctaaacaatttttgcatgaggagagagagaagctttctcaatatcgcgattcagtcaggcaacactatgctgaacttcgatctggtgttagagaaggactacccacggatcttgcacgacctcttgcagttggacagcgtgttatagcctgtcatcctagaacaagggaacttcatgatgggaatattctgacagttgacaataatcgttgtcgggttcagtttgatcggcctgagctgggtgttgagtttgtgatggatattgattgtatgcccctccatcccatggaaaatgagtccctcaggcaaaaaaacatcgtgaataaatacttatccgaggtgaaacttgaggatcagatgaatgacttgggtagtgggggtgcagcaaggttcgcatcaaatgtgaatgtgaattgtggcgatgcagcgttccaaataccttctagccacccggtaaatagtttaacgaagcaagcaaaggttggcacagttgattcaattgtacaggccaaagctacagttaatgaggttgcaattgcagcacaacaagcaatgtacaatcagccatgcagtctctcacagatacaggaaagagaagctgatataagagctcttgctgaactatcacgtgcccttgataaaaaggaagctttattggtagagttgaggcacatgaatgaagaagtgtccagaaagcaaaaggatggtgagactgttagagttgaagcatttcaggacgcaatatgctatggtgcttgtgcagctaagagattctaatgatcaagtagcctcagctttgctttctctgcggcaacgtaacacgtatcatggaaatcaattaccgtcatatcctatttccatggaaaatggtggaaccattactggagcaccagatccatataaccgttttggttatattaatccagaatccggttcccaagtaatggaagttattgagacttcaaggtgcaaagcaaaaatgatggttgatgttgctgttcaggcgatgtgcaaagtgagggaaggagagaacgcctttgctaaaatcggtgaagcactagatgatctcgatagtcgtggcacaggctctggttcaagcatactaggaataagacggatacctcccgattcagggaaggcaaatacatcctttcaagataacggaacgcctgcccctgcagcaatcaactcttcaggtccaagattgcccaacgggtatgattctgaagctcaggttcctactgatttgatttcgtcctgcgtagccacgatacttatgattcagaactgcacggaaaagcagtatcatcctgccgaagttgcacacatccttgattcggccctgtcacgcctacaaccgtgcagctcccagaacatcccgatcttcagggagattgagatgtgcatgggcattataaagaatcaaatgttggcgttgatacccacaccaagcggctagttccttgctttcctgtgagctggccggaagaggggtaaatttcggaaagaaaccggaatactgtatgtggcgtgtattgttttttttttcccattttttactgatttgttgtgttgtacaagctgtatgtttttttactgtcgtacaagctgtatgttattgctttatacatgtataatagtaatcatgaaagttcattgttctggcaagcgcatgtacattcagcttgaaatactgaaccctttttccaaacggaaattttttc

SEQ ID NO: 33573 - DNA, 4773 bp, Zea Mays
atgatccagtacttcaagattgctggctggtcggtggaagactcccaaattgagggtaaattccctagaaacagcaaccccaaggagattattgtaaaaattccaaacagcatgtttcttttctgcttgatcaacgattacaagatggctgttcaattctcaatggcttcgtcgcgaaaagtgaggaatgcaaataaacgctacaccaaaatcaacgaagattggcaggataaagatgagacaaatgtacataaaagtaaagtgcgaaagaaaaagttatctgacatgcttgggtctcaatggagcaaagatgagctcgagcgcttctatggagcctacagaaaatatggaaaagattggagaaaggttgctggtgcaatacgtgataggacatctgaaatggtggaggctctttacaacattaataaggcatatttatctcttccagagggaacagctactgctgcggggttaatagcaatgatgaccgatcactacaatattctggatggaagtaacagtgatcatgaaagcaatgattcaccaaaagcttcaaggaagccacagaagcgtggtcgtgctaggtttcaatctgtttctaagacatctgatgcacgttatgctgatctagggcaatctcagccttcttcatcaagctatggctgcctttcgttgttgacgaaaaaatgtgctggagatctgcttgtagggaacaggcctcgtgctgttggaaaaaggactccaagagtacctggtgcaagtatatactatcgagatgacaggggtgtaacagataggcgtgcaaaaacagttgctaacaatggtgatgatgaaggagctcatgtagctgcgcttgctctggcagaggtatttcaaagaggaggctcacctcaggtttctgaaacatccaaatggtgatcacatgttcctgtctcctgttaaaagtagtgacagaaaaaatgctgattcagagatgggaagctcaaagttgcatgggtttcatttggatgctgattaccccgaaggtagcttaggaagcagggaggccgagactggtgaatattgcaaaggttcatcatttttgacgaaaaatgaaggttctggtaagcctctgaagaagggaaaaaagtctcagaagaggaggaaaaaagctgcacataaaacaggtgatcagttcgaggatgacagagaggcttgtagtggaactgatgaagggcataggtcgataaagattaaagaagactcagagctggagtcattgggatggccgtctagcacgtcaaataaaagaagtcgtcaattgttttttggtggattgctaacaaaagaacagtagcggaggcccttgagggtatggcgtggattagtgatatcagggggaccatctcttgggcagttattttcgatctcctgatcctgtgcgaagctgtcacagaagttcatctacaggctgggaccaccgacaagcacttttggagattttccacttctggccagtattctgcgaaggcagcttatgagctgttcttccttggctccactgccttcgggcctttgaaaggatttggaaaacttgggctcctgccaaatgcaagttctttttgtggttggtcatgcataacagatgctggacagcagatcgtttggcaaaaagggatctccctcaccctgcggtctgtcctctctgtgatcagcaagcggaaacaatccaacaccttctcatttcttgtgtttttgcaagacaattctggttcacgctgctgcaaaagatgggggctgccgaacctctccccagacttggatgccaccaatctggacagttggtggaatagtgctgctgagaagctgcctggagaccttcaagccggctttaattctatcgtgatccttggcgcttggagtatctggcgtccccgcaatgactgtgtcttcaatggcatgtcacctagtgtgaccacggctatcacccttgctagtgatgagctgaggatgtggagcctcgctggtgctaaaggtctcaacctgctgtcagccctggtttttgtgttcgatccagggtgggggttttttcttgagtttttgggtttttgggtttgtgtgtgagttgtgctgtgttttgtgggttgtgttctggtgaccttgtggtcgctgggctgtttgggtgtgtgtttgtgtgtgtgtgtcgtggtgttttgtactccctttttatctttaatggaaagatacgcagctctcctgcgtgttcgagaaaaaatatgtccttgttttgcatacattggctgatctatctgtgaatatcctaccaccttcatcagtaatggaatctgaatcttcagcccaaattaaggatgaaaacaaagatgttgattctgatgacaggcctggcatgcctgcggcagtatcagtgtatgagcagaaagttaactccaaaagcactgcaaggaaagttaaaaggcagcctgaaatttcaaattcagagatggtcactaggaaaaaagctaaagttactaaagatcctcatcacgatgggagcaccacttctgatgtaaagcagcaagcttgtacatgtggtgtcaaaacagagaaaaagaagaggaaatcatccacgacaaaggtaattcccaaattattatttgttgatcatttctgtaaggaaaagtatgtttctgctgaagaagggaaggtgtcgtctaatatcgggacaaccacacaaggtgatacaacacaagctgacttatcatcaaagggtaaaagctgccgtaaaataggcattcagcaagcactaattgaagaatgcaaatcaaccaaggttgccaatgatactggaagtgataaattttctcactcagtgaataatgttattgatcttaaggacaaactctctcactgcttgtcctcacgtttgcttcggaggtggtgtatgtttgaatggttctatagtgcaattgattatccatggtttgcaaaaagtgaatttgtggagtacttgaatcatgtcaagctgggtcatgttccaaggctgactcgtgttgagtggggtgtcataaggagttctcttgggaagccccgccgattgtctaaacaatttttgcatgaggagagagagaagctttctcaatatcgcgattcagtcaggcaacactatgctgaacttcgatctggtgttagagaaggactacccacggatcttgcacgacctcttgcagttggacagcgtgttatagcctgtcatcctagaacaagggaacttcatgatgggaatattctgacagttgacaataatcgttgtcgggttcagtttgatcggcctgagctgggtgttgagtttgtgatggatattgattgtatgcccctccatcccatggaaaatgagtccctcaggcaaaaaaacatcgtgaataaatacttatccgaggtgaaacttgaggatcagatgaatgacttgggtagtgggggtgcagcaaggttcgcatcaaatgtgaatgtgaattgtggcgatgcagcgttccaaataccttctagccacccggtaaatagtttaacgaagcaagcaaaggccaaagctacagttaatgaggttgcaattgcagcacaacaagcaatgtacaatcagccatgcagtctctcacagatacaggaaagagaagctgatataagagctcttgctgaactatcacgtgcccttgataaaaaggaagctttattggtagagttgaggcacatgaatgaagaagtgtccagaaagcaaaaggatggtgagactgttagagttgaagcatttcaggacgcaatatgctatggtgcttgtgcagctaagagattctaatgatcaagtagcctcagctttgctttctctgcggcaacgtaacacgtatcatggaaatcaattaccgtcatatcctatttccatggaaaatggtggaaccattactggagcaccagatccatataaccgttttggttatattaatccagaatccggttcccaagtaatggaagttattgagacttcaaggtgcaaagcaaaaatgatggttgatgttgctgttcaggcgatgtgcaaagtgagggaaggagagaacgcctttgctaaaatcggtgaagcactagatgatctcgatagtcgtggcacaggctctggttcaagcatactaggaataagacggatacctcccgattcagggaaggcaaatacatcctttcaagataacggaacgcctgcccctgcagcaatcaactcttcaggtccaagattgcccaacgggtatgattctgaagctcaggttcctactgatttgatttcgtcctgcgtagccacgatacttatgattcagaactgcacggaaaagcagtatcatcctgccgaagttgcacacatccttgattcggccctgtcacgcctacaaccgtgcagctcccagaacatcccgatcttcagggagattgagatgtgcatgggcattataaagaatcaaatgttggcgttgatacccacaccaagcggctagttccttgctttcctgtgagctggccggaagaggggtaaatttcggaaagaaaccggaatactgtatgtggcgtgtattgttttttttttcccattttttactgatttgttgtgttgtacaagctgtatgtttttttactgtcgtacaagctgtatgttattgctttatacatgtataatagtaatcatgaaagttcattgttctggcaagcgcatgtacattcagcttgaaatactgaaccctttttccaaacggaaattttttc

SEQ ID NO: 33574 - DNA, 3795 bp, Zea Mays
atgatccagtacttcaagattgctggctggtcggtggaagactcccaaattgagggtaaattccctagaaacagcaaccccaaggagattattgtaaaaattccaaacagcatgtttcttttctgcttgatcaacgattacaagatggctgttcaattctcaatggcttcgtcgcgaaaagtgaggaatgcaaataaacgctacaccaaaatcaacgaagattggcaggataaagatgagacaaatgtacataaaagtaaagtgcgaaagaaaaagttatctgacatgcttgggtctcaatggagcaaagatgagctcgagcgcttctatggagcctacagaaaatatggaaaagattggagaaaggttgctggtgcaatacgtgataggacatctgaaatggtggaggctctttacaacattaataaggcatatttatctcttccagagggaacagctactgctgcggggttaatagcaatgatgaccgatcactacaatattctggatggaagtaacagtgatcatgaaagcaatgattcaccaaaagcttcaaggaagccacagaagcgtggtcgtgctaggtttcaatctgtttctaagacatctgatgcacgttatgctgatctagggcaatctcagccttcttcatcaagctatggctgcctttcgttgttgacgaaaaaatgtgctggagatctgcttgtagggaacaggcctcgtgctgttggaaaaaggactccaagagtacctggtgcaagtatatactatcgagatgacaggggtgtaacagataggcgtgcaaaaacagttgctaacaatggtgatgatgaaggagctcatgtagctgcgcttgctctggcagaggtatttcaaagaggaggctcacctcaggtttctgaaacatccaaatggtgatcacatgttcctgtctcctgttaaaagtagtgacagaaaaaatgctgattcagagatgggaagctcaaagttgcatgggtttcatttggatgctgattaccccgaaggtagcttaggaagcagggaggccgagactggtgaatattgcaaaggttcatcatttttgacgaaaaatgaaggttctggtaagcctctgaagaagggaaaaaagtctcagaagaggaggaaaaaagctgcacataaaacaggtgatcagttcgaggatgacagagaggcttgtagtggaactgatgaagggcataggtcgataaagattaaagaagactcagagctggagtcattgggatggccgtctagcacgtcaaataaaagaagtcgtcaattgttttttggtgtcgagaaaaaatatgtccttgttttgcatacattggctgatctatctgtgaatatcctaccaccttcatcagtaatggaatctgaatcttcagcccaaattaaggatgaaaacaaagatgttgattctgatgacaggcctggcatgcctgcggcagtatcagtgtatgagcagaaagttaactccaaaagcactgcaaggaaagttaaaaggcagcctgaaatttcaaattcagagatggtcactaggaaaaaagctaaagttactaaagatcctcatcacgatgggagcaccacttctgatgtaaagcagcaagcttgtacatgtggtgtcaaaacagagaaaaagaagaggaaatcatccacgacaaaggtttctgctgaagaagggaaggtgtcgtctaatatcgggacaaccacacaaggtgatacaacacaagctgacttatcatcaaagggtaaaagctgccgtaaaataggcattcagcaagcactaattgaagaatgcaaatcaaccaaggttgccaatgatactggaagtgataaattttctcactcagtgaataatgttattgatcttaaggacaaactctctcactgcttgtcctcacgtttgcttcggaggtggtgtatgtttgaatggttctatagtgcaattgattatccatggtttgcaaaaagtgaatttgtggagtacttgaatcatgtcaagctgggtcatgttccaaggctgactcgtgttgagtggggtgtcataaggagttctcttgggaagccccgccgattgtctaaacaatttttgcatgaggagagagagaagctttctcaatatcgcgattcagtcaggcaacactatgctgaacttcgatctggtgttagagaaggactacccacggatcttgcacgacctcttgcagttggacagcgtgttatagcctgtcatcctagaacaagggaacttcatgatgggaatattctgacagttgacaataatcgttgtcgggttcagtttgatcggcctgagctgggtgttgagtttgtgatggatattgattgtatgcccctccatcccatggaaaatgagtccctcaggcaaaaaaacatcgtgaataaatacttatccgaggtgaaacttgaggatcagatgaatgacttgggtagtgggggtgcagcaaggttcgcatcaaatgtgaatgtgaattgtggcgatgcagcgttccaaataccttctagccacccggttggcacagttgattcaattgtacaggccaaagctacagttaatgaggttgcaattgcagcacaacaagcaatgtacaatcagccatgcagtctctcacagatacaggaaagagaagctgatataagagctcttgctgaactatcacgtgcccttgataaaaaggaagctttattggtagagttgaggcacatgaatgaagaagtgtccagaaagcaaaaggatggtgagactgttagagttgaagcatttcaggacgcaatatgctatggtgcttgtgcagctaagagattctaatgatcaagtagcctcagctttgctttctctgcggcaacgtaacacgtatcatggaaatcaattaccgtcatatcctatttccatggaaaatggtggaaccattactggagcaccagatccatataaccgttttggttatattaatccagaatccggttcccaagtaatggaagttattgagacttcaaggtgcaaagcaaaaatgatggttgatgttgctgttcaggcgatgtgcaaagtgagggaaggagagaacgcctttgctaaaatcggtgaagcactagatgatctcgatagtcgtggcacaggctctggttcaagcatactaggaataagacggatacctcccgattcagggaaggcaaatacatcctttcaagataacggaacgcctgcccctgcagcaatcaactcttcaggtccaagattgcccaacgggtatgattctgaagctcaggttcctactgatttgatttcgtcctgcgtagccacgatacttatgattcagaactgcacggaaaagcagtatcatcctgccgaagttgcacacatccttgattcggccctgtcacgcctacaaccgtgcagctcccagaacatcccgatcttcagggagattgagatgtgcatgggcattataaagaatcaaatgttggcgttgatacccacaccaagcggctagttccttgctttcctgtgagctggccggaagaggggtaaatttcggaaagaaaccggaatactgtatgtggcgtgtattgttttttttttcccattttttactgatttgttgtgttgtacaagctgtatgtttttttactgtcgtacaagctgtatgttattgctttatacatgtataatagtaatcatgaaagttcattgttctggcaagcgcatgtacattcagcttgaaatactgaaccctttttccaaacggaaattttttc

SEQ ID NO: 33575 - DNA, 3705 bp, Zea Mays
atcaaggagatgagcatggtaggctgttcaattctcaatggcttcgtcgcgaaaagtgaggaatgcaaataaacgctacaccaaaatcaacgaagattggcaggataaagatgagacaaatgtacataaaagtaaagtgcgaaagaaaaagttatctgacatgcttgggtctcaatggagcaaagatgagctcgagcgcttctatggagcctacagaaaatatggaaaagattggagaaagttttttttatgcccttctagacagaaccgagacataaaaatacatttagttgctggtgcaatacgtgataggacatctgaaatggtggaggctctttacaacattaataaggcatatttatctcttccagagggaacagctactgctgcggggttaatagcaatgatgaccgatcactacaatattctggatggaagtaacagtgatcatgaaagcaatgattcaccaaaagcttcaaggaagccacagaagcgtggtcgtgctaggtttcaatctgtttctaagacatctgatgcacgttatgctgatctagggcaatctcagccttcttcatcaagctatggctgcctttcgttgttgacgaaaaaatgtgctggagatctgcttgtagggaacaggcctcgtgctgttggaaaaaggactccaagagtacctggtgcaagtatatactatcgagatgacaggggtgtaacagataggcgtgcaaaaacagttgctaacaatggtgatgatgaaggagctcatgtagctgcgcttgctctggcagaggtatttcaaagaggaggctcacctcaggtttctgaaacatccaaatggtgatcacatgttcctgtctcctgttaaaagtagtgacagaaaaaatgctgattcagagatgggaagctcaaagttgcatgggtttcatttggatgctgattaccccgaaggtagcttaggaagcagggaggccgagactggtgaatattgcaaaggttcatcatttttgacgaaaaatgaaggttctggtaagcctctgaagaagggaaaaaagtctcagaagaggaggaaaaaagctgcacataaaacaggtgatcagttcgaggatgacagagaggcttgtagtggaactgatgaagggcataggtcgataaagattaaagaagactcagagctggagtcattgggatggccgtctagcacgtcaaataaaagaagtcgtcaattgttttttggtgaatcttcagcccaaattaaggatgaaaacaaagatgttgattctgatgacaggcctggcatgcctgcggcagtatcagtgtatgagcagaaagttaactccaaaagcactgcaaggaaagttaaaaggcagcctgaaatttcaaattcagagatggtcactaggaaaaaagctaaagttactaaagatcctcatcacgatgggagcaccacttctgatgtaaagcagcaagcttgtacatgtggtgtcaaaacagagaaaaagaagaggaaatcatccacgacaaaggtaattcccaaattattatttgttgatcatttctgtaaggaaaagtatgtttctgctgaagaagggaaggtgtcgtctaatatcgggacaaccacacaaggtgatacaacacaagctgacttatcatcaaagggtaaaagctgccgtaaaataggcattcagcaagcactaattgaagaatgcaaatcaaccaaggttgccaatgatactggaagtgataaattttctcactcagtgaataatgttattgatcttaaggacaaactctctcactgcttgtcctcacgtttgcttcggaggtggtgtatgtttgaatggttctatagtgcaattgattatccatggtttgcaaaaagtgaatttgtggagtacttgaatcatgtcaagctgggtcatgttccaaggctgactcgtgttgagtggggtgtcataaggagttctcttgggaagccccgccgattgtctaaacaatttttgcatgaggagagagagaagctttctcaatatcgcgattcagtcaggcaacactatgctgaacttcgatctggtgttagagaaggactacccacggatcttgcacgacctcttgcagttggacagcgtgttatagcctgtcatcctagaacaagggaacttcatgatgggaatattctgacagttgacaataatcgttgtcgggttcagtttgatcggcctgagctgggtgttgagtttgtgatggatattgattgtatgcccctccatcccatggaaaatgagtccctcaggcaaaaaaacatcgtgaataaatacttatccgaggtgaaacttgaggatcagatgaatgacttgggtagtgggggtgcagcaaggttcgcatcaaatgtgaatgtgaattgtggcgatgcagcgttccaaataccttctagccacccggtaaatagtttaacgaagcaagcaaaggttggcacagttgattcaattgtacaggccaaagctacagttaatgaggttgcaattgcagcacaacaagcaatgtacaatcagccatgcagtctctcacagatacaggaaagagaagctgatataagagctcttgctgaactatcacgtgcccttgataaaaagctttattggtagagttgaggcacatgaatgaagaagtgtccagaaagcaaaaggatggtgagactgttagagttgaagcatttcaggacgcaatatgctatggtgcttgtgcagctaagagattctaatgatcaagtagcctcagctttgctttctctgcggcaacgtaacacgtatcatggaaatcaattaccgtcatatcctatttccatggaaaatggtggaaccattactggagcaccagatccatataaccgttttggttatattaatccagaatccggttcccaagtaatggaagttattgagacttcaaggtgcaaagcaaaaatgatggttgatgttgctgttcaggcgatgtgcaaagtgagggaaggagagaacgcctttgctaaaatcggtgaagcactagatgatctcgatagtcgtggcacaggctctggttcaagcatactaggaataagacggatacctcccgattcagggaaggcaaatacatcctttcaagataacggaacgcctgcccctgcagcaatcaactcttcaggtccaagattgcccaacgggtatgattctgaagctcaggttcctactgatttgatttcgtcctgcgtagccacgatacttatgattcagaactgcacggaaaagcagtatcatcctgccgaagttgcacacatccttgattcggccctgtcacgcctacaaccgtgcagctcccagaacatcccgatcttcagggagattgagatgtgcatgggcattataaagaatcaaatgttggcgttgatacccacaccaagcggctagttccttgctttcctgtgagctggccggaagaggggtaaatttcggaaagaaaccggaatactgtatgtggcgtgtattgttttttttttcccattttttactgatttgttgtgttgtacaagctgtatgtttttttactgtcgtacaagctgtatgttattgctttatacatgtataatagtaatcatgaaagttcattgttctggcaagcgcatgtacattcagcttgaaatactgaaccctttttccaaacggaaattttttc

SEQ ID NO: 33576 - DNA, 3683 bp, Zea Mays
gagatggatcaaggagatgagcatggtaggctgttcaattctcaatggcttcgtcgcgaaaagtgaggaatgcaaataaacgctacaccaaaatcaacgaagattggcaggataaagatgagacaaatgtacataaaagtaaagtgcgaaagaaaaagttatctgacatgcttgggtctcaatggagcaaagatgagctcgagcgcttctatggagcctacagaaaatatggaaaagattggagaaaggttgctggtgcaatacgtgataggacatctgaaatggtggaggctctttacaacattaataaggcatatttatctcttccagagggaacagctactgctgcggggttaatagcaatgatgaccgatcactacaatattctggatggaagtaacagtgatcatgaaagcaatgattcaccaaaagcttcaaggaagccacagaagcgtggtcgtgctaggtttcaatctgtttctaagacatctgatgcacgttatgctgatctagggcaatctcagccttcttcatcaagctatggctgcctttcgttgttgacgaaaaaatgtgctggagatctgcttgtagggaacaggcctcgtgctgttggaaaaaggactccaagagtacctggtgcaagtatatactatcgagatgacaggggtgtaacagataggcgtgcaaaaacagttgctaacaatggtgatgatgaaggagctcatgtagctgcgcttgctctggcagaggtatttcaaagaggaggctcacctcaggtttctgaaacatccaaatggtgatcacatgttcctgtctcctgttaaaagtagtgacagaaaaaatgctgattcagagatgggaagctcaaagttgcatgggtttcatttggatgctgattaccccgaaggtagcttaggaagcagggaggccgagactggtgaatattgcaaaggttcatcatttttgacgaaaaatgaaggttctggtaagcctctgaagaagggaaaaaagtctcagaagaggaggaaaaaagctgcacataaaacaggtgatcagttcgaggatgacagagaggcttgtagtggaactgatgaagggcataggtcgataaagattaaagaagactcagagctggagtcattgggatggccgtctagcacgtcaaataaaagaagtcgtcaattgttttttggtgaatcttcagcccaaattaaggatgaaaacaaagatgttgattctgatgacaggcctggcatgcctgcggcagtatcagtgtatgagcagaaagttaactccaaaagcactgcaaggaaagttaaaaggcagcctgaaatttcaaattcagagatggtcactaggaaaaaagctaaagttactaaagatcctcatcacgatgggagcaccacttctgatgtaaagcagcaagcttgtacatgtggtgtcaaaacagagaaaaagaagaggaaatcatccacgacaaaggtttctgctgaagaagggaaggtgtcgtctaatatcgccatgaatatcgcagggacaaccacacaaggtgatacaacacaagctgacttatcatcaaagggtaaaagctgccgtaaaataggcattcagcaagcactaattgaagaatgcaaatcaaccaaggttgccaatgatactggaagtgataaattttctcactcagtgaataatgttattgatcttaaggacaaactctctcactgcttgtcctcacgtttgcttcggaggtggtgtatgtttgaatggttctatagtgcaattgattatccatggtttgcaaaaagtgaatttgtggagtacttgaatcatgtcaagctgggtcatgttccaaggctgactcgtgttgagtggggtgtcataaggagttctcttgggaagccccgccgattgtctaaacaatttttgcatgaggagagagagaagctttctcaatatcgcgattcagtcaggcaacactatgctgaacttcgatctggtgttagagaaggactacccacggatcttgcacgacctcttgcagttggacagcgtgttatagcctgtcatcctagaacaagggaacttcatgatgggaatattctgacagttgacaataatcgttgtcgggttcagtttgatcggcctgagctgggtgttgagtttgtgatggatattgattgtatgcccctccatcccatggaaaatgagtccctcaggcaaaaaaacatcgtgaataaatacttatccgaggtgaaacttgaggatcagatgaatgacttgggtagtgggggtgcagcaaggttcgcatcaaatgtgaatgtgaattgtggcgatgcagcgttccaaataccttctagccacccggtaaatagtttaacgaagcaagcaaaggccaaagctacagttaatgaggttgcaattgcagcacaacaagcaatgtacaatcagccatgcagtctctcacagatacaggaaagagaagctgatataagagctcttgctgaactatcacgtgcccttgataaaaaggaagctttattggtagagttgaggcacatgaatgaagaagtgtccagaaagcaaaaggatggtgagactgttagagttgaagcatttcaggacgcaatatgctatggtgcttgtgcagctaagagattctaatgatcaagtagcctcagctttgctttctctgcggcaacgtaacacgtatcatggaaatcaattaccgtcatatcctatttccatggaaaatggtggaaccattactggagcaccagatccatataaccgttttggttatattaatccagaatccggttcccaagtaatggaagttattgagacttcaaggtgcaaagcaaaaatgatggttgatgttgctgttcaggattcctcatggatctcatcaactcatgtttatattctgtattttgcgaagaaagttcttccaattgaacaaacagcgatgtgcaaagtgagggaaggagagaacgcctttgctaaaatcggtgaagcactagatgatctcgatagtcgtggcacaggctctggttcaagcatactaggaataagacggatacctcccgattcagggaaggcaaatacatcctttcaagataacggaacgcctgcccctgcagcaatcaactcttcaggtccaagattgcccaacgggtatgattctgaagctcaggttcctactgatttgatttcgtcctgcgtagccacgatacttatgattcagaactgcacggaaaagcagtatcatcctgccgaagttgcacacatccttgattcggccctgtcacgcctacaaccgtgcagctcccagaacatcccgatcttcagggagattgagatgtgcatgggcattataaagaatcaaatgttggcgttgatacccacaccaagcggctagttccttgctttcctgtgagctggccggaagaggggtaaatttcggaaagaaaccggaatactgtatgtggcgtgtattgttttttttttcccattttttactgatttgttgtgttgtacaagctgtatgtttttttactgtcgtacaagctgtatgttattgctttatacatgtataatagtaatcatgaaagttcattgttctggcaagcgcatgtacattcagcttgaaatactgaaccctttttccaaacggaaattttttc

SEQ ID NO: 33577 - DNA, 3735 bp, Zea Mays
ggggaagccaatgggagatggatcaaggagatgagcatggctgttcaattctcaatggcttcgtcgcgaaaagtgaggaatgcaaataaacgctacaccaaaatcaacgaagattggcaggataaagatgagacaaatgtacataaaagtaaagtgcgaaagaaaaagttatctgacatgcttgggtctcaatggagcaaagatgagctcgagcgcttctatggagcctacagaaaatatggaaaagattggagaaaggttgctggtgcaatacgtgataggacatctgaaatggtggaggctctttacaacattaataaggcatatttatctcttccagagggaacagctactgctgcggggttaatagcaatgatgaccgatcactacaatattctggatggaagtaacagtgatcatgaaagcaatgattcaccaaaagcttcaaggaagccacagaagcgtggtcgtgctaggtttcaatctgtttctaagacatctgatgcacgttatgctgatctagggcaatctcagccttcttcatcaagctatggctgcctttcgttgttgacgaaaaaatgtgctggagatctgcttgtagggaacaggcctcgtgctgttggaaaaaggactccaagagtacctggtgcaagtatatactatcgagatgacaggggtgtaacagataggcgtgcaaaaacagttgctaacaatggtgatgatgaaggagctcatgtagctgcgcttgctctggcagaggtatttcaaagaggaggctcacctcaggtttctgaaacatccaaatggtgatcacatgttcctgtctcctgttaaaagtagtgacagaaaaaatgctgattcagagatgggaagctcaaagttgcatgggtttcatttggatgctgattaccccgaaggtagcttaggaagcagggaggccgagactggtgaatattgcaaaggttcatcatttttgacgaaaaatgaaggttctggtaagcctctgaagaagggaaaaaagtctcagaagaggaggaaaaaagctgcacataaaacaggtgatcagttcgaggatgacagagaggcttgtagtggaactgatgaagggcataggtcgataaagattaaagaagactcagagctggagtcattgggatggccgtctagcacgtcaaataaaagaagtcgtcaattgttttttggtgtcgagaaaaaatatgtccttgttttgcatacattggctgatctatctgtgaatatcctaccaccttcatcagtaatggaatctgaatcttcagcccaaattaaggatgaaaacaaagatgttgattctgatgacaggcctggcatgcctgcggcagtatcagtgtatgagcagaaagttaactccaaaagcactgcaaggaaagttaaaaggcagcctgaaatttcaaattcagagatggtcactaggaaaaaagctaaagttactaaagatcctcatcacgatgggagcaccacttctgatgtaaagcagcaagcttgtacatgtggtgtcaaaacagagaaaaagaagaggaaatcatccacgacaaaggtaattcccaaattattatttgttgatcatttctgtaaggaaaagtatgtttctgctgaagaagggaaggtgtcgtctaatatcgggacaaccacacaaggtgatacaacacaagctgacttatcatcaaagggtaaaagctgccgtaaaataggcattcagcaagcactaattgaagaatgcaaatcaaccaaggttgccaatgatactggaagtgataaattttctcactcagtgaataatgttattgatcttaaggacaaactctctcactgcttgtcctcacgtttgcttcggaggtggtgtatgtttgaatggttctatagtgcaattgattatccatggtttgcaaaaagtgaatttgtggagtacttgaatcatgtcaagctgggtcatgttccaaggctgactcgtgttgagtggggtgtcataaggagttctcttgggaagccccgccgattgtctaaacaatttttgcatgaggagagagagaagctttctcaatatcgcgattcagtcaggcaacactatgctgaacttcgatctggtgttagagaaggactacccacggatcttgcacgacctcttgcagttggacagcgtgttatagcctgtcatcctagaacaagggaacttcatgatgggaatattctgacagttgacaataatcgttgtcgggttcagtttgatcggcctgagctgggtgttgagtttgtgatggatattgattgtatgcccctccatcccatggaaaatgagtccctcaggcaaaaaaacatcgtgaataaatacttatccgaggtgaaacttgaggatcagatgaatgacttgggtagtgggggtgcagcaaggttcgcatcaaatgtgaatgtgaattgtggcgatgcagcgttccaaataccttctagccacccggttggcacagttgattcaattgtacaggccaaagctacagttaatgaggttgcaattgcagcacaacaagcaatgtacaatcagccatgcagtctctcacagatacaggaaagagaagctgatataagagctcttgctgaactatcacgtgcccttgataaaaaggaagctttattggtagagttgaggcacatgaatgaagaagtgtccagaaagcaaaaggatggtgagactgttagagttgaagcatttcaggacgcaatatgctatggtgcttgtgcagctaagagattctaatgatcaagtagcctcagctttgctttctctgcggcaacgtaacacgtatcatggaaatcaattaccgtcatatcctatttccatggaaaatggtggaaccattactggagcaccagatccatataaccgttttggttatattaatccagaatccggttcccaagtaatggaagttattgagacttcaaggtgcaaagcaaaaatgatggttgatgttgctgttcaggcgatgtgcaaagtgagggaaggagagaacgcctttgctaaaatcggtgaagcactagatgatctcgatagtcgtggcacaggctctggttcaagcatactaggaataagacggatacctcccgattcagggaaggcaaatacatcctttcaagataacggaacgcctgcccctgcagcaatcaactcttcaggtccaagattgcccaacgggtatgattctgaagctcaggttcctactgatttgatttcgtcctgcgtagccacgatacttatgattcagaactgcacggaaaagcagtatcatcctgccgaagttgcacacatccttgattcggccctgtcacgcctacaaccgtgcagctcccagaacatcccgatcttcagggagattgagatgtgcatgggcattataaagaatcaaatgttggcgttgatacccacaccaagcggctagttccttgctttcctgtgagctggccggaagaggggtaaatttcggaaagaaaccggaatactgtatgtggcgtgtattgttttttttttcccattttttactgatttgttgtgttgtacaagctgtatgtttttttactgtcgtacaagctgtatgttattgctttatacatgtataatagtaatcatgaaagttcattgttctggcaagcgcatgtacattcagcttgaaatactgaaccctttttccaaacggaaattttttc

SEQ ID NO: 33578 - DNA, 3736 bp, Zea Mays
gatgagggggaagccaatgggagatggatcaaggagatgagcatggtaggctgttcaattctcaatggcttcgtcgcgaaaagtgaggaatgcaaataaacgctacaccaaaatcaacgaagattggcaggataaagatgagacaaatgtacataaaagtaaagtgcgaaagaaaaagttatctgacatgcttgggtctcaatggagcaaagatgagctcgagcgcttctatggagcctacagaaaatatggaaaagattggagaaagttttttttatgcccttctagacagaaccgagacataaaaatacatttagttgctggtgcaatacgtgataggacatctgaaatggtggaggctctttacaacattaataaggcatatttatctcttccagagggaacagctactgctgcggggttaatagcaatgatgaccgatcactacaatattctggatggaagtaacagtgatcatgaaagcaatgattcaccaaaagcttcaaggaagccacagaagcgtggtcgtgctaggtttcaatctgtttctaagacatctgatgcacgttatgctgatctagggcaatctcagccttcttcatcaagctatggctgcctttcgttgttgacgaaaaaatgtgctggagatctgcttgtagggaacaggcctcgtgctgttggaaaaaggactccaagagtacctggtgcaagtatatactatcgagatgacaggggtgtaacagataggcgtgcaaaaacagttgctaacaatggtgatgatgaaggagctcatgtagctgcgcttgctctggcagaggtatttcaaagaggaggctcacctcaggtttctgaaacatccaaatggtgatcacatgttcctgtctcctgttaaaagtagtgacagaaaaaatgctgattcagagatgggaagctcaaagttgcatgggtttcatttggatgctgattaccccgaaggtagcttaggaagcagggaggccgagactggtgaatattgcaaaggttcatcatttttgacgaaaaatgaaggttctggtaagcctctgaagaagggaaaaaagtctcagaagaggaggaaaaaagctgcacataaaacaggtgatcagttcgaggatgacagagaggcttgtagtggaactgatgaagggcataggtcgataaagattaaagaagactcagagctggagtcattgggatggccgtctagcacgtcaaataaaagaagtcgtcaattgttttttggtgaatcttcagcccaaattaaggatgaaaacaaagatgttgattctgatgacaggcctggcatgcctgcggcagtatcagtgtatgagcagaaagttaactccaaaagcactgcaaggaaagttaaaaggcagcctgaaatttcaaattcagagatggtcactaggaaaaaagctaaagttactaaagatcctcatcacgatgggagcaccacttctgatgtaaagcagcaagcttgtacatgtggtgtcaaaacagagaaaaagaagaggaaatcatccacgacaaaggtttctgctgaagaagggaaggtgtcgtctaatatcgggacaaccacacaaggtgatacaacacaagctgacttatcatcaaagggtaaaagctgccgtaaaataggcattcagcaagcactaattgaagaatgcaaatcaaccaaggttgccaatgatactggaagtgataaattttctcactcagtgaataatgttattgatcttaaggacaaactctctcactgcttgtcctcacgtttgcttcggaggtggtgtatgtttgaatggttctatagtgcaattgattatccatggtttgcaaaaagtgaatttgtggagtacttgaatcatgtcaagctgggtcatgttccaaggctgactcgtgttgagtggggtgtcataaggagttctcttgggaagccccgccgattgtctaaacaatttttgcatgaggagagagagaagctttctcaatatcgcgattcagtcaggcaacactatgctgaacttcgatctggtgttagagaaggactacccacggatcttgcacgacctcttgcagttggacagcgtgttatagcctgtcatcctagaacaagggaacttcatgatgggaatattctgacagttgacaataatcgttgtcgggttcagtttgatcggcctgagctgggtgttgagtttgtgatggatattgattgtatgcccctccatcccatggaaaatgagtccctcaggcaaaaaaacatcgtgaataaatacttatccgaggtgaaacttgaggatcagatgaatgacttgggtagtgggggtgcagcaaggttcgcatcaaatgtgaatgtgaattgtggcgatgcagcgttccaaataccttctagccacccggtaaatagtttaacgaagcaagcaaaggccaaagctacagttaatgaggttgcaattgcagcacaacaagcaatgtacaatcagccatgcagtctctcacagatacaggaaagagaagctgatataagagctcttgctgaactatcacgtgcccttgataaaaaggaagctttattggtagagttgaggcacatgaatgaagaagtgtccagaaagcaaaaggatggtgagactgttagagttgaagcatttcaggacgcaatatgctatggtgcttgtgcagctaagagattctaatgatcaagtagcctcagctttgctttctctgcggcaacgtaacacgtatcatggaaatcaattaccgtcatatcctatttccatggaaaatggtggaaccattactggagcaccagatccatataaccgttttggttatattaatccagaatccggttcccaagtaatggaagttattgagacttcaaggtgcaaagcaaaaatgatggttgatgttgctgttcaggattcctcatggatctcatcaactcatgtttatattctgtattttgcgaagaaagttcttccaattgaacaaacagcgatgtgcaaagtgagggaaggagagaacgcctttgctaaaatcggtgaagcactagatgatctcgatagtcgtggcacaggctctggttcaagcatactaggaataagacggatacctcccgattcagggaaggcaaatacatcctttcaagataacggaacgcctgcccctgcagcaatcaactcttcaggtccaagattgcccaacgggtatgattctgaagctcaggttcctactgatttgatttcgtcctgcgtagccacgatacttatgattcagaactgcacggaaaagcagtatcatcctgccgaagttgcacacatccttgattcggccctgtcacgcctacaaccgtgcagctcccagaacatcccgatcttcagggagattgagatgtgcatgggcattataaagaatcaaatgttggcgttgatacccacaccaagcggctagttccttgctttcctgtgagctggccggaagaggggtaaatttcggaaagaaaccggaatactgtatgtggcgtgtattgttttttttttcccattttttactgatttgttgtgttgtacaagctgtatgtttttttactgtcgtacaagctgtatgttattgctttatacatgtataatagtaatcatgaaagttcattgttctggcaagcgcatgtacattcagcttgaaatactgaaccctttttccaaacggaaattttttc

SEQ ID NO: 33579 - DNA, 4751 bp, Zea Mays
ggatgagggggaagccaatgggagatggatcaaggagatgagcatggtaggctgttcaattctcaatggcttcgtcgcgaaaagtgaggaatgcaaataaacgctacaccaaaatcaacgaagattggcaggataaagatgagacaaatgtacataaaagtaaagtgcgaaagaaaaagttatctgacatgcttgggtctcaatggagcaaagatgagctcgagcgcttctatggagcctacagaaaatatggaaaagattggagaaagttttttttatgcccttctagacagaaccgagacataaaaatacatttagttgctggtgcaatacgtgataggacatctgaaatggtggaggctctttacaacattaataaggcatatttatctcttccagagggaacagctactgctgcggggttaatagcaatgatgaccgatcactacaatattctggatggaagtaacagtgatcatgaaagcaatgattcaccaaaagcttcaaggaagccacagaagcgtggtcgtgctaggtttcaatctgtttctaagacatctgatgcacgttatgctgatctagggcaatctcagccttcttcatcaagctatggctgcctttcgttgttgacgaaaaaatgtgctggagatctgcttgtagggaacaggcctcgtgctgttggaaaaaggactccaagagtacctggtgcaagtatatactatcgagatgacaggggtgtaacagataggcgtgcaaaaacagttgctaacaatggtgatgatgaaggagctcatgtagctgcgcttgctctggcagaggtatttcaaagaggaggctcacctcaggtttctgaaacatccaaatggtgatcacatgttcctgtctcctgttaaaagtagtgacagaaaaaatgctgattcagagatgggaagctcaaagttgcatgggtttcatttggatgctgattaccccgaaggtagcttaggaagcagggaggccgagactggtgaatattgcaaaggttcatcatttttgacgaaaaatgaaggttctggtaagcctctgaagaagggaaaaaagtctcagaagaggaggaaaaaagctgcacataaaacaggtgatcagttcgaggatgacagagaggcttgtagtggaactgatgaagggcataggtcgataaagattaaagaagactcagagctggagtcattgggatggccgtctagcacgtcaaataaaagaagtcgtcaattgttttttggtggattgctaacaaaagaacagtagcggaggcccttgagggtatggcgtggattagtgatatcagggggaccatctcttgggcagttattttcgatctcctgatcctgtgcgaagctgtcacagaagttcatctacaggctgggaccaccgacaagcacttttggagattttccacttctggccagtattctgcgaaggcagcttatgagctgttcttccttggctccactgccttcgggcctttgaaaggatttggaaaacttgggctcctgccaaatgcaagttctttttgtggttggtcatgcataacagatgctggacagcagatcgtttggcaaaaagggatctccctcaccctgcggtctgtcctctctgtgatcagcaagcggaaacaatccaacaccttctcatttcttgtgtttttgcaagacaattctggttcacgctgctgcaaaagatgggggctgccgaacctctccccagacttggatgccaccaatctggacagttggtggaatagtgctgctgagaagctgcctggagaccttcaagccggctttaattctatcgtgatccttggcgcttggagtatctggcgtccccgcaatgactgtgtcttcaatggcatgtcacctagtgtgaccacggctatcacccttgctagtgatgagctgaggatgtggagcctcgctggtgctaaaggtctcaacctgctgtcagccctggtttttgtgttcgatccagggtgggggttttttcttgagtttttgggtttttgggtttgtgtgtgagttgtgctgtgttttgtgggttgtgttctggtgaccttgtggtcgctgggctgtttgggtgtgtgtttgtgtgtgtgtgtcgtggtgttttgtactccctttttatctttaatggaaagatacgcagctctcctgcgtgttcgagaaaaaatatgtccttgttttgcatacattggctgatctatctgtgaatatcctaccaccttcatcagtaatggaatctgaatcttcagcccaaattaaggatgaaaacaaagatgttgattctgatgacaggcctggcatgcctgcggcagtatcagtgtatgagcagaaagttaactccaaaagcactgcaaggaaagttaaaaggcagcctgaaatttcaaattcagagatggtcactaggaaaaaagctaaagttactaaagatcctcatcacgatgggagcaccacttctgatgtaaagcagcaagcttgtacatgtggtgtcaaaacagagaaaaagaagaggaaatcatccacgacaaaggtttctgctgaagaagggaaggtgtcgtctaatatcgggacaaccacacaaggtgatacaacacaagctgacttatcatcaaagggtaaaagctgccgtaaaataggcattcagcaagcactaattgaagaatgcaaatcaaccaaggttgccaatgatactggaagtgataaattttctcactcagtgaataatgttattgatcttaaggacaaactctctcactgcttgtcctcacgtttgcttcggaggtggtgtatgtttgaatggttctatagtgcaattgattatccatggtttgcaaaaagtgaatttgtggagtacttgaatcatgtcaagctgggtcatgttccaaggctgactcgtgttgagtggggtgtcataaggagttctcttgggaagccccgccgattgtctaaacaatttttgcatgaggagagagagaagctttctcaatatcgcgattcagtcaggcaacactatgctgaacttcgatctggtgttagagaaggactacccacggatcttgcacgacctcttgcagttggacagcgtgttatagcctgtcatcctagaacaagggaacttcatgatgggaatattctgacagttgacaataatcgttgtcgggttcagtttgatcggcctgagctgggtgttgagtttgtgatggatattgattgtatgcccctccatcccatggaaaatgagtccctcaggcaaaaaaacatcgtgaataaatacttatccgaggtgaaacttgaggatcagatgaatgacttgggtagtgggggtgcagcaaggttcgcatcaaatgtgaatgtgaattgtggcgatgcagcgttccaaataccttctagccacccggtaaatagtttaacgaagcaagcaaaggccaaagctacagttaatgaggttgcaattgcagcacaacaagcaatgtacaatcagccatgcagtctctcacagatacaggaaagagaagctgatataagagctcttgctgaactatcacgtgcccttgataaaaaggaagctttattggtagagttgaggcacatgaatgaagaagtgtccagaaagcaaaaggatggtgagactgttagagttgaagcatttcaggacgcaatatgctatggtgcttgtgcagctaagagattctaatgatcaagtagcctcagctttgctttctctgcggcaacgtaacacgtatcatggaaatcaattaccgtcatatcctatttccatggaaaatggtggaaccattactggagcaccagatccatataaccgttttggttatattaatccagaatccggttcccaagtaatggaagttattgagacttcaaggtgcaaagcaaaaatgatggttgatgttgctgttcaggattcctcatggatctcatcaactcatgtttatattctgtattttgcgaagaaagttcttccaattgaacaaacagcgatgtgcaaagtgagggaaggagagaacgcctttgctaaaatcggtgaagcactagatgatctcgatagtcgtggcacaggctctggttcaagcatactaggaataagacggatacctcccgattcagggaaggcaaatacatcctttcaagataacggaacgcctgcccctgcagcaatcaactcttcaggtccaagattgcccaacgggtatgattctgaagctcaggttcctactgatttgatttcgtcctgcgtagccacgatacttatgattcagaactgcacggaaaagcagtatcatcctgccgaagttgcacacatccttgattcggccctgtcacgcctacaaccgtgcagctcccagaacatcccgatcttcagggagattgagatgtgcatgggcattataaagaatcaaatgttggcgttgatacccacaccaagcggctagttccttgctttcctgtgagctggccggaagaggggtaaatttcggaaagaaaccggaatactgtatgtggcgtgtattgttttttttttcccattttttactgatttgttgtgttgtacaagctgtatgtttttttactgtcgtacaagctgtatgttattgctttatacatgtataatagtaatcatgaaagttcattgttctggcaagcgcatgtacattcagcttgaaatactgaaccctttttccaaacggaaattttttc

SEQ ID NO: 33580 - DNA, 4751 bp, Zea Mays
ggatgagggggaagccaatgggagatggatcaaggagatgagcatggtaggctgttcaattctcaatggcttcgtcgcgaaaagtgaggaatgcaaataaacgctacaccaaaatcaacgaagattggcaggataaagatgagacaaatgtacataaaagtaaagtgcgaaagaaaaagttatctgacatgcttgggtctcaatggagcaaagatgagctcgagcgcttctatggagcctacagaaaatatggaaaagattggagaaagttttttttatgcccttctagacagaaccgagacataaaaatacatttagttgctggtgcaatacgtgataggacatctgaaatggtggaggctctttacaacattaataaggcatatttatctcttccagagggaacagctactgctgcggggttaatagcaatgatgaccgatcactacaatattctggatggaagtaacagtgatcatgaaagcaatgattcaccaaaagcttcaaggaagccacagaagcgtggtcgtgctaggtttcaatctgtttctaagacatctgatgcacgttatgctgatctagggcaatctcagccttcttcatcaagctatggctgcctttcgttgttgacgaaaaaatgtgctggagatctgcttgtagggaacaggcctcgtgctgttggaaaaaggactccaagagtacctggtgcaagtatatactatcgagatgacaggggtgtaacagataggcgtgcaaaaacagttgctaacaatggtgatgatgaaggagctcatgtagctgcgcttgctctggcagaggtatttcaaagaggaggctcacctcaggtttctgaaacatccaaatggtgatcacatgttcctgtctcctgttaaaagtagtgacagaaaaaatgctgattcagagatgggaagctcaaagttgcatgggtttcatttggatgctgattaccccgaaggtagcttaggaagcagggaggccgagactggtgaatattgcaaaggttcatcatttttgacgaaaaatgaaggttctggtaagcctctgaagaagggaaaaaagtctcagaagaggaggaaaaaagctgcacataaaacaggtgatcagttcgaggatgacagagaggcttgtagtggaactgatgaagggcataggtcgataaagattaaagaagactcagagctggagtcattgggatggccgtctagcacgtcaaataaaagaagtcgtcaattgttttttggtggattgctaacaaaagaacagtagcggaggcccttgagggtatggcgtggattagtgatatcagggggaccatctcttgggcagttattttcgatctcctgatcctgtgcgaagctgtcacagaagttcatctacaggctgggaccaccgacaagcacttttggagattttccacttctggccagtattctgcgaaggcagcttatgagctgttcttccttggctccactgccttcgggcctttgaaaggatttggaaaacttgggctcctgccaaatgcaagttctttttgtggttggtcatgcataacagatgctggacagcagatcgtttggcaaaaagggatctccctcaccctgcggtctgtcctctctgtgatcagcaagcggaaacaatccaacaccttctcatttcttgtgtttttgcaagacaattctggttcacgctgctgcaaaagatgggggctgccgaacctctccccagacttggatgccaccaatctggacagttggtggaatagtgctgctgagaagctgcctggagaccttcaagccggctttaattctatcgtgatccttggcgcttggagtatctggcgtccccgcaatgactgtgtcttcaatggcatgtcacctagtgtgaccacggctatcacccttgctagtgatgagctgaggatgtggagcctcgctggtgctaaaggtctcaacctgctgtcagccctggtttttgtgttcgatccagggtgggggttttttcttgagtttttgggtttttgggtttgtgtgtgagttgtgctgtgttttgtgggttgtgttctggtgaccttgtggtcgctgggctgtttgggtgtgtgtttgtgtgtgtgtgtcgtggtgttttgtactccctttttatctttaatggaaagatacgcagctctcctgcgtgttcgagaaaaaatatgtccttgttttgcatacattggctgatctatctgtgaatatcctaccaccttcatcagtaatggaatctgaatcttcagcccaaattaaggatgaaaacaaagatgttgattctgatgacaggcctggcatgcctgcggcagtatcagtgtatgagcagaaagttaactccaaaagcactgcaaggaaagttaaaaggcagcctgaaatttcaaattcagagatggtcactaggaaaaaagctaaagttactaaagatcctcatcacgatgggagcaccacttctgatgtaaagcagcaagcttgtacatgtggtgtcaaaacagagaaaaagaagaggaaatcatccacgacaaaggtaattcccaaattattatttgttgatcatttctgtaaggaaaagtatgtttctgctgaagaagggaaggtgtcgtctaatatcgggacaaccacacaaggtgatacaacacaagctgacttatcatcaaagggtaaaagctgccgtaaaataggcattcagcaagcactaattgaagaatgcaaatcaaccaaggttgccaatgatactggaagtgataaattttctcactcagtgaataatgttattgatcttaaggacaaactctctcactgcttgtcctcacgtttgcttcggaggtggtgtatgtttgaatggttctatagtgcaattgattatccatggtttgcaaaaagtgaatttgtggagtacttgaatcatgtcaagctgggtcatgttccaaggctgactcgtgttgagtggggtgtcataaggagttctcttgggaagccccgccgattgtctaaacaatttttgcatgaggagagagagaagctttctcaatatcgcgattcagtcaggcaacactatgctgaacttcgatctggtgttagagaaggactacccacggatcttgcacgacctcttgcagttggacagcgtgttatagcctgtcatcctagaacaagggaacttcatgatgggaatattctgacagttgacaataatcgttgtcgggttcagtttgatcggcctgagctgggtgttgagtttgtgatggatattgattgtatgcccctccatcccatggaaaatgagtccctcaggcaaaaaaacatcgtgaataaatacttatccgaggtgaaacttgaggatcagatgaatgacttgggtagtgggggtgcagcaaggttcgcatcaaatgtgaatgtgaattgtggcgatgcagcgttccaaataccttctagccacccggtaaatagtttaacgaagcaagcaaaggttggcacagttgattcaattgtacaggccaaagctacagttaatgaggttgcaattgcagcacaacaagcaatgtacaatcagccatgcagtctctcacagatacaggaaagagaagctgatataagagctcttgctgaactatcacgtgcccttgataaaaaggaagctttattggtagagttgaggcacatgaatgaagaagtgtccagaaagcaaaaggatggtgagactgttagagttgaagcatttcaggacgcaatatgctatggtgcttgtgcagctaagagattctaatgatcaagtagcctcagctttgctttctctgcggcaacgtaacacgtatcatggaaatcaattaccgtcatatcctatttccatggaaaatggtggaaccattactggagcaccagatccatataaccgttttggttatattaatccagaatccggttcccaagtaatggaagttattgagacttcaaggtgcaaagcaaaaatgatggttgatgttgctgttcaggcgatgtgcaaagtgagggaaggagagaacgcctttgctaaaatcggtgaagcactagatgatctcgatagtcgtggcacaggctctggttcaagcatactaggaataagacggatacctcccgattcagggaaggcaaatacatcctttcaagataacggaacgcctgcccctgcagcaatcaactcttcaggtccaagattgcccaacgggtatgattctgaagctcaggttcctactgatttgatttcgtcctgcgtagccacgatacttatgattcagaactgcacggaaaagcagtatcatcctgccgaagttgcacacatccttgattcggccctgtcacgcctacaaccgtgcagctcccagaacatcccgatcttcagggagattgagatgtgcatgggcattataaagaatcaaatgttggcgttgatacccacaccaagcggctagttccttgctttcctgtgagctggccggaagaggggtaaatttcggaaagaaaccggaatactgtatgtggcgtgtattgttttttttttcccattttttactgatttgttgtgttgtacaagctgtatgtttttttactgtcgtacaagctgtatgttattgctttatacatgtataatagtaatcatgaaagttcattgttctggcaagcgcatgtacattcagcttgaaatactgaaccctttttccaaacggaaattttttc

SEQ ID NO: 33581 - DNA, 3773 bp, Zea Mays
ggatgagggggaagccaatgggagatggatcaaggagatgagcatggtaggctgttcaattctcaatggcttcgtcgcgaaaagtgaggaatgcaaataaacgctacaccaaaatcaacgaagattggcaggataaagatgagacaaatgtacataaaagtaaagtgcgaaagaaaaagttatctgacatgcttgggtctcaatggagcaaagatgagctcgagcgcttctatggagcctacagaaaatatggaaaagattggagaaagttttttttatgcccttctagacagaaccgagacataaaaatacatttagttgctggtgcaatacgtgataggacatctgaaatggtggaggctctttacaacattaataaggcatatttatctcttccagagggaacagctactgctgcggggttaatagcaatgatgaccgatcactacaatattctggatggaagtaacagtgatcatgaaagcaatgattcaccaaaagcttcaaggaagccacagaagcgtggtcgtgctaggtttcaatctgtttctaagacatctgatgcacgttatgctgatctagggcaatctcagccttcttcatcaagctatggctgcctttcgttgttgacgaaaaaatgtgctggagatctgcttgtagggaacaggcctcgtgctgttggaaaaaggactccaagagtacctggtgcaagtatatactatcgagatgacaggggtgtaacagataggcgtgcaaaaacagttgctaacaatggtgatgatgaaggagctcatgtagctgcgcttgctctggcagaggtatttcaaagaggaggctcacctcaggtttctgaaacatccaaatggtgatcacatgttcctgtctcctgttaaaagtagtgacagaaaaaatgctgattcagagatgggaagctcaaagttgcatgggtttcatttggatgctgattaccccgaaggtagcttaggaagcagggaggccgagactggtgaatattgcaaaggttcatcatttttgacgaaaaatgaaggttctggtaagcctctgaagaagggaaaaaagtctcagaagaggaggaaaaaagctgcacataaaacaggtgatcagttcgaggatgacagagaggcttgtagtggaactgatgaagggcataggtcgataaagattaaagaagactcagagctggagtcattgggatggccgtctagcacgtcaaataaaagaagtcgtcaattgttttttggtgtcgagaaaaaatatgtccttgttttgcatacattggctgatctatctgtgaatatcctaccaccttcatcagtaatggaatctgaatcttcagcccaaattaaggatgaaaacaaagatgttgattctgatgacaggcctggcatgcctgcggcagtatcagtgtatgagcagaaagttaactccaaaagcactgcaaggaaagttaaaaggcagcctgaaatttcaaattcagagatggtcactaggaaaaaagctaaagttactaaagatcctcatcacgatgggagcaccacttctgatgtaaagcagcaagcttgtacatgtggtgtcaaaacagagaaaaagaagaggaaatcatccacgacaaaggtttctgctgaagaagggaaggtgtcgtctaatatcgggacaaccacacaaggtgatacaacacaagctgacttatcatcaaagggtaaaagctgccgtaaaataggcattcagcaagcactaattgaagaatgcaaatcaaccaaggttgccaatgatactggaagtgataaattttctcactcagtgaataatgttattgatcttaaggacaaactctctcactgcttgtcctcacgtttgcttcggaggtggtgtatgtttgaatggttctatagtgcaattgattatccatggtttgcaaaaagtgaatttgtggagtacttgaatcatgtcaagctgggtcatgttccaaggctgactcgtgttgagtggggtgtcataaggagttctcttgggaagccccgccgattgtctaaacaatttttgcatgaggagagagagaagctttctcaatatcgcgattcagtcaggcaacactatgctgaacttcgatctggtgttagagaaggactacccacggatcttgcacgacctcttgcagttggacagcgtgttatagcctgtcatcctagaacaagggaacttcatgatgggaatattctgacagttgacaataatcgttgtcgggttcagtttgatcggcctgagctgggtgttgagtttgtgatggatattgattgtatgcccctccatcccatggaaaatgagtccctcaggcaaaaaaacatcgtgaataaatacttatccgaggtgaaacttgaggatcagatgaatgacttgggtagtgggggtgcagcaaggttcgcatcaaatgtgaatgtgaattgtggcgatgcagcgttccaaataccttctagccacccggtaaatagtttaacgaagcaagcaaaggttggcacagttgattcaattgtacaggccaaagctacagttaatgaggttgcaattgcagcacaacaagcaatgtacaatcagccatgcagtctctcacagatacaggaaagagaagctgatataagagctcttgctgaactatcacgtgcccttgataaaaaggaagctttattggtagagttgaggcacatgaatgaagaagtgtccagaaagcaaaaggatggtgagactgttagagttgaagcatttcaggacgcaatatgctatggtgcttgtgcagctaagagattctaatgatcaagtagcctcagctttgctttctctgcggcaacgtaacacgtatcatggaaatcaattaccgtcatatcctatttccatggaaaatggtggaaccattactggagcaccagatccatataaccgttttggttatattaatccagaatccggttcccaagtaatggaagttattgagacttcaaggtgcaaagcaaaaatgatggttgatgttgctgttcaggcgatgtgcaaagtgagggaaggagagaacgcctttgctaaaatcggtgaagcactagatgatctcgatagtcgtggcacaggctctggttcaagcatactaggaataagacggatacctcccgattcagggaaggcaaatacatcctttcaagataacggaacgcctgcccctgcagcaatcaactcttcaggtccaagattgcccaacgggtatgattctgaagctcaggttcctactgatttgatttcgtcctgcgtagccacgatacttatgattcagaactgcacggaaaagcagtatcatcctgccgaagttgcacacatccttgattcggccctgtcacgcctacaaccgtgcagctcccagaacatcccgatcttcagggagattgagatgtgcatgggcattataaagaatcaaatgttggcgttgatacccacaccaagcggctagttccttgctttcctgtgagctggccggaagaggggtaaatttcggaaagaaaccggaatactgtatgtggcgtgtattgttttttttttcccattttttactgatttgttgtgttgtacaagctgtatgtttttttactgtcgtacaagctgtatgttattgctttatacatgtataatagtaatcatgaaagttcattgttctggcaagcgcatgtacattcagcttgaaatactgaaccctttttccaaacggaaattttttc

SEQ ID NO: 33582 - DNA, 3746 bp, Zea Mays
ggatgagggggaagccaatgggagatggatcaaggagatgagcatggtaggctgttcaattctcaatggcttcgtcgcgaaaagtgaggaatgcaaataaacgctacaccaaaatcaacgaagattggcaggataaagatgagacaaatgtacataaaagtaaagtgcgaaagaaaaagttatctgacatgcttgggtctcaatggagcaaagatgagctcgagcgcttctatggagcctacagaaaatatggaaaagattggagaaagttttttttatgcccttctagacagaaccgagacataaaaatacatttagttgctggtgcaatacgtgataggacatctgaaatggtggaggctctttacaacattaataaggcatatttatctcttccagagggaacagctactgctgcggggttaatagcaatgatgaccgatcactacaatattctggatggaagtaacagtgatcatgaaagcaatgattcaccaaaagcttcaaggaagccacagaagcgtggtcgtgctaggtttcaatctgtttctaagacatctgatgcacgttatgctgatctagggcaatctcagccttcttcatcaagctatggctgcctttcgttgttgacgaaaaaatgtgctggagatctgcttgtagggaacaggcctcgtgctgttggaaaaaggactccaagagtacctggtgcaagtatatactatcgagatgacaggggtgtaacagataggcgtgcaaaaacagttgctaacaatggtgatgatgaaggagctcatgtagctgcgcttgctctggcagaggtatttcaaagaggaggctcacctcaggtttctgaaacatccaaatggtgatcacatgttcctgtctcctgttaaaagtagtgacagaaaaaatgctgattcagagatgggaagctcaaagttgcatgggtttcatttggatgctgattaccccgaaggtagcttaggaagcagggaggccgagactggtgaatattgcaaaggttcatcatttttgacgaaaaatgaaggttctggtaagcctctgaagaagggaaaaaagtctcagaagaggaggaaaaaagctgcacataaaacaggtgatcagttcgaggatgacagagaggcttgtagtggaactgatgaagggcataggtcgataaagattaaagaagactcagagctggagtcattgggatggccgtctagcacgtcaaataaaagaagtcgtcaattgttttttggtgtcgagaaaaaatatgtccttgttttgcatacattggctgatctatctgtgaatatcctaccaccttcatcagtaatggaatctgaatcttcagcccaaattaaggatgaaaacaaagatgttgattctgatgacaggcctggcatgcctgcggcagtatcagtgtatgagcagaaagttaactccaaaagcactgcaaggaaagttaaaaggcagcctgaaatttcaaattcagagatggtcactaggaaaaaagctaaagttactaaagatcctcatcacgatgggagcaccacttctgatgtaaagcagcaagcttgtacatgtggtgtcaaaacagagaaaaagaagaggaaatcatccacgacaaaggtttctgctgaagaagggaaggtgtcgtctaatatcgggacaaccacacaaggtgatacaacacaagctgacttatcatcaaagggtaaaagctgccgtaaaataggcattcagcaagcactaattgaagaatgcaaatcaaccaaggttgccaatgatactggaagtgataaattttctcactcagtgaataatgttattgatcttaaggacaaactctctcactgcttgtcctcacgtttgcttcggaggtggtgtatgtttgaatggttctatagtgcaattgattatccatggtttgcaaaaagtgaatttgtggagtacttgaatcatgtcaagctgggtcatgttccaaggctgactcgtgttgagtggggtgtcataaggagttctcttgggaagccccgccgattgtctaaacaatttttgcatgaggagagagagaagctttctcaatatcgcgattcagtcaggcaacactatgctgaacttcgatctggtgttagagaaggactacccacggatcttgcacgacctcttgcagttggacagcgtgttatagcctgtcatcctagaacaagggaacttcatgatgggaatattctgacagttgacaataatcgttgtcgggttcagtttgatcggcctgagctgggtgttgagtttgtgatggatattgattgtatgcccctccatcccatggaaaatgagtccctcaggcaaaaaaacatcgtgaataaatacttatccgaggtgaaacttgaggatcagatgaatgacttgggtagtgggggtgcagcaaggttcgcatcaaatgtgaatgtgaattgtggcgatgcagcgttccaaataccttctagccacccggtaaatagtttaacgaagcaagcaaaggccaaagctacagttaatgaggttgcaattgcagcacaacaagcaatgtacaatcagccatgcagtctctcacagatacaggaaagagaagctgatataagagctcttgctgaactatcacgtgcccttgataaaaaggaagctttattggtagagttgaggcacatgaatgaagaagtgtccagaaagcaaaaggatggtgagactgttagagttgaagcatttcaggacgcaatatgctatggtgcttgtgcagctaagagattctaatgatcaagtagcctcagctttgctttctctgcggcaacgtaacacgtatcatggaaatcaattaccgtcatatcctatttccatggaaaatggtggaaccattactggagcaccagatccatataaccgttttggttatattaatccagaatccggttcccaagtaatggaagttattgagacttcaaggtgcaaagcaaaaatgatggttgatgttgctgttcaggcgatgtgcaaagtgagggaaggagagaacgcctttgctaaaatcggtgaagcactagatgatctcgatagtcgtggcacaggctctggttcaagcatactaggaataagacggatacctcccgattcagggaaggcaaatacatcctttcaagataacggaacgcctgcccctgcagcaatcaactcttcaggtccaagattgcccaacgggtatgattctgaagctcaggttcctactgatttgatttcgtcctgcgtagccacgatacttatgattcagaactgcacggaaaagcagtatcatcctgccgaagttgcacacatccttgattcggccctgtcacgcctacaaccgtgcagctcccagaacatcccgatcttcagggagattgagatgtgcatgggcattataaagaatcaaatgttggcgttgatacccacaccaagcggctagttccttgctttcctgtgagctggccggaagaggggtaaatttcggaaagaaaccggaatactgtatgtggcgtgtattgttttttttttcccattttttactgatttgttgtgttgtacaagctgtatgtttttttactgtcgtacaagctgtatgttattgctttatacatgtataatagtaatcatgaaagttcattgttctggcaagcgcatgtacattcagcttgaaatactgaaccctttttccaaacggaaattttttc

SEQ ID NO: 33583 - DNA, 3779 bp, Zea Mays
tcattggccggacagcagagctaaataaagctggggcggttgggatgagggggaagccaatgggagatggatcaaggagatgagcatggtaggctgttcaattctcaatggcttcgtcgcgaaaagtgaggaatgcaaataaacgctacaccaaaatcaacgaagattggcaggataaagatgagacaaatgtacataaaagtaaagtgcgaaagaaaaagttatctgacatgcttgggtctcaatggagcaaagatgagctcgagcgcttctatggagcctacagaaaatatggaaaagattggagaaagttttttttatgcccttctagacagaaccgagacataaaaatacatttagttgctggtgcaatacgtgataggacatctgaaatggtggaggctctttacaacattaataaggcatatttatctcttccagagggaacagctactgctgcggggttaatagcaatgatgaccgatcactacaatattctggatggaagtaacagtgatcatgaaagcaatgattcaccaaaagcttcaaggaagccacagaagcgtggtcgtgctaggtttcaatctgtttctaagacatctgatgcacgttatgctgatctagggcaatctcagccttcttcatcaagctatggctgcctttcgttgttgacgaaaaaatgtgctggagatctgcttgtagggaacaggcctcgtgctgttggaaaaaggactccaagagtacctggtgcaagtatatactatcgagatgacaggggtgtaacagataggcgtgcaaaaacagttgctaacaatggtgatgatgaaggagctcatgtagctgcgcttgctctggcagaggtatttcaaagaggaggctcacctcaggtttctgaaacatccaaatggtgatcacatgttcctgtctcctgttaaaagtagtgacagaaaaaatgctgattcagagatgggaagctcaaagttgcatgggtttcatttggatgctgattaccccgaaggtagcttaggaagcagggaggccgagactggtgaatattgcaaaggttcatcatttttgacgaaaaatgaaggttctggtaagcctctgaagaagggaaaaaagtctcagaagaggaggaaaaaagctgcacataaaacaggtgatcagttcgaggatgacagagaggcttgtagtggaactgatgaagggcataggtcgataaagattaaagaagactcagagctggagtcattgggatggccgtctagcacgtcaaataaaagaagtcgtcaattgttttttggtgaatcttcagcccaaattaaggatgaaaacaaagatgttgattctgatgacaggcctggcatgcctgcggcagtatcagtgtatgagcagaaagttaactccaaaagcactgcaaggaaagttaaaaggcagcctgaaatttcaaattcagagatggtcactaggaaaaaagctaaagttactaaagatcctcatcacgatgggagcaccacttctgatgtaaagcagcaagcttgtacatgtggtgtcaaaacagagaaaaagaagaggaaatcatccacgacaaaggtaattcccaaattattatttgttgatcatttctgtaaggaaaagtatgtttctgctgaagaagggaaggtgtcgtctaatatcgggacaaccacacaaggtgatacaacacaagctgacttatcatcaaagggtaaaagctgccgtaaaataggcattcagcaagcactaattgaagaatgcaaatcaaccaaggttgccaatgatactggaagtgataaattttctcactcagtgaataatgttattgatcttaaggacaaactctctcactgcttgtcctcacgtttgcttcggaggtggtgtatgtttgaatggttctatagtgcaattgattatccatggtttgcaaaaagtgaatttgtggagtacttgaatcatgtcaagctgggtcatgttccaaggctgactcgtgttgagtggggtgtcataaggagttctcttgggaagccccgccgattgtctaaacaatttttgcatgaggagagagagaagctttctcaatatcgcgattcagtcaggcaacactatgctgaacttcgatctggtgttagagaaggactacccacggatcttgcacgacctcttgcagttggacagcgtgttatagcctgtcatcctagaacaagggaacttcatgatgggaatattctgacagttgacaataatcgttgtcgggttcagtttgatcggcctgagctgggtgttgagtttgtgatggatattgattgtatgcccctccatcccatggaaaatgagtccctcaggcaaaaaaacatcgtgaataaatacttatccgaggtgaaacttgaggatcagatgaatgacttgggtagtgggggtgcagcaaggttcgcatcaaatgtgaatgtgaattgtggcgatgcagcgttccaaataccttctagccacccggtaaatagtttaacgaagcaagcaaaggttggcacagttgattcaattgtacaggccaaagctacagttaatgaggttgcaattgcagcacaacaagcaatgtacaatcagccatgcagtctctcacagatacaggaaagagaagctgatataagagctcttgctgaactatcacgtgcccttgataaaaaggaagctttattggtagagttgaggcacatgaatgaagaagtgtccagaaagcaaaaggatggtgagactgttagagttgaagcatttcaggacgcaatatgctatggtgcttgtgcagctaagagattctaatgatcaagtagcctcagctttgctttctctgcggcaacgtaacacgtatcatggaaatcaattaccgtcatatcctatttccatggaaaatggtggaaccattactggagcaccagatccatataaccgttttggttatattaatccagaatccggttcccaagtaatggaagttattgagacttcaaggtgcaaagcaaaaatgatggttgatgttgctgttcaggcgatgtgcaaagtgagggaaggagagaacgcctttgctaaaatcggtgaagcactagatgatctcgatagtcgtggcacaggctctggttcaagcatactaggaataagacggatacctcccgattcagggaaggcaaatacatcctttcaagataacggaacgcctgcccctgcagcaatcaactcttcaggtccaagattgcccaacgggtatgattctgaagctcaggttcctactgatttgatttcgtcctgcgtagccacgatacttatgattcagaactgcacggaaaagcagtatcatcctgccgaagttgcacacatccttgattcggccctgtcacgcctacaaccgtgcagctcccagaacatcccgatcttcagggagattgagatgtgcatgggcattataaagaatcaaatgttggcgttgatacccacaccaagcggctagttccttgctttcctgtgagctggccggaagaggggtaaatttcggaaagaaaccggaatactgtatgtggcgtgtattgttttttttttcccattttttactgatttgttgtgttgtacaagctgtatgtttttttactgtcgtacaagctgtatgttattgctttatacatgtataatagtaatcatgaaagttcattgttctggcaagcgcatgtacattcagcttgaaatactgaaccctttttccaaacggaaattttttc

SEQ ID NO: 33584 - DNA, 4618 bp, Zea Mays
cccgtccatagcagcgctgccaccaccgacggaaggcccttagcagcgccgccaccaccacgggagatgcgtggagagatgaagcaaaccaagtcaggaagaatagaaatgagggcagaatggaatgaaacaagaacttgtttttttgtgagcttactgaaggagtacaattcaccaagatatcgtgcccaaaatggttggacaaaagaagcatggaacaacatgacacaacgcatcaacgataaatttgaaacaaattttgtggtgacgtaattgaagaacaaatgaccagtgggggccgaataaacttacaaattcataccgaattttgcctggtccactaaagctgcctgcgcccccccccccccccccccccgcatgggctcgtagcccacagacgtcccaggagctggcccaatttatcttcgccatccatttcgattgaatggccacgatttaccgaaatcgcatatataaatgaaaatttcggcatgccctaaccctagcttcattcgcttccgatatttccggagtggtatagggcggatttggtggcggcgactgtgaggcgggcgagcgaggtggtcattgggctcgcgccggagaacgctatgatcccgctgttcgagacggggggcgcgcagctcgagctcatacgggatgccgagattgagccgtgtgcctacgtgaggtgggagcaagggaggccgagaggatccgcttcatgagttggatgcacacgagagacgttggggatcccagcttcccaatgcgggagatccagaagagtcaacggcggatcgatcaagtggattagcactctcccctgtctgcgtgatctgtagaacaaggataagtcggggacgctgttctgctttgccgcgatggaacatgtgttccaatccgagaatttcaggctggggcggttgggatgagggggaagccaatgggagatggatcaaggagatgagcatggtaggctgttcaattctcaatggcttcgtcgcgaaaagtgaggaatgcaaataaacgctacaccaaaatcaacgaagattggcaggataaagatgagacaaatgtacataaaagtaaagtgcgaaagaaaaagttatctgacatgcttgggtctcaatggagcaaagatgagctcgagcgcttctatggagcctacagaaaatatggaaaagattggagaaaggttgctggtgcaatacgtgataggacatctgaaatggtggaggctctttacaacattaataaggcatatttatctcttccagagggaacagctactgctgcggggttaatagcaatgatgaccgatcactacaatattctggatggaagtaacagtgatcatgaaagcaatgattcaccaaaagcttcaaggaagccacagaagcgtggtcgtgctaggtttcaatctgtttctaagacatctgatgcacgttatgctgatctagggcaatctcagccttcttcatcaagctatggctgcctttcgttgttgacgaaaaaatgtgctggagatctgcttgtagggaacaggcctcgtgctgttggaaaaaggactccaagagtacctggtgcaagtatatactatcgagatgacaggggtgtaacagataggcgtgcaaaaacagttgctaacaatggtgatgatgaaggagctcatgtagctgcgcttgctctggcagaggtatttcaaagaggaggctcacctcaggtttctgaaacatccaaatggtgatcacatgttcctgtctcctgttaaaagtagtgacagaaaaaatgctgattcagagatgggaagctcaaagttgcatgggtttcatttggatgctgattaccccgaaggtagcttaggaagcagggaggccgagactggtgaatattgcaaaggttcatcatttttgacgaaaaatgaaggttctggtaagcctctgaagaagggaaaaaagtctcagaagaggaggaaaaaagctgcacataaaacaggtgatcagttcgaggatgacagagaggcttgtagtggaactgatgaagggcataggtcgataaagattaaagaagactcagagctggagtcattgggatggccgtctagcacgtcaaataaaagaagtcgtcaattgttttttggtgaatcttcagcccaaattaaggatgaaaacaaagatgttgattctgatgacaggcctggcatgcctgcggcagtatcagtgtatgagcagaaagttaactccaaaagcactgcaaggaaagttaaaaggcagcctgaaatttcaaattcagagatggtcactaggaaaaaagctaaagttactaaagatcctcatcacgatgggagcaccacttctgatgtaaagcagcaagcttgtacatgtggtgtcaaaacagagaaaaagaagaggaaatcatccacgacaaaggtttctgctgaagaagggaaggtgtcgtctaatatcgggacaaccacacaaggtgatacaacacaagctgacttatcatcaaagggtaaaagctgccgtaaaataggcattcagcaagcactaattgaagaatgcaaatcaaccaaggttgccaatgatactggaagtgataaattttctcactcagtgaataatgttattgatcttaaggacaaactctctcactgcttgtcctcacgtttgcttcggaggtggtgtatgtttgaatggttctatagtgcaattgattatccatggtttgcaaaaagtgaatttgtggagtacttgaatcatgtcaagctgggtcatgttccaaggctgactcgtgttgagtggggtgtcataaggagttctcttgggaagccccgccgattgtctaaacaatttttgcatgaggagagagagaagctttctcaatatcgcgattcagtcaggcaacactatgctgaacttcgatctggtgttagagaaggactacccacggatcttgcacgacctcttgcagttggacagcgtgttatagcctgtcatcctagaacaagggaacttcatgatgggaatattctgacagttgacaataatcgttgtcgggttcagtttgatcggcctgagctgggtgttgagtttgtgatggatattgattgtatgcccctccatcccatggaaaatgagtccctcaggcaaaaaaacatcgtgaataaatacttatccgaggtgaaacttgaggatcagatgaatgacttgggtagtgggggtgcagcaaggttcgcatcaaatgtgaatgtgaattgtggcgatgcagcgttccaaataccttctagccacccggttggcacagttgattcaattgtacaggccaaagctacagttaatgaggttgcaattgcagcacaacaagcaatgtacaatcagccatgcagtctctcacagatacaggaaagagaagctgatataagagctcttgctgaactatcacgtgcccttgataaaaaggaagctttattggtagagttgaggcacatgaatgaagaagtgtccagaaagcaaaaggatggtgagactgttagagttgaagcatttcaggacgcaatatgctatggtgcttgtgcagctaagagattctaatgatcaagtagcctcagctttgctttctctgcggcaacgtaacacgtatcatggaaatcaattaccgtcatatcctatttccatggaaaatggtggaaccattactggagcaccagatccatataaccgttttggttatattaatccagaatccggttcccaagtaatggaagttattgagacttcaaggtgcaaagcaaaaatgatggttgatgttgctgttcaggattcctcatggatctcatcaactcatgtttatattctgtattttgcgaagaaagttcttccaattgaacaaacagcgatgtgcaaagtgagggaaggagagaacgcctttgctaaaatcggtgaagcactagatgatctcgatagtcgtggcacaggctctggttcaagcatactaggaataagacggatacctcccgattcagggaaggcaaatacatcctttcaagataacggaacgcctgcccctgcagcaatcaactcttcaggtccaagattgcccaacgggtatgattctgaagctcaggttcctactgatttgatttcgtcctgcgtagccacgatacttatgattcagaactgcacggaaaagcagtatcatcctgccgaagttgcacacatccttgattcggccctgtcacgcctacaaccgtgcagctcccagaacatcccgatcttcagggagattgagatgtgcatgggcattataaagaatcaaatgttggcgttgatacccacaccaagcggctagttccttgctttcctgtgagctggccggaagaggggtaaatttcggaaagaaaccggaatactgtatgtggcgtgtattgttttttttttcccattttttactgatttgttgtgttgtacaagctgtatgtttttttactgtcgtacaagctgtatgttattgctttatacatgtataatagtaatcatgaaagttcattgttctggcaagcgcatgtacattcagcttgaaatactgaaccctttttccaaacggaaattttttc

SEQ ID NO: 33585 - DNA, 2105 bp, Zea Mays
gatggatcaaggagatgagcatggctgttcaattctcaatggcttcgtcgcgaaaagtgaggaatgcaaataaacgctacaccaaaatcaacgaagattggcaggataaagatgagacaaatgtacataaaagtaaagtgcgaaagaaaaagttatctgacatgcttgggtctcaatggagcaaagatgagctcgagcgcttctatggagcctacagaaaatatggaaaagattggagaaaggttgctggtgcaatacgtgataggacatctgaaatggtggaggctctttacaacattaataaggcatatttatctcttccagagggaacagctactgctgcggggttaatagcaatgatgaccgatcactacaatattctggatggaagtaacagtgatcatgaaagcaatgattcaccaaaagcttcaaggaagccacagaagcgtggtcgtgctaggtttcaatctgtttctaagacatctgatgcacgttatgctgatctagggcaatctcagccttcttcatcaagctatggctgcctttcgttgttgacgaaaaaatgtgctggagatctgcttgtagggaacaggcctcgtgctgttggaaaaaggactccaagagtacctggtgcaagtatatactatcgagatgacaggggtgtaacagataggcgtgcaaaaacagttgctaacaatggtgatgatgaaggagctcatgtagctgcgcttgctctggcagaggtatttcaaagaggaggctcacctcaggtttctgaaacatccaaatggtgatcacatgttcctgtctcctgttaaaagtagtgacagaaaaaatgctgattcagagatgggaagctcaaagttgcatgggtttcatttggatgctgattaccccgaaggtagcttaggaagcagggaggccgagactggtgaatattgcaaaggttcatcatttttgacgaaaaatgaaggttctggtaagcctctgaagaagggaaaaaagtctcagaagaggaggaaaaaagctgcacataaaacaggtgatcagttcgaggatgacagagaggcttgtagtggaactgatgaagggcataggtcgataaagattaaagaagactcagagctggagtcattgggatggccgtctagcacgtcaaataaaagaagtcgtcaattgttttttggtggattgctaacaaaagaacagtagcggaggcccttgagggtatggcgtggattagtgatatcagggggaccatctcttgggcagttattttcgatctcctgatcctgtgcgaagctgtcacagaagttcatctacaggctgggaccaccgacaagcacttttggagattttccacttctggccagtattctgcgaaggcagcttatgagctgttcttccttggctccactgccttcgggcctttgaaaggatttggaaaacttgggctcctgccaaatgcaagttctttttgtggttggtcatgcataacagatgctggacagcagatcgtttggcaaaaagggatctccctcaccctgcggtctgtcctctctgtgatcagcaagcggaaacaatccaacaccttctcatttcttgtgtttttgcaagacaattctggttcacgctgctgcaaaagatgggggctgccgaacctctccccagacttggatgccaccaatctggacagttggtggaatagtgctgctgagaagctgcctggagaccttcaagccggctttaattctatcgtgatccttggcgcttggagtatctggcgtccccgcaatgactgtgtcttcaatggcatgtcacctagtgtgaccacggctatcacccttgctagtgatgagctgaggatgtggagcctcgctggtgctaaaggtctcaacctgctgtcagccctggtttttgtgttcgatccagggtgggggttttttcttgagtttttgggtttttgggtttgtgtgtgagttgtgctgtgttttgtgggttgtgttctggtgaccttgtggtcgctgggctgtttgggtgtgtgtttgtgtgtgtgtgtcgtggtgttttgtactccctttttatctttaatggaaagatacgca

SEQ ID NO: 33586 - DNA, 2320 bp, Zea Mays
tttccttctcccgcgtgcggcgcgccctagcttcctccttcccttccactcccgtccatagcagcgctgccaccaccgacggaaggcccttagcagcgccgccaccaccacgggagatgcgtggagagatgaagcaaaccaagtcaggaagaatagaaatgagggcagaatggaatgaaacaagaacttgtttttttgtgagcttactgaaggagtacaattcaccaagatatcgtgcccaaaatggttggacaaaagaagcatggaacaacatgacacaacgcatcaacgataaatttgaaacaaattttgtggtgacgtaattgaagaacaaatgaccagtgggggccgaataaacttacaaattcataccgaattttgcctggtccactaaagctgcctgcgcccccccccccccccccccccgcatgggctcgtagcccacagacgtcccaggagctggcccaatttatcttcgccatccatttcgattgaatggccacgatttaccgaaatcgcatatataaatgaaaatttcggcatgccctaaccctagcttcattcgcttccgatatttccggagtggtatagggcggatttggtggcggcgactgtgaggcgggcgagcgaggtggtcattgggctcgcgccggagaacgctatgatcccgctgttcgagacggggggcgcgcagctcgagctcatacgggatgccgagattgagccgtgtgcctacgtgaggtgggagcaagggaggccgagaggatccgcttcatgagttggatgcacacgagagacgttggggatcccagcttcccaatgcgggagatccagaagagtcaacggcggatcgatcaagtggattagcactctcccctgtctgcgtgatctgtagaacaaggataagtcggggacgctgttctgctttgccgcgatggaacatgtgttccaatccgagaatttcaggctggggcggttgggatgagggggaagccaatgggagatggatcaaggagatgagcatggtaggctgttcaattctcaatggcttcgtcgcgaaaaagatgggaagctcaaagttgcatgggtttcatttggatgctgattaccccgaaggtagcttaggaagcagggaggccgagactggtgaatattgcaaaggttcatcatttttgacgaaaaatgaaggttctggtaagcctctgaagaagggaaaaaagtctcagaagaggaggaaaaaagctgcacataaaacaggtgatcagttcgaggatgacagagaggcttgtagtggaactgatgaagggcataggtcgataaagattaaagaagactcagagctggagtcattgggatggccgtctagcacgtcaaataaaagaagtcgtcaattgttttttggtggattgctaacaaaagaacagtagcggaggcccttgagggtatggcgtggattagtgatatcagggggaccatctcttgggcagttattttcgatctcctgatcctgtgcgaagctgtcacagaagttcatctacaggctgggaccaccgacaagcacttttggagattttccacttctggccagtattctgcgaaggcagcttatgagctgttcttccttggctccactgccttcgggcctttgaaaggatttggaaaacttgggctcctgccaaatgcaagttctttttgtggttggtcatgcataacagatgctggacagcagatcgtttggcaaaaagggatctccctcaccctgcggtctgtcctctctgtgatcagcaagcggaaacaatccaacaccttctcatttcttgtgtttttgcaagacaattctggttcacgctgctgcaaaagatgggggctgccgaacctctccccagacttggatgccaccaatctggacagttggtggaatagtgctgctgagaagctgcctggagaccttcaagccggctttaattctatcgtgatccttggcgcttggagtatctggcgtccccgcaatgactgtgtcttcaatggcatgtcacctagtgtgaccacggctatcacccttgctagtgatgagctgaggatgtggagcctcgctggtgctaaaggtctcaacctgctgtcagccctggtttttgtgttcgatccagggtgggggttttttcttgagtttttgggtttttgggtttgtgtgtgagttgtgctgtgttttgtgggttgtgttctggtgaccttgtggtcgctgggctgtttgggtgtgtgtttgtgtgtgtgtgtcgtggtgttttgtactccctttttatctttaatggaaagatacgca

SEQ ID NO: 33587 - DNA, 3174 bp, Zea Mays
cgagcgcgcgtattttttccttctcccgcgtgcggcgcgccctagcttcctccttcccttccactcccgtccatagcagcgctgccaccaccgacggaaggcccttagcagcgccgccaccaccacgggagatgcgtggagagatgaagcaaaccaagtcaggaagaatagaaatgagggcagaatggaatgaaacaagaacttgtttttttgtgagcttactgaaggagtacaattcaccaagatatcgtgcccaaaatggttggacaaaagaagcatggaacaacatgacacaacgcatcaacgataaatttgaaacaaattttgtggtgacgtaattgaagaacaaatgaccagtgggggccgaataaacttacaaattcataccgaattttgcctggtccactaaagctgcctgcgcccccccccccccccccccccgcatgggctcgtagcccacagacgtcccaggagctggcccaatttatcttcgccatccatttcgattgaatggccacgatttaccgaaatcgcatatataaatgaaaatttcggcatgccctaaccctagcttcattcgcttccgatatttccggagtggtatagggcggatttggtggcggcgactgtgaggcgggcgagcgaggtggtcattgggctcgcgccggagaacgctatgatcccgctgttcgagacggggggcgcgcagctcgagctcatacgggatgccgagattgagccgtgtgcctacgtgaggtgggagcaagggaggccgagaggatccgcttcatgagttggatgcacacgagagacgttggggatcccagcttcccaatgcgggagatccagaagagtcaacggcggatcgatcaagtggattagcactctcccctgtctgcgtgatctgtagaacaaggataagtcggggacgctgttctgctttgccgcgatggaacatgtgttccaatccgagaatttcaggctggggcggttgggatgagggggaagccaatgggagatggatcaaggagatgagcatggtaggctgttcaattctcaatggcttcgtcgcgaaaagtgaggaatgcaaataaacgctacaccaaaatcaacgaagattggcaggataaagatgagacaaatgtacataaaagtaaagtgcgaaagaaaaagttatctgacatgcttgggtctcaatggagcaaagatgagctcgagcgcttctatggagcctacagaaaatatggaaaagattggagaaagttttttttatgcccttctagacagaaccgagacataaaaatacatttagttgctggtgcaatacgtgataggacatctgaaatggtggaggctctttacaacattaataaggcatatttatctcttccagagggaacagctactgctgcggggttaatagcaatgatgaccgatcactacaatattctggatggaagtaacagtgatcatgaaagcaatgattcaccaaaagcttcaaggaagccacagaagcgtggtcgtgctaggtttcaatctgtttctaagacatctgatgcacgttatgctgatctagggcaatctcagccttcttcatcaagctatggctgcctttcgttgttgacgaaaaaatgtgctggagatctgcttgtagggaacaggcctcgtgctgttggaaaaaggactccaagagtacctggtgcaagtatatactatcgagatgacaggggtgtaacagataggcgtgcaaaaacagttgctaacaatggtgatgatgaaggagctcatgtagctgcgcttgctctggcagaggtatttcaaagaggaggctcacctcaggtttctgaaacatccaaatggtgatcacatgttcctgtctcctgttaaaagtagtgacagaaaaaatgctgattcagagatgggaagctcaaagttgcatgggtttcatttggatgctgattaccccgaaggtagcttaggaagcagggaggccgagactggtgaatattgcaaaggttcatcatttttgacgaaaaatgaaggttctggtaagcctctgaagaagggaaaaaagtctcagaagaggaggaaaaaagctgcacataaaacaggtgatcagttcgaggatgacagagaggcttgtagtggaactgatgaagggcataggtcgataaagattaaagaagactcagagctggagtcattgggatggccgtctagcacgtcaaataaaagaagtcgtcaattgttttttggtggattgctaacaaaagaacagtagcggaggcccttgagggtatggcgtggattagtgatatcagggggaccatctcttgggcagttattttcgatctcctgatcctgtgcgaagctgtcacagaagttcatctacaggctgggaccaccgacaagcacttttggagattttccacttctggccagtattctgcgaaggcagcttatgagctgttcttccttggctccactgccttcgggcctttgaaaggatttggaaaacttgggctcctgccaaatgcaagttctttttgtggttggtcatgcataacagatgctggacagcagatcgtttggcaaaaagggatctccctcaccctgcggtctgtcctctctgtgatcagcaagcggaaacaatccaacaccttctcatttcttgtgtttttgcaagacaattctggttcacgctgctgcaaaagatgggggctgccgaacctctccccagacttggatgccaccaatctggacagttggtggaatagtgctgctgagaagctgcctggagaccttcaagccggctttaattctatcgtgatccttggcgcttggagtatctggcgtccccgcaatgactgtgtcttcaatggcatgtcacctagtgtgaccacggctatcacccttgctagtgatgagctgaggatgtggagcctcgctggtgctaaaggtctcaacctgctgtcagccctggtttttgtgttcgatccagggtgggggttttttcttgagtttttgggtttttgggtttgtgtgtgagttgtgctgtgttttgtgggttgtgttctggtgaccttgtggtcgctgggctgtttgggtgtgtgtttgtgtgtgtgtgtcgtggtgttttgtactccctttttatctttaatggaaagatacgca

SEQ ID NO: 33588 - DNA, 390 bp, Zea Mays
ccgacggaaggcccttagcagcgccgccaccaccacgggagatgcgtggagagatgaagcaaaccaagtcagggcggatttggtggcggcgactgtgaggcgggcgagcgaggtggtcattgggctcgcgccggagaacgctatgatcccgctgttcgagacggggggcgcgcagctcgagctcatacgggatgccgagattgagccgtgtgcctacgtgaggtgggagcaagggaggccgagaggatccgcttcatgagttggatgcacacgagagacgttggggatcccagcttcccaatgcgggagatccagaagagtcaacggcggatcgatcaagtggattagcactctcccctgtctgcgaacaaggataagtcggggacgctg

SEQ ID NO: 33589 - DNA, 1664 bp, Zea Mays
gcgagctcaagtttctctgatccttttacaatcagctgtaaaattcttaaacaaaaattcgggacacctatgaatgcaatatttgacttatttgatttcaaaattattattctttctcactaatcttcaaatgcaagtcgatgcaagtgctcactgaccttgagatgcaagttgatgcagcgatgcaggcgcttattgatcttcacgtggaggacaatgcaaccgcgacgatacacaattatatataaccttttcagggtataagaagttcaatcaacattttccctccatgagtgaatgcagatcgatcaaattgagaagatgactacttcaattgaagatgatcggaagataagtgtttgtgatatttttttattgccactttttgttcctaaatcaatcatttgctgtggttccagaaagtaactgaggagtgataaaacgacaattttgagcttcaacgctttgctaggttggcaaaaaacttaaagcaacagagtgttcaagctaatgttttggtgctagaaaaggctttaatgcatcaggcttgtgttcctgtgttggataatgcttagagaagtttagcagtgataatgcttcactattcgaaaatcagtaaaaagtttagaccatttatgtgacatttttggatagttcctatgttgtgttgcaaccattaactatattaactgtatattttcacatggtgggacagatagaggacttcatagtgttcattcgaataatgttgatgtataagttaactttccacttttcttggttacttaatgaaattaacttttatagatttgtgtctacatagtgttcatgcaaatattgttgtatattatattatatttaagactcttaattagtgtcatttaacaacaataaaaaaaaattacacaatacattgttgatatgagataatcaagtccaaaaaatgtagaattatacgggcgcggcgaagcgcgcctgccatcctagtaataatgctaacaagaagagtcctctctcccttcacgttctgtatgttcttttttgttcttttggaggagcagggcgtctttgtcaatttaatgcaagtaaatcaggagaaagttttgttgattgatattgacaatgatcatattcaaaatcctattggtgatggcttttcagcatttaaatcaactagccccaaatgcatgtgattttttatctgaacagcattagtatatgacaaagtaattatacattatgttgataagcttaaaataattagttacatgttttcgtctatcggtcccgtgcatcgcacgggttttaagctagtctatgaaacaagtgattaacgtggtatgataatttgattcattcctgattctatggatcgtccgttcctatctgtgttattgggatcgattcgtttgccttttccttgaatattacacgattttttactgttattgtcattgttttgtagtcagtttagtgccagaaaaatgatcccgagcatgattttttcggactcagatcagagaagggtttcaccagattttttttagcacaagggcaaagccccccacctccttaataaggcggatttggtggcggcgactgtgaggcgggcgagcgaggtggtcattgggctcgcgccggagaacgctatgatcccgctgttc

SEQ ID NO: 33590 - DNA, 747 bp, Zea Mays
ctgggtgaagacacagccccatcaatcaatcatagcagaaaagaagtcttcagctgctgaaaaacataaatgaatctgaatgaatacactaagtccaagaacttcacgaaagaagtattgttccatcggttgtcaaggacgacgagcaaaagtctctcttttctacgcctcttgatgtgtgggcgagctcaagtttctctgatccttttacaatcagctgtaaaattcttaaacaaaaattcgggacacctatgaatgcaatatttgacttatttgatttcaaaattattattctttctcactaatcttcaaatgcaagtcgatgcaagtgctcactgaccttgagatgcaagttgatgcagcgatgcaggcgcttattgatcttcacgtggaggacaatgcaaccgcgacgatacacaaggtataagaagttcaatcaacattttccctccatgagtgaatgcagatcgatcaaattgagaagatgactacttcaattgaagatgatcggaagataagtgtttgtgatatttttttattgccactttttgttcctaaatcaatcatttgctgtggttccagaaagtaactgaggagtgataaaacgacaattttgagcttcaacgctttgctaggttggcaaaaaacttaaagcaacagagggcggatttggtggcggcgactgtgaggcgggcgagcgaggtggtcattgggctcgcgccggagaacgctatgatcccgctgttc

SEQ ID NO: 33591 - DNA, 840 bp, Zea Mays
ctgggtgaagacacagccccatcaatcaatcatagcagaaaagaagtcttcagctgctgaaaaacataaatgaatctgaatgaatacactaagtccaagaacttcacgaaagaagtattgttccatcggttgtcaaggacgacgagcaaaagtctctcttttctacgcctcttgatgtgtgggcgagctcaagtttctctgatccttttacaatcagctgtaaaattcttaaacaaaaattcgggacacctatgaatgcaatatttgacttatttgatttcaaaattattattctttctcactaatcttcaaatgcaagtcgatgcaagtgctcactgaccttgagatgcaagttgatgcagcgatgcaggcgcttattgatcttcacgtggaggacaatgcaaccgcgacgatacacaagcatttgagaagggctacccatctgttttatggaatgtcaattgcaatttattcagatgctaattttgcctttgtatgatctttacataatagggtataagaagttcaatcaacattttccctccatgagtgaatgcagatcgatcaaattgagaagatgactacttcaattgaagatgatcggaagataagtgtttgtgatatttttttattgccactttttgttcctaaatcaatcatttgctgtggttccagaaagtaactgaggagtgataaaacgacaattttgagcttcaacgctttgctaggttggcaaaaaacttaaagcaacagagggcggatttggtggcggcgactgtgaggcgggcgagcgaggtggtcattgggctcgcgccggagaacgctatgatcccgctgttc

SEQ ID NO: 33592 - DNA, 2564 bp, Zea Mays
ctgggtgaagacacagccccatcaatcaatcatagcagaaaagaagtcttcagctgctgaaaaacataaatgaatctgaatgaatacactaagtccaagaacttcacgaaagaagtattgttccatcggttgtcaaggacgacgagcaaaagtctctcttttctacgcctcttgatgtgtgggcgagctcaagtttctctgatccttttacaatcagctgtaaaattcttaaacaaaaattcgggacacctatgaatgcaatatttgacttatttgatttcaaaattattattctttctcactaatcttcaaatgcaagtcgatgcaagtgctcactgaccttgagatgcaagttgatgcagcgatgcaggcgcttattgatcttcacgtggaggacaatgcaaccgcgacgatacacaagtatattattcttcagtaccttggttttgcatgttgatgtcagttttgattaaaaaaagtctatactcgcacaggataaccacatggtccaaacatcaaaaattactttttccaggttcaaagttcaacagatcatgtaacatttaggttttacatttttcctattgtatgttaaaaaataatgaaaatttgaattaaattcttactagccggttaatttactccgttaatccctcattaatgtatgtactgttttcatgctaattaaactttgggagaatttttttccaactgatgtggaaaaatgaccattcaggcatttgagaagggctacccatctgttttatggaatgtcaattgcaatttattcagatgctaattttgcctttgtatgatctttacataatagggtataagaagttcaatcaacattttccctccatgagtgaatgcagatcgatcaaattgagaagatgactacttcaattgaagatgatcggaagataagtgtttgtgatatttttttattgccactttttgttcctaaatcaatcatttgctgtggttccagaaagtaactgaggagtgataaaacgacaattttgagcttcaacgctttgctaggttggcaaaaaacttaaagcaacagaggtaagttcgacttatgttaccctgggtacctgtatctatttcaatgtaaggcatatcatttgtaagcctctggtctgaaatacatgtcgccggttagtttagatttgagctaatcgtcaacatgtgttttagatcggatagagtactattttagaaatgtttggaccatacgagcagcctattgtccacaacaacaaaaaaaaacttaaaataggcacaatatggtttgacggtgaatgaatacacaatttcagagcacaaagagcaagtcccaatatatattgcattccccatctctaacaagcatacctttcattgtttgtaacagtgttcaagctaatgttttggtgctagaaaaggctttaatgcatcaggcttgtgttcctgtgttggataatgcttagagaagtttagcagtgataatgcttcactattcgaaaatcagtaaaaagtttagaccatttatgtgacatttttggatagttcctatgttgtgttgcaaccattaactatattaactgtatattttcacatggtgggacagatagaggacttcatagtgttcattcgaataatgttgatgtataagttaactttccacttttcttggttacttaatgaaattaacttttatagatttgtgtctacatagtgttcatgcaaatattgttgtatattatattatatttaagactcttaattagtgtcatttaacaacaataaaaaaaaattacacaatacattgttgatatgagataatcaagtccaaaaaatgtagaattatacgggcgcggcgaagcgcgcctgccatcctagtaataatgctaacaagaagagtcctctctcccttcacgttctgtatgttcttttttgttcttttggaggagcagggcgtctttgtcaatttaatgcaagtaaatcaggagaaagttttgttgattgatattgacaatgatcatattcaaaatcctattggtgatggcttttcagcatttaaatcaactagccccaaatgcatgtgattttttatctgaacagcattagtatatgacaaagtaattatacattatgttgataagcttaaaataattagttacatgttttcgtctatcggtcccgtgcatcgcacgggttttaagctagtctatgaaacaagtgattaacgtggtatgataatttgattcattcctgattctatggatcgtccgttcctatctgtgttattgggatcgattcgtttgccttttccttgaatattacacgattttttactgttattgtcattgttttgtagtcagtttagtgccagaaaaatgatcccgagcatgattttttcggactcagatcagagaagggtttcaccagattttttttagcacaagggcaaagccccccacctccttaataaggcggatttggtggcggcgactgtgaggcgggcgagcgaggtggtcattgggctcgcgccggagaacgctatgatcccgctgttc

SEQ ID NO: 33593 - DNA, 1356 bp, Zea Mays
ctgggtgaagacacagccccatcaatcaatcatagcagaaaagaagtcttcagctgctgaaaaacataaatgaatctgaatgaatacactaagtccaagaacttcacgaaagaagtattgttccatcggttgtcaaggacgacgagcaaaagtctctcttttctacgcctcttgatgtgtgggcgagctcaagtttctctgatccttttacaatcagctgtaaaattcttaaacaaaaattcgggacacctatgaatgcaatatttgacttatttgatttcaaaattattattctttctcactaatcttcaaatgcaagtcgatgcaagtgctcactgaccttgagatgcaagttgatgcagcgatgcaggcgcttattgatcttcacgtggaggacaatgcaaccgcgacgatacacaagtatattattcttcagtaccttggttttgcatgttgatgtcagttttgattaaaaaaagtctatactcgcacaggataaccacatggtccaaacatcaaaaattactttttccaggttcaaagttcaacagatcatgtaacatttaggttttacatttttcctattgtatgttaaaaaataatgaaaatttgaattaaattcttactagccggttaatttactccgttaatccctcattaatgtatgtactgttttcatgctaattaaactttgggagaatttttttccaactgatgtggaaaaatgaccattcaggcatttgagaagggctacccatctgttttatggaatgtcaattgcaatttattcagatgctaattttgcctttgtatgatctttacataataggttggtaaaaagcaaggtccatcgattattcgagacttaatgtgcaactatttttacagtttgtcagttatatataaccttttcagggtataagaagttcaatcaacattttccctccatgagtgaatgcagatcgatcaaattgagaagatgactacttcaattgaagatgatcggaagataagtgtttgtgatatttttttattgccactttttgttcctaaatcaatcatttgctgtggttccagaaagtaactgaggagtgataaaacgacaattttgagcttcaacgctttgctaggttggcaaaaaacttaaagcaacagagtcagtttagtgccagaaaaatgatcccgagcatgattttttcggactcagatcagagaagggtttcaccagattttttttagcacaagggcaaagccccccacctccttaataaggcggatttggtggcggcgactgtgaggcgggcgagcgaggtggtcattgggctcgcgccggagaacgctatgatcccgctgttc

SEQ ID NO: 33594 - DNA, 1827 bp, Zea Mays
ctgggtgaagacacagccccatcaatcaatcatagcagaaaagaagtcttcagctgctgaaaaacataaatgaatctgaatgaatacactaagtccaagaacttcacgaaagaagtattgttccatcggttgtcaaggacgacgagcaaaagtctctcttttctacgcctcttgatgtgtgggcgagctcaagtttctctgatccttttacaatcagctgtaaaattcttaaacaaaaattcgggacacctatgaatgcaatatttgacttatttgatttcaaaattattattctttctcactaatcttcaaatgcaagtcgatgcaagtgctcactgaccttgagatgcaagttgatgcagcgatgcaggcgcttattgatcttcacgtggaggacaatgcaaccgcgacgatacacaaggtataagaagttcaatcaacattttccctccatgagtgaatgcagatcgatcaaattgagaagatgactacttcaattgaagatgatcggaagataagtgtttgtgatatttttttattgccactttttgttcctaaatcaatcatttgctgtggttccagaaagtaactgaggagtgataaaacgacaattttgagcttcaacgctttgctaggttggcaaaaaacttaaagcaacagagtgttcaagctaatgttttggtgctagaaaaggctttaatgcatcaggcttgtgttcctgtgttggataatgcttagagaagtttagcagtgataatgcttcactattcgaaaatcagtaaaaagtttagaccatttatgtgacatttttggatagttcctatgttgtgttgcaaccattaactatattaactgtatattttcacatggtgggacagatagaggacttcatagtgttcattcgaataatgttgatgtataagttaactttccacttttcttggttacttaatgaaattaacttttatagatttgtgtctacatagtgttcatgcaaatattgttgtatattatattatatttaagactcttaattagtgtcatttaacaacaataaaaaaaaattacacaatacattgttgatatgagataatcaagtccaaaaaatgtagaattatacgggcgcggcgaagcgcgcctgccatcctagtaataatgctaacaagaagagtcctctctcccttcacgttctgtatgttcttttttgttcttttggaggagcagggcgtctttgtcaatttaatgcaagtaaatcaggagaaagttttgttgattgatattgacaatgatcatattcaaaatcctattggtgatggcttttcagcatttaaatcaactagccccaaatgcatgtgattttttatctgaacagcattagtatatgacaaagtaattatacattatgttgataagcttaaaataattagttacatgttttcgtctatcggtcccgtgcatcgcacgggttttaagctagtctatgaaacaagtgattaacgtggtatgataatttgattcattcctgattctatggatcgtccgttcctatctgtgttattgggatcgattcgtttgccttttccttgaatattacacgattttttactgttattgtcattgttttgtagtcagtttagtgccagaaaaatgatcccgagcatgattttttcggactcagatcagagaagggtttcaccagattttttttagcacaagggcaaagccccccacctccttaataaggcggatttggtggcggcgactgtgaggcgggcgagcgaggtggtcattgggctcgcgccggagaacgctatgatcccgctgttc

SEQ ID NO: 33595 - DNA, 2155 bp, Zea Mays
ctgggtgaagacacagccccatcaatcaatcatagcagaaaagaagtcttcagctgctgaaaaacataaatgaatctgaatgaatacactaagtccaagaacttcacgaaagaagtattgttccatcggttgtcaaggacgacgagcaaaagtctctcttttctacgcctcttgatgtgtgggcgagctcaagtttctctgatccttttacaatcagctgtaaaattcttaaacaaaaattcgggacacctatgaatgcaatatttgacttatttgatttcaaaattattattctttctcactaatcttcaaatgcaagtcgatgcaagtgctcactgaccttgagatgcaagttgatgcagcgatgcaggcgcttattgatcttcacgtggaggacaatgcaaccgcgacgatacacaaggtataagaagttcaatcaacattttccctccatgagtgaatgcagatcgatcaaattgagaagatgactacttcaattgaagatgatcggaagataagtgtttgtgatatttttttattgccactttttgttcctaaatcaatcatttgctgtggttccagaaagtaactgaggagtgataaaacgacaattttgagcttcaacgctttgctaggttggcaaaaaacttaaagcaacagaggtaagttcgacttatgttaccctgggtacctgtatctatttcaatgtaaggcatatcatttgtaagcctctggtctgaaatacatgtcgccggttagtttagatttgagctaatcgtcaacatgtgttttagatcggatagagtactattttagaaatgtttggaccatacgagcagcctattgtccacaacaacaaaaaaaaacttaaaataggcacaatatggtttgacggtgaatgaatacacaatttcagagcacaaagagcaagtcccaatatatattgcattccccatctctaacaagcatacctttcattgtttgtaacagtgttcaagctaatgttttggtgctagaaaaggctttaatgcatcaggcttgtgttcctgtgttggataatgcttagagaagtttagcagtgataatgcttcactattcgaaaatcagtaaaaagtttagaccatttatgtgacatttttggatagttcctatgttgtgttgcaaccattaactatattaactgtatattttcacatggtgggacagatagaggacttcatagtgttcattcgaataatgttgatgtataagttaactttccacttttcttggttacttaatgaaattaacttttatagatttgtgtctacatagtgttcatgcaaatattgttgtatattatattatatttaagactcttaattagtgtcatttaacaacaataaaaaaaaattacacaatacattgttgatatgagataatcaagtccaaaaaatgtagaattatacgggcgcggcgaagcgcgcctgccatcctagtaataatgctaacaagaagagtcctctctcccttcacgttctgtatgttcttttttgttcttttggaggagcagggcgtctttgtcaatttaatgcaagtaaatcaggagaaagttttgttgattgatattgacaatgatcatattcaaaatcctattggtgatggcttttcagcatttaaatcaactagccccaaatgcatgtgattttttatctgaacagcattagtatatgacaaagtaattatacattatgttgataagcttaaaataattagttacatgttttcgtctatcggtcccgtgcatcgcacgggttttaagctagtctatgaaacaagtgattaacgtggtatgataatttgattcattcctgattctatggatcgtccgttcctatctgtgttattgggatcgattcgtttgccttttccttgaatattacacgattttttactgttattgtcattgttttgtagtcagtttagtgccagaaaaatgatcccgagcatgattttttcggactcagatcagagaagggtttcaccagattttttttagcacaagggcaaagccccccacctccttaataaggcggatttggtggcggcgactgtgaggcgggcgagcgaggtggtcattgggctcgcgccggagaacgctatgatcccgctgttc

SEQ ID NO: 33596 - DNA, 1153 bp, Zea Mays
ctgggtgaagacacagccccatcaatcaatcatagcagaaaagaagtcttcagctgctgaaaaacataaatgaatctgaatgaatacactaagtccaagaacttcacgaaagaagtattgttccatcggttgtcaaggacgacgagcaaaagtctctcttttctacgcctcttgatgtgtgggcgagctcaagtttctctgatccttttacaatcagctgtaaaattcttaaacaaaaattcgggacacctatgaatgcaatatttgacttatttgatttcaaaattattattctttctcactaatcttcaaatgcaagtcgatgcaagtgctcactgaccttgagatgcaagttgatgcagcgatgcaggcgcttattgatcttcacgtggaggacaatgcaaccgcgacgatacacaagtatattattcttcagtaccttggttttgcatgttgatgtcagttttgattaaaaaaagtctatactcgcacaggataaccacatggtccaaacatcaaaaattactttttccaggttcaaagttcaacagatcatgtaacatttaggttttacatttttcctattgtatgttaaaaaataatgaaaatttgaattaaattcttactagccggttaatttactccgttaatccctcattaatgtatgtactgttttcatgctaattaaactttgggagaatttttttccaactgatgtggaaaaatgaccattcaggcatttgagaagggctacccatctgttttatggaatgtcaattgcaatttattcagatgctaattttgcctttgtatgatctttacataatagggtataagaagttcaatcaacattttccctccatgagtgaatgatcgatcaaattgagaagatgactacttcaattgaagatgatcggaagataagtgtttgtgatatttttttattgccactttttgttcctaaatcaatcatttgctgtggttccagaaagtaactgaggagtgataaaacgacaattttgagcttcaacgctttgctaggttggcaaaaaacttaaagcaacagagggcggatttggtggcggcgactgtgaggcgggcgagcgaggtggtcattgggctcgcgccggagaacgctatgatcccgctgttc

SEQ ID NO: 33597 - DNA, 2236 bp, Zea Mays
ctgggtgaagacacagccccatcaatcaatcatagcagaaaagaagtcttcagctgctgaaaaacataaatgaatctgaatgaatacactaagtccaagaacttcacgaaagaagtattgttccatcggttgtcaaggacgacgagcaaaagtctctcttttctacgcctcttgatgtgtgggcgagctcaagtttctctgatccttttacaatcagctgtaaaattcttaaacaaaaattcgggacacctatgaatgcaatatttgacttatttgatttcaaaattattattctttctcactaatcttcaaatgcaagtcgatgcaagtgctcactgaccttgagatgcaagttgatgcagcgatgcaggcgcttattgatcttcacgtggaggacaatgcaaccgcgacgatacacaagtatattattcttcagtaccttggttttgcatgttgatgtcagttttgattaaaaaaagtctatactcgcacaggataaccacatggtccaaacatcaaaaattactttttccaggttcaaagttcaacagatcatgtaacatttaggttttacatttttcctattgtatgttaaaaaataatgaaaatttgaattaaattcttactagccggttaatttactccgttaatccctcattaatgtatgtactgttttcatgctaattaaactttgggagaatttttttccaactgatgtggaaaaatgaccattcaggcatttgagaagggctacccatctgttttatggaatgtcaattgcaatttattcagatgctaattttgcctttgtatgatctttacataatagggtataagaagttcaatcaacattttccctccatgagtgaatgcagatcgatcaaattgagaagatgactacttcaattgaagatgatcggaagataagtgtttgtgatatttttttattgccactttttgttcctaaatcaatcatttgctgtggttccagaaagtaactgaggagtgataaaacgacaattttgagcttcaacgctttgctaggttggcaaaaaacttaaagcaacagagtgttcaagctaatgttttggtgctagaaaaggctttaatgcatcaggcttgtgttcctgtgttggataatgcttagagaagtttagcagtgataatgcttcactattcgaaaatcagtaaaaagtttagaccatttatgtgacatttttggatagttcctatgttgtgttgcaaccattaactatattaactgtatattttcacatggtgggacagatagaggacttcatagtgttcattcgaataatgttgatgtataagttaactttccacttttcttggttacttaatgaaattaacttttatagatttgtgtctacatagtgttcatgcaaatattgttgtatattatattatatttaagactcttaattagtgtcatttaacaacaataaaaaaaaattacacaatacattgttgatatgagataatcaagtccaaaaaatgtagaattatacgggcgcggcgaagcgcgcctgccatcctagtaataatgctaacaagaagagtcctctctcccttcacgttctgtatgttcttttttgttcttttggaggagcagggcgtctttgtcaatttaatgcaagtaaatcaggagaaagttttgttgattgatattgacaatgatcatattcaaaatcctattggtgatggcttttcagcatttaaatcaactagccccaaatgcatgtgattttttatctgaacagcattagtatatgacaaagtaattatacattatgttgataagcttaaaataattagttacatgttttcgtctatcggtcccgtgcatcgcacgggttttaagctagtctatgaaacaagtgattaacgtggtatgataatttgattcattcctgattctatggatcgtccgttcctatctgtgttattgggatcgattcgtttgccttttccttgaatattacacgattttttactgttattgtcattgttttgtagtcagtttagtgccagaaaaatgatcccgagcatgattttttcggactcagatcagagaagggtttcaccagattttttttagcacaagggcaaagccccccacctccttaataaggcggatttggtggcggcgactgtgaggcgggcgagcgaggtggtcattgggctcgcgccggagaacgctatgatcccgctgttc

SEQ ID NO: 33598 - DNA, 1156 bp, Zea Mays
ctgggtgaagacacagccccatcaatcaatcatagcagaaaagaagtcttcagctgctgaaaaacataaatgaatctgaatgaatacactaagtccaagaacttcacgaaagaagtattgttccatcggttgtcaaggacgacgagcaaaagtctctcttttctacgcctcttgatgtgtgggcgagctcaagtttctctgatccttttacaatcagctgtaaaattcttaaacaaaaattcgggacacctatgaatgcaatatttgacttatttgatttcaaaattattattctttctcactaatcttcaaatgcaagtcgatgcaagtgctcactgaccttgagatgcaagttgatgcagcgatgcaggcgcttattgatcttcacgtggaggacaatgcaaccgcgacgatacacaagtatattattcttcagtaccttggttttgcatgttgatgtcagttttgattaaaaaaagtctatactcgcacaggataaccacatggtccaaacatcaaaaattactttttccaggttcaaagttcaacagatcatgtaacatttaggttttacatttttcctattgtatgttaaaaaataatgaaaatttgaattaaattcttactagccggttaatttactccgttaatccctcattaatgtatgtactgttttcatgctaattaaactttgggagaatttttttccaactgatgtggaaaaatgaccattcaggcatttgagaagggctacccatctgttttatggaatgtcaattgcaatttattcagatgctaattttgcctttgtatgatctttacataatagggtataagaagttcaatcaacattttccctccatgagtgaatgcagatcgatcaaattgagaagatgactacttcaattgaagatgatcggaagataagtgtttgtgatatttttttattgccactttttgttcctaaatcaatcatttgctgtggttccagaaagtaactgaggagtgataaaacgacaattttgagcttcaacgctttgctaggttggcaaaaaacttaaagcaacagagggcggatttggtggcggcgactgtgaggcgggcgagcgaggtggtcattgggctcgcgccggagaacgctatgatcccgctgttc

SEQ ID NO: 33599 - DNA, 1058 bp, Zea Mays
ccgacggaaggcccttagcagcgccgccaccaccacgggagatgcgtggagagatgaagcaaaccaagtcaggaagaatagaaatgagggcagaatggaatgaaacaagaacttgtttttttgtgagcttactgaaggagtacaattcaccaagatatcgtgcccaaaatggttggacaaaagaagcatggaacaacatgacacaacgcatcaacgataaatttgaaacaaattttgtggtgacgtaattgaagaacaaatgaccagtgggggccgaataaacttacaaattcataccgaattttgcctggtccactaaagctgcctgcgcccccccccccccccccccccgcatgggctcgtagcccacagacgtcccaggagctggcccaatttatcttcgccatccatttcgattgaatggccacgatttaccgaaatcgcatatataaatgaaaatttcggcatgccctaaccctagcttcattcgcttccgatatttccggagtggtatagggcggatttggtggcggcgactgtgaggcgggcgagcgaggtggtcattgggctcgcgccggagaacgctatgatcccgctgttcgagacggggggcgcgcagctcgagctcatacgggatgccgagattgagccgtgtgcctacgtgaggtgggagcaagggaggccgagaggatccgcttcatgagttggatgcacacgagagacgttggggatcccagcttcccaatgcgggagatccagaagagtcaacggcggatcgatcaagtggattagcactctcccctgtctgcgtgatctgtagaacaaggataagtcggggacgctgttctgctttgccgcgatggaacatgtgttccaatccgagaatttcaggctggggcggttgggatgagggggaagccaatgggagatggatcaaggagatgagcatgggctagacgacttcctggtgaagggcggatttggtggcggcgactgtgaggcgggcgagcgaggtggtcattgggctcgcgccggagaacgctatgatcccgctgttc

SEQ ID NO: 33600 - DNA, 2173 bp, Zea Mays
ccgacggaaggcccttagcagcgccgccaccaccacgggagatgcgtggagagatgaagcaaaccaagtcaggaagaatagaaatgagggcagaatggaatgaaacaagaacttgtttttttgtgagcttactgaaggagtacaattcaccaagatatcgtgcccaaaatggttggacaaaagaagcatggaacaacatgacacaacgcatcaacgataaatttgaaacaaattttgtggtgacgtaattgaagaacaaatgaccagtgggggccgaataaacttacaaattcataccgaattttgcctggtccactaaagctgcctgcgcccccccccccccccccccccgcatgggctcgtagcccacagacgtcccaggagctggcccaatttatcttcgccatccatttcgattgaatggccacgatttaccgaaatcgcatatataaatgaaaatttcggcatgccctaaccctagcttcattcgcttccgatatttccggagtggtatagggcggatttggtggcggcgactgtgaggcgggcgagcgaggtggtcattgggctcgcgccggagaacgctatgatcccgctgttcgagacggggggcgcgcagctcgagctcatacgggatgccgagattgagccgtgtgcctacgtgaggtgggagcaagggaggccgagaggatccgcttcatgagttggatgcacacgagagacgttggggatcccagcttcccaatgcgggagatccagaagagtcaacggcggatcgatcaagtggattagcactctcccctgtctgcgtgatctgtagaacaaggataagtcggggacgctgttctgctttgccgcgatggaacatgtgttccaatccgagaatttcaggctggggcggttgggatgagggggaagccaatgggagatggatcaaggagatgagcatgtatttgttagggttttctccgggattgaaggcactgctgcaggctgaaacgtttctcgcttgattggcggaagaagggattccagcgatctgtttgctgctagctgcgagagttcaatatgtctcggaccttcaaatcgacgacgggtctctctcggcggtttctgaatctgatcgcggccaaccactcccctggcgtcaagtcgctgcaccgcatcggcctgggtcgcatctttaactcaacgccagcgccaataccaaacggagatcgattggagtccgcagcaggacaagaagactacatggtgcggccccgcgcgttggatatcattcggctccccacgccggtaatgagcttccgatcttcagcgtcatttgaaagcaaagaatggaagttggattgcttcccgttttcggactgcaaagttttctgcatggaccagtcagggcgcggtttcctcttcgatgccaactcgtgcggggtgtcaaccgtggcccatctccatacacccaaggcgcttattgatcttcacgtggaggacaatgcaaccgcgacgatacacaagcatttgagaagggctacccatctgttttatggaatgtcaattgcaatttattcagatgctaattttgcctttgtatgatctttacataataggttggtaaaaagcaaggtccatcgattattcgagacttaatgtgcaactatttttacagtttgtcagttatatataaccttttcagggtataagaagttcaatcaacattttccctccatgagtgaatggtaacgtttaacattgcatttataaatcaatactttggggaatagatttattttcaccctcaaactcacaaattgcatttataagtcaacctgttggggaatacttttacttccattcttgaattgacttttcttatcttgtgaacgctacagcagatcgatcaaattgagaagatgactacttcaattgaagatgatcggaagataagtgtttgtgatatttttttattgccactttttgttcctaaatcaatcatttgctgtggttccagaaagtaactgaggagtgataaaacgacaattttgagcttcaacgctttgctaggttggcaaaaaacttaaagcaacagagggcggatttggtggcggcgactgtgaggcgggcgagcgaggtggtcattgggctcgcgccggagaacgctatgatcccgctgttc

SEQ ID NO: 33601 - DNA, 3408 bp, Zea Mays
ctgggtgaagacacagccccatcaatcaatcatagcagaaaagaagtcttcagctgctgaaaaacataaatgaatctgaatgaatacactaagtccaagaacttcacgaaagaagtattgttccatcggttgtcaaggacgacgagcaaaagtctctcttttctacgcctcttgatgtgtgggcgagctcaagtttctctgatccttttacaatcagctgtaaaattcttaaacaaaaattcgggacacctatgaatgcaatatttgacttatttgatttcaaaattattattctttctcactaatcttcaaatgcaagtcgatgcaagtgctcactgaccttgagatgcaagttgatgcagcgatgcaggcgcttattgatcttcacgtggaggacaatgcaaccgcgacgatacacaagtatattattcttcagtaccttggttttgcatgttgatgtcagttttgattaaaaaaagtctatactcgcacaggataaccacatggtccaaacatcaaaaattactttttccaggttcaaagttcaacagatcatgtaacatttaggttttacatttttcctattgtatgttaaaaaataatgaaaatttgaattaaattcttactagccggttaatttactccgttaatccctcattaatgtatgtactgttttcatgctaattaaactttgggagaatttttttccaactgatgtggaaaaatgaccattcaggcatttgagaagggctacccatctgttttatggaatgtcaattgcaatttattcagatgctaattttgcctttgtatgatctttacataatagggtataagaagttcaatcaacattttccctccatgagtgaatgatcgatcaaattgagaagatgactacttcaattgaagatgatcggaagataagtgtttgtgatatttttttattgccactttttgttcctaaatcaatcatttgctgtggttccagaaagtaactgaggagtgataaaacgacaattttgagcttcaacgctttgctaggttggcaaaaaacttaaagcaacagagtgttcaagctaatgttttggtgctagaaaaggctttaatgcatcaggcttgtgttcctgtgttggataatgcttagagaagtttagcagtgataatgcttcactattcgaaaatcagtaaaaagtttagaccatttatgtgacatttttggatagttcctatgttgtgttgcaaccattaactatattaactgtatattttcacatggtgggacagatagaggacttcatagtgttcattcgaataatgttgatgtataagttaactttccacttttcttggttacttaatgaaattaacttttatagatttgtgtctacatagtgttcatgcaaatattgttgtatattatattatatttaagactcttaattagtgtcatttaacaacaataaaaaaaaattacacaatacattgttgatatgagataatcaagtccaaaaaatgtagaattatacgggcgcggcgaagcgcgcctgccatcctagtaataatgctaacaagaagagtcctctctcccttcacgttctgtatgttcttttttgttcttttggaggagcagggcgtctttgtcaatttaatgcaagtaaatcaggagaaagttttgttgattgatattgacaatgatcatattcaaaatcctattggtgatggcttttcagcatttaaatcaactagccccaaatgcatgtgattttttatctgaacagcattagtatatgacaaagtaattatacattatgttgataagcttaaaataattagttacatgttttcgtctatcggtcccgtgcatcgcacgggttttaagctagtctatgaaacaagtgattaacgtggtatgataatttgattcattcctgattctatggatcgtccgttcctatctgtgttattgggatcgattcgtttgccttttccttgaatattacacgattttttactgttattgtcattgttttgtagtcagtttagtgccagaaaaatgatcccgagcatgattttttcggactcagatcagagaagggtttcaccagattttttttagcacaagggcaaagccccccacctccttaataagtgagtcaccttacaaagtataagggtttgaccagataatttcatttctttacgaatccctgaaataaacaataaaaatacaatcactattgcataaaaattgatagtgatccagtcataaagaaatgacactgcattttatgtttgaacgtcttactcatataggggtggctaaggagtgagattagttaattaaaactcatgtattttctatattttgaattaaaatttaaatttgaattcaaatataaaatatttggtgaattttctaggaatattgactaaatttaaattcgaattcagctcttagacctttgaagttctgagagcagaattcgaatttaaattttagttcaaaatacataccaaactagcaaaagtgttcaaaagtaaaattgtaatgaatagttctatcagtcaacaaggaccagatatttagttaaaaaaattgataggacccacttgtcagcctcttcacaacgccacataggatgccacctaggcgaaactgcctgcaaaatcgtctgagggatcaaaatcagacggttttgaaagttaaaaaactagtagttgtacctggttttgtgcagcagacacaaaaatagattcgcacaacacttaagaggaccaaaagagtactttttcccatagaactagttgtgagcctgtgcgttgcaacaggaaaatagatattgaacgaaaaggttcatcaaacatgtataatattagaataataagatacataattttaatattaaataatattttaacacattatgtaaatattatagtataatataatataaaatcatcattgggcaaaaataaagcaatatttcttctatattaattgcctttgaaaacataaactctttgtgtattaaaatttattcaatcataatctattagcaaattaacccacttaagtagtgtttttgttaaatacacatatctatagtgtccaacggcaaatagcgtacttgaaggacctctacgagcaaattttgccttcgtacaatattattgaccagcaataattaattaatgttgaaaattagttaacactaatttatttatattttatgaaagttaaagaaagattaagcatgtttcaacccaatgattaatgcacataattattcaattttatgctgcacaaaataattaaaaactaaaaagaaaaacaaatgaccagtgggggccgaataaacttacaaattcataccgaattttgcctggtccactaaagctgcctgcccc

SEQ ID NO: 33602 - DNA, 3495 bp, Zea Mays
ctgggtgaagacacagccccatcaatcaatcatagcagaaaagaagtcttcagctgctgaaaaacataaatgaatctgaatgaatacactaagtccaagaacttcacgaaagaagtattgttccatcggttgtcaaggacgacgagcaaaagtctctcttttctacgcctcttgatgtgtgggcgagctcaagtttctctgatccttttacaatcagctgtaaaattcttaaacaaaaattcgggacacctatgaatgcaatatttgacttatttgatttcaaaattattattctttctcactaatcttcaaatgcaagtcgatgcaagtgctcactgaccttgagatgcaagttgatgcagcgatgcaggcgcttattgatcttcacgtggaggacaatgcaaccgcgacgatacacaagtatattattcttcagtaccttggttttgcatgttgatgtcagttttgattaaaaaaagtctatactcgcacaggataaccacatggtccaaacatcaaaaattactttttccaggttcaaagttcaacagatcatgtaacatttaggttttacatttttcctattgtatgttaaaaaataatgaaaatttgaattaaattcttactagccggttaatttactccgttaatccctcattaatgtatgtactgttttcatgctaattaaactttgggagaatttttttccaactgatgtggaaaaatgaccattcaggcatttgagaagggctacccatctgttttatggaatgtcaattgcaatttattcagatgctaattttgcctttgtatgatctttacataataggttggtaaaaagcaaggtccatcgattattcgagacttaatgtgcaactatttttacagtttgtcagttatatataaccttttcagggtataagaagttcaatcaacattttccctccatgagtgaatgcagatcgatcaaattgagaagatgactacttcaattgaagatgatcggaagataagtgtttgtgatatttttttattgccactttttgttcctaaatcaatcatttgctgtggttccagaaagtaactgaggagtgataaaacgacaattttgagcttcaacgctttgctaggttggcaaaaaacttaaagcaacagtgttcaagctaatgttttggtgctagaaaaggctttaatgcatcaggcttgtgttcctgtgttggataatgcttagagaagtttagcagtgataatgcttcactattcgaaaatcagtaaaaagtttagaccatttatgtgacatttttggatagttcctatgttgtgttgcaaccattaactatattaactgtatattttcacatggtgggacagatagaggacttcatagtgttcattcgaataatgttgatgtataagttaactttccacttttcttggttacttaatgaaattaacttttatagatttgtgtctacatagtgttcatgcaaatattgttgtatattatattatatttaagactcttaattagtgtcatttaacaacaataaaaaaaaattacacaatacattgttgatatgagataatcaagtccaaaaaatgtagaattatacgggcgcggcgaagcgcgcctgccatcctagtaataatgctaacaagaagagtcctctctcccttcacgttctgtatgttcttttttgttcttttggaggagcagggcgtctttgtcaatttaatgcaagtaaatcaggagaaagttttgttgattgatattgacaatgatcatattcaaaatcctattggtgatggcttttcagcatttaaatcaactagccccaaatgcatgtgattttttatctgaacagcattagtatatgacaaagtaattatacattatgttgataagcttaaaataattagttacatgttttcgtctatcggtcccgtgcatcgcacgggttttaagctagtctatgaaacaagtgattaacgtggtatgataatttgattcattcctgattctatggatcgtccgttcctatctgtgttattgggatcgattcgtttgccttttccttgaatattacacgattttttactgttattgtcattgttttgtagtcagtttagtgccagaaaaatgatcccgagcatgattttttcggactcagatcagagaagggtttcaccagattttttttagcacaagggcaaagccccccacctccttaataagtgagtcaccttacaaagtataagggtttgaccagataatttcatttctttacgaatccctgaaataaacaataaaaatacaatcactattgcataaaaattgatagtgatccagtcataaagaaatgacactgcattttatgtttgaacgtcttactcatataggggtggctaaggagtgagattagttaattaaaactcatgtattttctatattttgaattaaaatttaaatttgaattcaaatataaaatatttggtgaattttctaggaatattgactaaatttaaattcgaattcagctcttagacctttgaagttctgagagcagaattcgaatttaaattttagttcaaaatacataccaaactagcaaaagtgttcaaaagtaaaattgtaatgaatagttctatcagtcaacaaggaccagatatttagttaaaaaaattgataggacccacttgtcagcctcttcacaacgccacataggatgccacctaggcgaaactgcctgcaaaatcgtctgagggatcaaaatcagacggttttgaaagttaaaaaactagtagttgtacctggttttgtgcagcagacacaaaaatagattcgcacaacacttaagaggaccaaaagagtactttttcccatagaactagttgtgagcctgtgcgttgcaacaggaaaatagatattgaacgaaaaggttcatcaaacatgtataatattagaataataagatacataattttaatattaaataatattttaacacattatgtaaatattatagtataatataatataaaatcatcattgggcaaaaataaagcaatatttcttctatattaattgcctttgaaaacataaactctttgtgtattaaaatttattcaatcataatctattagcaaattaacccacttaagtagtgtttttgttaaatacacatatctatagtgtccaacggcaaatagcgtacttgaaggacctctacgagcaaattttgccttcgtacaatattattgaccagcaataattaattaatgttgaaaattagttaacactaatttatttatattttatgaaagttaaagaaagattaagcatgtttcaacccaatgattaatgcacataattattcaattttatgctgcacaaaataattaaaaactaaaaagaaaaacaaatgaccagtgggggccgaataaacttacaaattcataccgaattttgcctggtccactaaagctgcctgcccc

SEQ ID NO: 33603 - DNA, 3330 bp, Zea Mays
ctgggtgaagacacagccccatcaatcaatcatagcagaaaagaagtcttcagctgctgaaaaacataaatgaatctgaatgaatacactaagtccaagaacttcacgaaagaagtattgttccatcggttgtcaaggacgacgagcaaaagtctctcttttctacgcctcttgatgtgtgggcgagctcaagtttctctgatccttttacaatcagctgtaaaattcttaaacaaaaattcgggacacctatgaatgcaatatttgacttatttgatttcaaaattattattctttctcactaatcttcaaatgcaagtcgatgcaagtgctcactgaccttgagatgcaagttgatgcagcgatgcaggcgcttattgatcttcacgtggaggacaatgcaaccgcgacgatacacaaggtataagaagttcaatcaacattttccctccatgagtgaatgcagatcgatcaaattgagaagatgactacttcaattgaagatgatcggaagataagtgtttgtgatatttttttattgccactttttgttcctaaatcaatcatttgctgtggttccagaaagtaactgaggagtgataaaacgacaattttgagcttcaacgctttgctaggttggcaaaaaacttaaagcaacagaggtaagttcgacttatgttaccctgggtacctgtatctatttcaatgtaaggcatatcatttgtaagcctctggtctgaaatacatgtcgccggttagtttagatttgagctaatcgtcaacatgtgttttagatcggatagagtactattttagaaatgtttggaccatacgagcagcctattgtccacaacaacaaaaaaaaacttaaaataggcacaatatggtttgacggtgaatgaatacacaatttcagagcacaaagagcaagtcccaatatatattgcattccccatctctaacaagcatacctttcattgtttgtaacagtgttcaagctaatgttttggtgctagaaaaggctttaatgcatcaggcttgtgttcctgtgttggataatgcttagagaagtttagcagtgataatgcttcactattcgaaaatcagtaaaaagtttagaccatttatgtgacatttttggatagttcctatgttgtgttgcaaccattaactatattaactgtatattttcacatggtgggacagatagaggacttcatagtgttcattcgaataatgttgatgtataagttaactttccacttttcttggttacttaatgaaattaacttttatagatttgtgtctacatagtgttcatgcaaatattgttgtatattatattatatttaagactcttaattagtgtcatttaacaacaataaaaaaaaattacacaatacattgttgatatgagataatcaagtccaaaaaatgtagaattatacgggcgcggcgaagcgcgcctgccatcctagtaataatgctaacaagaagagtcctctctcccttcacgttctgtatgttcttttttgttcttttggaggagcagggcgtctttgtcaatttaatgcaagtaaatcaggagaaagttttgttgattgatattgacaatgatcatattcaaaatcctattggtgatggcttttcagcatttaaatcaactagccccaaatgcatgtgattttttatctgaacagcattagtatatgacaaagtaattatacattatgttgataagcttaaaataattagttacatgttttcgtctatcggtcccgtgcatcgcacgggttttaagctagtctatgaaacaagtgattaacgtggtatgataatttgattcattcctgattctatggatcgtccgttcctatctgtgttattgggatcgattcgtttgccttttccttgaatattacacgattttttactgttattgtcattgttttgtagtcagtttagtgccagaaaaatgatcccgagcatgattttttcggactcagatcagagaagggtttcaccagattttttttagcacaagggcaaagccccccacctccttaataagtgagtcaccttacaaagtataagggtttgaccagataatttcatttctttacgaatccctgaaataaacaataaaaatacaatcactattgcataaaaattgatagtgatccagtcataaagaaatgacactgcattttatgtttgaacgtcttactcatataggggtggctaaggagtgagattagttaattaaaactcatgtattttctatattttgaattaaaatttaaatttgaattcaaatataaaatatttggtgaattttctaggaatattgactaaatttaaattcgaattcagctcttagacctttgaagttctgagagcagaattcgaatttaaattttagttcaaaatacataccaaactagcaaaagtgttcaaaagtaaaattgtaatgaatagttctatcagtcaacaaggaccagatatttagttaaaaaaattgataggacccacttgtcagcctcttcacaacgccacataggatgccacctaggcgaaactgcctgcaaaatcgtctgagggatcaaaatcagacggttttgaaagttaaaaaactagtagttgtacctggttttgtgcagcagacacaaaaatagattcgcacaacacttaagaggaccaaaagagtactttttcccatagaactagttgtgagcctgtgcgttgcaacaggaaaatagatattgaacgaaaaggttcatcaaacatgtataatattagaataataagatacataattttaatattaaataatattttaacacattatgtaaatattatagtataatataatataaaatcatcattgggcaaaaataaagcaatatttcttctatattaattgcctttgaaaacataaactctttgtgtattaaaatttattcaatcataatctattagcaaattaacccacttaagtagtgtttttgttaaatacacatatctatagtgtccaacggcaaatagcgtacttgaaggacctctacgagcaaattttgccttcgtacaatattattgaccagcaataattaattaatgttgaaaattagttaacactaatttatttatattttatgaaagttaaagaaagattaagcatgtttcaacccaatgattaatgcacataattattcaattttatgctgcacaaaataattaaaaactaaaaagaaaaacaaatgaccagtgggggccgaataaacttacaaattcataccgaattttgcctggtccactaaagctgcctgcccc

SEQ ID NO: 33604 - DNA, 2481 bp, Zea Mays
ctgggtgaagacacagccccatcaatcaatcatagcagaaaagaagtcttcagctgctgaaaaacataaatgaatctgaatgaatacactaagtccaagaacttcacgaaagaagtattgttccatcggttgtcaaggacgacgagcaaaagtctctcttttctacgcctcttgatgtgtgggcgagctcaagtttctctgatccttttacaatcagctgtaaaattcttaaacaaaaattcgggacacctatgaatgcaatatttgacttatttgatttcaaaattattattctttctcactaatcttcaaatgcaagtcgatgcaagtgctcactgaccttgagatgcaagttgatgcagcgatgcaggcgcttattgatcttcacgtggaggacaatgcaaccgcgacgatacacaagtatattattcttcagtaccttggttttgcatgttgatgtcagttttgattaaaaaaagtctatactcgcacaggataaccacatggtccaaacatcaaaaattactttttccaggttcaaagttcaacagatcatgtaacatttaggttttacatttttcctattgtatgttaaaaaataatgaaaatttgaattaaattcttactagccggttaatttactccgttaatccctcattaatgtatgtactgttttcatgctaattaaactttgggagaatttttttccaactgatgtggaaaaatgaccattcaggcatttgagaagggctacccatctgttttatggaatgtcaattgcaatttattcagatgctaattttgcctttgtatgatctttacataataggttggtaaaaagcaaggtccatcgattattcgagacttaatgtgcaactatttttacagtttgtcagttatatataaccttttcagggtataagaagttcaatcaacattttccctccatgagtgaatgcagatcgatcaaattgagaagatgactacttcaattgaagatgatcggaagataagtgtttgtgatatttttttattgccactttttgttcctaaatcaatcatttgctgtggttccagaaagtaactgaggagtgataaaacgacaattttgagcttcaacgctttgctaggttggcaaaaaacttaaagcaacagagatcagagaagggtttcaccagattttttttagcacaagggcaaagccccccacctccttaataagtgagtcaccttacaaagtataagggtttgaccagataatttcatttctttacgaatccctgaaataaacaataaaaatacaatcactattgcataaaaattgatagtgatccagtcataaagaaatgacactgcattttatgtttgaacgtcttactcatataggggtggctaaggagtgagattagttaattaaaactcatgtattttctatattttgaattaaaatttaaatttgaattcaaatataaaatatttggtgaattttctaggaatattgactaaatttaaattcgaattcagctcttagacctttgaagttctgagagcagaattcgaatttaaattttagttcaaaatacataccaaactagcaaaagtgttcaaaagtaaaattgtaatgaatagttctatcagtcaacaaggaccagatatttagttaaaaaaattgataggacccacttgtcagcctcttcacaacgccacataggatgccacctaggcgaaactgcctgcaaaatcgtctgagggatcaaaatcagacggttttgaaagttaaaaaactagtagttgtacctggttttgtgcagcagacacaaaaatagattcgcacaacacttaagaggaccaaaagagtactttttcccatagaactagttgtgagcctgtgcgttgcaacaggaaaatagatattgaacgaaaaggttcatcaaacatgtataatattagaataataagatacataattttaatattaaataatattttaacacattatgtaaatattatagtataatataatataaaatcatcattgggcaaaaataaagcaatatttcttctatattaattgcctttgaaaacataaactctttgtgtattaaaatttattcaatcataatctattagcaaattaacccacttaagtagtgtttttgttaaatacacatatctatagtgtccaacggcaaatagcgtacttgaaggacctctacgagcaaattttgccttcgtacaatattattgaccagcaataattaattaatgttgaaaattagttaacactaatttatttatattttatgaaagttaaagaaagattaagcatgtttcaacccaatgattaatgcacataattattcaattttatgctgcacaaaataattaaaaactaaaaagaaaaacaaatgaccagtgggggccgaataaacttacaaattcataccgaattttgcctggtccactaaagctgcctgcccc

SEQ ID NO: 33605 - DNA, 3739 bp, Zea Mays
ctgggtgaagacacagccccatcaatcaatcatagcagaaaagaagtcttcagctgctgaaaaacataaatgaatctgaatgaatacactaagtccaagaacttcacgaaagaagtattgttccatcggttgtcaaggacgacgagcaaaagtctctcttttctacgcctcttgatgtgtgggcgagctcaagtttctctgatccttttacaatcagctgtaaaattcttaaacaaaaattcgggacacctatgaatgcaatatttgacttatttgatttcaaaattattattctttctcactaatcttcaaatgcaagtcgatgcaagtgctcactgaccttgagatgcaagttgatgcagcgatgcaggcgcttattgatcttcacgtggaggacaatgcaaccgcgacgatacacaagtatattattcttcagtaccttggttttgcatgttgatgtcagttttgattaaaaaaagtctatactcgcacaggataaccacatggtccaaacatcaaaaattactttttccaggttcaaagttcaacagatcatgtaacatttaggttttacatttttcctattgtatgttaaaaaataatgaaaatttgaattaaattcttactagccggttaatttactccgttaatccctcattaatgtatgtactgttttcatgctaattaaactttgggagaatttttttccaactgatgtggaaaaatgaccattcaggcatttgagaagggctacccatctgttttatggaatgtcaattgcaatttattcagatgctaattttgcctttgtatgatctttacataatagggtataagaagttcaatcaacattttccctccatgagtgaatgcagatcgatcaaattgagaagatgactacttcaattgaagatgatcggaagataagtgtttgtgatatttttttattgccactttttgttcctaaatcaatcatttgctgtggttccagaaagtaactgaggagtgataaaacgacaattttgagcttcaacgctttgctaggttggcaaaaaacttaaagcaacagaggtaagttcgacttatgttaccctgggtacctgtatctatttcaatgtaaggcatatcatttgtaagcctctggtctgaaatacatgtcgccggttagtttagatttgagctaatcgtcaacatgtgttttagatcggatagagtactattttagaaatgtttggaccatacgagcagcctattgtccacaacaacaaaaaaaaacttaaaataggcacaatatggtttgacggtgaatgaatacacaatttcagagcacaaagagcaagtcccaatatatattgcattccccatctctaacaagcatacctttcattgtttgtaacagtgttcaagctaatgttttggtgctagaaaaggctttaatgcatcaggcttgtgttcctgtgttggataatgcttagagaagtttagcagtgataatgcttcactattcgaaaatcagtaaaaagtttagaccatttatgtgacatttttggatagttcctatgttgtgttgcaaccattaactatattaactgtatattttcacatggtgggacagatagaggacttcatagtgttcattcgaataatgttgatgtataagttaactttccacttttcttggttacttaatgaaattaacttttatagatttgtgtctacatagtgttcatgcaaatattgttgtatattatattatatttaagactcttaattagtgtcatttaacaacaataaaaaaaaattacacaatacattgttgatatgagataatcaagtccaaaaaatgtagaattatacgggcgcggcgaagcgcgcctgccatcctagtaataatgctaacaagaagagtcctctctcccttcacgttctgtatgttcttttttgttcttttggaggagcagggcgtctttgtcaatttaatgcaagtaaatcaggagaaagttttgttgattgatattgacaatgatcatattcaaaatcctattggtgatggcttttcagcatttaaatcaactagccccaaatgcatgtgattttttatctgaacagcattagtatatgacaaagtaattatacattatgttgataagcttaaaataattagttacatgttttcgtctatcggtcccgtgcatcgcacgggttttaagctagtctatgaaacaagtgattaacgtggtatgataatttgattcattcctgattctatggatcgtccgttcctatctgtgttattgggatcgattcgtttgccttttccttgaatattacacgattttttactgttattgtcattgttttgtagtcagtttagtgccagaaaaatgatcccgagcatgattttttcggactcagatcagagaagggtttcaccagattttttttagcacaagggcaaagccccccacctccttaataagtgagtcaccttacaaagtataagggtttgaccagataatttcatttctttacgaatccctgaaataaacaataaaaatacaatcactattgcataaaaattgatagtgatccagtcataaagaaatgacactgcattttatgtttgaacgtcttactcatataggggtggctaaggagtgagattagttaattaaaactcatgtattttctatattttgaattaaaatttaaatttgaattcaaatataaaatatttggtgaattttctaggaatattgactaaatttaaattcgaattcagctcttagacctttgaagttctgagagcagaattcgaatttaaattttagttcaaaatacataccaaactagcaaaagtgttcaaaagtaaaattgtaatgaatagttctatcagtcaacaaggaccagatatttagttaaaaaaattgataggacccacttgtcagcctcttcacaacgccacataggatgccacctaggcgaaactgcctgcaaaatcgtctgagggatcaaaatcagacggttttgaaagttaaaaaactagtagttgtacctggttttgtgcagcagacacaaaaatagattcgcacaacacttaagaggaccaaaagagtactttttcccatagaactagttgtgagcctgtgcgttgcaacaggaaaatagatattgaacgaaaaggttcatcaaacatgtataatattagaataataagatacataattttaatattaaataatattttaacacattatgtaaatattatagtataatataatataaaatcatcattgggcaaaaataaagcaatatttcttctatattaattgcctttgaaaacataaactctttgtgtattaaaatttattcaatcataatctattagcaaattaacccacttaagtagtgtttttgttaaatacacatatctatagtgtccaacggcaaatagcgtacttgaaggacctctacgagcaaattttgccttcgtacaatattattgaccagcaataattaattaatgttgaaaattagttaacactaatttatttatattttatgaaagttaaagaaagattaagcatgtttcaacccaatgattaatgcacataattattcaattttatgctgcacaaaataattaaaaactaaaaagaaaaacaaatgaccagtgggggccgaataaacttacaaattcataccgaattttgcctggtccactaaagctgcctgcccc

SEQ ID NO: 33606 - DNA, 2129 bp, Zea Mays
ctgggtgaagacacagccccatcaatcaatcatagcagaaaagaagtcttcagctgctgaaaaacataaatgaatctgaatgaatacactaagtccaagaacttcacgaaagaagtattgttccatcggttgtcaaggacgacgagcaaaagtctctcttttctacgcctcttgatgtgtgggcgagctcaagtttctctgatccttttacaatcagctgtaaaattcttaaacaaaaattcgggacacctatgaatgcaatatttgacttatttgatttcaaaattattattctttctcactaatcttcaaatgcaagtcgatgcaagtgctcactgaccttgagatgcaagttgatgcagcgatgcaggcgcttattgatcttcacgtggaggacaatgcaaccgcgacgatacacaagcatttgagaagggctacccatctgttttatggaatgtcaattgcaatttattcagatgctaattttgcctttgtatgatctttacataatagggtataagaagttcaatcaacattttccctccatgagtgaatgcagatcgatcaaattgagaagatgactacttcaattgaagatgatcggaagataagtgtttgtgatatttttttattgccactttttgttcctaaatcaatcatttgctgtggttccagaaagtaactgaggagtgataaaacgacaattttgagcttcaacgctttgctaggttggcaaaaaacttaaagcaacagagtcagtttagtgccagaaaaatgatcccgagcatgattttttcggactcagatcagagaagggtttcaccagattttttttagcacaagggcaaagccccccacctccttaataagtgagtcaccttacaaagtataagggtttgaccagataatttcatttctttacgaatccctgaaataaacaataaaaatacaatcactattgcataaaaattgatagtgatccagtcataaagaaatgacactgcattttatgtttgaacgtcttactcatataggggtggctaaggagtgagattagttaattaaaactcatgtattttctatattttgaattaaaatttaaatttgaattcaaatataaaatatttggtgaattttctaggaatattgactaaatttaaattcgaattcagctcttagacctttgaagttctgagagcagaattcgaatttaaattttagttcaaaatacataccaaactagcaaaagtgttcaaaagtaaaattgtaatgaatagttctatcagtcaacaaggaccagatatttagttaaaaaaattgataggacccacttgtcagcctcttcacaacgccacataggatgccacctaggcgaaactgcctgcaaaatcgtctgagggatcaaaatcagacggttttgaaagttaaaaaactagtagttgtacctggttttgtgcagcagacacaaaaatagattcgcacaacacttaagaggaccaaaagagtactttttcccatagaactagttgtgagcctgtgcgttgcaacaggaaaatagatattgaacgaaaaggttcatcaaacatgtataatattagaataataagatacataattttaatattaaataatattttaacacattatgtaaatattatagtataatataatataaaatcatcattgggcaaaaataaagcaatatttcttctatattaattgcctttgaaaacataaactctttgtgtattaaaatttattcaatcataatctattagcaaattaacccacttaagtagtgtttttgttaaatacacatatctatagtgtccaacggcaaatagcgtacttgaaggacctctacgagcaaattttgccttcgtacaatattattgaccagcaataattaattaatgttgaaaattagttaacactaatttatttatattttatgaaagttaaagaaagattaagcatgtttcaacccaatgattaatgcacataattattcaattttatgctgcacaaaataattaaaaactaaaaagaaaaacaaatgaccagtgggggccgaataaacttacaaattcataccgaattttgcctggtccactaaagctgcctgcccc

SEQ ID NO: 33607 - DNA, 5210 bp, Zea Mays
ccgacggaaggcccttagcagcgccgccaccaccacgggagatgcgtggagagatgaagcaaaccaagtcaggaagaatagaaatgagggcagaatggaatgaaacaagaacttgtttttttgtgagcttactgaaggagtacaattcaccaagatatcgtgcccaaaatggttggacaaaagaagcatggaacaacatgacacaacgcatcaacgataaatttgaaacaaattttgtggtgacgtaattgaagaacaaatgaccagtgggggccgaataaacttacaaattcataccgaattttgcctggtccactaaagctgcctgcgcccccccccccccccccccccgcatgggctcgtagcccacagacgtcccaggagctggcccaatttatcttcgccatccatttcgattgaatggccacgatttaccgaaatcgcatatataaatgaaaatttcggcatgccctaaccctagcttcattcgcttccgatatttccggagtggtatagggcggatttggtggcggcgactgtgaggcgggcgagcgaggtggtcattgggctcgcgccggagaacgctatgatcccgctgttcgagacggggggcgcgcagctcgagctcatacgggatgccgagattgagccgtgtgcctacgtgaggtgggagcaagggaggccgagaggatccgcttcatgagttggatgcacacgagagacgttggggatcccagcttcccaatgcgggagatccagaagagtcaacggcggatcgatcaagtggattagcactctcccctgtctgcgtgatctgtagaacaaggataagtcggggacgctgttctgctttgccgcgatggaacatgtgttccaatccgagaatttcaggctggggcggttgggatgagggggaagccaatgggagatggatcaaggagatgagcatgggctagacgacttcctggtgaaggtagcttcaacagaccataactttcatgacgcttcaacccgctgcaatgaagacggcgatgaacacaatttcaacataacatataacggtgaagggtttagtagatgaatataataggggatgtatgtgacaaatagaagagttctcaccaaaggcaaatgaacaaaaccgaaaagaaaaggaacatcgtatgtaatttatagtgaaacaaaatatatgtaaagaataaagagggacgtgaggcgttgtgagagcggcaagatccgattaaaaaattgccataaccgagtgaattcgagtgaggtggggggtgtggaaagcgtgaaatctggttggcaggccctattgtcagagtgtgcattaaaatcggatcaggtggtctggcaccggttcaggagaaaccggttgcgtgggaacgtgggtggactggcaccgggtcaggagtaaaaccggtcgcgtggtggcgtcagttggcgggtggacgcgcgcttcgcactgggacgcacgacgggacgacaagtgacgctttaaaggagtaaagagattgacggacctaagcaactgcataaccatttcgaggcctattttgagaagcccacagacggaagattacgtctccttgtcacggcccaaatagagcatacaagaactcatcagaatctccccgccgccatgcggatctgcagtaccttcatcctgtttgatccaaagccgactccttttcttcctctaatccttctttctggcagtatttgttagggttttctccgggattgaaggcactgctgcaggctgaaacgtttctcgcttgattggcggaagaagggattccagcgatctgtttgctgctagctgcgagagttcaatatgtctcggaccttcaaatcgacgacgggtctctctcggcggtttctgaatctgatcgcggccaaccactcccctggcgtcaagtcgctgcaccgcatcggcctgggtcgcatctttaactcaacgccagcgccaataccaaacggagatcgattggagtccgcagcaggacaagaagactacatggtgcggccccgcgcgttggatatcattcggctccccacgccgtcagggcgcggtttcctcttcgatgccaactcgtgcggggtgtcaaccgtggcccatctccatacacccaagttgatgcagcgatgcaggcgcttattgatcttcacgtggaggacaatgcaaccgcgacgatacacaagataaccacatggtccaaacatcaaaaattactttttccaggttcaaagttcaacagatcatgtaacatttaggttttacatttttcctattgtatgttaaaaaataatgaaaatttgaattaaattcttactagccggttaatttactccgttaatccctcattaatgtatgtactgttttcatgctaattaaactttgggagaatttttttccaactgatgtggaaaaatgaccattcaggcatttgagaagggctacccatctgttttatggaatgtcaattgcaatttattcagatgctaattttgcctttgtatgatctttacataataggttggtaaaaagcaaggtccatcgattattcgagacttaatgtgcaactatttttacagtttgtcagttatatataaccttttcagggtataagaagttcaatcaacattttccctccatgagtgaatgcagatcgatcaaattgagaagatgactacttcaattgaagatgatcggaagataagtgtttgtgatatttttttattgccactttttgttcctaaatcaatcatttgctgtggttccagaaagtaactgaggagtgataaaacgacaattttgagcttcaacgctttgctaggttggcaaaaaacttaaagcaacagagtgttcaagctaatgttttggtgctagaaaaggctttaatgcatcaggcttgtgttcctgtgttggataatgcttagagaagtttagcagtgataatgcttcactattcgaaaatcagtaaaaagtttagaccatttatgtgacatttttggatagttcctatgttgtgttgcaaccattaactatattaactgtatattttcacatggtgggacagatagaggacttcatagtgttcattcgaataatgttgatgtataagttaactttccacttttcttggttacttaatgaaattaacttttatagatttgtgtctacatagtgttcatgcaaatattgttgtatattatattatatttaagactcttaattagtgtcatttaacaacaataaaaaaaaattacacaatacattgttgatatgagataatcaagtccaaaaaatgtagaattatacgggcgcggcgaagcgcgcctgccatcctagtaataatgctaacaagaagagtcctctctcccttcacgttctgtatgttcttttttgttcttttggaggagcagggcgtctttgtcaatttaatgcaagtaaatcaggagaaagttttgttgattgatattgacaatgatcatattcaaaatcctattggtgatggcttttcagcatttaaatcaactagccccaaatgcatgtgattttttatctgaacagcattagtatatgacaaagtaattatacattatgttgataagcttaaaataattagttacatgttttcgtctatcggtcccgtgcatcgcacgggttttaagctagtctatgaaacaagtgattaacgtggtatgataatttgattcattcctgattctatggatcgtccgttcctatctgtgttattgggatcgattcgtttgccttttccttgaatattacacgattttttactgttattgtcattgttttgtagtcagtttagtgccagaaaaatgatcccgagcatgattttttcggactcagatcagagaagggtttcaccagattttttttagcacaagggcaaagccccccacctccttaataagtgagtcaccttacaaagtataagggtttgaccagataatttcatttctttacgaatccctgaaataaacaataaaaatacaatcactattgcataaaaattgatagtgatccagtcataaagaaatgacactgcattttatgtttgaacgtcttactcatataggggtggctaaggagtgagattagttaattaaaactcatgtattttctatattttgaattaaaatttaaatttgaattcaaatataaaatatttggtgaattttctaggaatattgactaaatttaaattcgaattcagctcttagacctttgaagttctgagagcagaattcgaatttaaattttagttcaaaatacataccaaactagcaaaagtgttcaaaagtaaaattgtaatgaatagttctatcagtcaacaaggaccagatatttagttaaaaaaattgataggacccacttgtcagcctcttcacaacgccacataggatgccacctaggcgaaactgcctgcaaaatcgtctgagggatcaaaatcagacggttttgaaagttaaaaaactagtagttgtacctggttttgtgcagcagacacaaaaatagattcgcacaacacttaagaggaccaaaagagtactttttcccatagaactagttgtgagcctgtgcgttgcaacaggaaaatagatattgaacgaaaaggttcatcaaacatgtataatattagaataataagatacataattttaatattaaataatattttaacacattatgtaaatattatagtataatataatataaaatcatcattgggcaaaaataaagcaatatttcttctatattaattgcctttgaaaacataaactctttgtgtattaaaatttattcaatcataatctattagcaaattaacccacttaagtagtgtttttgttaaatacacatatctatagtgtccaacggcaaatagcgtacttgaaggacctctacgagcaaattttgccttcgtacaatattattgaccagcaataattaattaatgttgaaaattagttaacactaatttatttatattttatgaaagttaaagaaagattaagcatgtttcaacccaatgattaatgcacataattattcaattttatgctgcacaaaataattaaaaactaaaaagaaaaacaaatgaccagtgggggccgaataaacttacaaattcataccgaattttgcctggtccactaaagctgcctgcccc

SEQ ID NO: 33608 - DNA, 2226 bp, Zea Mays
cttgctttgaaccaatcctccagcggggtacagtgtcgagcagggatgccaatattcatgctgcggccgctgcatatatgatagttatacattaataagtaaaaagaagatttaaatgcaaattatgagtaataaggataaaaaacacacattaaggtataggagtcacaactgactgtactgaacctcctagtaaaccgcctcgacgccctcacaattgcaaaaaggcccattttctgcaataagctatccatcagactaatatacaacttcattaaaaagaaccaatatagggacatcatccaaaaacgtacaaaatttacaaaagcagggacaacaataaatcttccatattaacagaaaactgctaaactaaaagaatgatatcataacaagggctaactcattgtgtaaccgtggtgtttaccacacaaatttttttaatttcattctcgtcattacataatacaagcagaatggaggaagagatggtgtttaccacacaaaattttttaatttcattttcgtcattccagaatacaagcagaatgaagagagtacctctgtgtctgctcggttcttctgggtgacagggcggcggctcctctgcttctggtgacagggcggcgactcctcctcagcttcaatgtgacaggatagggtattagggttgctcctcggctctgaaggatgcgcacagggacagagaaattacaacccgtcaacgaaaaaaaggcaaggactcaccttgggagacctgctcgacactgtaccccgctggaggattggttcaaagcaaggcctgtcatggaacttattccaacacaaagattgataacaactgtgctggctgacagaaagtatcagatgttagatgacaacaggcatgtgctttggacaggactaattcagatagagtttgcaaaatcaagaaagatttcactgaagggccttcttagttatgataacttagaagttattaatggactgaacatgctgtgcttgaaaaatttatctttgtccacaagttctccttcagaagattcttcaagctctcctttacaagagtctctctttgaagattttatggagatggttctgcagaaggagttgtcatgtagtatctcaagtctacctgagcatcgggattcgctttttgagaccttgaaaaatcctgcccataagttgcatgatgccatataccatccagcatttctctcagatgaagagttctctaatctatgcattcacactcaccgtctcgttcgtcatgagatgttgatgaggaatcaaggaactgaagcatgttcaatctgtgcacatctaaatgtggcatattatgaccaagatgttatctttacttgccagggtcacttcatgttatccaattttcttggggtacattccaaattggttaaagggaagccaattgctgggcagtatcataacaatccttctttgaacatattgccatatcgacccccctcagttctgcatccgatagggtcagctttggtggatactatgcgaattggttgcatgcattccattgaaaacaagttgatcaacgatatttgtaaggcaagcttcaaaggtgttaaggaccctttacttgacacgtacaccagggaggaagtcattcgcctacttcgctatatattcccaaattatgctcaatatgctcttgaaggtttcaagactgaaggtctgcttcataagcttgggctgaaccgcttaaagcccataccttctattctaaatatttgaacctcaggtacatatcttttgaattttctcctcagtaccagagagttggtgggcagccagttgaacacgctggttttctgggcaaccaatggcttccagcttccttttgatcgtgcgcatccaatcgtctgcatcgagagggttgcttgatccggcgaacgtgggaggtttgagtctcaggaagtctctcattctgtcttgcggtcttccaccatttggccgttgatttttcagatttcgagtgaggacctcgatgagtcgggtctgatttgctagaacttgggctaggtctaagggtaggggtggaggtgcggggaggtgggtttcactttcctctctaacgacttccccttcagctcttcgggggaaacctgctccaatccctgaggcggtaggcgtggttttatccgaagccatctgccagggaagagagtcactatcatgcacatgcaaattgtt

SEQ ID NO: 33609 - DNA, 2529 bp, Zea Mays
ccgacggaaggcccttagcagcgccgccaccaccacgggagatgcgtggagagatgaagcaaaccaagtcaggaagaatagaaatgagggcagaatggaatgaaacaagaacttgtttttttgtgagcttactgaaggagtacaattcaccaagatatcgtgcccaaaatggttggacaaaagaagcatggaacaacatgacacaacgcatcaacgataaatttgaaacaaattttgtggtgacgtaattgaagaacaaatgaccagtgggggccgaataaacttacaaattcataccgaattttgcctggtccactaaagctgcctgcgcccccccccccccccccccccgcatgggctcgtagcccacagacgtcccaggagctggcccaatttatcttcgccatccatttcgattgaatggccacgatttaccgaaatcgcatatataaatgaaaatttcggcatgccctaaccctagcttcattcgcttccgatatttccggagtggtatagggcggatttggtggcggcgactgtgaggcgggcgagcgaggtggtcattgggctcgcgccggagaacgctatgatcccgctgttcgagacggggggcgcgcagctcgagctcatacgggatgccgagattgagccgtgtgcctacgtgaggtgggagcaagggaggccgagaggatccgcttcatgagttggatgcacacgagagacgttggggatcccagcttcccaatgcgggagatccagaagagtcaacggcggatcgatcaagtggattagcactctcccctgtctgcgtgatctgtagaacaaggataagtcggggacgctgttctgctttgccgcgatggaacatgtgttccaatccgagaatttcaggctggggcggttgggatgagggggaagccaatgggagatggatcaaggagatgagcatgggctagacgacttcctggtgaaggtagcttcaacagaccataactttcatgacgcttcaacccgctgcaatgaagacggcgatgaacacaatttcaacataacatataacggtgaagggtttagtagatgaatataataggggatgtatgtgacaaatagaagagttctcaccaaaggcaaatgaacaaaaccgaaaagaaaaggaacatcgtatgtaatttatagtgaaacaaaatatatgtaaagaataaagagggacgtgaggcgttgtgagagcggcaagatccgattaaaaaattgccataaccgagtgaattcgagtgaggtggggggtgtggaaagcgtgaaatctggttggcaggccctattgtcagagtgtgcattaaaatcggatcaggtggtctggcaccggttcaggagaaaccggttgcgtgggaacgtgggtggactggcaccgggtcaggagtaaaaccggtcgcgtggtggcgtcagttggcgggtggacgcgcgcttcgcactgggacgcacgacgggacgacaagtgacgctttaaaggagtaaagagattgacggacctaagcaactgcataaccatttcgaggcctattttgagaagcccacagacggaagattacgtctccttgtcacggcccaaatagagcatacaagaactcatcagaatctccccgccgccatgcggatctgcagtaccttcatcctgtttgatccaaagccgactccttttcttcctctaatccttctttctggcagtatttgttagggttttctccgggattgaaggcactgctgcaggctgaaacgtttctcgcttgattggcggaagaagggattccagcgatctgtttgctgctagctgcgagagttcaatatgtctcggaccttcaaatcgacgacgggtctctctcggcggtttctgaatctgatcgcggccaaccactcccctggcgtcaagtcgctgcaccgcatcggcctgggtcgcatctttaactcaacgccagcgccaataccaaacggagatcgattggagtccgcagcaggacaagaagactacatggtgcggccccgcgcgttggatatcattcggctccccacgccggtaatgagcttccgatcttcagcgtcatttgaaagcaaagaatggaagttggattgcttcccgttttcggactgcaaagttttctgcatggaccagtcagggcgcggtttcctcttcgatgccaactcgtgcggggtgtcaaccgtggcccatctccatacacccaagcagctgaagacttcttttctgctatgcttgattgatggggctgcgtcttcacccagttctgcctgtggcttgggctattttatcttcctctgcgcattatgtttttcggctcactttcgagcttgtatccccggtattgtaataacattattcagactctgtaactatttgaagtaatgaatgtggttactagcctcctgggactagtaattatatcacatttgagtcccaaaggatcgggacgcttcaggtggtatcggagcctataggactggccgtagaccacaaccctg

SEQ ID NO: 33610 - DNA, 1747 bp, Zea Mays
ccgacggaaggcccttagcagcgccgccaccaccacgggagatgcgtggagagatgaagcaaaccaagtcaggaagaatagaaatgagggcagaatggaatgaaacaagaacttgtttttttgtgagcttactgaaggagtacaattcaccaagatatcgtgcccaaaatggttggacaaaagaagcatggaacaacatgacacaacgcatcaacgataaatttgaaacaaattttgtggtgacgtaattgaagaacaaatgaccagtgggggccgaataaacttacaaattcataccgaattttgcctggtccactaaagctgcctgcgcccccccccccccccccccccgcatgggctcgtagcccacagacgtcccaggagctggcccaatttatcttcgccatccatttcgattgaatggccacgatttaccgaaatcgcatatataaatgaaaatttcggcatgccctaaccctagcttcattcgcttccgatatttccggagtggtatagggcggatttggtggcggcgactgtgaggcgggcgagcgaggtggtcattgggctcgcgccggagaacgctatgatcccgctgttcgagacggggggcgcgcagctcgagctcatacgggatgccgagattgagccgtgtgcctacgtgaggtgggagcaagggaggccgagaggatccgcttcatgagttggatgcacacgagagacgttggggatcccagcttcccaatgcgggagatccagaagagtcaacggcggatcgatcaagtggattagcactctcccctgtctgcgaacaaggataagtcggggacgctgttctgctttgccgcgatggaacatgtgttccaatccgagaatttcaggctggggcggttgggatgagggggaagccaatgggagatggatcaaggagatgagcatgtatttgttagggttttctccgggattgaaggcactgctgcaggctgaaacgtttctcgcttgattggcggaagaagggattccagcgatctgtttgctgctagctgcgagagttcaatatgtctcggaccttcaaatcgacgacgggtctctctcggcggtttctgaatctgatcgcggccaaccactcccctggcgtcaagtcgctgcaccgcatcggcctgggtcgcatctttaactcaacgccagcgccaataccaaacggagatcgattggagtccgcagcaggacaagaagactacatggtgcggccccgcgcgttggatatcattcggctccccacgccggtaatgagcttccgatcttcagcgtcatttgaaagcaaagaatggaagttggattgcttcccgttttcggactgcaaagttttctgcatggaccagtcagggcgcggtttcctcttcgatgccaactcgtgcggggtgtcaaccgtggcccatctccatacacccaagcagctgaagacttcttttctgctatgcttgattgatggggctgcgtcttcacccagttctgcctgtggcttgggctattttatcttcctctgcgcattatgtttttcggctcactttcgagcttgtatccccggtattgtaataacattattcagactctgtaactatttgaagtaatgaatgtggttactagcctcctgggactagtaattatatcacatttgagtcccaaaggatcgggacgcttcaggtggtatcggagcctataggactggccgtagaccacaaccctg

SEQ ID NO: 33611 - DNA, 1724 bp, Zea Mays
attttttccttctcccgcgtgcggcgcgccctagcttcctccttcccttccactcccgtccatagcagcgctgccaccaccgacggaaggcccttagcagcgccgccaccaccacgggagatgcgtggagagatgaagcaaaccaagtcaggaagaatagaaatgagggcagaatggaatgaaacaagaacttgtttttttgtgagcttactgaaggagtacaattcaccaagatatcgtgcccaaaatggttggacaaaagaagcatggaacaacatgacacaacgcatcaacgataaatttgaaacaaattttgtggtgacgtaattgaagaacaaatgaccagtgggggccgaataaacttacaaattcataccgaattttgcctggtccactaaagctgcctgcgcccccccccccccccccccccgcatgggctcgtagcccacagacgtcccaggagctggcccaatttatcttcgccatccatttcgattgaatggccacgatttaccgaaatcgcatatataaatgaaaatttcggcatgccctaaccctagcttcattcgcttccgatatttccggagtggtatagggcggatttggtggcggcgactgtgaggcgggcgagcgaggtggtcattgggctcgcgccggagaacgctatgatcccgctgttcgagacggggggcgcgcagctcgagctcatacgggatgccgagattgagccgtgtgcctacgtgaggtgggagcaagggaggccgagaggatccgcttcatgagttggatgcacacgagagacgttggggatcccagcttcccaatgcgggagatccagaagagtcaacggcggatcgatcaagtggattagcactctcccctgtctgcgtgatctgtagaacaaggataagtcggggacgctgttctgctttgccgcgatggaacatgtgttccaatccgagaatttcaggctggggcggttgggatgagggggaagccaatgggagatggatcaaggagatgagcatgttcaatatgtctcggaccttcaaatcgacgacgggtctctctcggcggtttctgaatctgatcgcggccaaccactcccctggcgtcaagtcgctgcaccgcatcggcctgggtcgcatctttaactcaacgccagcgccaataccaaacggagatcgattggagtccgcagcaggacaagaagactacatggtgcggccccgcgcgttggatatcattcggctccccacgccggtaatgagcttccgatcttcagcgtcatttgaaagcaaagaatggaagttggattgcttcccgttttcggactgcaaagttttctgcatggaccagtcagggcgcggtttcctcttcgatgccaactcgtgcggggtgtcaaccgtggcccatctccatacacccaagcagctgaagacttcttttctgctatgcttgattgatggggctgcgtcttcacccagttctgcctgtggcttgggctattttatcttcctctgcgcattatgtttttcggctcactttcgagcttgtatccccggtattgtaataacattattcagactctgtaactatttgaagtaatgaatgtggttactagcctcctgggactagtaattatatcacatttgagtcccaaaggatcgggacgcttcaggtggtatcggagcctataggactggccgtagaccacaaccctg

SEQ ID NO: 33612 - DNA, 1887 bp, Zea Mays
gttttctcacgcgtcggtcgctcgcgcgcgtggatacctccgagcgcgcgtattttttccttctcccgcgtgcggcgcgccctagcttcctccttcccttccactcccgtccatagcagcgctgccaccaccgacggaaggcccttagcagcgccgccaccaccacgggagatgcgtggagagatgaagcaaaccaagtcaggaagaatagaaatgagggcagaatggaatgaaacaagaacttgtttttttgtgagcttactgaaggagtacaattcaccaagatatcgtgcccaaaatggttggacaaaagaagcatggaacaacatgacacaacgcatcaacgataaatttgaaacaaattttgtggtgacgtaattgaagaacaaatgaccagtgggggccgaataaacttacaaattcataccgaattttgcctggtccactaaagctgcctgcgcccccccccccccccccccccgcatgggctcgtagcccacagacgtcccaggagctggcccaatttatcttcgccatccatttcgattgaatggccacgatttaccgaaatcgcatatataaatgaaaatttcggcatgccctaaccctagcttcattcgcttccgatatttccggagtggtatagggcggatttggtggcggcgactgtgaggcgggcgagcgaggtggtcattgggctcgcgccggagaacgctatgatcccgctgttcgagacggggggcgcgcagctcgagctcatacgggatgccgagattgagccgtgtgcctacgtgaggtgggagcaagggaggccgagaggatccgcttcatgagttggatgcacacgagagacgttggggatcccagcttcccaatgcgggagatccagaagagtcaacggcggatcgatcaagtggattagcactctcccctgtctgcgtgatctgtagaacaaggataagtcggggacgctgttctgctttgccgcgatggaacatgtgttccaatccgagaatttcaggctggggcggttgggatgagggggaagccaatgggagatggatcaaggagatgagcatgtatttgttagggttttctccgggattgaaggcactgctgcaggctgaaacgtttctcgcttgattggcggaagaagggattccagcgatctgtttgctgctagctgcgagagttcaatatgtctcggaccttcaaatcgacgacgggtctctctcggcggtttctgaatctgatcgcggccaaccactcccctggcgtcaagtcgctgcaccgcatcggcctgggtcgcatctttaactcaacgccagcgccaataccaaacggagatcgattggagtccgcagcaggacaagaagactacatggtgcggccccgcgcgttggatatcattcggctccccacgccggtaatgagcttccgatcttcagcgtcatttgaaagcaaagaatggaagttggattgcttcccgttttcggactgcaaagttttctgcatggaccagtcagggcgcggtttcctcttcgatgccaactcgtgcggggtgtcaaccgtggcccatctccatacacccaagcagctgaagacttcttttctgctatgcttgattgatggggctgcgtcttcacccagttctgcctgtggcttgggctattttatcttcctctgcgcattatgtttttcggctcactttcgagcttgtatccccggtattgtaataacattattcagactctgtaactatttgaagtaatgaatgtggttactagcctcctgggactagtaattatatcacatttgagtcccaaaggatcgggacgcttcaggtggtatcggagcctataggactggccgtagaccacaaccctg

SEQ ID NO: 33613 - DNA, 596 bp, Zea Mays
atgtcgtcgtcgtcggtgccgctcgtggcggcgctctccaactacaagccggtcgggtggaagtgccgtatggcggcaggcagaagaagagatttttgttctgttgtgcaaatgcgttttggtctgcctactgttaatgtttcaatgttgatcatggcagatggcaatgagaaggactttgatgaagaattctctggttctgcaaatgtcaccactagcaacgtgcaggaagaggtgcaggaaagtaaatgcaaagagcaagttgaaaatgcaagcacgacaccagatgacttgcaactacatgagggaactaatgagtcccaagaatgggctcaatttgcttcatcttctggaaagaagctaacacctaggaggaaaccgattgtccaagttgaacatgatactaagtcaggtgaaagacgaccgtcggatggtgatacctttgaggagttacatgcaagaactgcaagtggtggacaaaattgttaatgattctgaagggatgcatcttgtttacatatttgtgttgtcaatatttggattgtttcatttatttggtgatatttgtaattacagttctttcagtgctgtaagga

SEQ ID NO: 33614 - DNA, 633 bp, Zea Mays
catttctataaccacattctgttattttccttataaaagtgagaatagccgatctgttgatgtgcttggccttaagactgcttttgcaaccttcatgggtaaggttccagagaagaaagcgagggaatggtgcgcctccaagggcgatattccatacttcgagacctctgcgaaggaggaccacaacgtcgacactgctttcctatgcatcgctaggctcgctttggagcatgagcatgaccaagacatttacttcaagacagttgtggaacaagtcccggacactgaacagacaagcggatgtgcttgctaggagccagccatttcctggaaggctggaactacgtggatgttactgaaggactggcccccgatatgtttccctcccattttttcttttgagctccagtaactttattactattctgtgttgctctcactggattttagcacttctgtaagttgtcatcttttaaagttaagaatttttacataagtcttacacatcgaacaaatccaccatgtacattaagatgcaatgcttatcgaacactcaagtattatgctcttgtaacctaaattaatcaaaattgggcaatgatcagcaaccgacttgtgctaaggtagaaaaat

SEQ ID NO: 33615 - DNA, 1040 bp, Zea Mays
atctaatctaattagtaaaatgacgtatctctttttttctgacacgcttgcgacactgaggccgactcaaatatctcattaaacaacatgtgcatgtctacgtttatgtgtaatgctcatgtcgactgcacataggcgtttcttagcttgatctgatggtgatcaattgaaaattgttgttgtagattttcctggagatcgaattgtccttttgtgatcctaggtttgatacagtgctgcaattttctgctctcccacctgtaccacatttgcaggtacataatgcgctcgaccacattaattttgtcgttaagagtcaaacgatggtttgtgttcacaactgaaaccattggattttgtttttgacatcctcaaggaggaattaaccgagagcttgctgccgcaaagaagatttctcacatctgagatcgggagaagaaagcattttcaaggagaatagccgatctgttgatgtgcttggccttaagactgcttttgcaaccttcatgggttccagagaagaaagcgagggaatggtgcgcctccaagggcgatattccatacttcgagacctctgcgaaggaggaccacaacgtcgacactgctttcctatgcatcgctaggctcgctttggagcatgagcatgaccaagacatttacttcaagacagttgtggaacaagtcccggacactgaacagacaagcggatgtgcttgctaggagccagccatttcctggaaggctggaactacgtggatgttactgaaggactggcccccgatatgtttccctcccattttttcttttgagctccagtaactttattactattctgtgttgctctcactggattttagcacttctgtaagttgtcatcttttaaagttaagaatttttacataagtcttacacatcgaacaaatccaccatgtacattaagatgcaatgcttatcgaacactcaagtattatgctcttgtaacctaaattaatcaaaattgggcaatgatcagcaaccgacttgtgctaaggtagaaaaat

SEQ ID NO: 33616 - DNA, 1217 bp, Zea Mays
gcgcccctcctccgtgcgtgccccgcccccgtccttcgctcacccgatgccctgccacctccgccgcgatagcctcccccacgaaatgcccccgtgatgttcgccccgctgcgaacccctccccctagatggaataagcagaggtccaatgcggatccgcggcccccgaccctccaccttggtgtgacagtcgcggctccgtggaggcaacttgctccctcgctcccacctcccacgccgccactgttgtcgccttcagcacgctgcccagcccacgccccccccccccccccgcctccaaatgtggatctgccaccccggccctccaccttggtgtgccttcagcacgccaccactgctgtttgattccttctcctttttgtttaggacgtcgccaaattccatccatctctcagcgccgtggtctcccgatgtggatgggggaaggtacataatgcgctcgaccacattaattttgtcgttaagagtcaaacgatggtttgtgttcacaactgaaaccattggattttgtttttgacatcctcaaggaggaattaaccgagagcttgctgccgcaaagaagatttctcacatctgagatcgggagaagaaagcattttcaaggagaatagccgatctgttgatgtgcttggccttaagactgcttttgcaaccttcatgggtaaggttccagagaagaaagcgagggaatggtgcgcctccaagggcgatattccatacttcgagacctctgcgaaggaggaccacaacgtcgacactgctttcctatgcatcgctaggctcgctttggagcatgagcatgaccaagacatttacttcaagacagttgtggaacaagtcccggacactgaacagacaagcggatgtgcttgctaggagccagccatttcctggaaggctggaactacgtggatgttactgaaggactggcccccgatatgtttccctcccattttttcttttgagctccagtaactttattactattctgtgttgctctcactggattttagcacttctgtaagttgtcatcttttaaagttaagaatttttacataagtcttacacatcgaacaaatccaccatgtacattaagatgcaatgcttatcgaacactcaagtattatgctcttgtaacctaaattaatcaaaattgggcaatgatcagcaaccgacttgtgctaaggtagaaaaat

SEQ ID NO: 33617 - DNA, 385 bp, Zea Mays
tttctataaccacattctgttattttccttataaaagtgagaatagccgatctgttgatgtgcttggccttaagactgcttttgcaaccttcatgggtaaggcaagtaaccttcctcctttgcctctctgatgctatgtgttatgtaataatggcctaaccccatcggtcgcttagtaagttgtcttgtctgttattaacttacattaaaattctgccacaaattcccatcaacaagaaaaacaagaaagatagctactaggagaagctttaatacgctcgatacctggcatgatgagttcctcaatcaatttcaggctggcccatcggatcctcaatgctttctgttcattttggtcgggaacaagattgatttagatggcggg

SEQ ID NO: 33618 - DNA, 901 bp, Zea Mays
tccggactcttccggaatcccaacaacacagggcagggacgcctccgcctcgccgcgccaggcagcccgagcacactccaccacctttcagaaccttccatcgccttccagaagcccatccctcaccacccatataaaccgccccctccggcctcgtcactccccacaccaagaaagaatcacacaacagcagctcaaaaacctaacacacctcaacaagcagagcaaagacccgggattcgccggcgcggtagcgagagcgagagatggacgggaggatcgcgaggacgccaagtacctgcgcatggagcggcggatgggcaagttcatgcgcaagttcgtgctgccggacaacgccgacatggacaagatctcggcggtgtgcagggacggcgtgctcaccgtgaccgtcgagaagctgcccccgcccgagcccaagaaacccaagaccatcgaggtcaaggtcgcctgaggtgggactaggtcgaccgatcgtggctctgaagatgtgggagcagtgccagcgagttgtgaggacctctacctgtgtggaatgtggcgaggaataatcgtagtctgtagtgggggtgcttctggtgtgcgtgtttgcgttccttcggtctcggtgtctgtctaccaattcctatctgatgtatcggcttcggtttcgtatgaaccatgccggatgctttcagtatgttcatctacctgtgtcttttgtctaaataatccgtagtcttcattgacagaaagactacacacgttatcctgacaagacacgaaatcccaataaagtttaaattcaggctactaccaagaacccaaaaaaattataatcaaaatttcaagggcagagtccggaagtgcaaagcaaaatgaaccaatagttcaaattcaggct

SEQ ID NO: 33619 - DNA, 1699 bp, Zea Mays
cagcgatcgaagttgggatcgcgcgggaaagatccccaaattccccgccattttttgccaacccattcacaccgacgaatccagcggcggcggatcacaccaacccaactgcaagccctagccatgtcccccgccaccgccgacgaacccagcgtcgcaatggaggagcagcccggaaaggagagcgaggaagccgccgatgcaatggaagagcagctcggaaaggagagcgaggaggcggcagagtccgccgaggaagtggggcaagtcgaggaggagcccgaggagggcgtcgaccccgccgaggcaatggagaaggctggagaggaggcggaggccgaagagggggcgtcgctgcggccggcgctgccggtggggagggtcaagcggatcatgcgggtggaccgggacatcaagaaggtgacgagcgaggcggcgctgctcatcgccgccgccaccgagctcttcctgggcagcctcgcgacaggggcccacgccgcggcggcgcggcgcagccggcgcactgtgcgtgccgtgcacgtccgcgccgcggcccgcgcgcaccggcccacggcggacttcctgcttgactgcctcgctgccgaagaggaggctccccgcgcccgccagaccgcaggatcagcccgcggcggcggcggcggaggaggagggaacgcgaagccgctgccgcgtgggacccgccgcatcgatgccttcttccagaaggttacctagaggtgtctctctctgcgtacgtgcttccatattttggtgatctaaatgtttacttcaaaattctatgggtgctgtgatgaatgtatgaacatgcaattaaattacgcttttctgttcctctgattcgttgtcattttgcttattttccgggatttctgtgtgtctgtgtgagcccataccttgaattgtgcagctgctcctacgatgcaaatttgatggcaatttggctcttctcccttgttattaggctgtacgggtcaatgtgcacatcacttttgggtatgtttagtactaacacatgatgacaaggaaaatgttttctactagggcatggtgctagctgtaaggttggcagttggcattagcaatgttttctaaattctattggaaaattgatgactttttttgtgcaccataattctttgagagtttgatatgaggctcactttgtagccaatgtgtctatagctaggaaaccaaggcgtgtcggtatcattcgagcaagcagatagcataactgcgatgggacgtactacactacaccgccacaaaatttgcattatgaattctgcgtctgcatttcagaataccagattttttgagtgttcgcacaggacacaagttgagcttatgttttaggctttcagaaatattatgttctcatccacaataaagtgccaacttgagcgtcaagcagagtactgactacatcaaacggctacctggccctttaacggcaattgtatgtaccaattcaggtcaacttaactgcatctcattaggagtaaaaggtaattactaaacgtgaaatggacaaaaatagttgttgtgtggaatgattgattaaactaagttatttgatcaatttaataaattgctggatcgttacacttccaatataaacgaagacacgaaaaagatccataaattaacggtgaaagcgttgacaaaggaaggaaacaac

SEQ ID NO: 33620 - DNA, 886 bp, Zea Mays
atggatataatagctaaattcaggatattcagctgctgctgctggtggtggcggcggctgctggcgaaacttagaccggaggcggccgacgttgtatgcactgagagaatagagatggccgccggtcgtcggagccggatctgcaggctaccagatgaagctcatctcggcgttggcgcgcgcggcgtcgtcgtcttcgtcgcgggacggggagtggacgtggcggccctcgtaggtggtgatgaccatgcgggggtcctcggcgagccgctccacccgcttcttcacccggcagttgtcctgcgtgcaccggtagtagctcctgcatgcaatgcagcgagcacatcatatcatgcgggggtccccaaaatgaacttagaaagagaaggagagtgcagtgcagagctggctagctttcttgggggacttctccggctcctgtgctagaggtacagctgagaagacttgagacgaaccaagctagcgctaggtgggcttaaatcaaacggaaaatgtatgtggtgctagtagctgctagccagcagaacagacttgagcccaggtcagttttatctctttaccatcacaccatgattttcgatatccgatcgagaaatcttcagatacatgtagctttgttgtcagctgtatgtgacgacgttattagtaattaaaaatcaatcctaaaactaagcatgtacttcctccgtttatttttatattgcgccggttagtacaaagtgacgtcaaataaataaaaatgaaggcagtaccacagtatagctactctatctaattgacccaacctagctaaccatatgcatggttgaaagagtgaaaggattgcttttgggcactgctaactttgctgcacacatacacacac

SEQ ID NO: 33621 - DNA, 5010 bp, Zea Mays
gttgcatcttcagtcttctaaccattcaagtgcgcttctcagtagttggcttcacccttttaagctgcaaataagcaacaggatgtgtcataaacactaataaactatctagatcaaatgaaatatgaaatccgcactcacatgtgtgcgaggccaagcaacacacatgcccacagcatcctccaaagttttaagatctccgtgtggtcgaggtaatctttcatcttcaacattgttaagataatgaaccgcaacagcataatatccatccccaagtacagttcctccaatttcatgagtagtatctctagatataagattaccaacagcaaaaacttggcctagttttcttttccttgttgagtacaacaagacagtcttctgtttattctacaagaataaaagagtagccaaacaaatgcttatgtacatactggaaaatctgcaagtagatctatccatattcaaagaaatagaatgaagcatggaagtataatcaatatggagatacctgttgcaatttgctttgttgttgttgcttgctttgagtttcctgtgacacatgatattgagctttgtaaatacagaagacacatctgtaatgaacatcatactaaatttcaagtaatgcaatgttgtttagtactaaccttatcagacatttctttatctagagatagtgatccattgttgagttcctggttcaagtcactagaccttgtaacttgtgattcctggaaatacagaaggcacaaataattaatagttctagctaagactagaaattcttatcaatccctttgaactgaatatataacagtgtctactgtgaaattcatgaatcaagtacctagtaatattcctgacttaccctgaaagctatgttgtcatttggtactgaatgatcagagcaacccaccttggcaatattataatctctagtataaatctgcaacagcaatatataaggagaagaatactacaaccagtctgttatgaagtatgatataaaattaaatttatattgcaggaaaggaaatttgggttgcctgttcattgtatggtgaaggtgatttctcataactggatcgttctacattatcatattgcaatgagacattttcattgtctttagtatcaacctgctggaaagtaatggaagacagtagattaccaaagtgtgcattaaattgatactgcaaaaatgacaaagccacttactgtagtgcttccagatccagtagctagaattgtgcttagcaattcctcttctggaaacttttttctaggaatgctctaatgttcctaaacccagaaatagcaagctctaggtcccttctaatcattttgttctcctctgattgaacatgtgaatcagtttcattgctccaatgtgtatcatcatagtacccacgaatgttcaagtcttttcttatgacattctcaaacacatcatcataatcactagtagaaagtgtccccttgtcctttcctcctgttctctaattcatcgaaggccttacccttcaaatttcataaaattaacagagaaaatgattgacaatttgaataaaaactaattaaagtgtagtacaggaaccagtgaataccataagtgtttgcacattttgattgacatagttcccattcctcttcttatgagactcgtcccaaagatcaattttagtgatgcttcctttcttcttgtcttcctgtgcaaaagaacacaatctgacaggatcattttgttttcatagtgactccaaaatggaaacaagataacagacagagccattaccatctccttcttaagtctagcatggcttttcctaccgctagtgtgtggatgcctctgcttctttccagattccgcatttgtccggcataatttctaagagtgcaacattagttaatgcaaataaaaatatttatttacactgctgattgaaaaaaaatactgtaggtggcaatcctaacctgatgtgcttcactgcaccatatgcctaacagaaaactccattgattttcattcacaccatcagggacatccttttcaatctggtcaaaagacctcttatctggattgaagtattgtttcttcaagtctgacttgtagtctctccaccttttattcactgtcttaagaatccaatctcgagtagaccattttgtctcactactatagataaattttttctattgaaaacattgaaagatcaataggtgaatgatttgcagttcaagatttagaataaaaattatcaccacaaacacaagatttagactgaaaagtatcatgtacctcaacatctttgatgatgcgttcctttggacctttgaataatttgttgtcccatctcggaatgtgtaatggtgcaaatgatgaattctgtgcaagctcaccaaggtatgacgagagaatggattcagaccactgattgggaatgccattcttgtcagtttcaactagtactcttcctcctttcagatcccacaattcagctgttcggaaatttctaaaaacctcccgaacaactccattttgcccttaaattaataatgtcatggatcatacattgatgttcatatatctataagaatgtttgagaacaaaatgacaaactcacatattattttgaatgacttattccttgttggcgcttctccctcaggaaacccaatggtgagctctggttgtggatcttggacatcttcatgttgttccacgttttcctgtgtctcagcttctaagttcagactttgtagtcttctgtgtttcattggcattacttctttccctacaagattaacatttcagattacaggagatgctaaaaattattgaaataggatgtatcaagattacacagccagcataagaataacaatttcatttgtcttatgcagtttaattaaaatcatgtaacacaaggtgcaactgcagacagacaatttggtaaacagaactcagaacaatagaattcaatgctccagtactgacgcaaatattaaaaaaagttgcaattggtgacaacagattaatctaagaattatcatcaaatagttgcattcagtgacagagattaatctaagaattaccagatcaaaattaaaagtgttgcattcggtgacagcagattaatccatgaatttccagatcaaaatcaaaatatttgcaatcggtgatagcagattaatctaagaataaccagatgaaaatcaaatagttgcattcagtgacagcagattaatctaagaattaccggatcaaaattaaaagtattgcatgcggtgacagcagattgatttaagaattaccagattgaaataaaaaagttgcaatcgttgacagcagattaaaaaacgttgtgcatttgtggctacaaatgattgtataatcggtgaatgcttcagtaaaatcacattgattgagtcaggctacagcagtaccttgtaggtcggagtaaagattagagggtgggtcagttatggtactactgcacccacgaagaaatctgttaccagctgggcgacggatcaaccagcagctgggcgatggatcatcaagcagcagactgaaaggagggcatatggagcaggagcacgaagagaatggtggcaggagagcgagaactacagggaggtggaagaaccggaggagatttctaggaggtgtgatcgagaaacatgggagggtggttccaacactttaggggggggggaatttttttagtttgatcacgttgactagtttattgaccaatttgattagctagccatcgatttttcaattccacacacgttttaaattcaaataatgtttgacttttaaaaatcaaagttaaactttgtcttactaaaaaatgtacaaaaactactaccttcgtttcgtaaaggttgtcactgatatttttataacatatatttaaggttcgagaagctaaatacatattaccaaagtcaatatcaacatttataagctctcagccaatatttcaaagagctagattttccaagagctcgttttatgagatcacagaaaggtctcggatctatgtgaatgaactcaaatttttttatcatcgttcatcacccgagaacagacagaaatagaatagacagaaagaattttagatctctcgggttagggttttacctgaccctaaatctaggattttcggccactaaatgagacttggtctcgaccaaaccgaggaaatccgagatagtaaaatagatcgaggttttagggttagggtttaataacctaaccctaatcatttttaaatcttggtcaacagagatcagtggctcgggatctttttttacatccacggcctagatgacagaacagattagaataggtacagaaaatcatcacagaaaataacagaaataacgcaaactctcggatccacgtttttttaatcaactcataactcgatcccaaatattacattagatccatctcatacattcattctcacagtaagggattcgagtaaatgagaactagatccgagtttttaaaaggttagagacagcgccccataatcggccgaccatctctggtaaatgaaaagacatgcctgcgctaggccagggaactagcgtcggattcaagaaaaaaaacagcagattcaaaagagagaaacgttgcgtcctggcggcctggtggagggagcaagacgttttctctgagattcagtcaaacaaaaaaaagaactaaaacaaataaaagagaggtcgtgaaaaatatgatcttcatttggctaaggcaagaagccagcagacagctgcttgccaagccgtttgccaagagctattttggccgaggcataacagatagggagagaggaagttttgagcagcagagcgcggtcggccaggagacaacctggtggccggctgttttgtggcggctagggatgacagaaatgagctagggttccacctcaccccgagattttagatttttatagaacctgctacagtgcatggaagatcctg

SEQ ID NO: 33622 - DNA, 2030 bp, Zea Mays
ctactgttgcaggatggtgatgtccacgggccgtggcgaaggcaagttttgcgggtgaagcgtatacaattaggcgcacgaacctggttgcccccacttcaaattggcgtacgatgagtcgatgacagtggcatgagggatcacactggcagcgacaagggctgccgccacctgcggtagtttcaccacctgcattagtttatctaattgaccaaaagtaccgacagcactctcagtccgctaaaagcaaaagggttaaaaacaaacatcacagtcgcaagctttctggacaaatggggagcacgcttaaacaacggccgcgcgcaacttggcagctctcaaggccggcagatattccaaccagcaaccaaccggtcaggtccgggtccaggattagcgagcgattaagaaactgcagaaaaagggggggcttggtagtacaatactgctcaaagaagattcatacatagtgcagccctgctcagctgcagtatgaagaacatcatggcagtagcaggcaagacctggcaaaaaaaaaatgcttctcggacaacaattatcgctgttgacaaatcataagcgatgttcttagggtgaagtgaagggaaaaaagagtattcctgagtcctcctgaccaagatacttcagaagcaagcacatggcaggaaagacgggatatcacagcacctcggccataccttaataacgagacaaaggacaccaaatcctcaagaaagttgcaccgccgtcggagctgtttgctatggatttagactgtgcagctacaattcatatagacaaaaacattgtagaagccgatatagattaaagccaagcgaacaatgtaaaacataaaaaacaacatgccaagctaagtgcagattaacataacccaaactcttaacagtccccgtcgcaatcagatcaactaacgctaatgttctcagcgccattccaaccatagaggcagacacaaaccagtccatcccctaaatattacaggtcggtctaatgtgcaaaccaggaacaggtgcgaaatgaggagtgctgctatccagaacatgtttctgctgcaatttagtaaactgcatattcaatgaatagctagaagagaacagaacacagaaaaggaaagggggaaaacaaagatcatttaaaaacaataacaagactagcaagtggcagataataagcagaatccaggaaaggataaataaaaatgttaacgctgaaaaaagggggctgaacaatacaatacaaggatgaataaccgatgataactgtggtacaaaaggaacaaacgggcactggaaatttattggtctaaactttgatgtctgactgaactcaactgagctgaaacttctctatacacccagatatatgatatatccctgcacctacaatacaatcccctcctctgctgtccctctcaaaactcttctttattcacagccaattttaaccaccaatcccaagcctaaaacgctccgaagagacccagcagaccaccccgtcacattcaattcaatccctttcagcaccaacgaccgacaccgacagaccatgatttcacaaaattctgtggagattaccacgcgctatcgaagccatgcagccgtcaaccaacaaaaatatgttagcatgacaacgaccacgacactcagaatctggcaagtggtagccatggccggaggggcaagagcagaaccaactatccttccgttccgtgcgtttgagattctctgtcaaggcagcggagggggcggcggcgatccgtattgaactgggtatactggtggccatggatggtgctgatgtgggggaggaggtgatgcgtatcggacagggtctgtgggtgggaatgggccggggtaatatggtggcggaggtggccatggatgcgttggtgtgcagggtagcggtggcggcagggcggggcagggagggcactatggtggtggtggcgggtggtagactggcgcgggggctggggatggtggaggtggggaatgcggcagtggttgtgg

SEQ ID NO: 33623 - DNA, 3500 bp, Zea Mays
ggacagttagctgtaacctacctttccccgctcttcatcggcaaaaaagagggggaaaaaaaacgaaccctgaagaggagagggaaaaaactcgagaaaagcaaaccctaggttgccatgtcatcgacgacatcctaattcgccgcattgcatcgcccaggcaaggggcttttggcacaggtcggcgctcccctgtcatcggattcgattcccctgctcaatttgccgccgatccgtggttcggatcttctcgccgctcggcgactgtcgcgccattttttctctcgatccgtctgcgagacactaagcgcttcgccgacggtcgaccctgctgacgccaccggcgccaggtggcttgtcgcctactctggtccgccaaccgacgcttgatgcctccagggctccaaagagaaatggaaatgggaacaccttcaaggaaagcttcaatatcaatgttccaaaagggagttgtctaaagattccacaaaatgtacaggtcgaagagctcttccttcaatgggtctcttctctaagggttttgatgttcaagagtctgtctttcttccagagtctaattattcagatatcaaacctgccatttgttgtttggatgaccggtgtaaattcactcaaagttttctggacatgacaactgcaccttcagtactgctttggcaccatagaaaaatgttaatggaaagcaattcgactaatggttctcagcaatccatgtcatgtgctttggatgaggatcatcagcagttgtttcgagatcaaaatgagccttgtattggtgctgataggccatgttcctccaaccttagtgttatttgctcttcacagaagtttgcagaggatcgtatttccatcaatattcctcaagacaaagcaattgatgcaacaaatgataaacctcttgacaaagatgaaaaagaaaagcatcctatatctaacttggttcaggaattgaatgaacatccaattggtcgtgttacaccaactgcccccagaactacttcccatcggaaccggtttacgtctatatcacgtgcttttggagatggttcaaagttactgccagaagaccacatgttgactggcttcgctagtggttctaagaagccacgaagtcaagtttcatactcaggttctcctagaagtgaggaacttggcttaaaaaacaaagatcatttccgcaagatacaatctcatgtcagtgttaagacaagtgatgcaaaaaaacttcctgatagttctagaagtgggcatagcagtccagagctattgacttgcattgcaaatgttcttgttacagtgggtgatagaggttggagggagtatgatacccagatcacaatggattctgatgttcacagtgaacagaggatatgcgtgaaacttgctgaagggaccaagtatgctcacaaggtctgtcaagttttgcagcctggggccacaaaccgctatacacatgccatgatgtggaagggtggggctgagtggtgcctggaatttcctgacagaagccagtggttgattttcaagcaaatgcatgatgagtgctatagccataacatcagagctgcttctgtgaggaacattccaacccctggtgtccatttggttggaatccatgatgataatgatatggtatcctttgtgcgatctgaagattatcttgtccacatcggaacagatgttgaaattgctcttgatgaggcccgtgtgttatataacatggacagtgatgatgaagagtggatatcaagccggcagaaattcttagtaagagacaacaacgccacacttgagttggcagaagatttgtttgagagggttatggacaaactagagaagtttgcatatagccacgactctaatgaactcagcattgttcagatgaaggaactggagactgatgacctacctctggacattattgaagtgatacatgcatattggcaagctaagaggcagaaaaagggaatgccacttattcgacatttccagttcgctatgtggaaggtctacgagcaacagttacatgaatgggaatcgaaagtatgcagaatgcagggttcatcaaatgggtaccaaggaaaaaaaatgcctcccaagcctgcattgtttgccttctgtttgaggcctcgtggactcgatgtaccatacaagggaccaaagcagcgttctcataagaagcttatgtctacaggctgccatagcttttcaagacagcatgatggcttttaccggcaagtatcaggtaggagatacaatgaatgcactgtggatgggcggatatgcgaattatatgacattggttctctttattccctaacagggtactctcccaggttctctacaagaacaggttctcttcgggcatttgagtcctcggaaagttctacaccaagatttttcaggacaaatattgtcaaaaggagtgcaaccgttgctttctctgatgatcaccagccgtcgccttccttccgccctcagagagttaaacggagcgcatctgaccattggaacactgtcattcatgactggcagaactcaaagcatctctttccgggctcgccccctgttgatattgaggagctcaaactgcgggatgctgcaagcgcagcacagcacgctgctgccatggcgaagctcaagagggaaaaggctcactgcctgatgcagaaggctgaccttgccctccataaggccacggtagccctcatgattgctgatgcaatcaaatcttccagcaggaacaagtctcgggattgccgaaggggatttgatgaatgaggaacgctgacttttttttgccttttgccgcgagcccttggcgtatacacacaacttgaactcgatgcttttgctgatgatgggagcgtgtttgcttatctaatgatcgagtcattagatagcatcccttccccccttctcccccctccccctcctttgcgtctcctgtacataggtttcttttcatcattcttttgtgctcttttacctcccgattaacatattgcccggtgatgaatgggccaggtcaccaggatgtaggttagcaatctggcgtgttgtctgaacagcggctagggaagtggcgctttacggagggttatggtcctgttgttgcactgtgatgcctttacgacattgcatattctagaaggagcacatggcatatcgtgggtcagtgggagcagtgccacatgacccctctgggtcataaataatctatttccgatggctcataggttgtgttcgatgacctaagccgtcggaaattttattgtggtcaacatatagtactcattggaattctggaggaacttgaacatgaggtccaacaacctcttagatatattttcgattccttgtgtgttctccaaatattttgcatccaataaacttacaaacactttcttaaaaatttccatgttttctcgatccctgtaggtgctgcgacatatgtttgcctggtcctacgtatcgatgat

SEQ ID NO: 33624 - DNA, 5808 bp, Zea Mays
ggacagttagctgtaacctacctttccccgctcttcatcggcaaaaaagagggggaaaaaaaacgaaccctgaagaggagagggaaaaaactcgagaaaagcaaaccctaggttgccatgtcatcgacgacatcctaattcgccgcattgcatcgcccaggcaaggggcttttggcacaggtcggcgctcccctgtcatcggattcgattcccctgctcaatttgccgccgatccgtggttcggatcttctcgccgctcggcgactgtcgcgccattttttctctcgatccgtctgcgagacactaagcgcttcgccgacggtcgaccctgctgacgccaccggcgccaggtggcttgtcgcctactctggtccgccaaccgacgcttgatgcctccagggctccaaaggattgctgatgagatcgaaactgtttctgttaatttatcgtggattcaactgaacccccatgctccacgcaaccgcccctggtctgggtcgaaactctacatatgatgggaggtgaaattctgaggaattatgttaacttgattcgtgggctcgtgaatggaacccagtggcagtgataaacccactgcaacagatgctaacgaatcagtggtgggtttagatggtgaggacactttgtctgagagggaatctgttggagcaaaagatggacctgccttgcctaatgggagtggaaaggaggctcatgcaagcagtccatctgcggcgaataagaggaagcacaacgacttgggttctaatcaaatggaactcaatgaaccagggacgccaagttccagctcaggtgattccacatggagcataaatggtctcgatgactgtcaccaactctcattgtctagaaataagaacgacgactctgaacattcggttacttcagctggagttacagtgatcaggcagcctcgtggcgtcttgaggttaagaaagctggctcagaatgttagtactgagagttggactggtggtcataatacttcacaagctaatggagttcctaggtcttcccaacacccgaggcggaacaataagagggaatcaattccgtcccaggagaatagagttagtggtgatgaacctgtcagctgcttgaggactgagaatggtacttgtgatcaggataccggcaccaagttctgttccaaaactgagttcttagctgaaaagcagtcacatctttcaggcgaacccccaaaagctgttcatgttgacaagggtgtctatgattatgtcaaagacgatgatggtgatagtttggaagaaaatgctgcctggatgctctgttctttatcagataacaaatgtgctggatcaccaaggaagggaactgataggttgtcaaagagatctttttctcagaattcaaaccattttaagaattcatatgaaaaaatcaaggatatatgtagtcctgctaggttgctgcggaagcgtgatggcaaagttccgttcttgaagcgtcgtcagcgtcggcatttttatgaagtcagccctagcgatgtggatccattctgcattgttaaagagaggatcagggttttttggcctcttgatgagacttggtactttggcatggtcaaggaatataatccggtcacaaggttacatcatgtcaggtatgatggtaaggatgaagaatggatcaaccttcaaaatgagaggattaaacttctgtttttaccagcggaagctcccaataaatctaaatgcaccaactcaaggtcagcgtttgagtcgaagcatgaacagggtgacagagaagacatgcatagaagcggaagcaatacagagagttttgagtcaggtcccatcagctcatggttggctcgatcaaaccaagcaaaatctgctgcactttgtgacatcaacaagcaagatcacagtcattccaatactgttccagtttcatttgaccaaaaacagtgtcgtgcttctgatgccaaggaatctattgattctgcaccatgtagttcacttgcaaatgggggtgtagaggttctcaaggataggaccatacctgaggacgggaggtttcactttgtttattctaggaagcgattttgcagaaaaaagaatgattttcttagcatttccgaacagcattctaattgccaaagaagagcaagttctatggttcttgcttcttgtcctgatatgaaatctagtattgcaactggtgcttcagttacatatgtcatacctgcattgagcctcccactgaaacctgtttataagttgctttgtgaagcctgttgtgtttcggtttccaatgctttctttcttcttcaatgtggtacaatggttgccttatggcctgttgtacatctggatatacttcttattgatagtgctttaggcttgaaacgtttccttcttgacacatgcatgagatcggcagtatcacttttctgtttacttgctggaagctttaagcagtgttctaggcagagaactaccaaggaatcaagaataccttgtacttcagtcagatttcagatatctggtgggcatggtagaagccaagtagtgtttatgtttttcagctttgttggtgtagagaaatggaaatgggaacaccttcaaggaaagcttcaatatcaatgttccaaaagggagttgtctaaagattccacaaaatgtacaggtcgaagagctcttccttcaatgggtctcttctctaagggttttgatgttcaagagtctgtctttcttccagagtctaattattcagatatcaaacctgccatttgttgtttggatgaccggtgtaaattcactcaaagttttctggacatgacaactgcaccttcagtactgctttggcaccatagaaaaatgttaatggaaagcaattcgactaatggttctcagcaatccatgtcatgtgctttggatgaggatcatcagcagttggtaacagaacatgcatctgatacagtttgtcatgctccacttcaagtttgttcacttaatcttggttcatcaccttatagtccattggatatggtctctgctagttgtgcaaatccatctagctctactagtagggaacccaagattactgaaaggaatataagcccagaatgtaatgacaacagtattgatgatgcaatataattgacataaagtttcgagatcaaaatgagccttgtattggtgctgataggccatgttcctccaaccttagtgttatttgctcttcacagaagtttgcagaggatcgtatttccatcaatattcctcaagacaaagcaattgatgcaacaaatgataaacctcttgacaaagatgaaaaagaaaagcatcctatatctaacttggttcaggaattgaatgaacatccaattggtcgtgttacaccaactgcccccagaactacttcccatcggaaccggtttacgtctatatcacgtgcttttggagatggttcaaagttactgccagaagaccacatgttgactggcttcgctagtggttctaagaagccacgaagtcaagtttcatactcaggttctcctagaagtgaggaacttggcttaaaaaacaaagatcatttccgcaagatacaatctcatgtcagtgttaagacaagtgatgcaaaaaaacttcctgatagttctagaagtgggcatagcagtccagagctattgacttgcattgcaaatgttcttgttacagtgggtgatagaggttggagggagtatgatacccagatcacaatggattctgatgttcacagtgaacagaggatatgcgtgaaacttgctgaagggaccaagtatgctcacaaggtctgtcaagttttgcagcctggggccacaaaccgctatacacatgccatgatgtggaagggtggggctgagtggtgcctggaatttcctgacagaagccagtggttgattttcaagcaaatgcatgatgagtgctatagccataacatcagagctgcttctgtgaggaacattccaacccctggtgtccatttggttggaatccatgatgataatgatatggtatcctttgtgcgatctgaagattatcttgtccacatcggaacagatgttgaaattgctcttgatgaggcccgtgtgttatataacatggacagtgatgatgaagagtggatatcaagccggcagaaattcttagtaagagacaacaacgccacacttgagttggcagaagatttgtttgagagggttatggacaaactagagaagtttgcatatagccacgactctaatgaactcagcattgttcagatgaaggaactggagactgatgacctacctctggacattattgaagtgatacatgcatattggcaagctaagaggcagaaaaagggaatgccacttattcgacatttccagttcgctatgtggaaggtctacgagcaacagttacatgaatgggaatcgaaagtatgcagaatgcagggttcatcaaatgggtaccaaggaaaaaaaatgcctcccaagcctgcattgtttgccttctgtttgaggcctcgtggactcgatgtaccatacaagggaccaaagcagcgttctcataagaagcttatgtctacaggctgccatagcttttcaagacagcatgatggcttttaccggcaagggtactctcccaggttctctacaagaacaggttctcttcgggcatttgagtcctcggaaagttctacaccaagatttttcaggacaaatattgtcaaaaggagtgcaaccgttgctttctctgatgatcaccagccgtcgccttccttccgccctcagagagttaaacggagcgcatctgaccattggaacactgtcattcatgactggcagaactcaaagcatctctttccgggctcgccccctgttgatattgaggagctcaaactgcgggatgctgcaagcgcagcacagcacgctgctgccatggcgaagctcaagagggaaaaggctcactgcctgatgcagaaggctgaccttgccctccataaggccacggtagccctcatgattgctgatgcaatcaaatcttccagcaggaacaagtctcgggattgccgaaggggatttgatgaatgaggaacgctgacttttttttgccttttgccgcgagcccttggcgtatacacacaacttgaactcgatgcttttgctgatgatgggagcgtgtttgcttatctaatgatcgagtcattagatagcatcccttccccccttctcccccctccccctcctttgcgtctcctgtacataggtttcttttcatcattcttttgtgctcttttacctcccgattaacatattgcccggtgatgaatgggccaggtcaccaggatgtaggttagcaatctggcgtgttgtctgaacagcggctagggaagtggcgctttacggagggttatggtcctgttgttgcactgtgatgcctttacgacattgcatattctagaaggagcacatggcatatcgtgggtcagtgggagcagtgccacatgacccctctgggtcataaataatctatttccgatggctcataggttgtgttcgatgacctaagccgtcggaaattttattgtggtcaacatatagtactcattggaattctggaggaacttgaacatgaggtccaacaacctcttagatatattttcgattccttgtgtgttctccaaatattttgcatccaataaacttacaaacactttcttaaaaatttccatgttttctcgatccctgtaggtgctgcgacatatgtttgcctggtcctacgtatcgatgat

SEQ ID NO: 33625 - DNA, 3403 bp, Zea Mays
ggacagttagctgtaacctacctttccccgctcttcatcggcaaaaaagagggggaaaaaaaacgaaccctgaagaggagagggaaaaaactcgagaaaagcaaaccctaggttgccatgtcatcgacgacatcctaattcgccgcattgcatcgcccaggcaaggggcttttggcacaggtcggcgctcccctgtcatcggattcgattcccctgctcaatttgccgccgatccgtggttcggatcttctcgccgctcggcgactgtcgcgccattttttctctcgatccgtctgcgagacactaagcgcttcgccgacggtcgaccctgctgacgccaccggcgccaggtggcttgtcgcctactctggtccgccaaccgacgcttgatgcctccagggctccaaagagaaatggaaatgggaacaccttcaaggaaagcttcaatatcaatgttccaaaagggagttgtctaaagattccacaaaatgtacaggtcgaagagctcttccttcaatgggtctcttctctaagggttttgatgttcaagagtctgtctttcttccagagtctaattattcagatatcaaacctgccatttgttgtttggatgaccggtgtaaattcactcaaagttttctggacatgacaactgcaccttcagtactgctttggcaccatagaaaaatgttaatggaaagcaattcgactaatggttctcagcaatccatgtcatgtgctttggatgaggatcatcagcagttgtttcgagatcaaaatgagccttgtattggtgctgataggccatgttcctccaaccttagtgttatttgctcttcacagaagtttgcagaggatcgtatttccatcaatattcctcaagacaaagcaattgatgcaacaaatgataaacctcttgacaaagatgaaaaagaaaagcatcctatatctaacttggttcaggaattgaatgaacatccaattggtcgtgttacaccaactgcccccagaactacttcccatcggaaccggtttacgtctatatcacgtgcttttggagatggttcaaagttactgccagaagaccacatgttgactggcttcgctagtggttctaagaagccacgaagtcaagtttcatactcaggttctcctagaagtgaggaacttggcttaaaaaacaaagatcatttccgcaagatacaatctcatgtcagtgttaagacaagtgatgcaaaaaaacttcctgatagttctagaagtgggcatagcagtccagagctattgacttgcattgcaaatgttcttgttacagtgggtgatagaggttggagggagtatgatacccagatcacaatggattctgatgttcacagtgaacagaggatatgcgtgaaacttgctgaagggaccaagtatgctcacaaggtctgtcaagttttgcagcctggggccacaaaccgctatacacatgccatgatgtggaagggtggggctgagtggtgcctggaatttcctgacagaagccagtggttgattttcaagcaaatgcatgatgagtgctatagccataacatcagagctgcttctgtgaggaacattccaacccctggtgtccatttggttggaatccatgatgataatgatatggtatcctttgtgcgatctgaagattatcttgtccacatcggaacagatgttgaaattgctcttgatgaggcccgtgtgttatataacatggacagtgatgatgaagagtggatatcaagccggcagaaattcttagtaagagacaacaacgccacacttgagttggcagaagatttgtttgagagggttatggacaaactagagaagtttgcatatagccacgactctaatgaactcagcattgttcagatgaaggaactggagactgatgacctacctctggacattattgaagtgatacatgcatattggcaagctaagaggcagaaaaagggaatgccacttattcgacatttccagttcgctatgtggaaggtctacgagcaacagttacatgaatgggaatcgaaagtatgcagaatgcagggttcatcaaatgggtaccaaggaaaaaaaatgcctcccaagcctgcattgtttgccttctgtttgaggcctcgtggactcgatgtaccatacaagggaccaaagcagcgttctcataagaagcttatgtctacaggctgccatagcttttcaagacagcatgatggcttttaccggcaaggttctctacaagaacaggttctcttcgggcatttgagtcctcggaaagttctacaccaagatttttcaggacaaatattgtcaaaaggagtgcaaccgttgctttctctgatgatcaccagccgtcgccttccttccgccctcagagagttaaacggagcgcatctgaccattggaacactgtcattcatgactggcagaactcaaagcatctctttccgggctcgccccctgttgatattgaggagctcaaactgcgggatgctgcaagcgcagcacagcacgctgctgccatggcgaagctcaagagggaaaaggctcactgcctgatgcagaaggctgaccttgccctccataaggccacggtagccctcatgattgctgatgcaatcaaatcttccagcaggaacaagtctcgggattgccgaaggggatttgatgaatgaggaacgctgacttttttttgccttttgccgcgagcccttggcgtatacacacaacttgaactcgatgcttttgctgatgatgggagcgtgtttgcttatctaatgatcgagtcattagatagcatcccttccccccttctcccccctccccctcctttgcgtctcctgtacataggtttcttttcatcattcttttgtgctcttttacctcccgattaacatattgcccggtgatgaatgggccaggtcaccaggatgtaggttagcaatctggcgtgttgtctgaacagcggctagggaagtggcgctttacggagggttatggtcctgttgttgcactgtgatgcctttacgacattgcatattctagaaggagcacatggcatatcgtgggtcagtgggagcagtgccacatgacccctctgggtcataaataatctatttccgatggctcataggttgtgttcgatgacctaagccgtcggaaattttattgtggtcaacatatagtactcattggaattctggaggaacttgaacatgaggtccaacaacctcttagatatattttcgattccttgtgtgttctccaaatattttgcatccaataaacttacaaacactttcttaaaaatttccatgttttctcgatccctgtaggtgctgcgacatatgtttgcctggtcctacgtatcgatgat

SEQ ID NO: 33626 - DNA, 3631 bp, Zea Mays
ggacagttagctgtaacctacctttccccgctcttcatcggcaaaaaagagggggaaaaaaaacgaaccctgaagaggagagggaaaaaactcgagaaaagcaaaccctaggttgccatgtcatcgacgacatcctaattcgccgcattgcatcgcccaggcaaggggcttttggcacaggtcggcgctcccctgtcatcggattcgattcccctgctcaatttgccgccgatccgtggttcggatcttctcgccgctcggcgactgtcgcgccattttttctctcgatccgtctgcgagacactaagcgcttcgccgacggtcgaccctgctgacgccaccggcgccaggtggcttgtcgcctactctggtccgccaaccgacgcttgatgcctccagggctccaaagagaaatggaaatgggaacaccttcaaggaaagcttcaatatcaatgttccaaaagggagttgtctaaagattccacaaaatgtacaggtcgaagagctcttccttcaatgggtctcttctctaagggttttgatgttcaagagtctgtctttcttccagagtctaattattcagatatcaaacctgccatttgttgtttggatgaccggtgtaaattcactcaaagttttctggacatgacaactgcaccttcagtactgctttggcaccatagaaaaatgttaatggaaagcaattcgactaatggttctcagcaatccatgtcatgtgctttggatgaggatcatcagcagttggtaacagaacatgcatctgatacagtttgtcatgctccacttcaagtttgttcacttaatcttggttcatcaccttatagtccattggatatggtctctgctagttgtgcaaatccatctagctctactagtagggaacccaagattactgaaaggaatataagcccagaatgtaatgacaacagtattgatgatgcaatataattgacataaagtttcgagatcaaaatgagccttgtattggtgctgataggccatgttcctccaaccttagtgttatttgctcttcacagaagtttgcagaggatcgtatttccatcaatattcctcaagacaaagcaattgatgcaacaaatgataaacctcttgacaaagatgaaaaagaaaagcatcctatatctaacttggttcaggaattgaatgaacatccaattggtcgtgttacaccaactgcccccagaactacttcccatcggaaccggtttacgtctatatcacgtgcttttggagatggttcaaagttactgccagaagaccacatgttgactggcttcgctagtggttctaagaagccacgaagtcaagtttcatactcaggttctcctagaagtgaggaacttggcttaaaaaacaaagatcatttccgcaagatacaatctcatgtcagtgttaagacaagtgatgcaaaaaaacttcctgatagttctagaagtgggcatagcagtccagagctattgacttgcattgcaaatgttcttgttacagtgggtgatagaggttggagggagtatgatacccagatcacaatggattctgatgttcacagtgaacagaggatatgcgtgaaacttgctgaagggaccaagtatgctcacaaggtctgtcaagttttgcagcctggggccacaaaccgctatacacatgccatgatgtggaagggtggggctgagtggtgcctggaatttcctgacagaagccagtggttgattttcaagcaaatgcatgatgagtgctatagccataacatcagagctgcttctgtgaggaacattccaacccctggtgtccatttggttggaatccatgatgataatgatatggtatcctttgtgcgatctgaagattatcttgtccacatcggaacagatgttgaaattgctcttgatgaggcccgtgtgttatataacatggacagtgatgatgaagagtggatatcaagccggcagaaattcttagtaagagacaacaacgccacacttgagttggcagaagatttgtttgagagggttatggacaaactagagaagtttgcatatagccacgactctaatgaactcagcattgttcagatgaaggaactggagactgatgacctacctctggacattattgaagtgatacatgcatattggcaagctaagaggcagaaaaagggaatgccacttattcgacatttccagttcgctatgtggaaggtctacgagcaacagttacatgaatgggaatcgaaagtatgcagaatgcagggttcatcaaatgggtaccaaggaaaaaaaatgcctcccaagcctgcattgtttgccttctgtttgaggcctcgtggactcgatgtaccatacaagggaccaaagcagcgttctcataagaagcttatgtctacaggctgccatagcttttcaagacagcatgatggcttttaccggcaagggtactctcccaggttctctacaagaacaggttctcttcgggcatttgagtcctcggaaagttctacaccaagatttttcaggacaaatattgtcaaaaggagtgcaaccgttgctttctctgatgatcaccagccgtcgccttccttccgccctcagagagttaaacggagcgcatctgaccattggaacactgtcattcatgactggcagaactcaaagcatctctttccgggctcgccccctgttgatattgaggagctcaaactgcgggatgctgcaagcgcagcacagcacgctgctgccatggcgaagctcaagagggaaaaggctcactgcctgatgcagaaggctgaccttgccctccataaggccacggtagccctcatgattgctgatgcaatcaaatcttccagcaggaacaagtctcgggattgccgaaggggatttgatgaatgaggaacgctgacttttttttgccttttgccgcgagcccttggcgtatacacacaacttgaactcgatgcttttgctgatgatgggagcgtgtttgcttatctaatgatcgagtcattagatagcatcccttccccccttctcccccctccccctcctttgcgtctcctgtacataggtttcttttcatcattcttttgtgctcttttacctcccgattaacatattgcccggtgatgaatgggccaggtcaccaggatgtaggttagcaatctggcgtgttgtctgaacagcggctagggaagtggcgctttacggagggttatggtcctgttgttgcactgtgatgcctttacgacattgcatattctagaaggagcacatggcatatcgtgggtcagtgggagcagtgccacatgacccctctgggtcataaataatctatttccgatggctcataggttgtgttcgatgacctaagccgtcggaaattttattgtggtcaacatatagtactcattggaattctggaggaacttgaacatgaggtccaacaacctcttagatatattttcgattccttgtgtgttctccaaatattttgcatccaataaacttacaaacactttcttaaaaatttccatgttttctcgatccctgtaggtgctgcgacatatgtttgcctggtcctacgtatcgatgat

SEQ ID NO: 33627 - DNA, 5892 bp, Zea Mays
ggacagttagctgtaacctacctttccccgctcttcatcggcaaaaaagagggggaaaaaaaacgaaccctgaagaggagagggaaaaaactcgagaaaagcaaaccctaggttgccatgtcatcgacgacatcctaattcgccgcattgcatcgcccaggcaaggggcttttggcacaggtcggcgctcccctgtcatcggattcgattcccctgctcaatttgccgccgatccgtggttcggatcttctcgccgctcggcgactgtcgcgccattttttctctcgatccgtctgcgagacactaagcgcttcgccgacggtcgaccctgctgacgccaccggcgccaggtggcttgtcgcctactctggtccgccaaccgacgcttgatgcctccagggctccaaaggattgctgatgagatcgaaactgtttctgttaatttatcgtggattcaactgaacccccatgctccacgcaaccgcccctggtctgggtcgaaactctacatatgatgggaggtgaaattctgaggaattatgttaacttgattcgtgggctcgtgaatggaacccagtggcagtgataaacccactgcaacagatgctaacgaatcagtggtgggtttagatggtgaggacactttgtctgagagggaatctgttggagcaaaagatggacctgccttgcctaatgggagtggaaaggaggctcatgcaagcagtccatctgcggcgaataagaggaagcacaacgacttgggttctaatcaaatggaactcaatgaaccagggacgccaagttccagctcaggtgattccacatggagcataaatggtctcgatgactgtcaccaactctcattgtctagaaataagaacgacgactctgaacattcggttacttcagctggagttacagtgatcaggcagcctcgtggcgtcttgaggttaagaaagctggctcagaatgttagtactgagagttggactggtggtcataatacttcacaagctaatggagttcctaggtcttcccaacacccgaggcggaacaataagagggaatcaattccgtcccaggagaatagagttagtggtgatgaacctgtcagctgcttgaggactgagaatggtacttgtgatcaggataccggcaccaagttctgttccaaaactgagttcttagctgaaaagcagtcacatctttcaggcgaacccccaaaagctgttcatgttgacaagggtgtctatgattatgtcaaagacgatgatggtgatagtttggaagaaaatgctgcctggatgctctgttctttatcagataacaaatgtgctggatcaccaaggaagggaactgataggttgtcaaagagatctttttctcagaattcaaaccattttaagaattcatatgaaaaaatcaaggatatatgtagtcctgctaggttgctgcggaagcgtgatggcaaagttccgttcttgaagcgtcgtcagcgtcggcatttttatgaagtcagccctagcgatgtggatccattctgcattgttaaagagaggatcagggttttttggcctcttgatgagacttggtactttggcatggtcaaggaatataatccggtcacaaggttacatcatgtcaggtatgatggtaaggatgaagaatggatcaaccttcaaaatgagaggattaaacttctgtttttaccagcggaagctcccaataaatctaaatgcaccaactcaaggtcagcgtttgagtcgaagcatgaacagggtgacagagaagacatgcatagaagcggaagcaatacagagagttttgagtcaggtcccatcagctcatggttggctcgatcaaaccaagcaaaatctgctgcactttgtgacatcaacaagcaagatcacagtcattccaatactgttccagtttcatttgaccaaaaacagtgtcgtgcttctgatgccaaggaatctattgattctgcaccatgtagttcacttgcaaatgggggtgtagaggttctcaaggataggaccatacctgaggacgggaggtttcactttgtttattctaggaagcgattttgcagaaaaaagaatgattttcttagcatttccgaacagcattctaattgccaaagaagagcaagttctatggttcttgcttcttgtcctgatatgaaatctagtattgcaactggtgcttcagttacatatgtcatacctgcattgagcctcccactgaaacctgtttataagttgctttgtgaagcctgttgtgtttcggtttccaatgctttctttcttcttcaatgtggtacaatggttgccttatggcctgttgtacatctggatatacttcttattgatagtgctttaggcttgaaacgtttccttcttgacacatgcatgagatcggcagtatcacttttctgtttacttgctggaagctttaagcagtgttctaggcagagaactaccaaggaatcaagaataccttgtacttcagtcagatttcagatatctggtgggcatggtagaagccaagtagtgtttatgtttttcagctttgttggtgtagagaaatggaaatgggaacaccttcaaggaaagcttcaatatcaatgttccaaaagggagttgtctaaagattccacaaaatgtacaggtcgaagagctcttccttcaatgggtctcttctctaagggttttgatgttcaagagtctgtctttcttccagagtctaattattcagatatcaaacctgccatttgttgtttggatgaccggtgtaaattcactcaaagttttctggacatgacaactgcaccttcagtactgctttggcaccatagaaaaatgttaatggaaagcaattcgactaatggttctcagcaatccatgtcatgtgctttggatgaggatcatcagcagttggtaacagaacatgcatctgatacagtttgtcatgctccacttcaagtttgttcacttaatcttggttcatcaccttatagtccattggatatggtctctgctagttgtgcaaatccatctagctctactagtagggaacccaagattactgaaaggaatataagcccagaatgtaatgacaacagtattgatgatgcaatataattgacataaagtttcgagatcaaaatgagccttgtattggtgctgataggccatgttcctccaaccttagtgttatttgctcttcacagaagtttgcagaggatcgtatttccatcaatattcctcaagacaaagcaattgatgcaacaaatgataaacctcttgacaaagatgaaaaagaaaagcatcctatatctaacttggttcaggaattgaatgaacatccaattggtcgtgttacaccaactgcccccagaactacttcccatcggaaccggtttacgtctatatcacgtgcttttggagatggttcaaagttactgccagaagaccacatgttgactggcttcgctagtggttctaagaagccacgaagtcaagtttcatactcaggttctcctagaagtgaggaacttggcttaaaaaacaaagatcatttccgcaagatacaatctcatgtcagtgttaagacaagtgatgcaaaaaaacttcctgatagttctagaagtgggcatagcagtccagagctattgacttgcattgcaaatgttcttgttacagtgggtgatagaggttggagggagtatgatacccagatcacaatggattctgatgttcacagtgaacagaggatatgcgtgaaacttgctgaagggaccaagtatgctcacaaggtctgtcaagttttgcagcctggggccacaaaccgctatacacatgccatgatgtggaagggtggggctgagtggtgcctggaatttcctgacagaagccagtggttgattttcaagcaaatgcatgatgagtgctatagccataacatcagagctgcttctgtgaggaacattccaacccctggtgtccatttggttggaatccatgatgataatgatatggtatcctttgtgcgatctgaagattatcttgtccacatcggaacagatgttgaaattgctcttgatgaggcccgtgtgttatataacatggacagtgatgatgaagagtggatatcaagccggcagaaattcttagtaagagacaacaacgccacacttgagttggcagaagatttgtttgagagggttatggacaaactagagaagtttgcatatagccacgactctaatgaactcagcattgttcagatgaaggaactggagactgatgacctacctctggacattattgaagtgatacatgcatattggcaagctaagaggcagaaaaagggaatgccacttattcgacatttccagttcgctatgtggaaggtctacgagcaacagttacatgaatgggaatcgaaagtatgcagaatgcagggttcatcaaatgggtaccaaggaaaaaaaatgcctcccaagcctgcattgtttgccttctgtttgaggcctcgtggactcgatgtaccatacaagggaccaaagcagcgttctcataagaagcttatgtctacaggctgccatagcttttcaagacagcatgatggcttttaccggcaagtatcaggtaggagatacaatgaatgcactgtggatgggcggatatgcgaattatatgacattggttctctttattccctaacagggtactctcccaggttctctacaagaacaggttctcttcgggcatttgagtcctcggaaagttctacaccaagatttttcaggacaaatattgtcaaaaggagtgcaaccgttgctttctctgatgatcaccagccgtcgccttccttccgccctcagagagttaaacggagcgcatctgaccattggaacactgtcattcatgactggcagaactcaaagcatctctttccgggctcgccccctgttgatattgaggagctcaaactgcgggatgctgcaagcgcagcacagcacgctgctgccatggcgaagctcaagagggaaaaggctcactgcctgatgcagaaggctgaccttgccctccataaggccacggtagccctcatgattgctgatgcaatcaaatcttccagcaggaacaagtctcgggattgccgaaggggatttgatgaatgaggaacgctgacttttttttgccttttgccgcgagcccttggcgtatacacacaacttgaactcgatgcttttgctgatgatgggagcgtgtttgcttatctaatgatcgagtcattagatagcatcccttccccccttctcccccctccccctcctttgcgtctcctgtacataggtttcttttcatcattcttttgtgctcttttacctcccgattaacatattgcccggtgatgaatgggccaggtcaccaggatgtaggttagcaatctggcgtgttgtctgaacagcggctagggaagtggcgctttacggagggttatggtcctgttgttgcactgtgatgcctttacgacattgcatattctagaaggagcacatggcatatcgtgggtcagtgggagcagtgccacatgacccctctgggtcataaataatctatttccgatggctcataggttgtgttcgatgacctaagccgtcggaaattttattgtggtcaacatatagtactcattggaattctggaggaacttgaacatgaggtccaacaacctcttagatatattttcgattccttgtgtgttctccaaatattttgcatccaataaacttacaaacactttcttaaaaatttccatgttttctcgatccctgtaggtgctgcgacatatgtttgcctggtcctacgtatcgatgat

SEQ ID NO: 33628 - DNA, 5828 bp, Zea Mays
cccactctcctccctcgccagttagcgggagcgggacagttagctgtaacctacctttccccgctcttcatcggcaaaaaagagggggaaaaaaaacgaaccctgaagaggagagggaaaaaactcgagaaaagcaaaccctaggttgccatgtcatcgacgacatcctaattcgccgcattgcatcgcccaggcaaggggcttttggcacaggtcggcgctcccctgtcatcggattcgattcccctgctcaatttgccgccgatccgtggttcggatcttctcgccgctcggcgactgtcgcgccattttttctctcgatccgtctgcgagacactaagcgcttcgccgacggtcgaccctgctgacgccaccggcgccaggtggcttgtcgcctactctggtccgccaaccgacgcttgatgcctccagggctccaaaggattgctgatgagatcgaaactgtttctgttaatttatcgtggattcaactgaacccccatgctccacgcaaccgcccctggtctgggtcgaaactctacatatgatgggaggtgaaattctgaggaattatgttaacttgattcgtgggctcgtgaatggaacccagtggcagtgataaacccactgcaacagatgctaacgaatcagtggtgggtttagatggtgaggacactttgtctgagagggaatctgttggagcaaaagatggacctgccttgcctaatgggagtggaaaggaggctcatgcaagcagtccatctgcggcgaataagaggaagcacaacgacttgggttctaatcaaatggaactcaatgaaccagggacgccaagttccagctcaggtgattccacatggagcataaatggtctcgatgactgtcaccaactctcattgtctagaaataagaacgacgactctgaacattcggttacttcagctggagttacagtgatcaggcagcctcgtggcgtcttgaggttaagaaagctggctcagaatgttagtactgagagttggactggtggtcataatacttcacaagctaatggagttcctaggtcttcccaacacccgaggcggaacaataagagggaatcaattccgtcccaggagaatagagttagtggtgatgaacctgtcagctgcttgaggactgagaatggtacttgtgatcaggataccggcaccaagttctgttccaaaactgagttcttagctgaaaagcagtcacatctttcaggcgaacccccaaaagctgttcatgttgacaagggtgtctatgattatgtcaaagacgatgatggtgatagtttggaagaaaatgctgcctggatgctctgttctttatcagataacaaatgtgctggatcaccaaggaagggaactgataggttgtcaaagagatctttttctcagaattcaaaccattttaagaattcatatgaaaaaatcaaggatatatgtagtcctgctaggttgctgcggaagcgtgatggcaaagttccgttcttgaagcgtcgtcagcgtcggcatttttatgaagtcagccctagcgatgtggatccattctgcattgttaaagagaggatcagggttttttggcctcttgatgagacttggtactttggcatggtcaaggaatataatccggtcacaaggttacatcatgtcaggtatgatggtaaggatgaagaatggatcaaccttcaaaatgagaggattaaacttctgtttttaccagcggaagctcccaataaatctaaatgcaccaactcaaggtcagcgtttgagtcgaagcatgaacagggtgacagagaagacatgcatagaagcggaagcaatacagagagttttgagtcaggtcccatcagctcatggttggctcgatcaaaccaagcaaaatctgctgcactttgtgacatcaacaagcaagatcacagtcattccaatactgttccagtttcatttgaccaaaaacagtgtcgtgcttctgatgccaaggaatctattgattctgcaccatgtagttcacttgcaaatgggggtgtagaggttctcaaggataggaccatacctgaggacgggaggtttcactttgtttattctaggaagcgattttgcagaaaaaagaatgattttcttagcatttccgaacagcattctaattgccaaagaagagcaagttctatggttcttgcttcttgtcctgatatgaaatctagtattgcaactggtgcttcagttacatatgtcatacctgcattgagcctcccactgaaacctgtttataagttgctttgtgaagcctgttgtgtttcggtttccaatgctttctttcttcttcaatgtggtacaatggttgccttatggcctgttgtacatctggatatacttcttattgatagtgctttaggcttgaaacgtttccttcttgacacatgcatgagatcggcagtatcacttttctgtttacttgctggaagctttaagcagtgttctaggcagagaactaccaaggaatcaagaataccttgtacttcagtcagatttcagatatctggtgggcatggtagaagccaagtagtgtttatgtttttcagctttgttggtgtagagaaatggaaatgggaacaccttcaaggaaagcttcaatatcaatgttccaaaagggagttgtctaaagattccacaaaatgtacaggtcgaagagctcttccttcaatgggtctcttctctaagggttttgatgttcaagagtctgtctttcttccagagtctaattattcagatatcaaacctgccatttgttgtttggatgaccggtgtaaattcactcaaagttttctggacatgacaactgcaccttcagtactgctttggcaccatagaaaaatgttaatggaaagcaattcgactaatggttctcagcaatccatgtcatgtgctttggatgaggatcatcagcagttggtaacagaacatgcatctgatacagtttgtcatgctccacttcaagtttgttcacttaatcttggttcatcaccttatagtccattggatatggtctctgctagttgtgcaaatccatctagctctactagtagggaacccaagattactgaaaggaatataagcccagaatgtaatgacaacagtattgatgatgcaatataattgacataaagtttcgagatcaaaatgagccttgtattggtgctgataggccatgttcctccaaccttagtgttatttgctcttcacagaagtttgcagaggatcgtatttccatcaatattcctcaagacaaagcaattgatgcaacaaatgataaacctcttgacaaagatgaaaaagaaaagcatcctatatctaacttggttcaggaattgaatgaacatccaattggtcgtgttacaccaactgcccccagaactacttcccatcggaaccggtttacgtctatatcacgtgcttttggagatggttcaaagttactgccagaagaccacatgttgactggcttcgctagtggttctaagaagccacgaagtcaagtttcatactcaggttctcctagaagtgaggaacttggcttaaaaaacaaagatcatttccgcaagatacaatctcatgtcagtgttaagacaagtgatgcaaaaaaacttcctgatagttctagaagtgggcatagcagtccagagctattgacttgcattgcaaatgttcttgttacagtgggtgatagaggttggagggagtatgatacccagatcacaatggattctgatgttcacagtgaacagaggatatgcgtgaaacttgctgaagggaccaagtatgctcacaaggtctgtcaagttttgcagcctggggccacaaaccgctatacacatgccatgatgtggaagggtggggctgagtggtgcctggaatttcctgacagaagccagtggttgattttcaagcaaatgcatgatgagtgctatagccataacatcagagctgcttctgtgaggaacattccaacccctggtgtccatttggttggaatccatgatgataatgatatggtatcctttgtgcgatctgaagattatcttgtccacatcggaacagatgttgaaattgctcttgatgaggcccgtgtgttatataacatggacagtgatgatgaagagtggatatcaagccggcagaaattcttagtaagagacaacaacgccacacttgagttggcagaagatttgtttgagagggttatggacaaactagagaagtttgcatatagccacgactctaatgaactcagcattgttcagatgaaggaactggagactgatgacctacctctggacattattgaagtgatacatgcatattggcaagctaagaggcagaaaaagggaatgccacttattcgacatttccagttcgctatgtggaaggtctacgagcaacagttacatgaatgggaatcgaaagtatgcagaatgcagggttcatcaaatgggtaccaaggaaaaaaaatgcctcccaagcctgcattgtttgccttctgtttgaggcctcgtggactcgatgtaccatacaagggaccaaagcagcgttctcataagaagcttatgtctacaggctgccatagcttttcaagacagcatgatggcttttaccggcaaggttctctacaagaacaggttctcttcgggcatttgagtcctcggaaagttctacaccaagatttttcaggacaaatattgtcaaaaggagtgcaaccgttgctttctctgatgatcaccagccgtcgccttccttccgccctcagagagttaaacggagcgcatctgaccattggaacactgtcattcatgactggcagaactcaaagcatctctttccgggctcgccccctgttgatattgaggagctcaaactgcgggatgctgcaagcgcagcacagcacgctgctgccatggcgaagctcaagagggaaaaggctcactgcctgatgcagaaggctgaccttgccctccataaggccacggtagccctcatgattgctgatgcaatcaaatcttccagcaggaacaagtctcgggattgccgaaggggatttgatgaatgaggaacgctgacttttttttgccttttgccgcgagcccttggcgtatacacacaacttgaactcgatgcttttgctgatgatgggagcgtgtttgcttatctaatgatcgagtcattagatagcatcccttccccccttctcccccctccccctcctttgcgtctcctgtacataggtttcttttcatcattcttttgtgctcttttacctcccgattaacatattgcccggtgatgaatgggccaggtcaccaggatgtaggttagcaatctggcgtgttgtctgaacagcggctagggaagtggcgctttacggagggttatggtcctgttgttgcactgtgatgcctttacgacattgcatattctagaaggagcacatggcatatcgtgggtcagtgggagcagtgccacatgacccctctgggtcataaataatctatttccgatggctcataggttgtgttcgatgacctaagccgtcggaaattttattgtggtcaacatatagtactcattggaattctggaggaacttgaacatgaggtccaacaacctcttagatatattttcgattccttgtgtgttctccaaatattttgcatccaataaacttacaaacactttcttaaaaatttccatgttttctcgatccctgtaggtgctgcgacatatgtttgcctggtcctacgtatcgatgat

SEQ ID NO: 33629 - DNA, 1151 bp, Zea Mays
atgttttttggcctgctgctataaatctcgtgcccaaataagaacctttgtttgctgcaaactacccaagcccaagccaccgaccaagtgggagctgtttgcaaaggcgaaaggaattaccaagcgcaagaagaacaagcgtgagtgggacgagcaaactcaatcctggaagcggacttatggctatgaccgtgtaaatgatgataaagacgttccgattcttgaagccaaactgactgacgagcctggtgttgatccctttgcacagagaagggatgagaagaagaagagggttgaaaagcaagaaaaaagcagattagagaatttaaagaaagctgcaaagtcatatacagcttgctgcgaaggccttgcccatcacaggaactaaagctgaccttccaaaaaaatctagaaaagaggatcttgagagtgttgttggcatggcttcgtcagcaacagcaagcggtgggaagtttgacgagaagttgcctggcgagaaacctccaaagcaccctggcaaacatagaaagttcctcccagttgctgaggggaagggaatgggcagcctggagaaacagcagaatgacaaaatcctgagctctctacttgccagaaactctgatgaaccgcttgatgtcagcaaggcaattacaatgtacaaggtgaaaaaggaaaagcagagaaggaaagagaaaaatatgccatcaaaatctgataagcttaagccccagaagaaaccccacaagaaatcatcgaagaaaagggcttaggtccacgtctttcagttgaccacagttttgaaagctgaagcaaggaggcctgtcacatattggattgtatttgtgagctttgaatctctgggagaaatattgttattccgtctaatggttatgatacaaaaacctgaatgctttgccatggtatgcgcccatcttgtacttttcaaattatgtttgggatgtggtttgtagcttggtaagagtccctccctttggttctgaaacctgttcaaaggagctgtcctggaaacagtaccaatgaagctactgtctagtgtcgatggtactgatttgttgttggcctctgagtttactctacgatgtggtgtgagattatacattttaaatctttcctccgataccttgtcaagc

SEQ ID NO: 33630 - DNA, 1494 bp, Zea Mays
cgcttcacatgtcacttgggccagcggccagtcagccccaagtaaaaccctaattcctttctccagtcgcagcctcgatttctttccctttccctttcccttccccagtcagccgcgagcctcgtaccggcgcagccatggcggaggagcccgccatcgtcgtcgccgcctcctccagctgcgaggtcgacctcggcaacctcatggcgtacgacccgtgtcaccacgtcgcagccgccgcctccgcctccagggaggagctgaggcaggagtgcctgcggaaggggacggagctggcgcaggcggtggccgacgccctcttcgcgctgccgcccaccgaggaccgcgacggccccatcgtccacctcccgccacacaccgttcgactcccgcgcgagaagcatctacccaagcccaagccaccgaccaagtgggagctgtttgcaaaggcgaaaggaattaccaagcgcaagaagaacaagcgtgagtgggacgagcaaactcaatcctggaagcggacttatggctatgaccgtgtaaatgatgataaagacgttccgattcttgaagccaaactgactgacgagcctggtgttgatccctttgcacagagaagggatgagaagaagaagagggttgaaaagcaagaaaaaagcagattagagaatttaaagaaagctgcaaagtcatatacagcttgctgcgaaggccttgcccatcacaggaactaaagctgaccttccaaaaaaatctagaaaagaggatcttgagagtgttgttggcatggcttcgtcagcaacagcaagcggtgggaagtttgacgagaagttgcctggcgagaaacctccaaagcaccctggcaaacatagaaagttcctcccagttgctgaggggaagggaatgggcagcctggagaaacagcagaatgacaaaatcctgagctctctacttgccagaaactctgatgaaccgcttgatgtcagcaaggcaattacaatgtacaaggtgaaaaaggaaaagcagagaaggaaagagaaaaatatgccatcaaaatctgataagcttaagccccagaagaaaccccacaagaaatcatcgaagaaaagggcttaggtccacgtctttcagttgaccacagttttgaaagctgaagcaaggaggcctgtcacatattggattgtatttgtgagctttgaatctctgggagaaatattgttattccgtctaatggttatgatacaaaaacctgaatgctttgccatggtatgcgcccatcttgtacttttcaaattatgtttgggatgtggtttgtagcttggtaagagtccctccctttggttctgaaacctgttcaaaggagctgtcctggaaacagtaccaatgaagctactgtctagtgtcgatggtactgatttgttgttggcctctgagtttactctacgatgtggtgtgagattatacattttaaatctttcctccgataccttgtcaagc

SEQ ID NO: 33631 - DNA, 1544 bp, Zea Mays
cgcttcacatgtcacttgggccagcggccagtcagccccaagtaaaaccctaattcctttctccagtcgcagcctcgatttctttccctttccctttcccttccccagtcagccgcgagcctcgtaccggcgcagccatggcggaggagcccgccatcgtcgtcgccgcctcctccagctgcgaggtcgacctcggcaacctcatggcgtacgacccgtgtcaccacgtcgcagccgccgcctccgcctccagaatgcgtggtcttgctggggcgaaaaaactcagggaggagctgaggcaggagtgcctgcggaaggggacggagctggcgcaggcggtggccgacgccctcttcgcgctgccgcccaccgaggaccgcgacggccccatcgtccacctcccgccacacaccgttcgactcccgcgcgagaagcatctacccaagcccaagccaccgaccaagtgggagctgtttgcaaaggcgaaaggaattaccaagcgcaagaagaacaagcgtgagtgggacgagcaaactcaatcctggaagcggacttatggctatgaccgtgtaaatgatgataaagacgttccgattcttgaagccaaactgactgacgagcctggtgttgatccctttgcacagagaagggatgagaagaagaagagggttgaaaagcaagaaaaaagcagattagagaatttaaagaaagctgcaaaggttggtgctttgccaagtcatatacagcttgctgcgaaggccttgcccatcacaggaactaaagctgaccttccaaaaaaatctagaaaagaggatcttgagagtgttgttggcatggcttcgtcagcaacagcaagcggtgggaagtttgacgagaagttgcctggcgagaaacctccaaagcaccctggcaaacatagaaagttcctcccagttgctgaggggaagggaatgggcagcctggagaaacagcagaatgacaaaatcctgagctctctacttgccagaaactctgatgaaccgcttgatgtcagcaaggcaattacaatgtacaaggtgaaaaaggaaaagcagagaaggaaagagaaaaatatgccatcaaaatctgataagcttaagccccagaagaaaccccacaagaaatcatcgaagaaaagggcttaggtccacgtctttcagttgaccacagttttgaaagctgaagcaaggaggcctgtcacatattggattgtatttgtgagctttgaatctctgggagaaatattgttattccgtctaatggttatgatacaaaaacctgaatgctttgccatggtatgcgcccatcttgtacttttcaaattatgtttgggatgtggtttgtagcttggtaagagtccctccctttggttctgaaacctgttcaaaggagctgtcctggaaacagtaccaatgaagctactgtctagtgtcgatggtactgatttgttgttggcctctgagtttactctacgatgtggtgtgagattatacattttaaatctttcctccgataccttgtcaagc

SEQ ID NO: 33632 - DNA, 6687 bp, Zea Mays
ccgacgcgccgctcgctccccacccaatgtcgcactgcccccgcgcctcactctccctcgcgccgccgtcgcccttcctcttcccccactgcccgtctccgcgccggcggcggcgcccgcgcggtcgcagcctccacctgacctcgcgccccctcctcaccctcgctcgcttcgacccgccgcggctgttccgcctcaaggtctccgactccagcgcctcccccggcgaggccgctcacgcccacgcccaccacagcaaccaccgcgcccacgcccaccacagccccgcgccgtcgctgctcccgtggccgcgggccctgatcggctcgctcgcgccggtatggcgggaggggctcttcctcgtgcgctgctccgtcttcgccgccgtggtctccgtcgccggcgcgctctcctggttcgcgcagctccgggcccgctccttcgtcgaggcccgcctcctgcccgctgcatgctccgcgctcagcgagtacctccagcgggaggtccgcctcggcaaggtgcgcagcatctcgccgatcgggatcacgctgcagacctgctccatcggcccgcacgaggaggagttctcctgcgccgaggtgcccgtcatgaagattagggtacgccccttcgccagtcttaggaggggaagggtcgtcgtggacgccgtgctgtccgagccctccgccctggtggcgcagaagaaggatttctcgtggctcgggattcccgcgccctctgagggcacggtcaagaggcactcgggggaggagggcatagactaccgcaccaagacgaggaggcttgccagggagaaggccgcggagcaatggaacgaggagagggataaagccgcaagggaagccgctgaaaagggatacaccattccgagcggccaatcggttcctctgtccagtaatgagattctggaggctgatgggcctaccgagattgggaagtccagtccacccctttgcgctgatcaaatgcacaagaatgatcatcacttggcaacaggcatcgactctggttcaaagcatgcagatttggagaaatcttttggcttcaaatcgcccattccagggatcaacctctggtctagggtgatttcaagccctagtaggctcaggtacatgagaaaggctcccagcaaggttattccagatgttgataattcttctcagcaaaggattcttagacgcagtgcagatgctgctgtatcatattttcagaacacaggtcacattaatattgatgattcatctcctggaccaggaaaaggctcgtcggatggtggtcatgccaatgttggtggcagtggaatcaattcaaatgatgaaactgtcagcaactctaagactgcatcaacgagtttggctgaatccccatcgcatagtcaactatctagtcagtgcagttcaagtaatttggataacttgttactatggcacaatttggaagatctgcagatcggtcaggccaagaatccttctggaaataagcctgttccacaccaagaaaatatttttgggaattttggttcatgcacacatgctcacaactgggtgccattttggccgttccaattaaagagttgtcctgtcagttttaattcaccttgggcatctctggaccttcaaattgagaaattgaagtcacaatttgccattggtcctggagatttctctgctgaacttacagaaggggttagtgagatccatcctggtggtgttcagaatgcacttccaatcaccctggattctgtgtatttcaatggaggtaacttgatgcttctgggatatggtgatcaagaacccagagaaatgaagcatgctagtggtcatgtcaagttcaaaaacaattataatcgtgtacacgtgcatgtaactgggaattgcatggagtggaggcaagaccgatcttctcaaggagggggttatctttctacagatgtatttgttgacatagctgaggaaacatggcatgctaatctcaatatagtcgatgcatttgccccgctgtttgaaagaattttagaaatacctgttgtttggcacaaaggaagagctaccggtgaggtgcatatctgtatgtcaaagggcgatagttttccaagcattcatggtcagcttgatgtgaaaggtcttgcttttcagatattggatgccccatcatcattttctgatattgtggcaaaattatcatttcgtggtcaaagagtatttctgcacaatgcaagtgggtggtttggtgacgctccagttgaagcttctggagatttgggactaaatcctgaggatggagagtttcatctaatgtgccaggttccatccgttgaagttaacgcacttatgaggacaatgaaaatgaaacctcttatgttcccattggctggttcagttactgctgtatttaactgtcaagggccccttgatgctcctgtttttgttggaagtgggattgtctcaaggaagtctttttcagtatctggtatgcctccatctgctgcttctgaagctgtgatgcaaaacaaagaggctggcgcagttgctgcatttgaccatattccattctctcatgtgtcggccaatttcacgttcaaccttgacaactctagcatgcctattggatggcggagaaattcgaggggctggtaacgcatggatttgcccagagggggagggtgatgattctgctatggatattaatttgtctgggactattctgcttgataaagtattgcatcgttacattcctggaggaatccaactgattccactcaagattggagagctcaatggagagactagactttctggttcccttattagaccgaagtttgatatcaaatgggctgcaccaaatgcagaagattctttttcagatgcacgtggcaatattgttattgcacatgattacattatggtcaactcttcatcagtctcctttgatttaaatagtcgagttcaaacatcatatattaatgactacttgttgaacaaggagacttatcaaatgaaaaaaatcatgccactaattgtggagggtgttgatttggatttacgtatgcgaggctttgagtttgctcatatagcctcttcaattccttttgattcaccacgtccattacatttgaaagcatctggaagggtcaaatttcaaggaaaaatcatgaaatctagcaatatagctgatggcaatatcaatggtgttcttcaaagtaacattgaccaaaataagcttgagaccaatgcgtcaaagcttgtaggcgacatatctctttctggaattaaactcaaccagctcatgctagcgccacaatctactggttttctttccatatcacgggattctatgatgttgaatgctactggcaggcctgatgaaaatttttctatagaagtgaatgggccattgcttttcacttcaaacgaggttattcaagatgtaaggcttctgtctatattcctccaaaagggccagctgagatctaatatctgttatcatcctgagaatttgaccagtctagaggttcggaatttgacactcgatgagctggagtttgcttcattgcgcggatttgttcaaaaggcagaacttcagcttaattttcagaaaagaagaggccatggtttgctgtcaataatccgtcccaaatttagtggcgtgcttggtgaggcacttgatatagctgctcgatggagcggtgatgttattactatggaaaaatctatcctggagcaagctaatagcaaatatgaggttcaaggggagtatgtttttcctggaacgcgtgatagatttcctgtggaaagtcagagtaatgggttcatagagaaagcaatgggagggcatcttggtagcataatgtcttcgatgggcaggtggaggatgagactagaggttcctggtgctgaagtagctgaaatgcttcctttagcaaggcttctttcacggagtacagacccagttatccgttcgagatcaaaggaactttttatgcaatgtctgcattctgttgggttcaatgctgaaagtcttaatgatcagctaaaggcattagaaatttatcatgattggttggatgatgacacaatggaagatatagcatttcctggcttagctgaactaagaggctattggcgtggctctctggatgccagtggaggtggcaatggggataccatggcagattttgatttcaatggtgaagattgggaatggggaacttacaagacacagcgagttctcgcatctggttcattcagcaataatgatggtctgcgtcttgataaattatttatccagaaagataatgccacccttcatgctgatggttcgattcttgggccgcttacaaatcttcactttgctgtgcttaacttcccagtcggccttataccagctttagttcaggctatagaatcatcaaccacagactcaattcattttctgaggcaatggttgactcccatcaaaggtattttgcacatggagggagacttgagaggtactctggcaaaaccagaatgtgatgttcaaataaggctgcttgatggcactattggaggcatcgatcttggaagagcagaagtattagcttctgttacccctacaagtcgtttcgtatttgatgcaaatttcgaaccgacaatacaaagtggacatgtaaacattcaaggtagtataccagtcacttatgtagacaacagctcgatagaggaaagtccagaagaggcagatgggaaacaaggtatcataagaatccctgtttgggcaagagacagaggatcatcgaatgagatcagtgaagcaagaatggtgagagacaagacagaggagggctgggaatttcaattagctgaaaaacttaaaggtttaagttataacatgctagaaccaggtgaagtgaggatagatgcagatataaaggatgggggtatgatgctgataactgcattgagtccttatgcaaactggcttcaaggctatgctgatgttttcctgcaggttaaaggcactgttgatcagcctgttgttgatggatcagcaacgtttaaccgggctattgtgaactctccttttcttcggacaccattgacaaattttgcgggtacaattcaagtcatatccaacagactatgcatcagttcaatggaaagcagggttgggaggaaagggagattgtcgatgaaaggaagcctacctcttaaaaatagcgagccatctgccaatgacaagattgatttgaaatgtgaagttctggacatacgagcaaaaaatattttgagtggccaagtagacagccagctacaagttacaggctcaattttgcgaccagatctttctggaatgatccggttgagtcatggtgaagcatatttgccccatgataaaggcaatggtgctgctgtcactaggttgacttcaaacaagtcgagttatcttctttctggttttgaccaatcaaccacttcgcaggatgtctcacgaattctggggtcactgtcaacatcggcagaaagagatcaatcagacacagaaaagactcttgagcatggaagttttaatccaaacattgatgcacggctaaatgatctgaagctcaccttgggaccagaattgaggattgtttatcctttaattctgaattttgctgtcagtggtgacctagagcttaatgggatggttcatccaaagtatctaagacctaagggcatcttaacatttgaaaatggtgaggtcaacctggtagctacgcaggttagacttaaaaatgatcatttaaatgcagcaaaatttgaacctgatcttggtttggatcctgttcttgatctcgttcttgttggatctgaatggcaattcaaaatccaaagtcgagcaagcatgtggcaagacaatctggtggtaacctcaacacgctctgtggaccaggatgttctgtcacctagtgaggctgcaaaggtttttgaatcgcagcttgcggaatcattattagaaggtgacggacagcttgcgttcaagaagcttgcaactgcaacgctggaaactttgatgccaaggatagaaggcaagggtgagtttggacaggcacggtggcgactggtttatgctccgcagatcccaagtttactctctgtggatccaacagttgatccgctaaaatctctggcaaacaatatctcttttgccacggaggtcgaagtgcagctcggaaaacgccttcaggcctctgtcgtcaggcaaatgaaagattcagaaatggcgatgcagtggacgctgatatatcagctaaccagtaggctccgtgttctcttccagtctactccatccaataggcttctcttcgagtattcagcaacatcacaggaatgattcattttttgttattgcgcacagcaagaattggttgtagcagctgcgtcgtacaaagattaggtggcctgataatcgttttttttgtagataagcaagctttgataagttgtacgtgtacaatcgctcagttgtattgtatttacattctttctcggaaacaaagtttctgagcctgtaaataataggtagcgatcttagcgtcgggtgtagagagaagtataaatgaatgaacgtttcctgtctcttgcgttgctgtccatacgtgaaattggctttcgttactgaccagttagagcaactagtcagatg

SEQ ID NO: 33633 - DNA, 6694 bp, Zea Mays
ccgacgcgccgctcgctccccacccaatgtcgcactgcccccgcgcctcactctccctcgcgccgccgtcgcccttcctcttcccccactgcccgtctccgcgccggcggcggcgcccgcgcggtcgcagcctccacctgacctcgcgccccctcctcaccctcgctcgcttcgacccgccgcggctgttccgcctcaaggtctccgactccagcgcctcccccggcgaggccgctcacgcccacgcccaccacagcaaccaccgcgcccacgcccaccacagccccgcgccgtcgctgctcccgtggccgcgggccctgatcggctcgctcgcgccggtatggcgggaggggctcttcctcgtgcgctgctccgtcttcgccgccgtggtctccgtcgccggcgcgctctcctggttcgcgcagctccgggcccgctccttcgtcgaggcccgcctcctgcccgctgcatgctccgcgctcagcgagtacctccagcgggaggtccgcctcggcaaggtgcgcagcatctcgccgatcgggatcacgctgcagacctgctccatcggcccgcacgaggaggagttctcctgcgccgaggtgcccgtcatgaagattagggtacgccccttcgccagtcttaggaggggaagggtcgtcgtggacgccgtgctgtccgagccctccgccctggtggcgcagaagaaggatttctcgtggctcgggattcccgcgccctctgagggcacggtcaagaggcactcgggggaggagggcatagactaccgcaccaagacgaggaggcttgccagggagaaggccgcggagcaatggaacgaggagagggataaagccgcaagggaagccgctgaaaagggatacaccattccgagcggccaatcggttcctctgtccagtaatgagattctggaggctgatgggcctaccgagattgggaagtccagtccacccctttgcgctgatcaaatgcacaagaatgatcatcacttggcaacaggcatcgactctggttcaaagcatgcagatttggagaaatcttttggcttcaaatcgcccattccagggatcaacctctggtctagggtgatttcaagccctagtaggctcaggtacatgagaaaggctcccagcaaggttattccagatgttgataattcttctcagcaaaggattcttagacgcagtgcagatgctgctgtatcatattttcagaacacaggtcacattaatattgatgattcatctcctggaccaggaaaaggctcgtcggatggtggtcatgccaatgttggtggcagtggaatcaattcaaatgatgaaactgtcagcaactctaagactgcatcaacgagtttggctgaatccccatcgcatagtcaactatctagtcagtgcagttcaagtaatttggataacttgttactatggcacaatttggaagatctgcagatcggtcaggccaagaatccttctggaaataagcctgttccacaccaagaaaatatttttgggaattttggttcatgcacacatgctcacaactgggtgccattttggccgttccaattaaagagttgtcctgtcagttttaattcaccttgggcatctctggaccttcaaattgagaaattgaagtcacaatttgccattggtcctggagatttctctgctgaacttacagaaggggttagtgagatccatcctggtggtgttcagaatgcacttccaatcaccctggattctgtgtatttcaatggaggtaacttgatgcttctgggatatggtgatcaagaacccagagaaatgaagcatgctagtggtcatgtcaagttcaaaaacaattataatcgtgtacacgtgcatgtaactgggaattgcatggagtggaggcaagaccgatcttctcaaggagggggttatctttctacagatgtatttgttgacatagctgaggaaacatggcatgctaatctcaatatagtcgatgcatttgccccgctgtttgaaagaattttagaaatacctgttgtttggcacaaaggaagagctaccggtgaggtgcatatctgtatgtcaaagggcgatagttttccaagcattcatggtcagcttgatgtgaaaggtcttgcttttcagatattggatgccccatcatcattttctgatattgtggcaaaattatcatttcgtggtcaaagagtatttctgcacaatgcaagtgggtggtttggtgacgctccagttgaagcttctggagatttgggactaaatcctgaggatggagagtttcatctaatgtgccaggttccatccgttgaagttaacgcacttatgaggacaatgaaaatgaaacctcttatgttcccattggctggttcagttactgctgtatttaactgtcaagggccccttgatgctcctgtttttgttggaagtgggattgtctcaaggaagtctttttcagtatctggtatgcctccatctgctgcttctgaagctgtgatgcaaaacaaagaggctggcgcagttgctgcatttgaccatattccattctctcatgtgtcggccaatttcacgttcaaccttgacaactctgttgctgatttatatggtattagagcatgcctattggatggcggagaaattcgaggggctggtaacgcatggatttgcccagagggggagggtgatgattctgctatggatattaatttgtctgggactattctgcttgataaagtattgcatcgttacattcctggaggaatccaactgattccactcaagattggagagctcaatggagagactagactttctggttcccttattagaccgaagtttgatatcaaatgggctgcaccaaatgcagaagattctttttcagatgcacgtggcaatattgttattgcacatgattacattatggtcaactcttcatcagtctcctttgatttaaatagtcgagttcaaacatcatatattaatgactacttgttgaacaaggagacttatcaaatgaaaaaaatcatgccactaattgtggagggtgttgatttggatttacgtatgcgaggctttgagtttgctcatatagcctcttcaattccttttgattcaccacgtccattacatttgaaagcatctggaagggtcaaatttcaaggaaaaatcatgaaatctagcaatatagctgatggcaatatcaatggtgttcttcaaagtaacattgaccaaaataagcttgagaccaatgcgtcaaagcttgtaggcgacatatctctttctggaattaaactcaaccagctcatgctagcgccacaatctactggttttctttccatatcacgggattctatgatggttcggaatttgacactcgatgagctggagtttgcttcattgcgcggatttgttcaaaaggtgtgttggatgattatgctaaggcagaacttcagcttaattttcagaaaagaagaggccatggtttgctgtcaataatccgtcccaaatttagtggcgtgcttggtgaggcacttgatatagctgctcgatggagcggtgatgttggctggggcaacacagattctgggaagatgatttcaacattattacgtcgcctcctattctcatatgtagtggcacaacaatcaaatgaagcacaactcaagaggaggccaaggcgggcacaatactgctcaattactatggaaaaatctatcctggagcaagctaatagcaaatatgaggttcaaggggagtatgtttttcctggaacgcgtgatagatttcctgtggaaagtcagagtaatgggttcatagagaaagcaatgggagggcatcttggtagcataatgtcttcgatgggcaggtggaggatgagactagaggttcctggtgctgaagtagctgaaatgcttcctttagcaaggcttctttcacggagtacagacccagttatccgttcgagatcaaaggaactttttatgcaatgtctgcattctgttgggttcaatgctgaaagtcttaatgatcagctaaaggcattagaaatttatcatgattggttggatgatgacacaatggaagatatagcatttcctggcttagctgaactaagaggctattggcgtggctctctggatgccagtggaggtggcaatggggataccatggcagattttgatttcaatggtgaagattgggaatggggaacttacaagacacagcgagttctcgcatctggttcattcagcaataatgatggtctgcgtcttgataaattatttatccagaaagataatgccacccttcatgctgatggttcgattcttgggccgcttacaaatcttcactttgctgtgcttaacttcccagtcggccttataccagctttagttcaggctatagaatcatcaaccacagactcaattcattttctgaggcaatggttgactcccatcaaaggtattttgcacatggagggagacttgagaggtactctggcaaaaccagaatgtgatgttcaaataaggctgcttgatggcactattggaggcatcgatcttggaagagcagaagtattagcttctgttacccctacaagtcgtttcgtatttgatgcaaatttcgaaccgacaatacaaagtggacatgtaaacattcaaggtagtataccagtcacttatgtagacaacagctcgatagaggaaagtccagaagaggcagatgggaaacaaggtatcataagaatccctgtttgggcaagagacagaggatcatcgaatgagatcagtgaagcaagaatggtgagagacaagacagaggagggctgggaatttcaattagctgaaaaacttaaaggtttaagttataacatgctagaaccaggtgaagtgaggatagatgcagatataaaggatgggggtatgatgctgataactgcattgagtccttatgcaaactggcttcaaggctatgctgatgttttcctgcaggttaaaggcactgttgatcagcctgttgttgatggatcagcaacgtttaaccgggctattgtgaactctccttttcttcggacaccattgacaaattttgcgggtacaattcaagtcatatccaacagactatgcatcagttcaatggaaagcagggttgggaggaaagggagattgtcgatgaaaggaagcctacctcttaaaaatagcgagccatctgccaatgacaagattgatttgaaatgtgaagttctggacatacgagcaaaaaatattttgagtggccaagtagacagccagctacaagttacaggctcaattttgcgaccagatctttctggaatgatccggttgagtcatggtgaagcatatttgccccatgataaaggcaatggtgctgctgtcactaggttgacttcaaacaagtcgagttatcttctttctggttttgaccaatcaaccacttcgcaggatgtctcacgaattctggggtcactgtcaacatcggcagaaagagatcaatcagacacagaaaagactcttgagcatggaagttttaatccaaacattgatgcacggctaaatgatctgaagctcaccttgggaccagaattgaggattgtttatcctttaattctgaattttgctgtcagtggtgacctagagcttaatgggatggttcatccaaagtatctaagacctaagggcatcttaacatttgaaaatggtgaggtcaacctggtagctacgcaggttagacttaaaaatgatcatttaaatgcagcaaaatttgaacctgatcttggtttggatcctgttcttgatctcgttcttgttggatctgaatggcaattcaaaatccaaagtcgagcaagcatgtggcaagacaatctggtggtaacctcaacacgctctgtggaccaggatgttctgtcacctagtgaggctgcaaaggtttttgaatcgcagcttgcggaatcattattagaaggtgacggacagcttgcgttcaagaagcttgcaactgcaacgctggaaactttgatgccaaggatagaaggcaagggtgagtttggacaggcacggtggcgactggtttatgctccgcagatcccaagtttactctctgtggatccaacagttgatccgctaaaatctctggcaaacaatatctcttttgccacggaggtcgaagtgcagctcggaaaacgccttcaggcctctgtcgtcaggcaaatgaaagattcagaaatggcgatgcagtggacgctgatatatcagctaaccagtaggctccgtgttctcttccagtctactccatccaataggcttctcttcgagtattcagcaacatcacaggaatgattcattttttgttattgcgcacagcaagaattggttgtagcagctgcgtcgtacaaagattaggtggcctgataatcgttttttttgtagataagcaagctttgataagttgtacgtgtacaatcgctcagttgtattgtatttacattctttctcggaaacaaagtttctgagcctgtaaataataggtagcgatcttagcgtcgggtgtagagagaagtataaatgaatgaacgtttcctgtctcttgcgttgctgtccatacgtgaaattggctttcgttactgaccagttagagcaactagtcagatg

SEQ ID NO: 33634 - DNA, 6540 bp, Zea Mays
ccgacgcgccgctcgctccccacccaatgtcgcactgcccccgcgcctcactctccctcgcgccgccgtcgcccttcctcttcccccactgcccgtctccgcgccggcggcggcgcccgcgcggtcgcagcctccacctgacctcgcgccccctcctcaccctcgctcgcttcgacccgccgcggctgttccgcctcaaggtctccgactccagcgcctcccccggcgaggccgctcacgcccacgcccaccacagcaaccaccgcgcccacgcccaccacagccccgcgccgtcgctgctcccgtggccgcgggccctgatcggctcgctcgcgccggtatggcgggaggggctcttcctcgtgcgctgctccgtcttcgccgccgtggtctccgtcgccggcgcgctctcctggttcgcgcagctccgggcccgctccttcgtcgaggcccgcctcctgcccgctgcatgctccgcgctcagcgagtacctccagcgggaggtccgcctcggcaaggtgcgcagcatctcgccgatcgggatcacgctgcagacctgctccatcggcccgcacgaggaggagttctcctgcgccgaggtgcccgtcatgaagattagggtacgccccttcgccagtcttaggaggggaagggtcgtcgtggacgccgtgctgtccgagccctccgccctggtggcgcagaagaaggatttctcgtggctcgggattcccgcgccctctgagggcacggtcaagaggcactcgggggaggagggcatagactaccgcaccaagacgaggaggcttgccagggagaaggccgcggagcaatggaacgaggagagggataaagccgcaagggaagccgctgaaaagggatacaccattccgagcggccaatcggttcctctgtccagtaatgagattctggaggctgatgggcctaccgagattgggaagtccagtccacccctttgcgctgatcaaatgcacaagaatgatcatcacttggcaacaggcatcgactctggttcaaagcatgcagatttggagaaatcttttggcttcaaatcgcccattccagggatcaacctctggtctagggtgatttcaagccctagtaggctcaggtacatgagaaaggctcccagcaaggttattccagatgttgataattcttctcagcaaaggattcttagacgcagtgcagatgctgctgtatcatattttcagaacacaggtcacattaatattgatgattcatctcctggaccaggaaaaggctcgtcggatggtggtcatgccaatgttggtggcagtggaatcaattcaaatgatgaaactgtcagcaactctaagactgcatcaacgagtttggctgaatccccatcgcatagtcaactatctagtcagtgcagttcaagtaatttggataacttgttactatggcacaatttggaagatctgcagatcggtcaggccaagaatccttctggaaataagcctgttccacaccaagaaaatatttttgggaattttggttcatgcacacatgctcacaactgggtgccattttggccgttccaattaaagagttgtcctgtcagttttaattcaccttgggcatctctggaccttcaaattgagaaattgaagtcacaatttgccattggtcctggagatttctctgctgaacttacagaaggggttagtgagatccatcctggtggtgttcagaatgcacttccaatcaccctggattctgtgtatttcaatggaggtaacttgatgcttctgggatatggtgatcaagaacccagagaaatgaagcatgctagtggtcatgtcaagttcaaaaacaattataatcgtgtacacgtgcatgtaactgggaattgcatggagtggaggcaagaccgatcttctcaaggagggggttatctttctacagatgtatttgttgacatagctgaggaaacatggcatgctaatctcaatatagtcgatgcatttgccccgctgtttgaaagaattttagaaatacctgttgtttggcacaaaggaagagctaccggtgaggtgcatatctgtatgtcaaagggcgatagttttccaagcattcatggtcagcttgatgtgaaaggtcttgcttttcagatattggatgccccatcatcattttctgatattgtggcaaaattatcatttcgtggtcaaagagtatttctgcacaatgcaagtgggtggtttggtgacgctccagttgaagcttctggagatttgggactaaatcctgaggatggagagtttcatctaatgtgccaggttccatccgttgaagttaacgcacttatgaggacaatgaaaatgaaacctcttatgttcccattggctggttcagttactgctgtatttaactgtcaagggccccttgatgctcctgtttttgttggaagtgggattgtctcaaggaagtctttttcagtatctggtatgcctccatctgctgcttctgaagctgtgatgcaaaacaaagaggctggcgcagttgctgcatttgaccatattccattctctcatgtgtcggccaatttcacgttcaaccttgacaactctgttgctgatttatatggtattagagcatgcctattggatggcggagaaattcgaggggctggtaacgcatggatttgcccagagggggagggtgatgattctgctatggatattaatttgtctgggactattctgcttgataaagtattgcatcgttacattcctggaggaatccaactgattccactcaagattggagagctcaatggagagactagactttctggttcccttattagaccgaagtttgatatcaaatgggctgcaccaaatgcagaagattctttttcagatgcacgtggcaatattgttattgcacatgattacattatggtcaactcttcatcagtctcctttgatttaaatagtcgagttcaaacatcatatattaatgactacttgttgaacaaggagacttatcaaatgaaaaaaatcatgccactaattgtggagggtgttgatttggatttacgtatgcgaggctttgagtttgctcatatagcctcttcaattccttttgattcaccacgtccattacatttgaaagcatctggaagggtcaaatttcaaggaaaaatcatgaaatctagcaatatagctgatggcaatatcaatggtgttcttcaaagtaacattgaccaaaataagcttgagaccaatgcgtcaaagcttgtaggcgacatatctctttctggaattaaactcaaccagctcatgctagcgccacaatctactggttttctttccatatcacgggattctatgatgttgaatgctactggcaggcctgatgaaaatttttctatagaagtgaatgggccattgcttttcacttcaaacgaggttattcaagatgtaaggcttctgtctatattcctccaaaagggccagctgagatctaatatctgttatcatcctgagaatttgaccagtctagaggttcggaatttgacactcgatgagctggagtttgcttcattgcgcggatttgttcaaaaggcagaacttcagcttaattttcagaaaagaagaggccatggtttgctgtcaataatccgtcccaaatttagtggcgtgcttggtgaggcacttgatatagctgctcgatggagcggtgatgttgtggaggatgagactagaggttcctggtgctgaagtagctgaaatgcttcctttagcaaggcttctttcacggagtacagacccagttatccgttcgagatcaaaggaactttttatgcaatgtctgcattctgttgggttcaatgctgaaagtcttaatgatcagctaaaggcattagaaatttatcatgattggttggatgatgacacaatggaagatatagcatttcctggcttagctgaactaagaggctattggcgtggctctctggatgccagtggaggtggcaatggggataccatggcagattttgatttcaatggtgaagattgggaatggggaacttacaagacacagcgagttctcgcatctggttcattcagcaataatgatggtctgcgtcttgataaattatttatccagaaagataatgccacccttcatgctgatggttcgattcttgggccgcttacaaatcttcactttgctgtgcttaacttcccagtcggccttataccagctttagttcaggctatagaatcatcaaccacagactcaattcattttctgaggcaatggttgactcccatcaaaggtattttgcacatggagggagacttgagaggtactctggcaaaaccagaatgtgatgttcaaataaggctgcttgatggcactattggaggcatcgatcttggaagagcagaagtattagcttctgttacccctacaagtcgtttcgtatttgatgcaaatttcgaaccgacaatacaaagtggacatgtaaacattcaaggtagtataccagtcacttatgtagacaacagctcgatagaggaaagtccagaagaggcagatgggaaacaaggtatcataagaatccctgtttgggcaagagacagaggatcatcgaatgagatcagtgaagcaagaatggtgagagacaagacagaggagggctgggaatttcaattagctgaaaaacttaaaggtttaagttataacatgctagaaccaggtgaagtgaggatagatgcagatataaaggatgggggtatgatgctgataactgcattgagtccttatgcaaactggcttcaaggctatgctgatgttttcctgcaggttaaaggcactgttgatcagcctgttgttgatggatcagcaacgtttaaccgggctattgtgaactctccttttcttcggacaccattgacaaattttgcgggtacaattcaagtcatatccaacagactatgcatcagttcaatggaaagcagggttgggaggaaagggagattgtcgatgaaaggaagcctacctcttaaaaatagcgagccatctgccaatgacaagattgatttgaaatgtgaagttctggacatacgagcaaaaaatattttgagtggccaagtagacagccagctacaagttacaggctcaattttgcgaccagatctttctggaatgatccggttgagtcatggtgaagcatatttgccccatgataaaggcaatggtgctgctgtcactaggttgacttcaaacaagtcgagttatcttctttctggttttgaccaatcaaccacttcgcaggatgtctcacgaattctggggtcactgtcaacatcggcagaaagagatcaatcagacacagaaaagactcttgagcatggaagttttaatccaaacattgatgcacggctaaatgatctgaagctcaccttgggaccagaattgaggattgtttatcctttaattctgaattttgctgtcagtggtgacctagagcttaatgggatggttcatccaaagtatctaagacctaagggcatcttaacatttgaaaatggtgaggtcaacctggtagctacgcaggttagacttaaaaatgatcatttaaatgcagcaaaatttgaacctgatcttggtttggatcctgttcttgatctcgttcttgttggatctgaatggcaattcaaaatccaaagtcgagcaagcatgtggcaagacaatctggtggtaacctcaacacgctctgtggaccaggatgttctgtcacctagtgaggctgcaaaggtttttgaatcgcagcttgcggaatcattattagaaggtgacggacagcttgcgttcaagaagcttgcaactgcaacgctggaaactttgatgccaaggatagaaggcaagggtgagtttggacaggcacggtggcgactggtttatgctccgcagatcccaagtttactctctgtggatccaacagttgatccgctaaaatctctggcaaacaatatctcttttgccacggaggtcgaagtgcagctcggaaaacgccttcaggcctctgtcgtcaggcaaatgaaagattcagaaatggcgatgcagtggacgctgatatatcagctaaccagtaggctccgtgttctcttccagtctactccatccaataggcttctcttcgagtattcagcaacatcacaggaatgattcattttttgttattgcgcacagcaagaattggttgtagcagctgcgtcgtacaaagattaggtggcctgataatcgttttttttgtagataagcaagctttgataagttgtacgtgtacaatcgctcagttgtattgtatttacattctttctcggaaacaaagtttctgagcctgtaaataataggtagcgatcttagcgtcgggtgtagagagaagtataaatgaatgaacgtttcctgtctcttgcgttgctgtccatacgtgaaattggctttcgttactgaccagttagagcaactagtcagatg

SEQ ID NO: 33635 - DNA, 6650 bp, Zea Mays
ccgacgcgccgctcgctccccacccaatgtcgcactgcccccgcgcctcactctccctcgcgccgccgtcgcccttcctcttcccccactgcccgtctccgcgccggcggcggcgcccgcgcggtcgcagcctccacctgacctcgcgccccctcctcaccctcgctcgcttcgacccgccgcggctgttccgcctcaaggtctccgactccagcgcctcccccggcgaggccgctcacgcccacgcccaccacagcaaccaccgcgcccacgcccaccacagccccgcgccgtcgctgctcccgtggccgcgggccctgatcggctcgctcgcgccggtatggcgggaggggctcttcctcgtgcgctgctccgtcttcgccgccgtggtctccgtcgccggcgcgctctcctggttcgcgcagctccgggcccgctccttcgtcgaggcccgcctcctgcccgctgcatgctccgcgctcagcgagtacctccagcgggaggtccgcctcggcaaggtgcgcagcatctcgccgatcgggatcacgctgcagacctgctccatcggcccgcacgaggaggagttctcctgcgccgaggtgcccgtcatgaagattagggtacgccccttcgccagtcttaggaggggaagggtcgtcgtggacgccgtgctgtccgagccctccgccctggtggcgcagaagaaggatttctcgtggctcgggattcccgcgccctctgagggcacggtcaagaggcactcgggggaggagggcatagactaccgcaccaagacgaggaggcttgccagggagaaggccgcggagcaatggaacgaggagagggataaagccgcaagggaagccgctgaaaagggatacaccattccgagcggccaatcggttcctctgtccagtaatgagattctggaggctgatgggcctaccgagattgggaagtccagtccacccctttgcgctgatcaaatgcacaagaatgatcatcacttggcaacaggcatcgactctggttcaaagcatgcagatttggagaaatcttttggcttcaaatcgcccattccagggatcaacctctggtctagggtgatttcaagccctagtaggctcaggtacatgagaaaggctcccagcaaggttattccagatgttgataattcttctcagcaaaggattcttagacgcagtgcagatgctgctgtatcatattttcagaacacaggtcacattaatattgatgattcatctcctggaccaggaaaaggctcgtcggatggtggtcatgccaatgttggtggcagtggaatcaattcaaatgatgaaactgtcagcaactctaagactgcatcaacgagtttggctgaatccccatcgcatagtcaactatctagtcagtgcagttcaagtaatttggataacttgttactatggcacaatttggaagatctgcagatcggtcaggccaagaatccttctggaaataagcctgttccacaccaagaaaatatttttgggaattttggttcatgcacacatgctcacaactgggtgccattttggccgttccaattaaagagttgtcctgtcagttttaattcaccttgggcatctctggaccttcaaattgagaaattgaagtcacaatttgccattggtcctggagatttctctgctgaacttacagaaggggttagtgagatccatcctggtggtgttcagaatgcacttccaatcaccctggattctgtgtatttcaatggaggtaacttgatgcttctgggatatggtgatcaagaacccagagaaatgaagcatgctagtggtcatgtcaagttcaaaaacaattataatcgtgtacacgtgcatgtaactgggaattgcatggagtggaggcaagaccgatcttctcaaggagggggttatctttctacagatgtatttgttgacatagctgaggaaacatggcatgctaatctcaatatagtcgatgcatttgccccgctgtttgaaagaattttagaaatacctgttgtttggcacaaaggaagagctaccggtgaggtgcatatctgtatgtcaaagggcgatagttttccaagcattcatggtcagcttgatgtgaaaggtcttgcttttcagatattggatgccccatcatcattttctgatattgtggcaaaattatcatttcgtggtcaaagagtatttctgcacaatgcaagtgggtggtttggtgacgctccagttgaagcttctggagatttgggactaaatcctgaggatggagagtttcatctaatgtgccaggttccatccgttgaagttaacgcacttatgaggacaatgaaaatgaaacctcttatgttcccattggctggttcagttactgctgtatttaactgtcaagggccccttgatgctcctgtttttgttggaagtgggattgtctcaaggaagtctttttcagtatctggtatgcctccatctgctgcttctgaagctgtgatgcaaaacaaagaggctggcgcagttgctgcatttgaccatattccattctctcatgtgtcggccaatttcacgttcaaccttgacaactctgttgctgatttatatggtattagagcatgcctattggatggcggagaaattcgaggggctggtaacgcatggatttgcccagagggggagggtgatgattctgctatggatattaatttgtctgggactattctgcttgataaagtattgcatcgttacattcctggaggaatccaactgattccactcaagattggagagctcaatggagagactagactttctggttcccttattagaccgaagtttgatatcaaatgggctgcaccaaatgcagaagattctttttcagatgcacgtggcaatattgttattgcacatgattacattatggtcaactcttcatcagtctcctttgatttaaatagtcgagttcaaacatcatatattaatgactacttgttgaacaaggagacttatcaaatgaaaaaaatcatgccactaattgtggagggtgttgatttggatttacgtatgcgaggctttgagtttgctcatatagcctcttcaattccttttgattcaccacgtccattacatttgaaagcatctggaagggtcaaatttcaaggaaaaatcatgaaatctagcaatatagctgatggcaatatcaatggtgttcttcaaagtaacattgaccaaaataagcttgagaccaatgcgtcaaagcttgtaggcgacatatctctttctggaattaaactcaaccagctcatgctagcgccacaatctactggttttctttccatatcacgggattctatgatgttgaatgctactggcaggcctgatgaaaatttttctatagaagtgaatgggccattgcttttcacttcaaacgaggttattcaagatgtaaggcttctgtctatattcctccaaaagggccagctgagatctaatatctgttatcatcctgagaatttgaccagtctagaggcagaacttcagcttaattttcagaaaagaagaggccatggtttgctgtcaataatccgtcccaaatttagtggcgtgcttggtgaggcacttgatatagctgctcgatggagcggtgatgttattactatggaaaaatctatcctggagcaagctaatagcaaatatgaggttcaaggggagtatgtttttcctggaacgcgtgatagatttcctgtggaaagtcagagtaatgggttcatagagaaagcaatgggagggcatcttggtagcataatgtcttcgatgggcaggtggaggatgagactagaggttcctggtgctgaagtagctgaaatgcttcctttagcaaggcttctttcacggagtacagacccagttatccgttcgagatcaaaggaactttttatgcaatgtctgcattctgttgggttcaatgctgaaagtcttaatgatcagctaaaggcattagaaatttatcatgattggttggatgatgacacaatggaagatatagcatttcctggcttagctgaactaagaggctattggcgtggctctctggatgccagtggaggtggcaatggggataccatggcagattttgatttcaatggtgaagattgggaatggggaacttacaagacacagcgagttctcgcatctggttcattcagcaataatgatggtctgcgtcttgataaattatttatccagaaagataatgccacccttcatgctgatggttcgattcttgggccgcttacaaatcttcactttgctgtgcttaacttcccagtcggccttataccagctttagttcaggctatagaatcatcaaccacagactcaattcattttctgaggcaatggttgactcccatcaaaggtattttgcacatggagggagacttgagaggtactctggcaaaaccagaatgtgatgttcaaataaggctgcttgatggcactattggaggcatcgatcttggaagagcagaagtattagcttctgttacccctacaagtcgtttcgtatttgatgcaaatttcgaaccgacaatacaaagtggacatgtaaacattcaaggtagtataccagtcacttatgtagacaacagctcgatagaggaaagtccagaagaggcagatgggaaacaaggtatcataagaatccctgtttgggcaagagacagaggatcatcgaatgagatcagtgaagcaagaatggtgagagacaagacagaggagggctgggaatttcaattagctgaaaaacttaaaggtttaagttataacatgctagaaccaggtgaagtgaggatagatgcagatataaaggatgggggtatgatgctgataactgcattgagtccttatgcaaactggcttcaaggctatgctgatgttttcctgcaggttaaaggcactgttgatcagcctgttgttgatggatcagcaacgtttaaccgggctattgtgaactctccttttcttcggacaccattgacaaattttgcgggtacaattcaagtcatatccaacagactatgcatcagttcaatggaaagcagggttgggaggaaagggagattgtcgatgaaaggaagcctacctcttaaaaatagcgagccatctgccaatgacaagattgatttgaaatgtgaagttctggacatacgagcaaaaaatattttgagtggccaagtagacagccagctacaagttacaggctcaattttgcgaccagatctttctggaatgatccggttgagtcatggtgaagcatatttgccccatgataaaggcaatggtgctgctgtcactaggttgacttcaaacaagtcgagttatcttctttctggttttgaccaatcaaccacttcgcaggatgtctcacgaattctggggtcactgtcaacatcggcagaaagagatcaatcagacacagaaaagactcttgagcatggaagttttaatccaaacattgatgcacggctaaatgatctgaagctcaccttgggaccagaattgaggattgtttatcctttaattctgaattttgctgtcagtggtgacctagagcttaatgggatggttcatccaaagtatctaagacctaagggcatcttaacatttgaaaatggtgaggtcaacctggtagctacgcaggttagacttaaaaatgatcatttaaatgcagcaaaatttgaacctgatcttggtttggatcctgttcttgatctcgttcttgttggatctgaatggcaattcaaaatccaaagtcgagcaagcatgtggcaagacaatctggtggtaacctcaacacgctctgtggaccaggatgttctgtcacctagtgaggctgcaaaggtttttgaatcgcagcttgcggaatcattattagaaggtgacggacagcttgcgttcaagaagcttgcaactgcaacgctggaaactttgatgccaaggatagaaggcaagggtgagtttggacaggcacggtggcgactggtttatgctccgcagatcccaagtttactctctgtggatccaacagttgatccgctaaaatctctggcaaacaatatctcttttgccacggaggtcgaagtgcagctcggaaaacgccttcaggcctctgtcgtcaggcaaatgaaagattcagaaatggcgatgcagtggacgctgatatatcagctaaccagtaggctccgtgttctcttccagtctactccatccaataggcttctcttcgagtattcagcaacatcacaggaatgattcattttttgttattgcgcacagcaagaattggttgtagcagctgcgtcgtacaaagattaggtggcctgataatcgttttttttgtagataagcaagctttgataagttgtacgtgtacaatcgctcagttgtattgtatttacattctttctcggaaacaaagtttctgagcctgtaaataataggtagcgatcttagcgtcgggtgtagagagaagtataaatgaatgaacgtttcctgtctcttgcgttgctgtccatacgtgaaattggctttcgttactgaccagttagagcaactagtcagatg

SEQ ID NO: 33636 - DNA, 6443 bp, Zea Mays
ccgacgcgccgctcgctccccacccaatgtcgcactgcccccgcgcctcactctccctcgcgccgccgtcgcccttcctcttcccccactgcccgtctccgcgccggcggcggcgcccgcgcggtcgcagcctccacctgacctcgcgccccctcctcaccctcgctcgcttcgacccgccgcggctgttccgcctcaaggtctccgactccagcgcctcccccggcgaggccgctcacgcccacgcccaccacagcaaccaccgcgcccacgcccaccacagccccgcgccgtcgctgctcccgtggccgcgggccctgatcggctcgctcgcgccggtatggcgggaggggctcttcctcgtgcgctgctccgtcttcgccgccgtggtctccgtcgccggcgcgctctcctggttcgcgcagctccgggcccgctccttcgtcgaggcccgcctcctgcccgctgcatgctccgcgctcagcgagtacctccagcgggaggtccgcctcggcaaggtgcgcagcatctcgccgatcgggatcacgctgcagacctgctccatcggcccgcacgaggaggagttctcctgcgccgaggtgcccgtcatgaagattagggtacgccccttcgccagtcttaggaggggaagggtcgtcgtggacgccgtgctgtccgagccctccgccctggtggcgcagaagaaggatttctcgtggctcgggattcccgcgccctctgagggcacggtcaagaggcactcgggggaggagggcatagactaccgcaccaagacgaggaggcttgccagggagaaggccgcggagcaatggaacgaggagagggataaagccgcaagggaagccgctgaaaagggatacaccattccgagcggccaatcggttcctctgtccagtaatgagattctggaggctgatgggcctaccgagattgggaagtccagtccacccctttgcgctgatcaaatgcacaagaatgatcatcacttggcaacaggcatcgactctggttcaaagcatgcagatttggagaaatcttttggcttcaaatcgcccattccagggatcaacctctggtctagggtgatttcaagccctagtaggctcaggtacatgagaaaggctcccagcaaggttattccagatgttgataattcttctcagcaaaggattcttagacgcagtgcagatgctgctgtatcatattttcagaacacaggtcacattaatattgatgattcatctcctggaccaggaaaaggctcgtcggatggtggtcatgccaatgttggtggcagtggaatcaattcaaatgatgaaactgtcagcaactctaagactgcatcaacgagtttggctgaatccccatcgcatagtcaactatctagtcagtgcagttcaagtaatttggataacttgttactatggcacaatttggaagatctgcagatcggtcaggccaagaatccttctggaaataagcctgttccacaccaagaaaatatttttgggaattttggttcatgcacacatgctcacaactgggtgccattttggccgttccaattaaagagttgtcctgtcagttttaattcaccttgggcatctctggaccttcaaattgagaaattgaagtcacaatttgccattggtcctggagatttctctgctgaacttacagaaggggttagtgagatccatcctggtggtgttcagaatgcacttccaatcaccctggattctgtgtatttcaatggaggtaacttgatgcttctgggatatggtgatcaagaacccagagaaatgaagcatgctagtggtcatgtcaagttcaaaaacaattataatcgtgtacacgtgcatgtaactgggaattgcatggagtggaggcaagaccgatcttctcaaggagggggttatctttctacagatgtatttgttgacatagctgaggaaacatggcatgctaatctcaatatagtcgatgcatttgccccgctgtttgaaagaattttagaaatacctgttgtttggcacaaaggaagagctaccggtgaggtgcatatctgtatgtcaaagggcgatagttttccaagcattcatggtcagcttgatgtgaaaggtcttgcttttcagatattggatgccccatcatcattttctgatattgtggcaaaattatcatttcgtggtcaaagagtatttctgcacaatgcaagtgggtggtttggtgacgctccagttgaagcttctggagatttgggactaaatcctgaggatggagagtttcatctaatgtgccaggttccatccgttgaagttaacgcacttatgaggacaatgaaaatgaaacctcttatgttcccatatctggtatgcctccatctgctgcttctgaagctgtgatgcaaaacaaagaggctggcgcagttgctgcatttgaccatattccattctctcatgtgtcggccaatttcacgttcaaccttgacaactctgttgctgatttatatggtattagagcatgcctattggatggcggagaaattcgaggggctggtaacgcatggatttgcccagagggggagggtgatgattctgctatggatattaatttgtctgggactattctgcttgataaagtattgcatcgttacattcctggaggaatccaactgattccactcaagattggagagctcaatggagagactagactttctggttcccttattagaccgaagtttgatatcaaatgggctgcaccaaatgcagaagattctttttcagatgcacgtggcaatattgttattgcacatgattacattatggtcaactcttcatcagtctcctttgatttaaatagtcgagttcaaacatcatatattaatgactacttgttgaacaaggagacttatcaaatgaaaaaaatcatgccactaattgtggagggtgttgatttggatttacgtatgcgaggctttgagtttgctcatatagcctcttcaattccttttgattcaccacgtccattacatttgaaagcatctggaagggtcaaatttcaaggaaaaatcatgaaatctagcaatatagctgatggcaatatcaatggtgttcttcaaagtaacattgaccaaaataagcttgagaccaatgcgtcaaagcttgtaggcgacatatctctttctggaattaaactcaaccagctcatgctagcgccacaatctactggttttctttccatatcacgggattctatgatgttgaatgctactggcaggcctgatgaaaatttttctatagaagtgaatgggccattgcttttcacttcaaacgaggttattcaagatgtaaggcttctgtctatattcctccaaaagggccagctgagatctaatatctgttatcatcctgagaatttgaccagtctagaggttcggaatttgacactcgatgagctggagtttgcttcattgcgcggatttgttcaaaaggcagaacttcagcttaattttcagaaaagaagaggccatggtttgctgtcaataatccgtcccaaatttagtggcgtgcttggtgaggcacttgatatagctgctcgatggagcggtgatgttgtggaggatgagactagaggttcctggtgctgaagtagctgaaatgcttcctttagcaaggcttctttcacggagtacagacccagttatccgttcgagatcaaaggaactttttatgcaatgtctgcattctgttgggttcaatgctgaaagtcttaatgatcagctaaaggcattagaaatttatcatgattggttggatgatgacacaatggaagatatagcatttcctggcttagctgaactaagaggctattggcgtggctctctggatgccagtggaggtggcaatggggataccatggcagattttgatttcaatggtgaagattgggaatggggaacttacaagacacagcgagttctcgcatctggttcattcagcaataatgatggtctgcgtcttgataaattatttatccagaaagataatgccacccttcatgctgatggttcgattcttgggccgcttacaaatcttcactttgctgtgcttaacttcccagtcggccttataccagctttagttcaggctatagaatcatcaaccacagactcaattcattttctgaggcaatggttgactcccatcaaaggtattttgcacatggagggagacttgagaggtactctggcaaaaccagaatgtgatgttcaaataaggctgcttgatggcactattggaggcatcgatcttggaagagcagaagtattagcttctgttacccctacaagtcgtttcgtatttgatgcaaatttcgaaccgacaatacaaagtggacatgtaaacattcaaggtagtataccagtcacttatgtagacaacagctcgatagaggaaagtccagaagaggcagatgggaaacaaggtatcataagaatccctgtttgggcaagagacagaggatcatcgaatgagatcagtgaagcaagaatggtgagagacaagacagaggagggctgggaatttcaattagctgaaaaacttaaaggtttaagttataacatgctagaaccaggtgaagtgaggatagatgcagatataaaggatgggggtatgatgctgataactgcattgagtccttatgcaaactggcttcaaggctatgctgatgttttcctgcaggttaaaggcactgttgatcagcctgttgttgatggatcagcaacgtttaaccgggctattgtgaactctccttttcttcggacaccattgacaaattttgcgggtacaattcaagtcatatccaacagactatgcatcagttcaatggaaagcagggttgggaggaaagggagattgtcgatgaaaggaagcctacctcttaaaaatagcgagccatctgccaatgacaagattgatttgaaatgtgaagttctggacatacgagcaaaaaatattttgagtggccaagtagacagccagctacaagttacaggctcaattttgcgaccagatctttctggaatgatccggttgagtcatggtgaagcatatttgccccatgataaaggcaatggtgctgctgtcactaggttgacttcaaacaagtcgagttatcttctttctggttttgaccaatcaaccacttcgcaggatgtctcacgaattctggggtcactgtcaacatcggcagaaagagatcaatcagacacagaaaagactcttgagcatggaagttttaatccaaacattgatgcacggctaaatgatctgaagctcaccttgggaccagaattgaggattgtttatcctttaattctgaattttgctgtcagtggtgacctagagcttaatgggatggttcatccaaagtatctaagacctaagggcatcttaacatttgaaaatggtgaggtcaacctggtagctacgcaggttagacttaaaaatgatcatttaaatgcagcaaaatttgaacctgatcttggtttggatcctgttcttgatctcgttcttgttggatctgaatggcaattcaaaatccaaagtcgagcaagcatgtggcaagacaatctggtggtaacctcaacacgctctgtggaccaggatgttctgtcacctagtgaggctgcaaaggtttttgaatcgcagcttgcggaatcattattagaaggtgacggacagcttgcgttcaagaagcttgcaactgcaacgctggaaactttgatgccaaggatagaaggcaagggtgagtttggacaggcacggtggcgactggtttatgctccgcagatcccaagtttactctctgtggatccaacagttgatccgctaaaatctctggcaaacaatatctcttttgccacggaggtcgaagtgcagctcggaaaacgccttcaggcctctgtcgtcaggcaaatgaaagattcagaaatggcgatgcagtggacgctgatatatcagctaaccagtaggctccgtgttctcttccagtctactccatccaataggcttctcttcgagtattcagcaacatcacaggaatgattcattttttgttattgcgcacagcaagaattggttgtagcagctgcgtcgtacaaagattaggtggcctgataatcgttttttttgtagataagcaagctttgataagttgtacgtgtacaatcgctcagttgtattgtatttacattctttctcggaaacaaagtttctgagcctgtaaataataggtagcgatcttagcgtcgggtgtagagagaagtataaatgaatgaacgtttcctgtctcttgcgttgctgtccatacgtgaaattggctttcgttactgaccagttagagcaactagtcagatg

SEQ ID NO: 33637 - DNA, 6697 bp, Zea Mays
ccgacgcgccgctcgctccccacccaatgtcgcactgcccccgcgcctcactctccctcgcgccgccgtcgcccttcctcttcccccactgcccgtctccgcgccggcggcggcgcccgcgcggtcgcagcctccacctgacctcgcgccccctcctcaccctcgctcgcttcgacccgccgcggctgttccgcctcaaggtctccgactccagcgcctcccccggcgaggccgctcacgcccacgcccaccacagcaaccaccgcgcccacgcccaccacagccccgcgccgtcgctgctcccgtggccgcgggccctgatcggctcgctcgcgccggtatggcgggaggggctcttcctcgtgcgctgctccgtcttcgccgccgtggtctccgtcgccggcgcgctctcctggttcgcgcagctccgggcccgctccttcgtcgaggcccgcctcctgcccgctgcatgctccgcgctcagcgagtacctccagcgggaggtccgcctcggcaaggtgcgcagcatctcgccgatcgggatcacgctgcagacctgctccatcggcccgcacgaggaggagttctcctgcgccgaggtgcccgtcatgaagattagggtacgccccttcgccagtcttaggaggggaagggtcgtcgtggacgccgtgctgtccgagccctccgccctggtggcgcagaagaaggatttctcgtggctcgggattcccgcgccctctgagggcacggtcaagaggcactcgggggaggagggcatagactaccgcaccaagacgaggaggcttgccagggagaaggccgcggagcaatggaacgaggagagggataaagccgcaagggaagccgctgaaaagggatacaccattccgagcggccaatcggttcctctgtccagtaatgagattctggaggctgatgggcctaccgagattgggaagtccagtccacccctttgcgctgatcaaatgcacaagaatgatcatcacttggcaacaggcatcgactctggttcaaagcatgcagatttggagaaatcttttggcttcaaatcgcccattccagggatcaacctctggtctagggtgatttcaagccctagtaggctcaggtacatgagaaaggctcccagcaaggttattccagatgttgataattcttctcagcaaaggattcttagacgcagtgcagatgctgctgtatcatattttcagaacacaggtcacattaatattgatgattcatctcctggaccaggaaaaggctcgtcggatggtggtcatgccaatgttggtggcagtggaatcaattcaaatgatgaaactgtcagcaactctaagactgcatcaacgagtttggctgaatccccatcgcatagtcaactatctagtcagtgcagttcaagtaatttggataacttgttactatggcacaatttggaagatctgcagatcggtcaggccaagaatccttctggaaataagcctgttccacaccaagaaaatatttttgggaattttggttcatgcacacatgctcacaactgggtgccattttggccgttccaattaaagagttgtcctgtcagttttaattcaccttgggcatctctggaccttcaaattgagaaattgaagtcacaatttgccattggtcctggagatttctctgctgaacttacagaaggggttagtgagatccatcctggtggtgttcagaatgcacttccaatcaccctggattctgtgtatttcaatggaggtaacttgatgcttctgggatatggtgatcaagaacccagagaaatgaagcatgctagtggtcatgtcaagttcaaaaacaattataatcgtgtacacgtgcatgtaactgggaattgcatggagtggaggcaagaccgatcttctcaaggagggggttatctttctacagatgtatttgttgacatagctgaggaaacatggcatgctaatctcaatatagtcgatgcatttgccccgctgtttgaaagaattttagaaatacctgttgtttggcacaaaggaagagctaccggtgaggtgcatatctgtatgtcaaagggcgatagttttccaagcattcatggtcagcttgatgtgaaaggtcttgcttttcagatattggatgccccatcatcattttctgatattgtggcaaaattatcatttcgtggtcaaagagtatttctgcacaatgcaagtgggtggtttggtgacgctccagttgaagcttctggagatttgggactaaatcctgaggatggagagtttcatctaatgtgccaggttccatccgttgaagttaacgcacttatgaggacaatgaaaatgaaacctcttatgttcccattactgctgtatttaactgtcaagggccccttgatgctcctgtttttgttggaagtgggattgtctcaaggaagtctttttcagtatctggtatgcctccatctgctgcttctgaagctgtgatgcaaaacaaagaggctggcgcagttgctgcatttgaccatattccattctctcatgtgtcggccaatttcacgttcaaccttgacaactctgttgctgatttatatggtattagagcatgcctattggatggcggagaaattcgaggggctggtaacgcatggatttgcccagagggggagggtgatgattctgctatggatattaatttgtctgggactattctgcttgataaagtattgcatcgttacattcctggaggaatccaactgattccactcaagattggagagctcaatggagagactagactttctggttcccttattagaccgaagtttgatatcaaatgggctgcaccaaatgcagaagattctttttcagatgcacgtggcaatattgttattgcacatgattacattatggtcaactcttcatcagtctcctttgatttaaatagtcgagttcaaacatcatatattaatgactacttgttgaacaaggagacttatcaaatgaaaaaaatcatgccactaattgtggagggtgttgatttggatttacgtatgcgaggctttgagtttgctcatatagcctcttcaattccttttgattcaccacgtccattacatttgaaagcatctggaagggtcaaatttcaaggaaaaatcatgaaatctagcaatatagctgatggcaatatcaatggtgttcttcaaagtaacattgaccaaaataagcttgagaccaatgcgtcaaagcttgtaggcgacatatctctttctggaattaaactcaaccagctcatgctagcgccacaatctactggttttctttccatatcacgggattctatgatgttgaatgctactggcaggcctgatgaaaatttttctatagaagtgaatgggccattgcttttcacttcaaacgaggttattcaagatgtaaggcttctgtctatattcctccaaaagggccagctgagatctaatatctgttatcatcctgagaatttgaccagtctagaggttcggaatttgacactcgatgagctggagtttgcttcattgcgcggatttgttcaaaaggcagaacttcagcttaattttcagaaaagaagaggccatggtttgctgtcaataatccgtcccaaatttagtggcgtgcttggtgaggcacttgatatagctgctcgatggagcggtgatgttattactatggaaaaatctatcctggagcaagctaatagcaaatatgaggttcaaggggagtatgtttttcctggaacgcgtgatagatttcctgtggaaagtcagagtaatgggttcatagagaaagcaatgggagggcatcttggtagcataatgtcttcgatgggcaggtggaggatgagactagaggttcctggtgctgaagtagctgaaatgcttcctttagcaaggcttctttcacggagtacagacccagttatccgttcgagatcaaaggaactttttatgcaatgtctgcattctgttgggttcaatgctgaaagtcttaatgatcagctaaaggcattagaaatttatcatgattggttggatgatgacacaatggaagatatagcatttcctggcttagctgaactaagaggctattggcgtggctctctggatgccagtggaggtggcaatggggataccatggcagattttgatttcaatggtgaagattgggaatggggaacttacaagacacagcgagttctcgcatctggttcattcagcaataatgatggtctgcgtcttgataaattatttatccagaaagataatgccacccttcatgctgatggttcgattcttgggccgcttacaaatcttcactttgctgtgcttaacttcccagtcggccttataccagctttagttcaggctatagaatcatcaaccacagactcaattcattttctgaggcaatggttgactcccatcaaaggtattttgcacatggagggagacttgagaggtactctggcaaaaccagaatgtgatgttcaaataaggctgcttgatggcactattggaggcatcgatcttggaagagcagaagtattagcttctgttacccctacaagtcgtttcgtatttgatgcaaatttcgaaccgacaatacaaagtggacatgtaaacattcaaggtagtataccagtcacttatgtagacaacagctcgatagaggaaagtccagaagaggcagatgggaaacaaggtatcataagaatccctgtttgggcaagagacagaggatcatcgaatgagatcagtgaagcaagaatggtgagagacaagacagaggagggctgggaatttcaattagctgaaaaacttaaaggtttaagttataacatgctagaaccaggtgaagtgaggatagatgcagatataaaggatgggggtatgatgctgataactgcattgagtccttatgcaaactggcttcaaggctatgctgatgttttcctgcaggttaaaggcactgttgatcagcctgttgttgatggatcagcaacgtttaaccgggctattgtgaactctccttttcttcggacaccattgacaaattttgcgggtacaattcaagtcatatccaacagactatgcatcagttcaatggaaagcagggttgggaggaaagggagattgtcgatgaaaggaagcctacctcttaaaaatagcgagccatctgccaatgacaagattgatttgaaatgtgaagttctggacatacgagcaaaaaatattttgagtggccaagtagacagccagctacaagttacaggctcaattttgcgaccagatctttctggaatgatccggttgagtcatggtgaagcatatttgccccatgataaaggcaatggtgctgctgtcactaggttgacttcaaacaagtcgagttatcttctttctggttttgaccaatcaaccacttcgcaggatgtctcacgaattctggggtcactgtcaacatcggcagaaagagatcaatcagacacagaaaagactcttgagcatggaagttttaatccaaacattgatgcacggctaaatgatctgaagctcaccttgggaccagaattgaggattgtttatcctttaattctgaattttgctgtcagtggtgacctagagcttaatgggatggttcatccaaagtatctaagacctaagggcatcttaacatttgaaaatggtgaggtcaacctggtagctacgcaggttagacttaaaaatgatcatttaaatgcagcaaaatttgaacctgatcttggtttggatcctgttcttgatctcgttcttgttggatctgaatggcaattcaaaatccaaagtcgagcaagcatgtggcaagacaatctggtggtaacctcaacacgctctgtggaccaggatgttctgtcacctagtgaggctgcaaaggtttttgaatcgcagcttgcggaatcattattagaaggtgacggacagcttgcgttcaagaagcttgcaactgcaacgctggaaactttgatgccaaggatagaaggcaagggtgagtttggacaggcacggtggcgactggtttatgctccgcagatcccaagtttactctctgtggatccaacagttgatccgctaaaatctctggcaaacaatatctcttttgccacggaggtcgaagtgcagctcggaaaacgccttcaggcctctgtcgtcaggcaaatgaaagattcagaaatggcgatgcagtggacgctgatatatcagctaaccagtaggctccgtgttctcttccagtctactccatccaataggcttctcttcgagtattcagcaacatcacaggaatgattcattttttgttattgcgcacagcaagaattggttgtagcagctgcgtcgtacaaagattaggtggcctgataatcgttttttttgtagataagcaagctttgataagttgtacgtgtacaatcgctcagttgtattgtatttacattctttctcggaaacaaagtttctgagcctgtaaataataggtagcgatcttagcgtcgggtgtagagagaagtataaatgaatgaacgtttcctgtctcttgcgttgctgtccatacgtgaaattggctttcgttactgaccagttagagcaactagtcagatg

SEQ ID NO: 33638 - DNA, 6613 bp, Zea Mays
ccgacgcgccgctcgctccccacccaatgtcgcactgcccccgcgcctcactctccctcgcgccgccgtcgcccttcctcttcccccactgcccgtctccgcgccggcggcggcgcccgcgcggtcgcagcctccacctgacctcgcgccccctcctcaccctcgctcgcttcgacccgccgcggctgttccgcctcaaggtctccgactccagcgcctcccccggcgaggccgctcacgcccacgcccaccacagcaaccaccgcgcccacgcccaccacagccccgcgccgtcgctgctcccgtggccgcgggccctgatcggctcgctcgcgccggtatggcgggaggggctcttcctcgtgcgctgctccgtcttcgccgccgtggtctccgtcgccggcgcgctctcctggttcgcgcagctccgggcccgctccttcgtcgaggcccgcctcctgcccgctgcatgctccgcgctcagcgagtacctccagcgggaggtccgcctcggcaaggtgcgcagcatctcgccgatcgggatcacgctgcagacctgctccatcggcccgcacgaggaggagttctcctgcgccgaggtgcccgtcatgaagattagggtacgccccttcgccagtcttaggaggggaagggtcgtcgtggacgccgtgctgtccgagccctccgccctggtggcgcagaagaaggatttctcgtggctcgggattcccgcgccctctgagggcacggtcaagaggcactcgggggaggagggcatagactaccgcaccaagacgaggaggcttgccagggagaaggccgcggagcaatggaacgaggagagggataaagccgcaagggaagccgctgaaaagggatacaccattccgagcggccaatcggttcctctgtccagtaatgagattctggaggctgatgggcctaccgagattgggaagtccagtccacccctttgcgctgatcaaatgcacaagaatgatcatcacttggcaacaggcatcgactctggttcaaagcatgcagatttggagaaatcttttggcttcaaatcgcccattccagggatcaacctctggtctagggtgatttcaagccctagtaggctcaggtacatgagaaaggctcccagcaaggttattccagatgttgataattcttctcagcaaaggattcttagacgcagtgcagatgctgctgtatcatattttcagaacacaggtcacattaatattgatgattcatctcctggaccaggaaaaggctcgtcggatggtggtcatgccaatgttggtggcagtggaatcaattcaaatgatgaaactgtcagcaactctaagactgcatcaacgagtttggctgaatccccatcgcatagtcaactatctagtcagtgcagttcaagtaatttggataacttgttactatggcacaatttggaagatctgcagatcggtcaggccaagaatccttctggaaataagcctgttccacaccaagaaaatatttttgggaattttggttcatgcacacatgctcacaactgggtgccattttggccgttccaattaaagagttgtcctgtcagttttaattcaccttgggcatctctggaccttcaaattgagaaattgaagtcacaatttgccattggtcctggagatttctctgctgaacttacagaaggggttagtgagatccatcctggtggtgttcagaatgcacttccaatcaccctggattctgtgtatttcaatggaggtaacttgatgcttctgggatatggtgatcaagaacccagagaaatgaagcatgctagtggtcatgtcaagttcaaaaacaattataatcgtgtacacgtgcatgtaactgggaattgcatggagtggaggcaagaccgatcttctcaaggagggggttatctttctacagatgtatttgttgacatagctgaggaaacatggcatgctaatctcaatatagtcgatgcatttgccccgctgtttgaaagaattttagaaatacctgttgtttggcacaaaggaagagctaccggtgaggtgcatatctgtatgtcaaagggcgatagttttccaagcattcatggtcagcttgatgtgaaaggtcttgcttttcagatattggatgccccatcatcattttctgatattgtggcaaaattatcatttcgtggtcaaagagtatttctgcacaatgcaagtgggtggtttggtgacgctccagttgaagcttctggagatttgggactaaatcctgaggatggagagtttcatctaatgtgccaggttccatccgttgaagttaacgcacttatgaggacaatgaaaatgaaacctcttatgttcccatatctggtatgcctccatctgctgcttctgaagctgtgatgcaaaacaaagaggctggcgcagttgctgcatttgaccatattccattctctcatgtgtcggccaatttcacgttcaaccttgacaactctgttgctgatttatatggtattagagcatgcctattggatggcggagaaattcgaggggctggtaacgcatggatttgcccagagggggagggtgatgattctgctatggatattaatttgtctgggactattctgcttgataaagtattgcatcgttacattcctggaggaatccaactgattccactcaagattggagagctcaatggagagactagactttctggttcccttattagaccgaagtttgatatcaaatgggctgcaccaaatgcagaagattctttttcagatgcacgtggcaatattgttattgcacatgattacattatggtcaactcttcatcagtctcctttgatttaaatagtcgagttcaaacatcatatattaatgactacttgttgaacaaggagacttatcaaatgaaaaaaatcatgccactaattgtggagggtgttgatttggatttacgtatgcgaggctttgagtttgctcatatagcctcttcaattccttttgattcaccacgtccattacatttgaaagcatctggaagggtcaaatttcaaggaaaaatcatgaaatctagcaatatagctgatggcaatatcaatggtgttcttcaaagtaacattgaccaaaataagcttgagaccaatgcgtcaaagcttgtaggcgacatatctctttctggaattaaactcaaccagctcatgctagcgccacaatctactggttttctttccatatcacgggattctatgatgttgaatgctactggcaggcctgatgaaaatttttctatagaagtgaatgggccattgcttttcacttcaaacgaggttattcaagatgtaaggcttctgtctatattcctccaaaagggccagctgagatctaatatctgttatcatcctgagaatttgaccagtctagaggttcggaatttgacactcgatgagctggagtttgcttcattgcgcggatttgttcaaaaggcagaacttcagcttaattttcagaaaagaagaggccatggtttgctgtcaataatccgtcccaaatttagtggcgtgcttggtgaggcacttgatatagctgctcgatggagcggtgatgttattactatggaaaaatctatcctggagcaagctaatagcaaatatgaggttcaaggggagtatgtttttcctggaacgcgtgatagatttcctgtggaaagtcagagtaatgggttcatagagaaagcaatgggagggcatcttggtagcataatgtcttcgatgggcaggtggaggatgagactagaggttcctggtgctgaagtagctgaaatgcttcctttagcaaggcttctttcacggagtacagacccagttatccgttcgagatcaaaggaactttttatgcaatgtctgcattctgttgggttcaatgctgaaagtcttaatgatcagctaaaggcattagaaatttatcatgattggttggatgatgacacaatggaagatatagcatttcctggcttagctgaactaagaggctattggcgtggctctctggatgccagtggaggtggcaatggggataccatggcagattttgatttcaatggtgaagattgggaatggggaacttacaagacacagcgagttctcgcatctggttcattcagcaataatgatggtctgcgtcttgataaattatttatccagaaagataatgccacccttcatgctgatggttcgattcttgggccgcttacaaatcttcactttgctgtgcttaacttcccagtcggccttataccagctttagttcaggctatagaatcatcaaccacagactcaattcattttctgaggcaatggttgactcccatcaaaggtattttgcacatggagggagacttgagaggtactctggcaaaaccagaatgtgatgttcaaataaggctgcttgatggcactattggaggcatcgatcttggaagagcagaagtattagcttctgttacccctacaagtcgtttcgtatttgatgcaaatttcgaaccgacaatacaaagtggacatgtaaacattcaaggtagtataccagtcacttatgtagacaacagctcgatagaggaaagtccagaagaggcagatgggaaacaaggtatcataagaatccctgtttgggcaagagacagaggatcatcgaatgagatcagtgaagcaagaatggtgagagacaagacagaggagggctgggaatttcaattagctgaaaaacttaaaggtttaagttataacatgctagaaccaggtgaagtgaggatagatgcagatataaaggatgggggtatgatgctgataactgcattgagtccttatgcaaactggcttcaaggctatgctgatgttttcctgcaggttaaaggcactgttgatcagcctgttgttgatggatcagcaacgtttaaccgggctattgtgaactctccttttcttcggacaccattgacaaattttgcgggtacaattcaagtcatatccaacagactatgcatcagttcaatggaaagcagggttgggaggaaagggagattgtcgatgaaaggaagcctacctcttaaaaatagcgagccatctgccaatgacaagattgatttgaaatgtgaagttctggacatacgagcaaaaaatattttgagtggccaagtagacagccagctacaagttacaggctcaattttgcgaccagatctttctggaatgatccggttgagtcatggtgaagcatatttgccccatgataaaggcaatggtgctgctgtcactaggttgacttcaaacaagtcgagttatcttctttctggttttgaccaatcaaccacttcgcaggatgtctcacgaattctggggtcactgtcaacatcggcagaaagagatcaatcagacacagaaaagactcttgagcatggaagttttaatccaaacattgatgcacggctaaatgatctgaagctcaccttgggaccagaattgaggattgtttatcctttaattctgaattttgctgtcagtggtgacctagagcttaatgggatggttcatccaaagtatctaagacctaagggcatcttaacatttgaaaatggtgaggtcaacctggtagctacgcaggttagacttaaaaatgatcatttaaatgcagcaaaatttgaacctgatcttggtttggatcctgttcttgatctcgttcttgttggatctgaatggcaattcaaaatccaaagtcgagcaagcatgtggcaagacaatctggtggtaacctcaacacgctctgtggaccaggatgttctgtcacctagtgaggctgcaaaggtttttgaatcgcagcttgcggaatcattattagaaggtgacggacagcttgcgttcaagaagcttgcaactgcaacgctggaaactttgatgccaaggatagaaggcaagggtgagtttggacaggcacggtggcgactggtttatgctccgcagatcccaagtttactctctgtggatccaacagttgatccgctaaaatctctggcaaacaatatctcttttgccacggaggtcgaagtgcagctcggaaaacgccttcaggcctctgtcgtcaggcaaatgaaagattcagaaatggcgatgcagtggacgctgatatatcagctaaccagtaggctccgtgttctcttccagtctactccatccaataggcttctcttcgagtattcagcaacatcacaggaatgattcattttttgttattgcgcacagcaagaattggttgtagcagctgcgtcgtacaaagattaggtggcctgataatcgttttttttgtagataagcaagctttgataagttgtacgtgtacaatcgctcagttgtattgtatttacattctttctcggaaacaaagtttctgagcctgtaaataataggtagcgatcttagcgtcgggtgtagagagaagtataaatgaatgaacgtttcctgtctcttgcgttgctgtccatacgtgaaattggctttcgttactgaccagttagagcaactagtcagatg

SEQ ID NO: 33639 - DNA, 6566 bp, Zea Mays
cgcaaatggtcacctaggcgcgcgaggccgacgcgccgctcgctccccacccaatgtcgcactgcccccgcgcctcactctccctcgcgccgccgtcgcccttcctcttcccccactgcccgtctccgcgccggcggcggcgcccgcgcggtcgcagcctccacctgacctcgcgccccctcctcaccctcgctcgcttcgacccgccgcggctgttccgcctcaaggtctccgactccagcgcctcccccggcgaggccgctcacgcccacgcccaccacagcaaccaccgcgcccacgcccaccacagccccgcgccgtcgctgctcccgtggccgcgggccctgatcggctcgctcgcgccggtatggcgggaggggctcttcctcgtgcgctgctccgtcttcgccgccgtggtctccgtcgccggcgcgctctcctggttcgcgcagctccgggcccgctccttcgtcgaggcccgcctcctgcccgctgcatgctccgcgctcagcgagtacctccagcgggaggtccgcctcggcaaggtgcgcagcatctcgccgatcgggatcacgctgcagacctgctccatcggcccgcacgaggaggagttctcctgcgccgaggtgcccgtcatgaagattagggtacgccccttcgccagtcttaggaggggaagggtcgtcgtggacgccgtgctgtccgagccctccgccctggtggcgcagaagaaggatttctcgtggctcgggattcccgcgccctctgagggcacggtcaagaggcactcgggggaggagggcatagactaccgcaccaagacgaggaggcttgccagggagaaggccgcggagcaatggaacgaggagagggataaagccgcaagggaagccgctgaaaagggatacaccattccgagcggccaatcggttcctctgtccagtaatgagattctggaggctgatgggcctaccgagattgggaagtccagtccacccctttgcgctgatcaaatgcacaagaatgatcatcacttggcaacaggcatcgactctggttcaaagcatgcagatttggagaaatcttttggcttcaaatcgcccattccagggatcaacctctggtctagggtgatttcaagccctagtaggctcaggtacatgagaaaggctcccagcaaggttattccagatgttgataattcttctcagcaaaggattcttagacgcagtgcagatgctgctgtatcatattttcagaacacaggtcacattaatattgatgattcatctcctggaccaggaaaaggctcgtcggatggtggtcatgccaatgttggtggcagtggaatcaattcaaatgatgaaactgtcagcaactctaagactgcatcaacgagtttggctgaatccccatcgcatagtcaactatctagtcagtgcagttcaagtaatttggataacttgttactatggcacaatttggaagatctgcagatcggtcaggccaagaatccttctggaaataagcctgttccacaccaagaaaatatttttgggaattttggttcatgcacacatgctcacaactgggtgccattttggccgttccaattaaagagttgtcctgtcagttttaattcaccttgggcatctctggaccttcaaattgagaaattgaagtcacaatttgccattggtcctggagatttctctgctgaacttacagaaggggttagtgagatccatcctggtggtgttcagaatgcacttccaatcaccctggattctgtgtatttcaatggaggtaacttgatgcttctgggatatggtgatcaagaacccagagaaatgaagcatgctagtggtcatgtcaagttcaaaaacaattataatcgtgtacacgtgcatgtaactgggaattgcatggagtggaggcaagaccgatcttctcaaggagggggttatctttctacagatgtatttgttgacatagctgaggaaacatggcatgctaatctcaatatagtcgatgcatttgccccgctgtttgaaagaattttagaaatacctgttgtttggcacaaaggaagagctaccggtgaggtgcatatctgtatgtcaaagggcgatagttttccaagcattcatggtcagcttgatgtgaaaggtcttgcttttcagatattggatgccccatcatcattttctgatattgtggcaaaattatcatttcgtggtcaaagagtatttctgcacaatgcaagtgggtggtttggtgacgctccagttgaagcttctggagatttgggactaaatcctgaggatggagagtttcatctaatgtgccaggttccatccgttgaagttaacgcacttatgaggacaatgaaaatgaaacctcttatgttcccattggctggttcagttactgctgtatttaactgtcaagggccccttgatgctcctgtttttgttggaagtgggattgtctcaaggaagtctttttcagtatctggtatgcctccatctgctgcttctgaagctgtgatgcaaaacaaagaggctggcgcagttgctgcatttgaccatattccattctctcatgtgtcggccaatttcacgttcaaccttgacaactctgttgctgatttatatggtattagagcatgcctattggatggcggagaaattcgaggggctggtaacgcatggatttgcccagagggggagggtgatgattctgctatggatattaatttgtctgggactattctgcttgataaagtattgcatcgttacattcctggaggaatccaactgattccactcaagattggagagctcaatggagagactagactttctggttcccttattagaccgaagtttgatatcaaatgggctgcaccaaatgcagaagattctttttcagatgcacgtggcaatattgttattgcacatgattacattatggtcaactcttcatcagtctcctttgatttaaatagtcgagttcaaacatcatatattaatgactacttgttgaacaaggagacttatcaaatgaaaaaaatcatgccactaattgtggagggtgttgatttggatttacgtatgcgaggctttgagtttgctcatatagcctcttcaattccttttgattcaccacgtccattacatttgaaagcatctggaagggtcaaatttcaaggaaaaatcatgaaatctagcaatatagctgatggcaatatcaatggtgttcttcaaagtaacattgaccaaaataagcttgagaccaatgcgtcaaagcttgtaggcgacatatctctttctggaattaaactcaaccagctcatgctagcgccacaatctactggttttctttccatatcacgggattctatgatggttcggaatttgacactcgatgagctggagtttgcttcattgcgcggatttgttcaaaaggcagaacttcagcttaattttcagaaaagaagaggccatggtttgctgtcaataatccgtcccaaatttagtggcgtgcttggtgaggcacttgatatagctgctcgatggagcggtgatgttattactatggaaaaatctatcctggagcaagctaatagcaaatatgaggttcaaggggagtatgtttttcctggaacgcgtgatagatttcctgtggaaagtcagagtaatgggttcatagagaaagcaatgggagggcatcttggtagcataatgtcttcgatgggcaggtggaggatgagactagaggttcctggtgctgaagtagctgaaatgcttcctttagcaaggcttctttcacggagtacagacccagttatccgttcgagatcaaaggaactttttatgcaatgtctgcattctgttgggttcaatgctgaaagtcttaatgatcagctaaaggcattagaaatttatcatgattggttggatgatgacacaatggaagatatagcatttcctggcttagctgaactaagaggctattggcgtggctctctggatgccagtggaggtggcaatggggataccatggcagattttgatttcaatggtgaagattgggaatggggaacttacaagacacagcgagttctcgcatctggttcattcagcaataatgatggtctgcgtcttgataaattatttatccagaaagataatgccacccttcatgctgatggttcgattcttgggccgcttacaaatcttcactttgctgtgcttaacttcccagtcggccttataccagctttagttcaggctatagaatcatcaaccacagactcaattcattttctgaggcaatggttgactcccatcaaaggtattttgcacatggagggagacttgagaggtactctggcaaaaccagaatgtgatgttcaaataaggctgcttgatggcactattggaggcatcgatcttggaagagcagaagtattagcttctgttacccctacaagtcgtttcgtatttgatgcaaatttcgaaccgacaatacaaagtggacatgtaaacattcaaggtagtataccagtcacttatgtagacaacagctcgatagaggaaagtccagaagaggcagatgggaaacaaggtatcataagaatccctgtttgggcaagagacagaggatcatcgaatgagatcagtgaagcaagaatggtgagagacaagacagaggagggctgggaatttcaattagctgaaaaacttaaaggtttaagttataacatgctagaaccaggtgaagtgaggatagatgcagatataaaggatgggggtatgatgctgataactgcattgagtccttatgcaaactggcttcaaggctatgctgatgttttcctgcaggttaaaggcactgttgatcagcctgttgttgatggatcagcaacgtttaaccgggctattgtgaactctccttttcttcggacaccattgacaaattttgcgggtacaattcaagtcatatccaacagactatgcatcagttcaatggaaagcagggttgggaggaaagggagattgtcgatgaaaggaagcctacctcttaaaaatagcgagccatctgccaatgacaagattgatttgaaatgtgaagttctggacatacgagcaaaaaatattttgagtggccaagtagacagccagctacaagttacaggctcaattttgcgaccagatctttctggaatgatccggttgagtcatggtgaagcatatttgccccatgataaaggcaatggtgctgctgtcactaggttgacttcaaacaagtcgagttatcttctttctggttttgaccaatcaaccacttcgcaggatgtctcacgaattctggggtcactgtcaacatcggcagaaagagatcaatcagacacagaaaagactcttgagcatggaagttttaatccaaacattgatgcacggctaaatgatctgaagctcaccttgggaccagaattgaggattgtttatcctttaattctgaattttgctgtcagtggtgacctagagcttaatgggatggttcatccaaagtatctaagacctaagggcatcttaacatttgaaaatggtgaggtcaacctggtagctacgcaggttagacttaaaaatgatcatttaaatgcagcaaaatttgaacctgatcttggtttggatcctgttcttgatctcgttcttgttggatctgaatggcaattcaaaatccaaagtcgagcaagcatgtggcaagacaatctggtggtaacctcaacacgctctgtggaccaggatgttctgtcacctagtgaggctgcaaaggtttttgaatcgcagcttgcggaatcattattagaaggtgacggacagcttgcgttcaagaagcttgcaactgcaacgctggaaactttgatgccaaggatagaaggcaagggtgagtttggacaggcacggtggcgactggtttatgctccgcagatcccaagtttactctctgtggatccaacagttgatccgctaaaatctctggcaaacaatatctcttttgccacggaggtcgaagtgcagctcggaaaacgccttcaggcctctgtcgtcaggcaaatgaaagattcagaaatggcgatgcagtggacgctgatatatcagctaaccagtaggctccgtgttctcttccagtctactccatccaataggcttctcttcgagtattcagcaacatcacaggaatgattcattttttgttattgcgcacagcaagaattggttgtagcagctgcgtcgtacaaagattaggtggcctgataatcgttttttttgtagataagcaagctttgataagttgtacgtgtacaatcgctcagttgtattgtatttacattctttctcggaaacaaagtttctgagcctgtaaataataggtagcgatcttagcgtcgggtgtagagagaagtataaatgaatgaacgtttcctgtctcttgcgttgctgtccatacgtgaaattggctttcgttactgaccagttagagcaactagtcagatg

SEQ ID NO: 33640 - DNA, 6886 bp, Zea Mays
cccttcctctcgccgcacgcaaatggtcacctaggcgcgcgaggccgacgcgccgctcgctccccacccaatgtcgcactgcccccgcgcctcactctccctcgcgccgccgtcgcccttcctcttcccccactgcccgtctccgcgccggcggcggcgcccgcgcggtcgcagcctccacctgacctcgcgccccctcctcaccctcgctcgcttcgacccgccgcggctgttccgcctcaaggtctccgactccagcgcctcccccggcgaggccgctcacgcccacgcccaccacagcaaccaccgcgcccacgcccaccacagccccgcgccgtcgctgctcccgtggccgcgggccctgatcggctcgctcgcgccggtatggcgggaggggctcttcctcgtgcgctgctccgtcttcgccgccgtggtctccgtcgccggcgcgctctcctggttcgcgcagctccgggcccgctccttcgtcgaggcccgcctcctgcccgctgcatgctccgcgctcagcgagtacctccagcgggaggtccgcctcggcaaggtgcgcagcatctcgccgatcgggatcacgctgcagacctgctccatcggcccgcacgaggaggagttctcctgcgccgaggtgcccgtcatgaagattagggtacgccccttcgccagtcttaggaggggaagggtcgtcgtggacgccgtgctgtccgagccctccgccctggtggcgcagaagaaggatttctcgtggctcgggattcccgcgccctctgagggcacggtcaagaggcactcgggggaggagggcatagactaccgcaccaagacgaggaggcttgccagggagaaggccgcggagcaatggaacgaggagagggataaagccgcaagggaagccgctgaaaagggatacaccattccgagcggccaatcggttcctctgtccagtaatgagattctggaggctgatgggcctaccgagattgggaagtccagtccacccctttgcgctgatcaaatgcacaagaatgatcatcacttggcaacaggcatcgactctggttcaaagcatgcagatttggagaaatcttttggcttcaaatcgcccattccagggatcaacctctggtctagggtgatttcaagccctagtaggctcaggtacatgagaaaggctcccagcaaggttattccagatgttgataattcttctcagcaaaggattcttagacgcagtgcagatgctgctgtatcatattttcagaacacaggtcacattaatattgatgattcatctcctggaccaggaaaaggctcgtcggatggtggtcatgccaatgttggtggcagtggaatcaattcaaatgatgaaactgtcagcaactctaagactgcatcaacgagtttggctgaatccccatcgcatagtcaactatctagtcagtgcagttcaagtaatttggataacttgttactatggcacaatttggaagatctgcagatcggtcaggccaagaatccttctggaaataagcctgttccacaccaagaaaatatttttgggaattttggttcatgcacacatgctcacaactgggtgccattttggccgttccaattaaagagttgtcctgtcagttttaattcaccttgggcatctctggaccttcaaattgagaaattgaagtcacaatttgccattggtcctggagatttctctgctgaacttacagaaggggttagtgagatccatcctggtggtgttcagaatgcacttccaatcaccctggattctgtgtatttcaatggaggtaacttgatgcttctgggatatggtgatcaagaacccagagaaatgaagcatgctagtggtcatgtcaagttcaaaaacaattataatcgtgtacacgtgcatgtaactgggaattgcatggagtggaggcaagaccgatcttctcaaggagggggttatctttctacagatgtatttgttgacatagctgaggaaacatggcatgctaatctcaatatagtcgatgcatttgccccgctgtttgaaagaattttagaaatacctgttgtttggcacaaaggaagagctaccggtgaggtgcatatctgtatgtcaaagggcgatagttttccaagcattcatggtcagcttgatgtgaaaggtcttgcttttcagatattggatgccccatcatcattttctgatattgtggcaaaattatcatttcgtggtcaaagagtatttctgcacaatgcaagtgggtggtttggtgacgctccagttgaagcttctggagatttgggactaaatcctgaggatggagagtttcatctaatgtgccaggttccatccgttgaagttaacgcacttatgaggacaatgaaaatgaaacctcttatgttcccattggctggttcagttactgctgtatttaactgtcaagggccccttgatgctcctgtttttgttggaagtgggattgtctcaaggaagtctttttcagtatctggtatgcctccatctgctgcttctgaagctgtgatgcaaaacaaagaggctggcgcagttgctgcatttgaccatattccattctctcatgtgtcggccaatttcacgttcaaccttgacaactctgttgctgatttatatggtattagagcatgcctattggatggcggagaaattcgaggggctggtaacgcatggatttgcccagagggggagggtgatgattctgctatggatattaatttgtctgggactattctgcttgataaagtattgcatcgttacattcctggaggaatccaactgattccactcaagattggagagctcaatggagagactagactttctggttcccttattagaccgaagtttgatatcaaatgggctgcaccaaatgcagaagattctttttcagatgcacgtggcaatattgttattgcacatgattacattatggtcaactcttcatcagtctcctttgatttaaatagtcgagttcaaacatcatatattaatgactacttgttgaacaaggagacttatcaaatgaaaaaaatcatgccactaattgtggagggtgttgatttggatttacgtatgcgaggctttgagtttgctcatatagcctcttcaattccttttgattcaccacgtccattacatttgaaagcatctggaagggtcaaatttcaaggaaaaatcatgaaatctagcaatatagctgatggcaatatcaatggtgttcttcaaagtaacattgaccaaaataagcttgagaccaatgcgtcaaagcttgtaggcgacatatctctttctggaattaaactcaaccagctcatgctagcgccacaatctactggttttctttccatatcacgggattctatgatgttgaatgctactggcaggcctgatgaaaatttttctatagaagtgaatgggccattgcttttcacttcaaacgaggttattcaagatgtaaggcttctgtctatattcctccaaaagggccagctgagatctaatatctgttatcatcctgagaatttgaccagtctagaggttcggaatttgacactcgatgagctggagtttgcttcattgcgcggatttgttcaaaaggcagaacttcagcttaattttcagaaaagaagaggccatggtttgctgtcaataatccgtcccaaatttagtggcgtgcttggtgaggcacttgatatagctgctcgatggagcggtgatgttggctggggcaacacagattctgggaagatgatttcaacattattacgtcgcctcctattctcatatgtagtggcacaacaatcaaatgaagcacaactcaagaggaggccaaggcgggcacaatactgctcaattactatggaaaaatctatcctggagcaagctaatagcaaatatgaggttcaaggggagtatgtttttcctggaacgcgtgatagatttcctgtggaaagtcagagtaatgggttcatagagaaagcaatgggagggcatcttggtagcataatgtcttcgatgggcaggtggaggatgagactagaggttcctggtgctgaagtagctgaaatgcttcctttagcaaggcttctttcacggagtacagacccagttatccgttcgagatcaaaggaactttttatgcaatgtctgcattctgttgggttcaatgctgaaagtcttaatgatcagctaaaggcattagaaatttatcatgattggttggatgatgacacaatggaagatatagcatttcctggcttagctgaactaagaggctattggcgtggctctctggatgccagtggaggtggcaatggggataccatggcagattttgatttcaatggtgaagattgggaatggggaacttacaagacacagcgagttctcgcatctggttcattcagcaataatgatggtctgcgtcttgataaattatttatccagaaagataatgccacccttcatgctgatggttcgattcttgggccgcttacaaatcttcactttgctgtgcttaacttcccagtcggccttataccagctttagttcaggctatagaatcatcaaccacagactcaattcattttctgaggcaatggttgactcccatcaaaggtattttgcacatggagggagacttgagaggtactctggcaaaaccagaatgtgatgttcaaataaggctgcttgatggcactattggaggcatcgatcttggaagagcagaagtattagcttctgttacccctacaagtcgtttcgtatttgatgcaaatttcgaaccgacaatacaaagtggacatgtaaacattcaaggtagtataccagtcacttatgtagacaacagctcgatagaggaaagtccagaagaggcagatgggaaacaaggtatcataagaatccctgtttgggcaagagacagaggatcatcgaatgagatcagtgaagcaagaatggtgagagacaagacagaggagggctgggaatttcaattagctgaaaaacttaaaggtttaagttataacatgctagaaccaggtgaagtgaggatagatgcagatataaaggatgggggtatgatgctgataactgcattgagtccttatgcaaactggcttcaaggctatgctgatgttttcctgcaggttaaaggcactgttgatcagcctgttgttgatggatcagcaacgtttaaccgggctattgtgaactctccttttcttcggacaccattgacaaattttgcgggtacaattcaagtcatatccaacagactatgcatcagttcaatggaaagcagggttgggaggaaagggagattgtcgatgaaaggaagcctacctcttaaaaatagcgagccatctgccaatgacaagattgatttgaaatgtgaagttctggacatacgagcaaaaaatattttgagtggccaagtagacagccagctacaagttacaggctcaattttgcgaccagatctttctggaatgatccggttgagtcatggtgaagcatatttgccccatgataaaggcaatggtgctgctgtcactaggttgacttcaaacaagtcgagttatcttctttctggttttgaccaatcaaccacttcgcaggatgtctcacgaattctggggtcactgtcaacatcggcagaaagagatcaatcagacacagaaaagactcttgagcatggaagttttaatccaaacattgatgcacggctaaatgatctgaagctcaccttgggaccagaattgaggattgtttatcctttaattctgaattttgctgtcagtggtgacctagagcttaatgggatggttcatccaaagtatctaagacctaagggcatcttaacatttgaaaatggtgaggtcaacctggtagctacgcaggttagacttaaaaatgatcatttaaatgcagcaaaatttgaacctgatcttggtttggatcctgttcttgatctcgttcttgttggatctgaatggcaattcaaaatccaaagtcgagcaagcatgtggcaagacaatctggtggtaacctcaacacgctctgtggaccaggatgttctgtcacctagtgaggctgcaaaggtttttgaatcgcagcttgcggaatcattattagaaggtgacggacagcttgcgttcaagaagcttgcaactgcaacgctggaaactttgatgccaaggatagaaggcaagggtgagtttggacaggcacggtggcgactggtttatgctccgcagatcccaagtttactctctgtggatccaacagttgatccgctaaaatctctggcaaacaatatctcttttgccacggaggtcgaagtgcagctcggaaaacgccttcaggcctctgtcgtcaggcaaatgaaagattcagaaatggcgatgcagtggacgctgatatatcagctaaccagtaggctccgtgttctcttccagtctactccatccaataggcttctcttcgagtattcagcaacatcacaggaatgattcattttttgttattgcgcacagcaagaattggttgtagcagctgcgtcgtacaaagattaggtggcctgataatcgttttttttgtagataagcaagctttgataagttgtacgtgtacaatcgctcagttgtattgtatttacattctttctcggaaacaaagtttctgagcctgtaaataataggtagcgatcttagcgtcgggtgtagagagaagtataaatgaatgaacgtttcctgtctcttgcgttgctgtccatacgtgaaattggctttcgttactgaccagttagagcaactagtcagatg

SEQ ID NO: 33641 - DNA, 6218 bp, Zea Mays
ctccctgtcacctcgccccgcgctcagaccactactctccccttcctctcgccgcacgcaaatggtcacctaggcgcgcgaggccgacgcgccgctcgctccccacccaatgtcgcactgcccccgcgcctcactctccctcgcgccgccgtcgcccttcctcttcccccactgcccgtctccgcgccggcggcggcgcccgcgcggtcgcagcctccacctgacctcgcgccccctcctcaccctcgctcgcttcgacccgccgcggctgttccgcctcaaggtctccgactccagcgcctcccccggcgaggccgctcacgcccacgcccaccacagcaaccaccgcgcccacgcccaccacagccccgcgccgtcgctgctcccgtggccgcgggccctgatcggctcgctcgcgccggtatggcgggaggggctcttcctcgtgcgctgctccgtcttcgccgccgtggtctccgtcgccggcgcgctctcctggttcgcgcagctccgggcccgctccttcgtcgaggcccgcctcctgcccgctgcatgctccgcgctcagcgagtacctccagcgggaggtccgcctcggcaaggtgcgcagcatctcgccgatcgggatcacgctgcagacctgctccatcggcccgcacgaggaggagttctcctgcgccgaggtgcccgtcatgaagattagggtacgccccttcgccagtcttaggaggggaagggtcgtcgtggacgccgtgctgtccgagccctccgccctggtggcgcagaagaaggatttctcgtggctcgggattcccgcgccctctgagggcacggtcaagaggcactcgggggaggagggcatagactaccgcaccaagacgaggaggcttgccagggagaaggccgcggagcaatggaacgaggagagggataaagccgcaagggaagccgctgaaaagggatacaccattccgagcggccaatcggttcctctgtccagtaatgagattctggaggctgatgggcctaccgagattgggaagtccagtccacccctttgcgctgatcaaatgcacaagaatgatcatcacttggcaacaggcatcgactctggttcaaagcatgcagatttggagaaatcttttggcttcaaatcgcccattccagggatcaacctctggtctagggtgatttcaagccctagtaggctcaggtacatgagaaaggctcccagcaaggttattccagatgttgataattcttctcagcaaaggattcttagacgcagtgcagatgctgctgtatcatattttcagaacacaggtcacattaatattgatgattcatctcctggaccaggaaaaggctcgtcggatggtggtcatgccaatgttggtggcagtggaatcaattcaaatgatgaaactgtcagcaactctaagactgcatcaacgagtttggctgaatccccatcgcatagtcaactatctagtcagtgcagttcaagtaatttggataacttgttactatggcacaatttggaagatctgcagatcggtcaggccaagaatccttctggaaataagcctgttccacaccaagaaaatatttttgggaattttggttcatgcacacatgctcacaactgggtgccattttggccgttccaattaaagagttgtcctgtcagttttaattcaccttgggcatctctggaccttcaaattgagaaattgaagtcacaatttgccattggtcctggagatttctctgctgaacttacagaaggggttagtgagatccatcctggtggtgttcagaatgcacttccaatcaccctggattctgtgtatttcaatggaggtaacttgatgcttctgggatatggtgatcaagaacccagagaaatgaagcatgctagtggtcatgtcaagttcaaaaacaattataatcgtgtacacgtgcatgtaactgggaattgcatggagtggaggcaagaccgatcttctcaaggagggggttatctttctacagatgtatttgttgacatagctgaggaaacatggcatgctaatctcaatatagtcgatgcatttgccccgctgtttgaaagaattttagaaatacctgttgtttggcacaaaggaagagctaccggtgaggtgcatatctgtatgtcaaagggcgatagttttccaagcattcatggtcagcttgatgtgaaaggtcttgcttttcagatattggatgccccatcatcattttctgatattgtggcaaaattatcatttcgtggtcaaagagtatttctgcacaatgcaagtgggtggtttggtgacgctccagttgaagcttctggagatttgggactaaatcctgaggatggagagtttcatctaatgtgccaggttccatccgttgaagttaacgcacttatgaggacaatgaaaatgaaacctcttatgttcccattggctggttcagttactgctgtatttaactgtcaagggccccttgatgctcctgtttttgttggaagtgggattgtctcaaggaagtctttttcagtatctggtatgcctccatctgctgcttctgaagctgtgatgcaaaacaaagaggctggcgcagttgctgcatttgaccatattccattctctcatgtgtcggccaatttcacgttcaaccttgacaactctgttgctgatttatatggtattagagcatgcctattggatggcggagaaattcgaggggctggtaacgcatggatttgcccagagggggagggtgatgattctgctatggatattaatttgtctgggactattctgcttgataaagtattgcatcgttacattcctggaggaatccaactgattccactcaagattggagagctcaatggagagactagactttctggttcccttattagaccgaagtttgatatcaaatgggctgcaccaaatgcagaagattctttttcagatgcacgtggcaatattgttattgcacatgattacattatggtcaactcttcatcagtctcctttgatttaaatagtcgagttcaaacatcatatattaatgactacttgttgaacaaggagacttatcaaatgaaaaaaatcatgccactaattgtggagggtgttgatttggatttacgtatgcgaggctttgagtttgctcatatagcctcttcaattccttttgattcaccacgtccattacatttgaaagcatctggaagggtcaaatttcaaggaaaaatcatgaaatctagcaatatagctgatggcaatatcaatggtgttcttcaaagtaacattgaccaaaataagcttgagaccaatgcgtcaaagcttgtaggcgacatatctctttctggaattaaactcaaccagctcatgctagcgccacaatctactggttttctttccatatcacgggattctatgatgttgaatgctactggcaggcctgatgaaaatttttctatagaagtgaatgggccattgcttttcacttcaaacgaggttattcaagatgtaaggcttctgtctatattcctccaaaagggccagctgagatctaatatctgttatcatcctgagaatttgaccagtctagaggttcggaatttgacactcgatgagctggagtttgcttcattgcgcggatttgttcaaaaggcagaacttcagcttaattttcagaaaagaagaggccatggtttgctgtcaataatccgtcccaaatttagtggcgtgcttggtgaggcacttgatatagctgctcgatggagcggtgatgttgcagattttgatttcaatggtgaagattgggaatggggaacttacaagacacagcgagttctcgcatctggttcattcagcaataatgatggtctgcgtcttgataaattatttatccagaaagataatgccacccttcatgctgatggttcgattcttgggccgcttacaaatcttcactttgctgtgcttaacttcccagtcggccttataccagctttagttcaggctatagaatcatcaaccacagactcaattcattttctgaggcaatggttgactcccatcaaaggtattttgcacatggagggagacttgagaggtactctggcaaaaccagaatgtgatgttcaaataaggctgcttgatggcactattggaggcatcgatcttggaagagcagaagtattagcttctgttacccctacaagtcgtttcgtatttgatgcaaatttcgaaccgacaatacaaagtggacatgtaaacattcaaggtagtataccagtcacttatgtagacaacagctcgatagaggaaagtccagaagaggcagatgggaaacaaggtatcataagaatccctgtttgggcaagagacagaggatcatcgaatgagatcagtgaagcaagaatggtgagagacaagacagaggagggctgggaatttcaattagctgaaaaacttaaaggtttaagttataacatgctagaaccaggtgaagtgaggatagatgcagatataaaggatgggggtatgatgctgataactgcattgagtccttatgcaaactggcttcaaggctatgctgatgttttcctgcaggttaaaggcactgttgatcagcctgttgttgatggatcagcaacgtttaaccgggctattgtgaactctccttttcttcggacaccattgacaaattttgcgggtacaattcaagtcatatccaacagactatgcatcagttcaatggaaagcagggttgggaggaaagggagattgtcgatgaaaggaagcctacctcttaaaaatagcgagccatctgccaatgacaagattgatttgaaatgtgaagttctggacatacgagcaaaaaatattttgagtggccaagtagacagccagctacaagttacaggctcaattttgcgaccagatctttctggaatgatccggttgagtcatggtgaagcatatttgccccatgataaaggcaatggtgctgctgtcactaggttgacttcaaacaagtcgagttatcttctttctggttttgaccaatcaaccacttcgcaggatgtctcacgaattctggggtcactgtcaacatcggcagaaagagatcaatcagacacagaaaagactcttgagcatggaagttttaatccaaacattgatgcacggctaaatgatctgaagctcaccttgggaccagaattgaggattgtttatcctttaattctgaattttgctgtcagtggtgacctagagcttaatgggatggttcatccaaagtatctaagacctaagggcatcttaacatttgaaaatggtgaggtcaacctggtagctacgcaggttagacttaaaaatgatcatttaaatgcagcaaaatttgaacctgatcttggtttggatcctgttcttgatctcgttcttgttggatctgaatggcaattcaaaatccaaagtcgagcaagcatgtggcaagacaatctggtggtaacctcaacacgctctgtggaccaggatgttctgtcacctagtgaggctgcaaaggtttttgaatcgcagcttgcggaatcattattagaaggtgacggacagcttgcgttcaagaagcttgcaactgcaacgctggaaactttgatgccaaggatagaaggcaagggtgagtttggacaggcacggtggcgactggtttatgctccgcagatcccaagtttactctctgtggatccaacagttgatccgctaaaatctctggcaaacaatatctcttttgccacggaggtcgaagtgcagctcggaaaacgccttcaggcctctgtcgtcaggcaaatgaaagattcagaaatggcgatgcagtggacgctgatatatcagctaaccagtagaattggttgtagcagctgcgtcgtacaaagattaggtggcctgataatcgttttttttgtagataagcaagctttgataagttgtacgtgtacaatcgctcagttgtattgtatttacattctttctcggaaacaaagtttctgagcctgtaaataataggtagcgatcttagcgtcgggtgtagagagaagtataaatgaatgaacgtttcctgtctcttgcgttgctgtccatacgtgaaattggctttcgttactgaccagttagagcaactagtcagatg

SEQ ID NO: 33642 - DNA, 6854 bp, Zea Mays
caaagaggaagcagcagcgcgagtgcgcgacgacgaaacggctccagcgaaaggcaagcatctccctgtcacctcgccccgcgctcagaccactactctccccttcctctcgccgcacgcaaatggtcacctaggcgcgcgaggccgacgcgccgctcgctccccacccaatgtcgcactgcccccgcgcctcactctccctcgcgccgccgtcgcccttcctcttcccccactgcccgtctccgcgccggcggcggcgcccgcgcggtcgcagcctccacctgacctcgcgccccctcctcaccctcgctcgcttcgacccgccgcggctgttccgcctcaaggtctccgactccagcgcctcccccggcgaggccgctcacgcccacgcccaccacagcaaccaccgcgcccacgcccaccacagccccgcgccgtcgctgctcccgtggccgcgggccctgatcggctcgctcgcgccggtatggcgggaggggctcttcctcgtgcgctgctccgtcttcgccgccgtggtctccgtcgccggcgcgctctcctggttcgcgcagctccgggcccgctccttcgtcgaggcccgcctcctgcccgctgcatgctccgcgctcagcgagtacctccagcgggaggtccgcctcggcaaggtgcgcagcatctcgccgatcgggatcacgctgcagacctgctccatcggcccgcacgaggaggagttctcctgcgccgaggtgcccgtcatgaagattagggtacgccccttcgccagtcttaggaggggaagggtcgtcgtggacgccgtgctgtccgagccctccgccctggtggcgcagaagaaggatttctcgtggctcgggattcccgcgccctctgagggcacggtcaagaggcactcgggggaggagggcatagactaccgcaccaagacgaggaggcttgccagggagaaggccgcggagcaatggaacgaggagagggataaagccgcaagggaagccgctgaaaagggatacaccattccgagcggccaatcggttcctctgtccagtaatgagattctggaggctgatgggcctaccgagattgggaagtccagtccacccctttgcgctgatcaaatgcacaagaatgatcatcacttggcaacaggcatcgactctggttcaaagcatgcagatttggagaaatcttttggcttcaaatcgcccattccagggatcaacctctggtctagggtgatttcaagccctagtaggctcaggtacatgagaaaggctcccagcaaggttattccagatgttgataattcttctcagcaaaggattcttagacgcagtgcagatgctgctgtatcatattttcagaacacaggtcacattaatattgatgattcatctcctggaccaggaaaaggctcgtcggatggtggtcatgccaatgttggtggcagtggaatcaattcaaatgatgaaactgtcagcaactctaagactgcatcaacgagtttggctgaatccccatcgcatagtcaactatctagtcagtgcagttcaagtaatttggataacttgttactatggcacaatttggaagatctgcagatcggtcaggccaagaatccttctggaaataagcctgttccacaccaagaaaatatttttgggaattttggttcatgcacacatgctcacaactgggtgccattttggccgttccaattaaagagttgtcctgtcagttttaattcaccttgggcatctctggaccttcaaattgagaaattgaagtcacaatttgccattggtcctggagatttctctgctgaacttacagaaggggttagtgagatccatcctggtggtgttcagaatgcacttccaatcaccctggattctgtgtatttcaatggaggtaacttgatgcttctgggatatggtgatcaagaacccagagaaatgaagcatgctagtggtcatgtcaagttcaaaaacaattataatcgtgtacacgtgcatgtaactgggaattgcatggagtggaggcaagaccgatcttctcaaggagggggttatctttctacagatgtatttgttgacatagctgaggaaacatggcatgctaatctcaatatagtcgatgcatttgccccgctgtttgaaagaattttagaaatacctgttgtttggcacaaaggaagagctaccggtgaggtgcatatctgtatgtcaaagggcgatagttttccaagcattcatggtcagcttgatgtgaaaggtcttgcttttcagatattggatgccccatcatcattttctgatattgtggcaaaattatcatttcgtggtcaaagagtatttctgcacaatgcaagtgggtggtttggtgacgctccagttgaagcttctggagatttgggactaaatcctgaggatggagagtttcatctaatgtgccaggttccatccgttgaagttaacgcacttatgaggacaatgaaaatgaaacctcttatgttcccattggctggttcagttactgctgtatttaactgtcaagggccccttgatgctcctgtttttgttggaagtgggattgtctcaaggaagtctttttcagtatctggtatgcctccatctgctgcttctgaagctgtgatgcaaaacaaagaggctggcgcagttgctgcatttgaccatattccattctctcatgtgtcggccaatttcacgttcaaccttgacaactctgttgctgatttatatggtattagagcatgcctattggatggcggagaaattcgaggggctggtaacgcatggatttgcccagagggggagggtgatgattctgctatggatattaatttgtctgggactattctgcttgataaagtattgcatcgttacattcctggaggaatccaactgattccactcaagattggagagctcaatggagagactagactttctggttcccttattagaccgaagtttgatatcaaatgggctgcaccaaatgcagaagattctttttcagatgcacgtggcaatattgttattgcacatgattacattatggtcaactcttcatcagtctcctttgatttaaatagtcgagttcaaacatcatatattaatgactacttgttgaacaaggagacttatcaaatgaaaaaaatcatgccactaattgtggagggtgttgatttggatttacgtatgcgaggctttgagtttgctcatatagcctcttcaattccttttgattcaccacgtccattacatttgaaagcatctggaagggtcaaatttcaaggaaaaatcatgaaatctagcaatatagctgatggcaatatcaatggtgttcttcaaagtaacattgaccaaaataagcttgagaccaatgcgtcaaagcttgtaggcgacatatctctttctggaattaaactcaaccagctcatgctagcgccacaatctactggttttctttccatatcacgggattctatgatgttgaatgctactggcaggcctgatgaaaatttttctatagaagtgaatgggccattgcttttcacttcaaacgaggttattcaagatgtaaggcttctgtctatattcctccaaaagggccagctgagatctaatatctgttatcatcctgagaatttgaccagtctagaggttcggaatttgacactcgatgagctggagtttgcttcattgcgcggatttgttcaaaaggcagaacttcagcttaattttcagaaaagaagaggccatggtttgctgtcaataatccgtcccaaatttagtggcgtgcttggtgaggcacttgatatagctgctcgatggagcggtgatgttattactatggaaaaatctatcctggagcaagctaatagcaaatatgaggttcaaggggagtatgtttttcctggaacgcgtgatagatttcctgtggaaagtcagagtaatgggttcatagagaaagcaatgggagggcatcttggtagcataatgtcttcgatgggcaggtggaggatgagactagaggttcctggtgctgaagtagctgaaatgcttcctttagcaaggcttctttcacggagtacagacccagttatccgttcgagatcaaaggaactttttatgcaatgtctgcattctgttgggttcaatgctgaaagtcttaatgatcagctaaaggcattagaaatttatcatgattggttggatgatgacacaatggaagatatagcatttcctggcttagctgaactaagaggctattggcgtggctctctggatgccagtggaggtggcaatggggataccatggcagattttgatttcaatggtgaagattgggaatggggaacttacaagacacagcgagttctcgcatctggttcattcagcaataatgatggtctgcgtcttgataaattatttatccagaaagataatgccacccttcatgctgatggttcgattcttgggccgcttacaaatcttcactttgctgtgcttaacttcccagtcggccttataccagctttagttcaggctatagaatcatcaaccacagactcaattcattttctgaggcaatggttgactcccatcaaaggtattttgcacatggagggagacttgagaggtactctggcaaaaccagaatgtgatgttcaaataaggctgcttgatggcactattggaggcatcgatcttggaagagcagaagtattagcttctgttacccctacaagtcgtttcgtatttgatgcaaatttcgaaccgacaatacaaagtggacatgtaaacattcaaggtagtataccagtcacttatgtagacaacagctcgatagaggaaagtccagaagaggcagatgggaaacaaggtatcataagaatccctgtttgggcaagagacagaggatcatcgaatgagatcagtgaagcaagaatggtgagagacaagacagaggagggctgggaatttcaattagctgaaaaacttaaaggtttaagttataacatgctagaaccaggtgaagtgaggatagatgcagatataaaggatgggggtatgatgctgataactgcattgagtccttatgcaaactggcttcaaggctatgctgatgttttcctgcaggttaaaggcactgttgatcagcctgttgttgatggatcagcaacgtttaaccgggctattgtgaactctccttttcttcggacaccattgacaaattttgcgggtacaattcaagtcatatccaacagactatgcatcagttcaatggaaagcagggttgggaggaaagggagattgtcgatgaaaggaagcctacctcttaaaaatagcgagccatctgccaatgacaagattgatttgaaatgtgaagttctggacatacgagcaaaaaatattttgagtggccaagtagacagccagctacaagttacaggctcaattttgcgaccagatctttctggaatgatccggttgagtcatggtgaagcatatttgccccatgataaaggcaatggtgctgctgtcactaggttgacttcaaacaagtcgagttatcttctttctggttttgaccaatcaaccacttcgcaggatgtctcacgaattctggggtcactgtcaacatcggcagaaagagatcaatcagacacagaaaagactcttgagcatggaagttttaatccaaacattgatgcacggctaaatgatctgaagctcaccttgggaccagaattgaggattgtttatcctttaattctgaattttgctgtcagtggtgacctagagcttaatgggatggttcatccaaagtatctaagacctaagggcatcttaacatttgaaaatggtgaggtcaacctggtagctacgcaggttagacttaaaaatgatcatttaaatgcagcaaaatttgaacctgatcttggtttggatcctgttcttgatctcgttcttgttggatctgaatggcaattcaaaatccaaagtcgagcaagcatgtggcaagacaatctggtggtaacctcaacacgctctgtggaccaggatgttctgtcacctagtgaggctgcaaaggtttttgaatcgcagcttgcggaatcattattagaaggtgacggacagcttgcgttcaagaagcttgcaactgcaacgctggaaactttgatgccaaggatagaaggcaagggtgagtttggacaggcacggtggcgactggtttatgctccgcagatcccaagtttactctctgtggatccaacagttgatccgctaaaatctctggcaaacaatatctcttttgccacggaggtcgaagtgcagctcggaaaacgccttcaggcctctgtcgtcaggcaaatgaaagattcagaaatggcgatgcagtggacgctgatatatcagctaaccagtaggctccgtgttctcttccagtctactccatccaataggcttctcttcgagtattcagcaacatcacaggaatgattcattttttgttattgcgcacagcaagaattggttgtagcagctgcgtcgtacaaagattaggtggcctgataatcgttttttttgtagataagcaagctttgataagttgtacgtgtacaatcgctcagttgtattgtatttacattctttctcggaaacaaagtttctgagcctgtaaataataggtagcgatcttagcgtcgggtgtagagagaagtataaatgaatgaacgtttcctgtctcttgcgttgctgtccatacgtgaaattggctttcgttactgaccagttagagcaactagtcagatg

SEQ ID NO: 33643 - DNA, 1095 bp, Zea Mays
tgtactttggacagggatttgttccaagtttttctatgtcttgggacattgagagtgatgatggggaccttgatgatgaggttgatgatggacctgaggatgaacctgaacatgatgcggaagatgccccagccgaacctgctatcaggacagctgcggccccggctgcgccacccaaggacacagaaaggcagctgtctaaaaaggagttgaaaaagaaggaactagcagaacttgatgcagtattggctgagctgggactctctgcaaattctagcagcactgcacaggatgctgagaagaaaggtaccaaccaaattggtgatgcagagaagaaggaagatgctcctgctcctcccgagagcaaggcctccaagaagaagaaaaagaaggacaagagttcaaaggagggaaaagaaacacaagaagcacttgatgggtcagaggagactgccagtgcaggacctgatgaagatacttctgctgtggatgtgaaggagcgcttgaagaagatggcatcaatgaagaagaagaaatcgagcagagagacggacacagctgccaaaattgccgctgccgaggctgcagcaaggagtgcaaggcttgcggcggccaagaagaaagaaaagagtcattacaaccagcagcccgtgcggtaaatgggcataaagttttgagtttgggtgctgtgagtttgatatccccttgttcgttttggactcgcaataaaacttttttgagttatcgtatttatgactgggaagtgcctttctgagtttcattttcagaatttaatgaaaggcctttgtggttgcaaaacggtggtgtaattgtgctttaaattgttcatccaatgataaacttcgtgaacaactccagcaccgcctgtagtccgatttttaaatccttgcattgatgaggagggcgggggtacacttgccgaaattatccccagcctgatttcttttatcttatatatataaatgtgccttttatacttctatagactgcagtacctttgaggcgatccccgtggctttgttcggttactagggaataaatctcactatatatttaatctgggtctgtattgta

SEQ ID NO: 33644 - DNA, 1148 bp, Zea Mays
gtccattatgccattttttttgcgattggtgtcggtaacggatgcaattattcgccttggccgtgcgtcttgtgtgcaatatggcaatcaatttctggacattgagagtgatgatggggaccttgatgatgaggttgatgatggacctgaggatgaacctgaacatgatgcggaagatgccccagccgaacctgctatcaggacagctgcggccccggctgcgccacccaaggacacagaaaggcagctgtctaaaaaggagttgaaaaagaaggaactagcagaacttgatgcagtattggctgagctgggactctctgcaaattctagcagcactgcacaggatgctgagaagaaaggtaccaaccaaattggtgatgcagagaagaaggaagatgctcctgctcctcccgagagcaaggcctccaagaagaagaaaaagaaggacaagagttcaaaggagggaaaagaaacacaagaagcacttgatgggtcagaggagactgccagtgcaggacctgatgaagatacttctgctgtggatgtgaaggagcgcttgaagaagatggcatcaatgaagaagaagaaatcgagcagagagacggacacagctgccaaaattgccgctgccgaggctgcagcaaggagtgcaaggcttgcggcggccaagaagaaagaaaagagtcattacaaccagcagcccgtgcggtaaatgggcataaagttttgagtttgggtgctgtgagtttgatatccccttgttcgttttggactcgcaataaaacttttttgagttatcgtatttatgactgggaagtgcctttctgagtttcattttcagaatttaatgaaaggcctttgtggttgcaaaacggtggtgtaattgtgctttaaattgttcatccaatgataaacttcgtgaacaactccagcaccgcctgtagtccgatttttaaatccttgcattgatgaggagggcgggggtacacttgccgaaattatccccagcctgatttcttttatcttatatatataaatgtgccttttatacttctatagactgcagtacctttgaggcgatccccgtggctttgttcggttactagggaataaatctcactatatatttaatctgggtctgtattgta

SEQ ID NO: 33645 - DNA, 1105 bp, Zea Mays
gtttaatctccgtactggttagttgacagttggcgctgctgcggaatccttggagacattgagagtgatgatggggaccttgatgatgaggttgatgatggacctgaggatgaacctgaacatgatgcggaagatgccccagccgaacctgctatcaggacagctgcggccccggctgcgccacccaaggacacagaaaggcagctgtctaaaaaggagttgaaaaagaaggaactagcagaacttgatgcagtattggctgagctgggactctctgcaaattctagcagcactgcacaggatgctgagaagaaaggtaccaaccaaattggtgatgcagagaagaaggaagatgctcctgctcctcccgagagcaaggcctccaagaagaagaaaaagaaggacaagagttcaaaggagggaaaagaaacacaagaagcacttgatgggtcagaggagactgccagtgcaggacctgatgaagatacttctgctgtggatgtgaaggagcgcttgaagaagatggcatcaatgaagaagaagaaatcgagcagagagacggacacagctgccaaaattgccgctgccgaggctgcagcaaggagtgcaaggcttgcggcggccaagaagaaagaaaagagtcattacaaccagcagcccgtgcggtaaatgggcataaagttttgagtttgggtgctgtgagtttgatatccccttgttcgttttggactcgcaataaaacttttttgagttatcgtatttatgactgggaagtgcctttctgagtttcattttcagaatttaatgaaaggcctttgtggttgcaaaacggtggtgtaattgtgctttaaattgttcatccaatgataaacttcgtgaacaactccagcaccgcctgtagtccgatttttaaatccttgcattgatgaggagggcgggggtacacttgccgaaattatccccagcctgatttcttttatcttatatatataaatgtgccttttatacttctatagactgcagtacctttgaggcgatccccgtggctttgttcggttactagggaataaatctcactatatatttaatctgggtctgtattgta

SEQ ID NO: 33646 - DNA, 1362 bp, Zea Mays
caatgagcattagcttggtttgccgatagctcacatggctggacttcctatttgtccagtggcaaagagaacatctgtttttgatgaccctacagtggagattcaagagttgactgcagtcattaagaaggatatcacggctttgaattctgctgttgtagacctacaagctctctgcaattcacaaaatgagagtggcagtctctccaaggacacatcaaatcattccactacagtcgtggacaacctaaaaaatcgtctgatgagtgcaacaaaagaatttaaagaagttcttaccatgcgaacagagaatttgaaggttcatgaaaatagaaggcaaatgttctcttcgtcagctgcaaaggacgcgtcaaatccattcatccgtcaacgaccccttgttgctagggatccatcagagtcatctgtgcccccagcaccatgggccagcgactctgcatctaccccattattccagagcctttcgcacagcagcaacaattggcagtgcagcaggacagttacatgcagagcagagctgaggcccttcaaaatgtggaatcaacaatccatgagctgagcaacatatttacacagttggcaaccatggtttctcaacagggagagctagcaatcagaattgacgagaacatggaggaaacagtggctaacgtggagggagcgcagggccagctcctgaagtatctcaacagcatttcgtccaacaggtggctgatgatgaagatattctttgtgctgatggtgttcctcatgatcttcatattcttcgtggcttgaccttctgtaccattctgcccgaggtgctctggccgctatgcgtagtattcttttatttttactcatactacaccgtgtacacaattttcaccctggacgataagccatcgttcacccttttgtggccatgtaaattgggaggagttcgagtcctgttacgttactcttgattggcaatatctccactgtatttgatgtatcaactcgccagacagtaataggcaggtggcaaaaccgcttctcgttcttgtcagatcactatacctatacgggagtatgccccgctagttcaggcacatgctattctgattgtttctgatatctgttgtttatcctcttttcattcgctaatttcaggtaggatatctgtcaggtagggtctgtcatgactactataatcatacatgaatcctggatggtgcctcttttgcgcttagatttctattttttttagttacaattttttcttgcgctttttagctcggttcagaaaagaaaataacttgacatgaaccagatatcactacccagctttgcgatttcatatttctacaaggttcatga

SEQ ID NO: 33647 - DNA, 1457 bp, Zea Mays
atttgtgccactttttttcaaattcaaactgaagattatctgcaccatatcatgtcaatgagcattagcttggtttgccgatagctcacatggctggacttcctatttgtccagtggcaaagagaacatctgtttttgatgaccctacagtggagattcaagagttgactgcagtcattaagaaggatatcacggctttgaattctgctgttgtagacctacaagctctctgcaattcacaaaatgagagtggcagtctctccaaggacacatcaaatcattccactacagtcgtggacaacctaaaaaatcgtctgatgagtgcaacaaaagaatttaaagaagttcttaccatgcgaacagagaatttgaaggttcatgaaaatagaaggcaaatgttctcttcgtcagctgcaaaggacgcgtcaaatccattcatccgtcaacgaccccttgttgctagggatccatcagagtcatctgtgcccccagcaccatgggccagcgactctgcatctaccccattattccagaggaagaaaactaatggagaccatggggcatcatcatctcagcctttcgcacagcagcaacaattggcagtgcagcaggacagttacatgcagagcagagctgaggcccttcaaaatgtggaatcaacaatccatgagctgagcaacatatttacacagttggcaaccatggtttctcaacagggagagctagcaatcagaattgacgagaacatggaggaaacagtggctaacgtggagggagcgcagggccagctcctgaagtatctcaacagcatttcgtccaacaggtggctgatgatgaagatattctttgtgctgatggtgttcctcatgatcttcatattcttcgtggcttgaccttctgtaccattctgcccgaggtgctctggccgctatgcgtagtattcttttatttttactcatactacaccgtgtacacaattttcaccctggacgataagccatcgttcacccttttgtggccatgtaaattgggaggagttcgagtcctgttacgttactcttgattggcaatatctccactgtatttgatgtatcaactcgccagacagtaataggcaggtggcaaaaccgcttctcgttcttgtcagatcactatacctatacgggagtatgccccgctagttcaggcacatgctattctgattgtttctgatatctgttgtttatcctcttttcattcgctaatttcaggtaggatatctgtcaggtagggtctgtcatgactactataatcatacatgaatcctggatggtgcctcttttgcgcttagatttctattttttttagttacaattttttcttgcgctttttagctcggttcagaaaagaaaataacttgacatgaaccagatatcactacccagctttgcgatttcatatttctacaaggttcatga

SEQ ID NO: 33648 - DNA, 1728 bp, Zea Mays
aaaattaaaaaatcggcaccgcgtctccctccttcgcgtgctcctccggtcctcccccgaaccccacccccctcccacccacgagtcgagggcgagcgcgagatccagatccgcgtctagatccatcgcccggggtccgccatgatcccgacgcggtccgcgcaggcgtcgttccgcgaccgcaccaacgagttccgcgccgccgtcgagagagcgcgccgccacgccgtaccttcctcgtcgtcagcccccgccgcgccgagtagcagctctaccgggcccctcgacgggttgatcgcagccacgtcggctcgctcggagttcaacaaccgcgcgtccaagatcgggctcgggatccaccagacctcacagaagctatcccgccttgcgaaattggcaaagagaacatctgtttttgatgaccctacagtggagattcaagagttgactgcagtcattaagaaggatatcacggctttgaattctgctgttgtagacctacaagctctctgcaattcacaaaatgagagtggcagtctctccaaggacacatcaaatcattccactacagtcgtggacaacctaaaaaatcgtctgatgagtgcaacaaaagaatttaaagaagttcttaccatgcgaacagaggttcatgaaaatagaaggcaaatgttctcttcgtcagctgcaaaggacgcgtcaaatccattcatccgtcaacgaccccttgttgctagggatccatcagagtcatctgtgcccccagcaccatgggccagcgactctgcatctaccccattattccagaggaagaaaactaatggagaccatggggcatcatcatctcagcctttcgcacagcagcaacaattggcagtgcagcaggacagttacatgcagagcagagctgaggcccttcaaaatgtggaatcaacaatccatgagctgagcaacatatttacacagttggcaaccatggtttctcaacagggagagctagcaatcagaattgacgagaacatggaggaaacagtggctaacgtggagggagcgcagggccagctcctgaagtatctcaacagcatttcgtccaacaggtggctgatgatgaagatattctttgtgctgatggtgttcctcatgatcttcatattcttcgtggcttgaccttctgtaccattctgcccgaggtgctctggccgctatgcgtagtattcttttatttttactcatactacaccgtgtacacaattttcaccctggacgataagccatcgttcacccttttgtggccatgtaaattgggaggagttcgagtcctgttacgttactcttgattggcaatatctccactgtatttgatgtatcaactcgccagacagtaataggcaggtggcaaaaccgcttctcgttcttgtcagatcactatacctatacgggagtatgccccgctagttcaggcacatgctattctgattgtttctgatatctgttgtttatcctcttttcattcgctaatttcaggtaggatatctgtcaggtagggtctgtcatgactactataatcatacatgaatcctggatggtgcctcttttgcgcttagatttctattttttttagttacaattttttcttgcgctttttagctcggttcagaaaagaaaataacttgacatgaaccagatatcactacccagctttgcgatttcatatttctacaaggttcatga

SEQ ID NO: 33649 - DNA, 1697 bp, Zea Mays
aaaattaaaaaatcggcaccgcgtctccctccttcgcgtgctcctccggtcctcccccgaaccccacccccctcccacccacgagtcgagggcgagcgcgagatccagatccgcgtctagatccatcgcccggggtccgccatgatcccgacgcggtccgcgcaggcgtcgttccgcgaccgcaccaacgagttccgcgccgccgtcgagagagcgcgccgccacgccgtaccttcctcgtcgtcagcccccgccgcgccgagtagcagctctaccgggcccctcgacgggttgatcgcagccacgtcggctcgctcggagttcaacaaccgcgcgtccaagatcgggctcgggatccaccagacctcacagaagctatcccgccttgcgaaattggcaaagagaacatctgtttttgatgaccctacagtggagattcaagagttgactgcagtcattaagaaggatatcacggctttgaattctgctgttgtagacctacaagctctctgcaattcacaaaatgagagtggcagtctctccaaggacacatcaaatcattccactacagtcgtggacaacctaaaaaatcgtctgatgagtgcaacaaaagaatttaaagaagttcttaccatgcgaacagagaatttgaaggttcatgaaaatagaaggcaaatgttctcttcgtcagctgcaaaggacgcgtcaaatccattcatccgtcaacgaccccttgttgctagggatccatcagagtcatctgtgcccccagcaccatgggccagcgactctgcatctaccccattattccagagcctttcgcacagcagcaacaattggcagtgcagcaggacagttacatgcagagcagagctgaggcccttcaaaatgtggaatcaacaatccatgagctgagcaacatatttacacagttggcaaccatggtttctcaacagggagagctagcaatcagaattgacgagaacatggaggaaacagtggctaacgtggagggagcgcagggccagctcctgaagtatctcaacagcatttcgtccaacaggtggctgatgatgaagatattctttgtgctgatggtgttcctcatgatcttcatattcttcgtggcttgaccttctgtaccattctgcccgaggtgctctggccgctatgcgtagtattcttttatttttactcatactacaccgtgtacacaattttcaccctggacgataagccatcgttcacccttttgtggccatgtaaattgggaggagttcgagtcctgttacgttactcttgattggcaatatctccactgtatttgatgtatcaactcgccagacagtaataggcaggtggcaaaaccgcttctcgttcttgtcagatcactatacctatacgggagtatgccccgctagttcaggcacatgctattctgattgtttctgatatctgttgtttatcctcttttcattcgctaatttcaggtaggatatctgtcaggtagggtctgtcatgactactataatcatacatgaatcctggatggtgcctcttttgcgcttagatttctattttttttagttacaattttttcttgcgctttttagctcggttcagaaaagaaaataacttgacatgaaccagatatcactacccagctttgcgatttcatatttctacaaggttcatga

SEQ ID NO: 33650 - DNA, 3715 bp, Zea Mays
cgcgtcagttggccccacaactgcaccccatttcgaattcaaaccacctcctacggcccttcagccctcttcctgctccccctcctcgtctccttccatcgaagcttctacgccctcgccgaaggcccttgcccggggagcgcgaggcgcagtcatgacggagccgcgcagggtgtcgttccgcgacggctgcctcgcgtcgcggaaggccgaggaagcagcatggaggcggcatcaggctgcagcctggctccaagcaatggtgggctccttgggcctgcctccttatccgtcggagcaagagtttgttgcttctctaaggaatggcattgtcctatgcaaggcaatcaacaagttacagcctggtgccgtgacaaagattatcacaaatgcccccagcaatagccagccgttgacggcttttcagtatttcgagaacatccgcaacttcttagtcgctgtcaacaaactgaagctgacgagttttgaggcatctgacttagataaggacaatcttgatgctgggacggttggcaagattgttgactgtgtcatttcattgaagtcttaccatgaatggaagcaagccggcggagccaatgggcctaacaagtacatgaaatcacctcttgcagtgcgttcttcgcagattcaatccgaaaatgttgcttcgggaccttctccctccctaaagcgtctagacttgactgaggttgatgctgacacacagacatttcaaaatctagatcctaacatgaaagattgtgcatttgcagacgcagtggagaaacttcagaaagttatagtagattctatgttgagttctaaggaaaatattgaccaagacattctgaaaaaggttccatcaaagcttattggtgctgttttagcaagccaactgggaaaagaacagttcaaacatcttcagcttttatctccggaaaagcttatagcggagaatgagccaactcattgtattgagcatcccaactcaccgattgagagcaaacaattgctgttgcaagcacatgaaactgaacttttggacctcaagaaaatgtttcaagatgttaaagtcaacttcaggtctttgcagacccaatttcgagatgacatggccaaattaggtgaaaatatccaagatctttccaaagctgcccttggttataaccaagccgtaaaagaaaacagaaatttgtataacatgcttcaagaactgcgaggaaatatccgagtcttctgccggataaggccacttcttcattcagagtctatttcttcaattgaacatgttggaaccgatggctcagtgatggtctgtgatccagttaaaccacaaagtgcacataaaatattccagttcaacaaagtttttgggccaacaactactcaagatgaagtgtataaggagacacaacctttggttagatccgtcatggatggatataatgtatgcatatttgcttacggtcagacaggttccggcaaaacccatacaatgtgtggcccatctggtgggctgtccaaggattatggaattaattacatggccttgaatgatctcttcaacatatcaacttctagagaagatgtcaagtacgacatacgggtgcagatggttgaaatatacaatgaacaagttcgtgatcttctaaatgaggacagatcaagcacaaaattagatataagggcttccttgaacaatggtctatccaaccttccagatgcaaagatctgcccagtgcagtccccttctgatgttatcaatttgatgcagttgggtgaaaagcaccgagcttccggatcaacagcaatgaaccataggagcagtcgttcccacagtatcttaactgtccatgtaaatggaaaggacattgctggcaatgtgagccgtagcagtttgcatttggtagatcttgcaggaagcgaaagggttgataggtcagaagccacaggagacagattaaaagaggctcagcatattaacaagtcactctcctgccttggagatgtcatcaacgcattagctcagaagaactctcacattccttatagaaatagtaaactcacccaactactacaaagttcattaggtatatctggctgcacattataaaatgatctaccaattttgtgaacattaatcaacaacttattaggtggttcaatggttctacatctctgacccatctttttagcatcataatttaacttcatggcttcatcatgcctgaagttggctgatgccagttgttttctgttcgagtaaaattaagcttgctatgtcatttttttcaaattcaaactatatatgcaactctaacttctctatacattttgcaatatcaatgagtgacaggggggaatgcaaaaatgctaatgtttgcccacataagtccggatgcagaatcttgtgcagaaacccttagtacactaaaatttgctcagagggcttctactgtagaacttgggactgcactcgcaaacaaagaaagcagtgaagtaagagagcttaaggaacaggtagatactctgaaaaaggcattagcaagtaaagaactggaaaaaacaactcttaaagtgaagggaagtgcaaccacgagtgagagaacaaagcaagtactggattgcactccccctaggccacggagattaagcctagagaatgctagtgataaagccaggatgccagaaagaaagatactgaaatcccctcgttcagctgtgggtataacccacgacaaggaatgcaacactgatgccttccgtcacgccaaccaccacgaatcactaatacagatgtcagcggcatgcgctgaagttcttgttagagaggaggagaagataatttgtacagttgatacagtggaattttgtcagctacccactgaagcttataatctacttaagcaatcaggattaaatactccagaggcagcaccttgtaggtcaaggaacctgcgcactgaagcaagttgcggtgatgctctttcttccactaccaaattggagaaaataatggcaggtactgcagtgaagaagggatctcaactaaagaagtcaattcaaagcagcatagggagattgattcatggtactgaaagaaggaacgcgcagcattcagcacaagggactccaactaaaatcatagctagcggatgccataataatgtctccccagttacagctgatatcaggttaaggagaagacagtcactgacaggtatcccaccaccgctcccaactatgtcacgcagatcctcacttggagggaggtcggatacaagttcaaacgacaaaagaggtgcaaaaacaccacctcccgtgaactcggcagcaaaggctaaaagatggctttgaatctgaagcagaactgtcagaaaattttgactccaagcagagctcaaggcagacacgtatttggtgccatcacttaactgtggttttaggccttgggtggtggttacattctttgtaacagctgaagcattagttgtacaagggggaagggtgtgtgtttgttgtattctggatttctatgatggagcattggagcaactcacttgttcgatttattatgggatgtttgttttgaggaaatcaccccatctaagatgaagtggtgcattatgagttcatttcttaaattttgtggaatgatcttattcttcgtgttagtactaactatgggggataaggtgatgatggataaact

SEQ ID NO: 33651 - DNA, 3708 bp, Zea Mays
cgcgtcagttggccccacaactgcaccccatttcgaattcaaaccacctcctacggcccttcagccctcttcctgctccccctcctcgtctccttccatcgaagcttctacgccctcgccgaaggcccttgcccggggagcgcgaggcgcagtcatgacggagccgcgcagggtgtcgttccgcgacggctgcctcgcgtcgcggaaggccgaggaagcagcatggaggcggcatcaggctgcagcctggctccaagcaatggtgggctccttgggcctgcctccttatccgtcggagcaagagtttgttgcttctctaaggaatggcattgtcctatgcaaggcaatcaacaagttacagcctggtgccgtgacaaagattatcacaaatgcccccagcaatagccagccgttgacggcttttcagtatttcgagaacatccgcaacttcttagtcgctgtcaacaaactgaagctgacgagttttgaggcatctgacttagataaggacaatcttgatgctgggacggttggcaagattgttgactgtgtcatttcattgaagtcttaccatgaatggaagcaagccggcggagccaatgggcctaacaagtacatgaaatcacctcttgcagtgcgttcttcgcagattcaatccgaaaatgttgcttcgggaccttctccctccctaaagcgtctagacttgactgaggttgatgctgacacacagacatttcaaaatctagatcctaacatgaaagattgtgcatttgcagacgcagtggagaaacttcagaaagttatagtagattctatgttgagttctaaggaaaatattgaccaagacattctgaaaaaggttccatcaaagcttattggtgctgttttagcaagccaactgggaaaagaacagttcaaacatcttcagcttttatctccggaaaagcttatagcggagaatgagccaactcattgtattgagcatcccaactcaccgattgagagcaaacaattgctgttgcaagcacatgaaactgaacttttggacctcaagaaaatgtttcaagatgttaaagtcaacttcaggtctttgcagacccaatttcgagatgacatggccaaattaggtgaaaatatccaagatctttccaaagctgcccttggttataaccaagccgtaaaagaaaacagaaatttgtataacatgcttcaagaactgcgaggaaatatccgagtcttctgccggataaggccacttcttcattcagagtctatttcttcaattgaacatgttggaaccgatggctcagtgatggtctgtgatccagttaaaccacaaagtgcacataaaatattccagttcaacaaagtttttgggccaacaactactcaagatgaagtgtataaggagacacaacctttggttagatccgtcatggatggatataatgtatgcatatttgcttacggtcagacaggttccggcaaaacccatacaatgtgtggcccatctggtgggctgtccaaggattatggaattaattacatggccttgaatgatctcttcaacatatcaacttctagagaagatgtcaagtacgacatacgggtgcagatggttgaaatatacaatgaacaagttcgtgatcttctaaatgaggacagatcaagcacaaaattagatataagggcttccttgaacaatggtctatccaaccttccagatgcaaagatctgcccagtgcagtccccttctgatgttatcaatttgatgcagttgggtgaaaagcaccgagcttccggatcaacagcaatgaaccataggagcagtcgttcccacagtatcttaactgtccatgtaaatggaaaggacattgctggcaatgtgagccgtagcagtttgcatttggtagatcttgcaggaagcgaaagggttgataggtcagaagccacaggagacagattaaaagaggctcagcatattaacaagtcactctcctgccttggagatgtcatcaacgcattagctcagaagaactctcacattccttatagaaatagtaaactcacccaactactacaaagttcattaggtatatctggctgcacattataaaatgatctaccaattttgtgaacattaatcaacaacttattaggtggttcaatggttctacatctctgacccatctttttagcatcataatttaacttcatggcttcatcatgcctgaagttggctgatgccagttgttttctgttcgagtaaaattaagcttgctatgtcatttttttcaaattcaaactatatatgcaactctaacttctctatacattttgcaatatcaatgagtgacaggggggaatgcaaaaatgctaatgtttgcccacataagtccggatgcagaatcttgtgcagaaacccttagtacactaaaatttgctcagagggcttctactgtagaacttgggactgcactcgcaaacaaagaaagcagtgaagtaagagagcttaaggaacaggtagatactctgaaaaaggcattagcaagtaaagaactggaaaaaacaactcttaaagtgaagggaagtgcaaccacgagtgagagaacaaagcaagtactggattgcactccccctaggccacggagattaagcctagagaatgctagtgataaagccaggatgccagaaagaaagatactgaaatcccctcgttcagctgtgggtataacccacgacaaggaatgcaacactgatgccttccgtcacgccaaccaccacgaatcactaatacagcggcatgcgctgaagttcttgttagagaggaggagaagataatttgtacagttgatacagtggaattttgtcagctacccactgaagcttataatctacttaagcaatcaggattaaatactccagaggcagcaccttgtaggtcaaggaacctgcgcactgaagcaagttgcggtgatgctctttcttccactaccaaattggagaaaataatggcaggtactgcagtgaagaagggatctcaactaaagaagtcaattcaaagcagcatagggagattgattcatggtactgaaagaaggaacgcgcagcattcagcacaagggactccaactaaaatcatagctagcggatgccataataatgtctccccagttacagctgatatcaggttaaggagaagacagtcactgacaggtatcccaccaccgctcccaactatgtcacgcagatcctcacttggagggaggtcggatacaagttcaaacgacaaaagaggtgcaaaaacaccacctcccgtgaactcggcagcaaaggctaaaagatggctttgaatctgaagcagaactgtcagaaaattttgactccaagcagagctcaaggcagacacgtatttggtgccatcacttaactgtggttttaggccttgggtggtggttacattctttgtaacagctgaagcattagttgtacaagggggaagggtgtgtgtttgttgtattctggatttctatgatggagcattggagcaactcacttgttcgatttattatgggatgtttgttttgaggaaatcaccccatctaagatgaagtggtgcattatgagttcatttcttaaattttgtggaatgatcttattcttcgtgttagtactaactatgggggataaggtgatgatggataaact

SEQ ID NO: 33652 - DNA, 3409 bp, Zea Mays
cgagatctcggacagatttcagttctcggggcaacggccgccgcgtcagttggccccacaactgcaccccatttcgaattcaaaccacctcctacggcccttcagccctcttcctgctccccctcctcgtctccttccatcgaagcttctacgccctcgccgaaggcccttgcccggggagcgcgaggcgcagtcatgacggagccgcgcagggtgtcgttccgcgacggctgcctcgcgtcgcggaaggccgaggaagcagcatggaggcggcatcaggctgcagcctggctccaagcaatggcaatcaacaagttacagcctggtgccgtgacaaagattatcacaaatgcccccagcaatagccagccgttgacggcttttcagtatttcgagaacatccgcaacttcttagtcgctgtcaacaaactgaagctgacgagttttgaggcatctgacttagataaggacaatcttgatgctgggacggttggcaagattgttgactgtgtcatttcattgaagtcttaccatgaatggaagcaagccggcggagccaatgggcctaacaagtacatgaaatcacctcttgcagtgcgttcttcgcagattcaatccgaaaatgttgcttcgggaccttctccctccctaaagcgtctagacttgactgaggttgatgctgacacacagacatttcaaaatctagatcctaacatgaaagattgtgcatttgcagacgcagtggagaaacttcagaaagttatagtagattctatgttgagttctaaggaaaatattgaccaagacattctgaaaaaggttccatcaaagcttattggtgctgttttagcaagccaactgggaaaagaacagttcaaacatcttcagcttttatctccggaaaagcttatagcggagaatgagccaactcattgtattgagcatcccaactcaccgattgagagcaaacaattgctgttgcaagcacatgaaactgaacttttggacctcaagaaaatgtttcaagatgttaaagtcaacttcaggtctttgcagacccaatttcgagatgacatggccaaattaggtgaaaatatccaagatctttccaaagctgcccttggttataaccaagccgtaaaagaaaacagaaatttgtataacatgcttcaagaactgcgaggaaatatccgagtcttctgccggataaggccacttcttcattcagagtctatttcttcaattgaacatgttggaaccgatggctcagtgatggtctgtgatccagttaaaccacaaagtgcacataaaatattccagttcaacaaagtttttgggccaacaactactcaagatgaagtgtataaggagacacaacctttggttagatccgtcatggatggatataatgtatgcatatttgcttacggtcagacaggttccggcaaaacccatacaatgtgtggcccatctggtgggctgtccaaggattatggaattaattacatggccttgaatgatctcttcaacatatcaacttctagagaagatgtcaagtacgacatacgggtgcagatggttgaaatatacaatgaacaagttcgtgatcttctaaatgaggacagatcaagcacaaaattagatataagggcttccttgaacaatggtctatccaaccttccagatgcaaagatctgcccagtgcagtccccttctgatgttatcaatttgatgcagttgggtgaaaagcaccgagcttccggatcaacagcaatgaaccataggagcagtcgttcccacagtatcttaactgtccatgtaaatggaaaggacattgctggcaatgtgagccgtagcagtttgcatttggtagatcttgcaggaagcgaaagggttgataggtcagaagccacaggagacagattaaaagaggctcagcatattaacaagtcactctcctgccttggagatgtcatcaacgcattagctcagaagaactctcacattccttatagaaatagtaaactcacccaactactacaaagttcattaggggggaatgcaaaaatgctaatgtttgcccacataagtccggatgcagaatcttgtgcagaaacccttagtacactaaaatttgctcagagggcttctactgtagaacttgggactgcactcgcaaacaaagaaagcagtgaagtaagagagcttaaggaacaggtagatactctgaaaaaggcattagcaagtaaagaactggaaaaaacaactcttaaagtgaagggaagtgcaaccacgagtgagagaacaaagcaagtactggattgcactccccctaggccacggagattaagcctagagaatgctagtgataaagccaggatgccagaaagaaagatactgaaatcccctcgttcagctgtgggtataacccacgacaaggaatgcaacactgatgccttccgtcacgccaaccaccacgaatcactaatacagatgtcagcggcatgcgctgaagttcttgttagagaggaggagaagataatttgtacagttgatacagtggaattttgtcagctacccactgaagcttataatctacttaagcaatcaggattaaatactccagaggcagcaccttgtaggtcaaggaacctgcgcactgaagcaagttgcggtgatgctctttcttccactaccaaattggagaaaataatggcaggtactgcagtgaagaagggatctcaactaaagaagtcaattcaaagcagcatagggagattgattcatggtactgaaagaaggaacgcgcagcattcagcacaagggactccaactaaaatcatagctagcggatgccataataatgtctccccagttacagctgatatcaggttaaggagaagacagtcactgacaggtatcccaccaccgctcccaactatgtcacgcagatcctcacttggagggaggtcggatacaagttcaaacgacaaaagaggtgcaaaaacaccacctcccgtgaactcggcagcaaaggctaaaagatggctttgaatctgaagcagaactgtcagaaaattttgactccaagcagagctcaaggcagacacgtatttggtgccatcacttaactgtggttttaggccttgggtggtggttacattctttgtaacagctgaagcattagttgtacaagggggaagggtgtgtgtttgttgtattctggatttctatgatggagcattggagcaactcacttgttcgatttattatgggatgtttgttttgaggaaatcaccccatctaagatgaagtggtgcattatgagttcatttcttaaattttgtggaatgatcttattcttcgtgttagtactaactatgggggataaggtgatgatggataaact

SEQ ID NO: 33653 - DNA, 644 bp, Zea Mays
gttcgatacctgggcagaattcatggttcatagtcggtttcttccttggtgccattccctggtacgttggagcctttctgctgtgctgttccagagttgattacagggagaaaccaggttatgtcgcatgtgttgcagcggctatcctcgctacaattgctgttatcattggggcggcagctggaactcatgttctttgattttttttagcttacaaggctatcctcccaaactagcccttactgttatcatttgggcggcagctggaagtggaagtggaactcatgttttttttagcttacattgtattgtcattgtacatacatacagtagtacatggtgtccatgtgtcgaagaaatcgtgcaatcaacatcgtaatggatgtctgttctgcattcgcaattattcatgtttataacaaggagaacaaagaccttgctcttagtcgtaaataaaccagacggagatgactccgccttgtgaaaaatgaaggaatttgatctggaagaaaattgtagccatgtattgtgctttaatggctgatctatgaagttgtaaccagggtttgctggagctgaacgaacatgctgcatcaaatttgtcaagaagtgttgtcttgcttgttttgaccgttggatgcagg

SEQ ID NO: 33654 - DNA, 1091 bp, Zea Mays
cggcctccttccttcctcctgccccagtttgatccctcctgttcccgtccaaagtgtggcgttgtcacttgttgtcaggctaccggaccaaactgcgtgctccggcctccgggagaggagagagggtagagccagaggagttgggcgcgcagcaggatgagcggggaggaggccgacggctccaagccccaaggaggcggtgtacactacggcaccttccaggggccgcccagctacccgcccccgcgcccgccgccgagcctctccgcccaccaccgcggcgactaccaggccgttcccgttctggagcgacggttctactgtacttctctagtctactcctacttactgtcaaacccttcttgtcctgtgcctgtgcccactgtatgcaatctcgagattacgaggcaggtgtgcggggacgtagccatgatcgacttccctgttgtggcattggttttggatggttcctgttcatagtcggtttcttccttggtgccattccctggtacgttggagcctttctgctgtgctgttccagagttgattacagggagaaaccaggttatgtcgcatgtgttgcagcggctatcctcgctacaattgctgttatcattggggcggcagctggaactcatgttctttgattttttttagcttacaaggctatcctcccaaactagcccttactgttatcatttgggcggcagctggaagtggaagtggaactcatgttttttttagcttacattgtattgtcattgtacatacatacagtagtacatggtgtccatgtgtcgaagaaatcgtgcaatcaacatcgtaatggatgtctgttctgcattcgcaattattcatgtttataacaaggagaacaaagaccttgctcttagtcgtaaataaaccagacggagatgactccgccttgtgaaaaatgaaggaatttgatctggaagaaaattgtagccatgtattgtgctttaatggctgatctatgaagttgtaaccagggtttgctggagctgaacgaacatgctgcatcaaatttgtcaagaagtgttgtcttgcttgttttgaccgttggatgcagg

SEQ ID NO: 33655 - DNA, 607 bp, Zea Mays
ctcagccgatctgcacaacgtcatttcacaccctcctcctctgcacctgcaaattgccgcaaaaccattctgccgccgcgcatcgatctctcttattgcttggccacagcttgcttggccatcgatcatcgtcaactagatggcaagggtgtcgtccgtggagtcgatctcggcctctgtcgtcactggctccgccgtgcgctcggcgtacgggcggcggcagaagcccgtgggcggcctcgctggccgctgcaacgccgtgctgaaggagcacaagacgaggctgtacatcctcggcaggtgcgtctccatgctcctgtgctggcacgaccatgcatgacgccgcggggcgcgggctgaggccgatgcatgggccggccgggatcgatcggactgacccggtcgccgccgtttcgatcactgtgcgtcgtcagtgtagggtggcttttatttggaggtgatacttcatcagctgtctggttaactggattttgtactattgattattactactcctaggcgataagacatatatggtgatcggtgaaacttcgaagtgtaaatgaatatatatacatataattaataacgagctggttaatttctt

SEQ ID NO: 33656 - DNA, 1740 bp, Zea Mays
cgcgaagccacagccgccattcccgccgccccgccgcgcattccatcctcagcccgcggcagagtcctctgttcccagcagcgcctcgccccgccccgcatcactcccggccgcgcatcactcccgcagcgccccgccccgccggcgcatcactcccggccgccaagcccgcttcccgaggccgccaaggtttccatcccgccgctcgctcaagggttccatcccgcggccgcatccagcgcattccatcgcgcaatcaccgctcgctcaaggcactcgctcgcactaaatcctttcgctctcagatcctgcccctcgctcgccgcccaatcaatagctcagacgttgcctcggttgtcctgcaagtttgtggaccccgacaacgtcgtttcctccgctctagtggcgcgtcgcgtgcggtcagacacgatgagttgcggcagcgatgtgtgccgggacagctgcagtagtagcggcagcgaggagttcaggcggtcgtggcccagcaaagtcaccgctgatgattcagtggcgcctgcccggagctcggatgtcgcagcgccggcatcgtggattgataggaagctgcttgttgatccaaagatgatgttcgtttgggacaagattggggagggagctcatggcaaggtctacaaggggaagtaaagatgtatttgagacgtgcatacccgtgcttattttttcacatgtctttgctccaagccacagctactttatcaactgggctgattttgaagtatctgctttagttgtctcgaattaaatgtgtgttatgcaccagacccttgcaaaaaatggctattagtatgctttaaattaattagtttctcagggtgcccaaatcctccatctgttatagtatcaagcagattcatgcctggtactcacttcaagcttccaaagttccaatattttgttgagattttagcaggcaggaggatgttttttgtcaaaacattagctatgagctgtgcgatccttgagaaccttggaggaaatgttagtcgtgatggcagtacagagtatacctccaataatctcctctctagagaaatattaatatgtcatagatgactgttggtaacatcacaagttcagatgtcattgtcttcacatgaggaagcttgtgccataatactttgtatttttttctattcttattcaccagtttctatcatttgccctttagaacatttaagtcatatctgtaatcctgtttttcttgtatgcttcaaataggtacggtgatcaaattgtagcgataaaggttcttaaccgtggcagtatccctgaagaaaaacaacacttgaaggctgtttcatccgaatttattggagcttgcaaagaaccattgatggtgatcgttagtgagctactgccaggaatgtcactgaaaagttacctgcatagcatccggtctagccaactaaatacacacactgcaataagctatgtagtggacatagctcatgcactggactatttacatgccaatggcataatacatagcgacctgaaacctggtaaggatgcttaagctaattgacttttggcattctacgctttgatcctttagcacgagcaccttaagtatgagtttacaatctgaacagttagtgtttacatgtattttatttttatgcaatatttatacttgttttgtatgtgtttattccgataaacatccgagggacgcaatatcttgtcgtttgatcaaat

SEQ ID NO: 33657 - DNA, 1753 bp, Zea Mays
cgcgaagccacagccgccattcccgccgccccgccgcgcattccatcctcagcccgcggcagagtcctctgttcccagcagcgcctcgccccgccccgcatcactcccggccgcgcatcactcccgcagcgccccgccccgccggcgcatcactcccggccgccaagcccgcttcccgaggccgccaaggtttccatcccgccgctcgctcaagggttccatcccgcggccgcatccagcgcattccatcgcgcaatcaccgctcgctcaaggcactcgctcgcactaaatcctttcgctctcagatcctgcccctcgctcgccgcccaatcaatagctcagacgttgcctcggttgtcctgcaagtttgtggaccccgacaacgtcgtttcctccgctctagtggcgcgtcgcgtgcggtcagacacgatgagttgcggcagcgatgtgtgccgggacagctgcagtagtagcggcagcgaggagttcaggcggtcgtggcccagcaaagtcaccgctgatgattcagtggcgcctgcccggagctcggatgtcgcagcgccggcatcgtggattgataggaagctgcttgttgatccaaagatgatgttcgtttgggacaagattggggagggagctcatggcaaggtctacaaggggaagtaaagatgtatttgagacgtgcatacccgtgcttattttttcacatgtctttgctccaagccacagctactttatcaactgggctgattttgaagtatctgctttagttgtctcgaattaaatgtgtgttatgcaccagacccttgcaaaaaatggctattagtatgctttaaattaattagtttctcagggtgcccaaatcctccatctgttatagtatcaagcagattcatgcctggtactcacttcaagcttccaaagttccaatattttgttgagattttagcaggcaggaggatgttttttgtcaaaacattagctatgagctgtgcgatccttgagaaccttggaggaaatgttagtcgtgatggcagtacagagtatacctccaataatctcctctctagagaaatattaatatgtcatagatgactgttggtaacatcacaagttcagatgtcattgtcttcacatgaggaagcttgtgccataatactttgtatttttttctattcttattcaccagtttctatcatttgccctttagaacatttaagtcatatctgtaatcctgtttttcttgtatgcttcaaataggtacggtgatcaaattgtagcgataaaggttcttaaccgtggcagtatccctgaagaaaaacaacacttgaaggctgtttcatccgaagtaaatatgatgttttattggagcttgcaaagaaccattgatggtgatcgttagtgagctactgccaggaatgtcactgaaaagttacctgcatagcatccggtctagccaactaaatacacacactgcaataagctatgtagtggacatagctcatgcactggactatttacatgccaatggcataatacatagcgacctgaaacctggtaaggatgcttaagctaattgacttttggcattctacgctttgatcctttagcacgagcaccttaagtatgagtttacaatctgaacagttagtgtttacatgtattttatttttatgcaatatttatacttgttttgtatgtgtttattccgataaacatccgagggacgcaatatcttgtcgtttgatcaaat

SEQ ID NO: 33658 - DNA, 1437 bp, Zea Mays
gcacggtgcacgttctgcctctcccctcatgcccacggacgaacgctccgcgaagccacagccgccattcccgccgccccgccgcgcattccatcctcagcccgcggcagagtcctctgttcccagcagcgcctcgccccgccccgcatcactcccggccgcgcatcactcccgcagcgccccgccccgccggcgcatcactcccggccgccaagcccgcttcccgaggccgccaaggtttccatcccgccgctcgctcaagggttccatcccgcggccgcatccagcgcattccatcgcgcaatcaccgctcgctcaagggttccatcccgcggccgcatccagcgcattccatcgctcaagggtttccatcccgccaagcccgcatccagcgcattccatcccgaggccgcaagggtttccatcgcgcaatcaccgctcgcgcattccatcgcgcaatcaccgctaccgcatccatggcttcaatcggttgcccccgcgatccccttccatccatggcgaggtcgctggttatttttaacagtccaccgacagcactcgctcgcactaaatcctttcgctctcagatcctgcccctcgctcgccgcccaatcaatagctcagacgttgcctcggttgtcctgcaagtttgtggaccccgacaacgtcgtttcctccgctctagtggcgcgtcgcgtgcggtcagacacgatgagttgcggcagcgatgtgtgccgggacagctgcagtagtagcggcagcgaggagttcaggcggtcgtggcccagcaaagtcaccgctgatgattcagtggcgcctgcccggagctcggatgtcgcagcgccggcatcgtggattgataggaagctgcttgttgatccaaagatgatgttcgtttgggacaagattggggagggagctcatggcaaggtctacaaggggaagtacggtgatcaaattgtagcgataaaggttcttaaccgtggcagtatccctgaagaaaaacaacacttgaaggctgtttcatccgaagtaaatatgatgttttattggagcttgcaaagaaccattgatggtgatcgttagtgagctactgccaggaatgtcactgaaaagttacctgcatagcatccggtctagccaactaaatacacacactgcaataagctatgtagtggacatagctcatgcactggactatttacatgccaatggcataatacatagcgacctgaaacctggtaaggatgcttaagctaattgacttttggcattctacgctttgatcctttagcacgagcaccttaagtatgagtttacaatctgaacagttagtgtttacatgtattttatttttatgcaatatttatacttgttttgtatgtgtttattccgataaacatccgagggacgcaatatcttgtcgtttgatcaaat

SEQ ID NO: 33659 - DNA, 2023 bp, Zea Mays
cgcacggtgcacgttctgcctctcccctcatgcccacggacgaacgctccgcgaagccacagccgccattcccgccgccccgccgcgcattccatcctcagcccgcggcagagtcctctgttcccagcagcgcctcgccccgccccgcatcactcccggccgcgcatcactcccgcagcgccccgccccgccggcgcatcactcccggccgccaagcccgcttcccgaggccgccaaggtttccatcccgccgctcgctcaagggttccatcccgcggccgcatccagcgcattccatcgcgcaatcaccgctcgctcaagggttccatcccgcggccgcatccagcgcattccatcgctcaagggtttccatcccgccaagcccgcatccagcgcattccatcccgaggccgcaagggtttccatcgcgcaatcaccgctcgcgcattccatcgcgcaatcaccgctaccgcatccatggcttcaatcggttgcccccgcgatccccttccatccatggcgaggtcgctggttatttttaacagtccaccgacagcactcgctcgcactaaatcctttcgctctcagatcctgcccctcgctcgccgcccaatcaatagctcagacgttgcctcggttgtcctgcaagtttgtggaccccgacaacgtcgtttcctccgctctagtggcgcgtcgcgtgcggtcagacacgatgagttgcggcagcgatgtgtgccgggacagctgcagtagtagcggcagcgaggagttcaggcggtcgtggcccagcaaagtcaccgctgatgattcagtggcgcctgcccggagctcggatgtcgcagcgccggcatcgtggattgataggaagctgcttgttgatccaaagatgatgttcgtttgggacaagattggggagggagctcatggcaaggtctacaaggggaagtaaagatgtatttgagacgtgcatacccgtgcttattttttcacatgtctttgctccaagccacagctactttatcaactgggctgattttgaagtatctgctttagttgtctcgaattaaatgtgtgttatgcaccagacccttgcaaaaaatggctattagtatgctttaaattaattagtttctcagggtgcccaaatcctccatctgttatagtatcaagcagattcatgcctggtactcacttcaagcttccaaagttccaatattttgttgagattttagcaggcaggaggatgttttttgtcaaaacattagctatgagctgtgcgatccttgagaaccttggaggaaatgttagtcgtgatggcagtacagagtatacctccaataatctcctctctagagaaatattaatatgtcatagatgactgttggtaacatcacaagttcagatgtcattgtcttcacatgaggaagcttgtgccataatactttgtatttttttctattcttattcaccagtttctatcatttgccctttagaacatttaagtcatatctgtaatcctgtttttcttgtatgcttcaaataggtacggtgatcaaattgtagcgataaaggttcttaaccgtggcagtatccctgaagaaaaacaacacttgaaggctgtttcatccgaatttattggagcttgcaaagaaccattgatggtgatcgttagtgagctactgccaggaatgtcactgaaaagttacctgcatagcatccggtctagccaactaaatacacacactgcaataagctatgtagtggacatagctcatgcactggactatttacatgccaatggcataatacatagcgacctgaaacctggtaaggatgcttaagctaattgacttttggcattctacgctttgatcctttagcacgagcaccttaagtatgagtttacaatctgaacagttagtgtttacatgtattttatttttatgcaatatttatacttgttttgtatgtgtttattccgataaacatccgagggacgcaatatcttgtcgtttgatcaaat

SEQ ID NO: 33660 - DNA, 1887 bp, Zea Mays
gcgcctatctctactactattatgtgagcactgtaggcgtccacttcgcacggtgcacgttctgcctctcccctcatgcccacggacgaacgctccgcgaagccacagccgccattcccgccgccccgccgcgcattccatcctcagcccgcggcagagtcctctgttcccagcagcgcctcgccccgccccgcatcactcccggccgcgcatcactcccgcagcgccccgccccgccggcgcatcactcccggccgccaagcccgcttcccgaggccgccaaggtttccatcccgccgctcgctcaagggttccatcccgcggccgcatccagcgcattccatcgcgcaatcaccgctcgctcaaggcactcgctcgcactaaatcctttcgctctcagatcctgcccctcgctcgccgcccaatcaatagctcagacgttgcctcggttgtcctgcaagtttgtggaccccgacaacgtcgtttcctccgctctagtggcgcgtcgcgtgcggtcagacacgatgagttgcggcagcgatgtgtgccgggacagctgcagtagtagcggcagcgaggagttcaggcggtcgtggcccagcaaagtcaccgctgatgattcagtggcgcctgcccggagctcggatgtcgcagcgccggcatcgtggattgataggaagctgcttgttgatccaaagatgatgttcgtttgggacaagattggggagggagctcatggcaaggtctacaaggggaagtaaagatgtatttgagacgtgcatacccgtgcttattttttcacatgtctttgctccaagccacagctactttatcaactgggctgattttgaagtatctgctttagttgtctcgaattaaatgtgtgttatgcaccagacccttgcaaaaaatggctattagtatgctttaaattaattagtttctcagggtgcccaaatcctccatctgttatagtatcaagcagattcatgcctggtactcacttcaagcttccaaagttccaatattttgttgagattttagcaggcaggaggatgttttttgtcaaaacattagctatgagctgtgcgatccttgagaaccttggaggaaatgttagtcgtgatggcagtacagagtatacctccaataatctcctctctagagaaatattaatatgtcatagatgactgttggtaacatcacaagttcagatgtcattgtcttcacatgaggaagcttgtgccataatactttgtatttttttctattcttattcaccagtttctatcatttgccctttagaacatttaagtcatatctgtaatcctgtttttcttgtatgcttcaaataggtacggtgatcaaattgtagcgataaaggttcttaaccgtggcagtatccctgaagaaaaacaacacttgaaggctgtttcatccgaagtaaatatgatgtgtaaagtgaaacatgagaatcttgtcaagatacttccggtttattggagcttgcaaagaaccattgatggtgatcgttagtgagctactgccaggaatgtcactgaaaagttacctgcatagcatccggtctagccaactaaatacacacactgcaataagctatgtagtggacatagctcatgcactggactatttacatgccaatggcataatacatagcgacctgaaacctggtaaggatgcttaagctaattgacttttggcattctacgctttgatcctttagcacgagcaccttaagtatgagtttacaatctgaacagttagtgtttacatgtattttatttttatgcaatatttatacttgttttgtatgtgtttattccgataaacatccgagggacgcaatatcttgtcgtttgatcaaat

SEQ ID NO: 33661 - DNA, 123 bp, Zea Mays
cactactactatataattcaccacttcaaataaaactagagccaccctaataaatgacccccgcagacatggaccaccctacatgcaccaaagcaactccacccagaaaaccaactcattaga

SEQ ID NO: 33662 - DNA, 2058 bp, Zea Mays
aattgatccagactctagagatagtccaacctttttttatcgaacgggcatgagcacatgcctatttcattgatgtagaagagagagagagagagagaccaaccctgaagccctgaaatcgtatatgaataatccttcaaaaggtggtttagaagcttcatagctgattacggcgtcccacttatggtgattgtgtggacaggattgtcgtatttacatccaggcaaggtgccttcaggagtccccaggaggctttcttctccacttccctgggagtcaagttcactgggacactggaccacagcaagggatttgttttctgtccctccagcatatatatttggagccattctgcctgcttttatggttgcaggactttacttctttgatcacagcgtagcttcacagttggcacagcaaaaagagtataatttgaagaagccttctgcctaccactatgacattttggtccttggattcgtggtcctgctctgcggtttgcttggtatccctccatctaatggagtgcttcctcagtctcccatgcacacaaaaagtcttgctgtccttaagaggcagttgctaagcaaaaagatggttgatactgccaaggagagcataggaggaagtgctaccagtttggaaatatatggcaagatggaagaagttttcatcaaaatggatagcgaacagaatactgattctgttgacagggagttgaagaacttcaaggatgctgttctgcaagaaggcgacgaagaagggagattggctagagaatttgaccctcgcaaacatatagaagcccacttgcctgtccgagtgaacgaacagagactgagcaatctgctgcagtccatactggttggtgggtgtgttggagctatgccagtcatcaggatgatacccacatcggtcctctggggttactttgcctacatggccatcgacagtctaccagggaatcagttctgggagaggatacagcttctgttcattacagaaagccgacgctacaaggttcttgaaggtccccatgcatcgtttgtggagtcagtggttcccaaaacagtaaccatcttcacgatcttccagttggtttacctcctaatatgcttcggcataacgtggataccgatagccgggatcctgttcccagtgcctttcttcctcatgatcgtcatcaggcagtatctcctcccaaaattttttgatcccgtcgtcttgagggagctcgatgcagctgagtacgaagaacttgacggggtcccccttgaacacaaactggaagatgaagcatctgaagtaggaagttgtcctagccgtcctgatgcggagatattggatgaactcacgaccaaccgcggagagctgaagcacagaagttctagcctgcgtgaagaaagaccaattcaagtgacagagccaaccggttgaattttttgggctcttttcttttctctgggataacaagtagtcaagtacgcaccacgcatgtcagtggctgctttccgcctaacataggaagattttcacaggctagttcgagttgcttcaagtgcggttcagccaagcctgtgaagacggcgaagtgttctttttatccgtagaattatgatcctcaagctgcactccgttgatgtgaatactgttgctatgtaatgtactgctactactagtgttgtacttgggtttttgacccaaacgcgtctgttggtaaggggtgatttgtaagaacagggacttacgtaaactacgtaggatcgattggtaagaagagagggagagaggagatgcaatacaagtcttcttggatatgaaagggggaatgccgaaggggcatggagtagaataatatcatatattgtcattagttcaaatagactgtagtaaccaagtttgcactctttgactgcaatcgcgtcagtgaagctgacggtgaacggttgattttttgtgaacaaaaagtacgaaagcagagcaggccgcagcaacggcacggcgtaggcgtcactgcacgcagcagcggtaacgctgcccatgtcgcgtgagtgagtg

SEQ ID NO: 33663 - DNA, 2534 bp, Zea Mays
cggagattgattttttcccccctgggagtgggggatttgcagagatggatctactgagacaccccttcaagggagttgtcactgatatcaaaggaagggccacttggtacaagcatgattgggttgcaggactccactctggctttaggatattggcacctaccatgtatatcttctttgcctctgctctccctgtcattgccttcggagcacaactgagcacggcaacaaatggaatactctcaacagttgaaacactggcatcgactgcgatatgtggcatcatacattcaattcttggagggcagcctttgttgattgttggagttgccgaaccaactattatcatgtacacttatctctacaattttgccaagaatcatcaagctctgggtgagcagctatatttggcgtggacaggatgggtctgcatctggactgccatcatgttgtttcttttggcaacgttcaatgcttccaacgttattagcagatttacaaggattgcaggagaactttttggcatgttaatcactgttctcttcttgcaagaagctatcaaggggatgataagtgaatttagtgtgcccgaagacgctgacagcagttcaccaatataccaattccagtggctctatgtcaatggcctactcggtgtcatattttcaattggcttgctgtacactgcattgaggaccaggcgagcaaggtcatggctctatggcacagggtggtttagaagcttcatagctgattacggcgtcccacttatggtgattgtgtggacaggattgtcgtatttacatccaggcaaggtgccttcaggagtccccaggaggctttcttctccacttccctgggagtcaagttcactgggacactggaccacagcaagggatttgttttctgtccctccagcatatatatttggagccattctgcctgcttttatggttgcaggactttacttctttgatcacagcgtagcttcacagttggcacagcaaaaagagtataatttgaagaagccttctgcctaccactatgacattttggtccttggattcgtggtcctgctctgcggtttgcttggtatccctccatctaatggagtgcttcctcagtctcccatgcacacaaaaagtcttgctgtccttaagaggcagttgctaagcaaaaagatggttgatactgccaaggagagcataggaggaagtgctaccagtttggaaatatatggcaagatggaagaagttttcatcaaaatggatagcgaacagaatactgattctgttgacagggagttgaagaacttcaaggatgctgttctgcaagaaggcgacgaagaagggagattggctagagaatttgaccctcgcaaacatatagaagcccacttgcctgtccgagtgaacgaacagagactgagcaatctgctgcagtccatactggttggtgggtgtgttggagctatgccagtcatcaggatgatacccacatcggtcctctggggttactttgcctacatggccatcgacagtctaccagggaatcagttctgggagaggatacagcttctgttcattacagaaagccgacgctacaaggttcttgaaggtccccatgcatcgtttgtggagtcagtggttcccaaaacagtaaccatcttcacgatcttccagttggtttacctcctaatatgcttcggcataacgtggataccgatagccgggatcctgttcccagtgcctttcttcctcatgatcgtcatcaggcagtatctcctcccaaaattttttgatcccgtcgtcttgagggagctcgatgcagctgagtacgaagaacttgacggggtcccccttgaacacaaactggaagatgaagcatctgaagtaggaagttgtcctagccgtcctgatgcggagatattggatgaactcacgaccaaccgcggagagctgaagcacagaagttctagcctgcgtgaagaaagaccaattcaagtgacagtgagcacgcatatggttgcttcaagtgcggttcagccaagcctgtgaagacggcgaagtgttctttttatccgtagaattatgatcctcaagctgcactccgttgatgtgaatactgttgctatgtaatgtactgctactactagtgttgtacttgggtttttgacccaaacgcgtctgttggtaaggggtgatttgtaagaacagggacttacgtaaactacgtaggatcgattggtaagaagagagggagagaggagatgcaatacaagtcttcttggatatgaaagggggaatgccgaaggggcatggagtagaataatatcatatattgtcattagttcaaatagactgtagtaaccaagtttgcactctttgactgcaatcgcgtcagtgaagctgacggtgaacggttgattttttgtgaacaaaaagtacgaaagcagagcaggccgcagcaacggcacggcgtaggcgtcactgcacgcagcagcggtaacgctgcccatgtcgcgtgagtgagtg

SEQ ID NO: 33664 - DNA, 2662 bp, Zea Mays
ctctacctcgacaaagcccacgccgcgccctcgccctcgccctcgcccccctgcctagggctccgcgccgccccgaggagaggagaacgcgcgcgcgcgcgcgcgccattgcggatccaaacgctccgccgcctcaactccctcgtcaattcacctccgccgccgccgccgcgccgcttcgaacacgatggatctactgagacaccccttcaagggagttgtcactgatatcaaaggaagggccacttggtacaagcatgattgggttgcaggactccactctggctttaggatattggcacctaccatgtatatcttctttgcctctgctctccctgtcattgccttcggagcacaactgagcacggcaacaaatggaatactctcaacagttgaaacactggcatcgactgcgatatgtggcatcatacattcaattcttggagggcagcctttgttgattgttggagttgccgaaccaactattatcatgtacacttatctctacaattttgccaagaatcatcaagctctgggtgagcagctatatttggcgtggacaggatgggtctgcatctggactgccatcatgttgtttcttttggcaacgttcaatgcttccaacgttattagcagatttacaaggattgcaggagaactttttggcatgttaatcactgttctcttcttgcaagaagctatcaaggggatgataagtgaatttagtgtgcccgaagacgctgacagcagttcaccaatataccaattccagtggctctatgtcaatggcctactcggtgtcatattttcaattggcttgctgtacactgcattgaggaccaggcgagcaaggtcatggctctatggcacagggtggtttagaagcttcatagctgattacggcgtcccacttatggtgattgtgtggacaggattgtcgtatttacatccaggcaaggtgccttcaggagtccccaggaggctttcttctccacttccctgggagtcaagttcactgggacactggaccacagcaagggatttgttttctgtccctccagcatatatatttggagccattctgcctgcttttatggttgcaggactttacttctttgatcacagcgtagcttcacagttggcacagcaaaaagagtataatttgaagaagccttctgcctaccactatgacattttggtccttggattcgtggtcctgctctgcggtttgcttggtatccctccatctaatggagtgcttcctcagtctcccatgcacacaaaaagtcttgctgtccttaagaggcagttgctaagcaaaaagatggttgatactgccaaggagagcataggaggaagtgctaccagtttggaaatatatggcaagatggaagaagttttcatcaaaatggatagcgaacagaatactgattctgttgacagggagttgaagaacttcaaggatgctgttctgcaagaaggcgacgaagaagggagattggctagagaatttgaccctcgcaaacatatagaagcccacttgcctgtccgagtgaacgaacagagactgagcaatctgctgcagtccatactggttggtgggtgtgttggagctatgccagtcatcaggatgatacccacatcggtcctctggggttactttgcctacatggccatcgacagtctaccagggaatcagttctgggagaggatacagcttctgttcattacagaaagccgacgctacaaggttcttgaaggtccccatgcatcgtttgtggagtcagtggttcccaaaacagtaaccatcttcacgatcttccagttggtttacctcctaatatgcttcggcataacgtggataccgatagccgggatcctgttcccagtgcctttcttcctcatgatcgtcatcaggcagtatctcctcccaaaattttttgatcccgtcgtcttgagggagctcgatgcagctgagtacgaagaacttgacggggtcccccttgaacacaaactggaagatgaagcatctgaagtaggaagttgtcctagccgtcctgatgcggagatattggatgaactcacgaccaaccgcggagagctgaagcacagaagttctagcctgcgtgaagaaagaccaattcaagtgacagttgcttcaagtgcggttcagccaagcctgtgaagacggcgaagtgttctttttatccgtagaattatgatcctcaagctgcactccgttgatgtgaatactgttgctatgtaatgtactgctactactagtgttgtacttgggtttttgacccaaacgcgtctgttggtaaggggtgatttgtaagaacagggacttacgtaaactacgtaggatcgattggtaagaagagagggagagaggagatgcaatacaagtcttcttggatatgaaagggggaatgccgaaggggcatggagtagaataatatcatatattgtcattagttcaaatagactgtagtaaccaagtttgcactctttgactgcaatcgcgtcagtgaagctgacggtgaacggttgattttttgtgaacaaaaagtacgaaagcagagcaggccgcagcaacggcacggcgtaggcgtcactgcacgcagcagcggtaacgctgcccatgtcgcgtgagtgagtg

SEQ ID NO: 33665 - DNA, 360 bp, Zea Mays
atggcagtgtcatcagggatggtcttctccgtccgcccgccggctccggcccggccctgcgcttgctctgccacggcgagggcgcgccccgtcggcgacggcgccaagtggtgggcgccgctgctggggtggtccgggcagccggactacatcgacgcgcggccggcgtccgaggacgagcctctgccgcgggggccggcctcggcctcggcctcggccaggcggttcggcgtgctgacggaggacaaggcgcggcggctgcgcgtgcagatgatggagacggagagcttccacgacgccatgtaccactccgccatcgcgtcccgcctcgcctccgccgcgcccgacgccaggccctag

SEQ ID NO: 33666 - DNA, 773 bp, Zea Mays
tgcagaattagccaatgcatctcctggtgacgctcctttgctcgaccgtcgagaagatgtcgatcaagacttttcggtgcacccaatctctgcaagtgaatgaagacaagtagttagcaacaataccacaaatacaatctaggagcaaagacaacatgtttttgtctcgctccctggcacacagatgatcatgatcgacaagattgctcaacatctactccttggctctagctgcctccatttccctagcctccggtgctctcttctcctcagccgccttctttttcctccactcaatacgcatcgagctattacagcctagatcttcggcaaacctacgcatcttctatctacactgtttaatgtacgaatcgatgagctgagatccacaccacatcttccctaccaagagtttcttcaaccttattatatgcttcacttctttcttggtctcctgtacaaaccaaacaaaaagtaagtatggagacaacaatacatctctgagccggtagaggaaagaccgcccccacgtaactggcctacgtttccataaataaatattaaaggagagtttgttggggatctgatatcatactcgccatgcaccagaagggtgaactgaaggaactgcttggcgatattgcacaaaaaggcgaacaaagtggttcctcatgaatcaagtagctgtgcaagcttctgagtggttgttctttctcagaagatttttaggtgatcttgcgttatcgttatgtggcttcggatttgaatgtgtt

SEQ ID NO: 33667 - DNA, 414 bp, Zea Mays
tttatttttttgtttgcgtacagtaatcttgaatcgaattgccaaaccgcaaggctgaactacaagacagtacaagaacgaagttacacggcgttctggcacggcaccctaaaccaccgagaaattaactagcagcagtgttcactggtgagtagacgggatggctaacagttaaaacagtgcatcagcgaggcaagagacgaaacccacgggtaacagtaggagaaaagaagaaaaagagaaggcgtcgtcaggaacagcaacacgccagcaatggtcagatcaggcgagcgcgagcagggcacgaaccagctccctctctcgtttctcactagctcttggcgaggttgttgcgagcggagctggaggagcgctcgctgctggaggggagcgagctcgtggtgctcgtcttcg

SEQ ID NO: 33668 - DNA, 6319 bp, Zea Mays
ctgttccatggagtccgtggctagagaagtgagagagcagggacgtgcacagcaagagaaagcagtgctcggcttgcaccttatagcgaccagggattcaaatatccagccgccgccaggaagaagcagataagggagaagcagcgcgtgcggtgagaaaaatctgaatagggggagcggcgtgaacggagctctcagccgtgcagggaagaagaaatactgggcggcagcgtgtgcagaggataagggaggtggcccagatttttctgtgctgagcggcgcgacaggggaaaaatcaggacgcgctggattttctttggagcagggcgtcgactgaaaataccagagggacagagagacgtacgtgagggagataaaatcaacagctgaaaagatcagctggagagaggcggcatgaaaatatcaacggtagaaaaatcagagaacagaacggctggaagataataagcgatggatatttctctttttattatttctttaaataatttcgtagatatttttgaatcccgatttttagcgctgtacactggccgacatgctacacgaatacacatttcattcttcgaatcacgaaatggaaaattcgaggatttggatccgggtaagaaatgacagaccaaaataaactgatttcggtactgacaatttgttctgcgtgattcgactaatattagccgaaaccagatccgctaatgtatacacgatttttgtcgtcgaaacagcgtgctgaagaattaattgaattatattctcgcgcacgatttttctcagacaactcgcgatacaaattattttgccccaacaccttagttgtcgagtacaaattaatccacctgggataaaatcattcgagtgagtcgggcttccgaattcgtattcgcgtgagcgatgaattttaaataatcaccggacgcaccgatttttcggaacaacgatgtttcgaacatcacgaaaatttcggaagaacccggatagatgaaaataaaaacaatgttgcactcgcgacaaacgaaacagatgcgatgtaaaaatcgcgataggcgaagatgattaaattttagtatccgtttcatctactgatattacgtgcttaactccatactcgttgtcgagcggacggtaagcacctggggtgttacaaccctccccccttaaaagaatctcgtcccgagattcggaacgaaagacttctaagagtagagaagtatgtaacccatgttcatatcagcgtaatcataaggcagtcttgagcgaaagcgagtgtctcaggatgtggtttctctagcggacataacatgtatcgccgtaggctaattttagaaatgtccattaataaagacgatgtctgcgagaagatcacataaggttccatgtgtgcagtttgctttttctgatgacactgtactatctgagtctgttgagcgagcggcaattacgcgattttccccaaacagaaccagatgcaccatcttgggtaaaacacacaaaaggaggtttaccaacaagtggtcatggtaagttcatagcacacgagacgggtgtgaatgttgaataacatcacagttgacccgtggctagccagaaaatctaagtccaagaaaaataataaagactcggaaaatatcaacgaaaggatccgttgatgttgacttcgcaaccaattcattgtatccagcactagtcatggctcgacttgatcgcacatgctggaaaagcacacgtgaggcgatcgaggcacgattagagcgacgattaggtggttatgggtcggcttaacttaactttggtgagtactttctttagagtgggttagaccaaagtgagtttaggcaaatcgataaaacgatctctaaactcaacctttgtttcaaatgcagttacaagttagtcaaaaccaacttgttgaactacggttgacattgagtaagtcctctcagtaccatcggtaagccaacagtcgagagctctctttgttaacaagagattatgtaattgggtagaaatccatttggtcatgttgttcatccttttcttcatgcaagatgaaccgacttggttaggaaatacattgattaaataggagagcgaatgaacaaactcctgcatctcaacagcagggaaaacaaacctccattttgagagctaattagttgtcttgcaacactaacaagctccaagacttcacgtttacacaaaggacgtaaatggaacttgtatgcgtgcagtcactatcaaagtcaaaagaaataagaccacacatgagagtggtatgcccttttgatccaacggagatgacagatgttgcttgatcacttcacaaacaacatagaaattgtttcaaggcaggagtccacgaaagatcacacatcggtgtagttccacaatggatcatgactagagacttcgataccagcacgcgccaagcagcagaatcctgtgtgcgcattcacaggagcctctcagtttcgctgcggcaccataagtccttaatcgtgacaccactaccgaactggcaccaataacaatctcacgtagcaaaaacagattgtgccaagataacacattgatatagtctcataatggattacaactactaacagtgataccagcgcgtgccgagcagcacgaccatgtgtgcgcacacacagaaggccctcggtttcgtcacggcaccaccggttttagtcataacaccattaccagacaaaaccaataagaaatctcgcacaacacaattagactgggcaagggtgataatatacaaagaggtactccacctgtatgaatagttacaagtagagagccaaatagatcatggcccgatgaaatgaacaaggcatggccataacctaaactgggtggcgagggagtacgatgagagactgttaattcagccccgagcatatttctatgcccatcgcagagattacaaggtcaaggattagtatcagattagatacggaggggaaacaatcacaaggttaagttggtatgccttcgatagatatgatgaaaccaaaggcaacaaacttcaagaaagtgataggacatgtctttcctaggttgggttgataaggcaacatggcgatccttaagaacaggcaactgggcaagggacatcaacttgtgccaatcgaacaagggcatggtctaagatggaaatatgagtcaagattcttattttaagcttaagtatcctttttgtccaacgaagaaattatctaagcatttatttgtatgtgtttggtcatggagtgataacggaaaaatttaagttttgggtcatggttcactaaataagaacatggcctagatttgggtttaggcaaacaagtcactaaccttctatcgacacattaagcacaagagcaaacaccatataagaccttaataggttacctaaagaatgggggacacctatttcatcgaagttcataattcaacattacaccatattatctacaatcaatggttactagaataaggatgagagaagcattttgggtgtataggtgacaaacatgatgcaacaatcaggatgcatgctcgtcctatacgtcctcactgatttttgccaacataatgtggcaataacgttatatatcggtggcatacttacgactctcacggtattttgctagtcgtcaactacacatacgttttcgaggttagtgtacctgcagaaaatccatcacagcccaattcccaatgatgcgagtcacacatgacagtttataacagtttatactccatatattgctatatggaggccagctcttcattaaacaccgagccacgcataggcgccgttgccacactttaaccatagggcaactcattatggtaacttaccttcttacctgagtgtaggtgcgtagttacaagtacattacacttttcagtattcccatgtctgtatacccatatacatccatggggtactgaattcccagaaaagtaattactccatatcgcagccttcatatatacatatgtggaacatgtatataatcaagcgcaacaattaaacacttccctagaccgacggttgttcggtcatgctctcacaactcaccttacctgagcgtcgatccattcaaaactgaatggccttaaaaataacaatacacatgtatgcaatacccacccggttgtgggttagtgttttaaactaagccacctgatagtccttaacttagggcttaatagaggatgtcgctagcattatagtttttcaaaactgtttttcaaagccaaacaatgtgtttagttgaaaataggtttttcgaaaccaaaacttttgttttgaaaatacgtatgtgaccgtatatacttaatcctgctccgataccagctgtggcagaacctcccaagttattgggcccacatgcacctgtccttgtctcaaagacctcagacagctatgcatgtgcactaaataacttaacaggatctgtccgattgccccaaggacatcggataaaccacttacaaccagaaccgcgggattaagtaaacacaaatcacacacatcaacatctttgcagcggaaatcttattaccaaattttacaagttacaaaaattttactttgtatgatcgaagtgattacaaaggtgattcaaagaaataactttaaactgttataaattatttataagtttgaaatatatgctagttcaagtgaccatcctcaataagaaggtaaagacggggtatacttatataagaaggccgagcccaccggcacttaacaccatcacagcagcacaaaactataacctgaaaaacaacagggaataaaaccctgagtatggaattactcagcaagtcttacccgactaaggaaaagactctcaagggtatgctggataaataggaatcaaggagaggctttagcaagaatcaacttagatacttttgcagaaatagcttactaaagtgagtccttactttcaatcttttaacgccatattcttattattaaccgcgggagcaaggctgtcacgtagtttggccacgtgttctgaaaaaatatttgccgtccgatctaagatcaactctgcacattaagcgtttgtgtgcggcgtctacggtgtgctggaaacatccagagattgccatatggaaaaaaaggaaaaccagatatcttctttctactctggccgaagaagactggagatcacaccactgaactgaacgaacgaaggcgacagatgcgatgtgaaggttgcaggtgactctcgatgccgcaaagcacgcgacttggacatcctcctcatctatcctgctgccaaaaattgccaacgcttccttccaggtgagattaatagtctcatttttctcccattcggtgtcgcaagtcgtatctcagttcaagctaggattgatattgcattttcattttttcccaattggtacatgtgttgttcctttgaagtccttcacgacatcaatctagccatctagctttgccgaatccgagcgcagacgcaacagcaacatctcctaatctcttttctcttcctccccacatcaacggctccaccccggccgacttttttttctttaatttttcccacaacagaagccacgaaaggaaggccagacagacgcaaaagcagcatccactctcgtcggctttctctgtatgtatcctattgttccccttactgctgcatcctaatatatccgtacaatcttaagtattatgattccaatcaccaaatattgcgctgatttcgtatagacactgtgtgtttatgaagataatatatatatatatatatatatatatatatatatatatatatatatatatatatgtgtgtgtgtcagtgtgttactctgttacccataactatggccttgtatggttacctagagattcttataatcagataaaatctatccgttagagatccaaacattttgctttccatgtcttggttaatgtgttgtgtgaaagaatctcaattattatccttacgttgcattttcttgggtattgtgcaatgtcatcttattatacatcatgcatgcatcacgtctaagatgaataatattcaatttgtttataaaggaaaacaatcaatattgtgttacaccaaatcttcatatatatcattccttctttatatgtacattctaataagaccgtaaaaaatcgcgcgcaagtcgcgcgttatacactagttaagtattaatagactctatttgcatctagtctaatttcaacatctcatcaatacaacatcatttttatccatagtgttcacatcctgactttaggttgcag

SEQ ID NO: 33669 - DNA, 402 bp, Zea Mays
cttaccacatttgtagcaaaccttcttggagcggggcttgtagtcttttcccctcctttgtttgaggatttggcggaagctcttgatgacgagcgccatctcctcattgtcaagcttggaggcgtctattggttgtcgacttggtgtagactcctccttcttttcttccgtcgccttgaatgcaacgggttgagtttcggatgtgtcgccaagctcgttgattttcctcgagccttctatcatgcactcaaaacttacaaaatacccgataacttcctcgggggtcattttagtgtatctaggattaccacgaatcaattgaacttgagtgggatttagaaaaatgagagatcttaaaataacatttaccacttcgtggtcgtcccacttcttgctcccgag

SEQ ID NO: 33670 - DNA, 445 bp, Zea Mays
taggtgattaaaatattttatcatcacacatgcctatcaaaattctactcggtccactaattcagctaagtgaccggaatagcgacataactcgctataactgaatctggctcgatactcgcaaaaaccgcgaagtcgacgagaggttcgcgacttatgcaatttatcaagcaccttaatgcgtctcgtactagcacatcaatttatgcaacgatcgaactattttggataatttatcagtttaccgtttcaatagccgactcgaatccgcgagatcggtagttgatagtcgcctagagggggggtgaatagggcgaaactgaaatttacaaatataaacacaactccaagccggggttagcgttagtaataataaatgagtccgcaagagagggcgcaaaacaaatcccaagcgaataagcaaatgagacacggagatttgttt

SEQ ID NO: 33671 - DNA, 2608 bp, Zea Mays
cccggtcggacggccccgcgcgtgagtgatgatgcgtgggcttgacggactcagcgatgggatgtcacggcccaacctccttagccgacgattcaagcagcccaaatggaagcggcccactcagaggacagcggctcatgtgccggaagctggtagctggacacataagagtcaatcattttctacaaacaactgctgaactcaatcacttgttgtcgtcccgttgctcaacagttttcccattaatatagaaacttttgtaccagaaataaaaagcatctccaattatagcccatcggagatgtaacatatatatcttcttatcatctccatagtgtatgagacaaatgcatgcatttcgattaaagttgtattctatggttacgattctactgaatatatctttttgattatgtcaaaaatcgatttaactatatagggcttatgacatccccctctacgccttgtggtaatgattactctggcactacgacctttaccacaacgatgtcgtcaatgcaccagtttatttcatcccatgtggatcggacagtattgatgcctcctttggtagggcttcttcaaaggctccttcaacggcttcttaaaaaaatctaccaaaacggaggctctttgatgagctcttccttgaaaagagggataagctcctctaaaaaaccagcaggaaccgggagccaaaaaaaaggagcttctaccggctcctctcccatatttttctcttcgtcggtgctacatcgtaggagaaactacagtaggagctatatttccaaccaaacatggtgctctttctatagctcttcctaaaaataaggagggagctgttttcttagaggagccagagcaaaggttaaaactggcaaggaagagccctaccaaatggggcctgactattgggaggggttaggaaagattttgacttactataaatttaaacctactcaatcccctccgatccatatagactaagattaaaacgagcaggccctaagccggtaaaggttctcgcttcgaagtggcaatgcgcacgcacttccttccttaaatcgttggcacatgcaacacactatttgttgcctctaggcttgaacatgaataccttgcagattggtggagtcgagcgagaaaaaggaaaccatctctcgtcccaattcacagaaataatactctatcatcattttgagtcaaatcgaaggtacaactaaatatgttgagtgaggtgttacaactaatttcttcacttggagctatttatatgctcaacttagtcatttaaggagtcttgcctctcttatctattaaagtagccacttaagagtttaaaatctcatgatcagtaacctcattagtatatagagagtgatttgtgtcattgtgtgcgaccaccaccctcatgacttgatatggttgatcaagtgagagtctagtgcttgttatttttagtgatcggcattacctagatagttagatggcgatctaaagtgtggtgttctctagagagcttgtgagtgacctgaatcgtccacatacatggttgtctgcggttcaccatgcccgagcaacgaagaacccgctcacagagagcacttggtccttgcacagatcaagagagagcgacacccttgcatcagtgctccaatgaggattagtggagactcttgactctccgagagttcggcaaaacatcgaggagcctcataaccatgtcctttgtgcatttacatttaaacaattcagtttagtcatttagattcttagaattgggattctactatagggttcaaaattagggtacaaaactatcgggtaccgtaattaggggtacccccaacactcctaaacatggctgataaacaccttcagaacagaccataaatgtggcagaacctcccaagttattgggccaacatgcacctgtccttgtctcaaagacctcagacagctatgcatgtgcactaaataacttaacaggatctgtccgattgccccaaggacatcggataaaccacttacaaccagaaccgcgggattaagtaaacacaaatcacacacatcaacatctttgcagcggaaatcttattaccaaattttacaagttacaaaaattttactttgtatgatcggagtgattacaaaggtgattcaaagaaataactttaaactgttataaattatttataagtttgaaatatatgctagttcaagtgaccatcctcaataagaaggtaaagacggggtatacttatataagaaggccgagcccaccggcacttaacaccatcacagcagcacaaaactataacctgaaaaacaacagggaataaaaccctgagtatggaattactcagcaagtcttacccgactaaggaaaagactctcaagggtatgctggataaataggaatcaaggagaggctttagcaagaatcaacttagatacttttgcagaaatagcttactaaagtgagtccttactttcaatcttttaacgccatattaagtattaatagactctatttgcatctagtctaatttcaacatctcatcaatacaacatcatttttatccatagtgttcacatcctgacttta

SEQ ID NO: 33672 - DNA, 2201 bp, Zea Mays
tggaaagcttttgtatcattgtatgttttaacgaaaaagtagtattgatgcatcaaataaatcacatataaagatgttaattgagcttaagttatgtatccaataaaaaaaaatatcagaataccctgactaagagcatctccaagattaccctgtacacctatccaaactactatacttaaatttaaggctaaccgttcaacagacaccctaaatgaactcctttgtttagttgcattataaaaaacctctcttccacccccgaaaaatggggtatctcagccttccatgttttttcgtccatattgcttacgtgtcatgtttaaagtttagggcattaagataaatgggaactgctgtcgaagtgacagatttagaagagataaatgtttagcctacatgaagaaataggggaccaaatttatgatcgctcttggagatgctataacaacatgaagagtcagcaatctacttaaaatgcaagagaactttccgtaataaggcatgagattgcaagtcaaaaattcatacgacagatgataatctttctgtaacaacatgaagatcagcaacggatgattatctttcctttcctgcatctctaatgaatactttgaatacaggagattgcaagtcaaaaattcatataactaaattccggaaccccaaacagtgttcaacatggttcttaaggcaataaggcaagacatggtgatggaccaccttctaatcgcctaaggtgacacctacacgatcgcaaggtgatgtataccattctgagaaacaggaagccagcagcatgaaggaaggaaaaacaaagaaaaaggagaaagagggcaggagacttaaggggctgccccagcccactagccaccctatataaccatccgtccatcccccaacttgcctatagcctatacgtttccagaactccttccttaatctccttgcatgatgctgccagcaactcctctgctcctcctccctgcttcttctcgggccctcattgagtcgtgtgctctcagatcaactgagcttctgtccaggtcgagatctatcgtgcctcaattgacaagcgcgagttctacaagccagagctatcagggattggcagctgctggggcttgttggttggtaacattggtttcccttccacccccctcccggtctctttctgttttttttttcattttcatttagggaacagggacgcccatgccatgatttttgagtgtctaggcgcctaggcgacaccttgaaaaccatggttctcaggcgaaccccaagtggaagtagctgcttgtctgtggtcatccagagcatgatagccatgtaataataacaatgcattgcatagcacttgactcaaacttggtaagtttttcctcggacaataaatctggcaagttgcatgaccaaattctaagctgtgctctgcgtgtcacaactcacaaggcaaatgccgcctaggaacactaggagcaagtttagcagggctccaggtcctaaaatggcttcagatttagctcctctcctggagtagcttctctggtagagccagaacactttgtagaaagatatttgacaaaagggtttcgtagagtatttttgagaggagctggtgcaagttaatattttgggctccggttccttggtggtttcaggggagaaaccggttttctttttaccccgtttggtagggtttcttcagaagccaaagccagagccttctgtaagccctagcaaagggactctaactgccataaaagctagggttttagcaataataactaacacagatccagcattgagaaacgtacagaaaagaacacgcgccgcgccgacgcattctgcgtctttacatcatatttatcggcgtacttaataacataaaccaaattcgcggatagaggcatcaatgtcaagcgacaatgcctaaattaacttcaccagtaataaatatgtgcaaaaaaagggttagaaagaagggcgaaggagggacgcacccatcccaagagcggatagctctacatcgccgtgctgttgcatatacctctgcacggaccgaagtaaccaaatcagccagaatctggaagcggcgggtgggcaggagtatcacggaaagatgcggcgcgtagggagagaaggtcagccgtaccttggcgaggttgacgtagaagaagaggggttttttggtgttg

SEQ ID NO: 33673 - DNA, 3617 bp, Zea Mays
gtggtcacgcacatacagacatccaaacagaaattagaggctagtcaacgtacgcacggacagaccgaaccaatcatgaggattattatttatgtgacgagagcatacacggtaagatataagatgctgctccatttcacaattaattcaagcaaatgccataatcagacgatatacattcagattcagttatatgcaccacaaccggatagaaataaacaacacaacatcagaacacattcatcatctatttcctccgtgcatgtgtctggcacttttgcagattggagcaacaagaaaaacaaagtccgcgacgaggcggcggctgtagagcaacaaggtagattattattactgtatttttgtagattgtagatgtagattactatagatatagtttagaatacgtatctccggccaccaataatcccttggccaaatcggtatacccacattaattttcggggagctcgtacggcaaggacagggtgggccaagctccaaacgtacacgcgcccgattcgcatggaggaaccttttctccttttttttaggaaaaaaaaatcagtagcaacgacgcatctccctgcccatgcaaagtccgcaccaggcaggagatcgtcgaagttagttggactaagcacccatatatatacgtactactccaagaatataataacaccgtcgtcgtgcgcgcgcgtcttctccggctgctggtcatcgtaattcgttcggagacacgaagctcggcgacagagagagaaagagagaaaaaaacataatccaagcatccgcagttcggagacacgagcgagacggctctagtaagtaattctccgctgacccgtcccgtccccgtacgtcgtcgtcgacaccgttgagcagggcaacgagcggtcaagtgctccagccgacgctccgacgagtccactccactcctcggcggcggcagggggaaggggaggcgcgaggcgtccgccgagatttgttgctgctaataatatatattgctgattcttgctcctcgtatcgcggccgccggtgccgcagatgccgtcgagtccgcgcgcgtgaagggggggtgcatgcatgctggcgcgtatctttcgcctcgtatgtccattggcgctgttgccaatccggcaacgacgattccacaaggcatgcccggcctgattggtcgccttcctttccttccgtcgtgtgcgtgcatcaattaaaacattccatcgcaaatgcgcgcggactctactatatacatagtatatattttttttttctgacgacgaatagaagcagatcctcctatcgatccctgcgtgcgttagttcacgcgtttcccgttcgaccttgcgtcggttaatctggcaccctagctcaccgcagccatggcgatcatcgtcagctcctcagctcgctcgacgctttttattctatcgtccattaccaaccatgtctaccgccgacaggtcgtctccgccctgaagacgacggccgccgcagcgaggcggcatacggccttcgccatgctgctcgccttcgtcacgctgctgcttgtgctggccactcgaccggcgcagtgccaccagcagagctacgacgtcgtcaggaacttccacgccgccgcggatggcaagacggacgatgccaaggcgttcctggcggcatggaaggcggcgtgcagcgacgaggccaggccagtcgtggtcgtcccgggaggacggacgttcctgctgagccaggtcacgtttcagggcccctgcaagtcacccatcaccatacagctggatggcaggatcgtagcgccgaaccgcatctggacgactcagccagccaacctcctggtcttccacggcgtcgacagcttgactctggacgggaacggcgagatcgacggccgaggggccatctggtgggactgctataaccacaagagatgcaacgcccggccaattctgctggccttctcgttctgcgaccacctacgggtcacgaggatacggctgaccaacagcgccgacaagcacatgaccctgttccggtgcagccaggcgctcgtggacggcgtctccatcgccgcgccgcccgacagccccaacacggacggcataaccgtggcgtcgtccaaccacaccgtcatctccaactgctccatccgaagcggagatgactgcgtatcgatcctgtcgcaaacgagaaacgttaccgtcactcgcagcacctgcgggcctggccatggtatcagtgtgggaagcctgggaagatccgagagcgcggtggtggaacagatcgtagtgactaactgcagctttgttgggaccatgaatggtgtcaggataaagtcatggcagggagggaagggctacgcaaaagggttcctctttgcgggcctcaacatgaccggagtgcagtatcccatcgtcatcgaccagttctactgcccgcaaggaaactgtcctgtgaagcctggtggcgtggcgataaccgacgcaaggttcatcgacatccaagggacgtcatccaggcaggaagccatcaggctgctgtgcagccagagtgtccactgccatgggatctacctcagcaacgtcaacctttcctgggtcaaccacaccgccccgtccaacgctactattctgaacgcccacgggacaaccgagggcgtcgtcgtgccaaagatacagtttttacagcctttgtagctagcatacgcccttcagtgcctatcgctcactgcactgcaaggagcatagagatagagcaaggttttttttgtttgagctttgtttagatggctaaaactacgcacacatagatgttcgtgggacatcatgtatgcgactgttgacatcgaatcgtatagactaagtatcgagatctcaggggcaccagttgttacagtatctcgcatgcttctgcttcggcgcggccaaacatggcgtacctgttgttcgcaacgttgtcgtacgcgaagtccctcaggaacctaaccaccgcaacagaatcagtagggaggagttgcatttcgttgtaaaactgattaactggttgtgcgaatcataaaaaaaaagtgcatcgattaagctggacagcagaggagggagctagcttacagagggacgaacttgaggaagacggcgagctgcgggaagggcaggttgaggtactccattatcctcagcaccgcttcagacttgatgaaagacctgcaagactcatcgtaagacgagcaccttaccatcatcgtcgtacataagctagcaatctgtagtgctagcattcaacagttcttgaaggaagggagcttatggttggggcacctgtctttctcgacgagaacaacgctggagatgtcgtcaggggacctccctgacctctgcaggagcttcctcccggactcgctctgcagcggcacgtacctgatgctcctgttggagttgcgaacccatcggaagaacctatcagcggctgaatcgctgttgctttgactgaggattgagcagcgcggctatacctgttggggtcgtgctcccgcacgaagcggacgccgccgttgcagaggttgcagacgcctgcaagcacagagcacggcagctggcaggttaggagatttgatt

SEQ ID NO: 33674 - DNA, 932 bp, Zea Mays
gaatccggtgagacacgaggcaggcatacttcgagacgagcctaaaatagactgatcgaagggaactactccagtgactgcaggggaaaaaaaagctctcttgagcaaaattacgtagaacagtaacctggccgttaatgatggacggcagagagtaatctggaggcaggcagtggtggaattcatgaaattcattgaatgattgacctgtctgctgtactaaccgcatcactcgtcgcgagttggcacgactgatggatgctagaatgccaagtcgggcgcggtggaaatggaatggaagagatcgttgcgtgacaggaaagggagaaggtgaaggggagaccggggagtaccttgcggatgaacttgggggcgccgccagtggcgcggtgcgggttggagagcgactcggcctcgaagatggtggcgtggagcgtgccgtggagcaagatctgagccatggccccctcgtctcgtcctcctcgctgtcagcctaccagcagcagcagcgtcctgcggaagcgcggaagggcatgagcaagaggacaggacacgcgctagggacaaccggacaagtaaagaggccacgcgcagacacgcagccgcgaaacgaacggaaagacggcagctgtgccagccaacggagcaacggctgcctgcccccacctttcccggccgaagacgatgagagcagagcaacagccaacagcggggagtggaacggggcagatctgagcgaggcactagcagcagagcctttggttaagcaccactggttagagcaaagcgagggacaagggagggcagagcaagattaccggttccagtcgagcagcgagggcaaggtcaccgtgattgatgacgacggtgatggtgagctagagagcagaagactacgcgccgcggcctgcggggtagaaaaggaagccaaa

SEQ ID NO: 33675 - DNA, 1387 bp, Zea Mays
agcatgacatcgacagtttgacatttagcagcacacacttgaacaagcaatcatgtttaagttctgaaatctggagtcacttccggcactgcaacgcagcaagcaacagaagctacaccagacaagggacaacacaatctggatgcagtaagcagtcgtactgtaataaacaactataattcctatcctcccagtctcccaccgtgcacaatgcattttattatgactcaataacgtcgaatccctctggacggaggggggatataatatcaacactgcaatctgaacctccagtgtcccaaacacaaacacagggacaccaaggtgaggccagagaggagagcagccatggcgctgcctgcagtgtgcactctatgtggtgaggatgggcgggaggtaatccgacttgttcccgaggacgcgggcgcgggtgtcggggaagttctccatcccgggcagctcggtaacgctgccgtcggcagtgacaccgatcgggtagctgaggaggtggcccgggaggtcctgctccaggtcgtcgctcgagtacaggtcccagtacttctcggcgacctcgttcaccttctgcacacactctacgctctcgggccgctggaagacgtcttccagcattcccaggtgctcgtaccaaagagacatccggaagccatggatctggccccgggcaggctgcctagtcgccaagtggtacggctggtacgcgcccatggcgatctcggagtccctggcaccgtccatggacctctggttgatgttggcggacccaatgatgatgtactcgtcgtccactgaaaccaaacaaaaatcgttaccatcttcatcaacaaaatgtatgcctttcagaccaagcaagagagcaattcaagcaggaatttgactgttcaacactttgctaccgagacagagtaactaactgcatactttgaatttattttttactcgtttgaaaagagtgttagttccttttttttaaaaaaaaagtagaattatatgagcataggacagcccctcgtaatatttgttgctttgtattgatggctttactgtccagtatagttttgcttttaactaaaaaacatgttgctccaaacatatgcacatcggcacatcagaaaagtaagtttcacaacaacaacagccaatactcctaaatagtgataaataaaagatatatggcctattaaaaggaactatcgacatattatatagcataatgcatggataaatagagggttatcatgcaccgaaaatctaacgcctctgaagccaagaaaagaaaacaatttaatcagggtgcccaatgctatgctatcatccacaaaagcgctcacatccggtcgttttggtggagcgagagcaccccaaaaac

SEQ ID NO: 33676 - DNA, 1978 bp, Zea Mays
caaagatccactatcgcgacgaaagcgccgccggactcatttcagatcacagcatggccgacgaggcgggctgacctgacgctccgagcacacgagagggcatgccgcacgcctgcgtgtatgtattcctgagctcacctcaccggtgacgctactttctggatcggaggaaaaaaggaacatgtgcccgatccaacagggtcaagctgccgacgacatggacacgagtacacgaccaactgccaaggtcggacgaagaaagaaaagccgccacgcaacaagtccaattgtgcttgtgcactgcgggccctgccaacctgcctcgcgtcgtctcactggctcactactcgacgtgctcgtattggtataatcccagagccacaggcacgaacgagtacgggatcccgggaagattcacgcccggcgccacctttccgtagcgccacgaggccacgaccacgagtattttaagcgtggccggcgaccgttccgcgggaagaccgcgcaagatgatgcagggcgcggcggcgggggggacctctgtctccggagcctcttgggctcgggccacgcgcggccgcgcggccgtcctcgcctcgcgccacgtcggcgtgggcgcctcctcctccgactactactacaaccacttcgggccccgcggcgccaccgccgccccgctcctccgcgcccgcgggggcgggcggctcaggcctctgccgctgctgtccggcagcggaaagaatggggaggtcgccaaggccgcggcggcggcggcatcggtgccggcggacgacgcgagtgccgccgcggtgacgacagacggcggtggcattgcggccacggcgcagctgggcgccatgatcgtcgcgtggtacctgctcaacatctacttcaacatctacaacaagcaggttctcggcgcgctgccgttgccgctgccgtacaccatcacagccttccagctcgcgttcggctccctgctcatcttcctcatgtgggccaccaggctccacccggcgcccaggctctccgctgcgcagctgggcaagatcgcgccgctggccgtggggcacatgctgggcacggtgttcaccaacatgagcctgggcaaggtcgccgtctccttcacgcacaccatcaaggcctccgagcccttcttcaccgtcgtcctctccgccctcttcctcggcgaggttccttcccttccggtgctgggctcgctcgtgccgatcgttggcggcgtcgccttggcgtcattcaccgaagtttctttcaactggaccgggttttggagcgccatggcgtccaatctgaccaaccaatcgaggaacgtcctcagcaagaaactccttgccggtgacaaggatgttatggatgacataaatctcttctcggtgatcactgtgctgtcgtttctgctgtcctgccctctgatgatctttgccgaaggcatcaagttcaccccaggatacctccagagcacgggcctgaacctccaagagctgtgcgtgagagcagcgctcgcaggtctgtgcttccatggctatcagaagctctcgtacttgatcttgtcgagagtgtcgccagtgacacactccgtcgccaactgcgtaaagcgtgtggttgtgatcgtctcctccgttctgttcttcagcacacctatttcgcctgtcaatgcactaggaactggtgctgcattagcaggtgttttcctttactcgaggttgacaagaaccaagaagccaaaggatgcataagcaaggataaaacagattacaggtttttgagggcacagccgactgcaagattcacgaatgaatatatattctcgagcctcacgtgagcatctccaacatgtcatgcaaagcactttacactgtagattacattttttatagattgcactttttgtaaagtgaagtttaaaataaagagcatagagtcaatctgacatgggctaatatagtccaaactccaa

SEQ ID NO: 33677 - DNA, 1289 bp, Zea Mays
agactgagcatgtgccatttgggagaaaaaggaagctgtacaggctaaggaaccctagcagaaagtacttagccactttatccgcatatgactcctccaacccaacaaaggattgggggtttcctgatattaatttgaataagcaatccactgcaaagtgccaatctgaagttcttgctgataaatcttgtggcggaggaagtgtctcagctgctaataccatggagccgaacacaaaagtttacagggacagagctgctgagagaaggatcctacatcgtggcttaggggttgggcctggacagaagcagagtaacaccaacaatttcgatgaatacgaggaatcaatcgaggacatggattcaatgggagttgcgtcagctgatttgaatttccaatccagcggtttgctttcggctaagagaataatggagaacatgggctggaagcagggagaagcccttggaaaaagcagaaagggcattgtagaacctatacagccttccatcaacaaacatggtgccggtttgggatggaggcaaacccgctaagatgttcctttgaagattccagtctttgtatttgtatcctctgaagcctgtcagatttggtgttcttaattcaagtgcaactacaacggaagaattgaggcaactgacttgtgcttgctgcttaaatctggcgtttttttggacagcagtatattcacaggctttcccttctcatttttcttctcatgggcacgagagtaatcagctggggctttgttcttgttcttgtcaccaccttgtctgctcctcttcttatagatgggcttttttatcttgtatgagctagcatttacttcgatgctttgccatttggatgagcattgaagtttgtcttcacaacctcatcttgtgcctcagcgacttgcatgacatcgatcagttcgttgtatggattgtaagcatcttgtaagtagttgcgagtactttagatagcgctcgggtggaaagtagataagtctttttcctatcttttcctgatctgtgataactttatcacaaagtgacaagttggtacaaatttgatgtaaggttgaattatattcatccacggttttgtaaccaacaaacataaggcatgcctaatcttgttatgctttgggttagatcatgtacttaaacttctcgaaccagtttttcaatgtggcccagaggccgcttgccttcttttctgccatgcattcattttttagtgttggcaagagatggtgctataaaaaataaatgtgtgtttggtcattt

SEQ ID NO: 33678 - DNA, 2022 bp, Zea Mays
atcacggtggggaaatagaaactgacgcaagtactgctttttaccatgaccctgttgctggatggtactacagcagcagagatagccaatattacgtctacaaaaatggaaattacatgccattgacaacagatctggaaaatgaacccacagccaatcatccatatgatgaggccaaccaagatgtcttggaacactcttcaggcttggaaacaactatacttgacaatgagaatgaaataccaggacctccatcagaatggatggaggaaacactgataaacttgtatttgtcaggctactcaaacaatgaagtcaatgctgaaagttcactagtaatcgcacattcaaatgaggaagacagaattgaaacaaccgggaacaaactagatagcttgacctcggacagtgcttcagcctctctgcatgatgctacatcacagcaaactgaagttgaaacagaaacaaagaattccgcttatgtgtatgaatctttgggggaagaggaagagaaatggcacgctcagtatggtcaggtcgagaggtcaaatgatgatcaacatttacctccaacaattgatatatgggattgggatgtggtccaagaccatgttaacaaaggtcagcccgtggttaggcttgtgggatgtttatctaggggttcaaataagcttcatccttctcttcctactcgtggtggccttgtaaggactgctcctgtgcgtgaagttcatcttgacctcgtgcaagtttcaacagggaagctgtacaggctaaggaaccctagcagaaagtacttagccactttatccgcatatgactcctccaacccaacaaaggattgggggtttcctgatattaatttgaataagcaatccactgcaaagtgccaatctgaagttcttgctgataaatcttgtggcggaggaagtgtctcagctgctaataccatggcaagagccgaacacaaaagtttacagggacagagctgctgagagaaggatcctacatcgtggcttaggggttgggcctggacagaagcagagtaacaccaacaatttcgatgaatacgaggaatcaatcgaggacatggattcaatgggagttgcgtcagctgatttgaatttccaatccagcggtttgctttcggctaagagaataatggagaacatgggctggaagcagggagaagcccttggaaaaagcagaaagggcattgtagaacctatacagccttccatcaacaaacatggtgccggtttgggatggaggcaaacccgctaagatgttcctttgaagattccagtctttgtatttgtatcctctgaagcctgtcagatttggtgttcttaattcaagtgcaactacaacggaagaattgaggcaactgacttgtgcttgctgcttaaatctggcgtttttttggacagcagtatattcacaggctttcccttctcatttttcttctcatgggcacgagagtaatcagctggggctttgttcttgttcttgtcaccaccttgtctgctcctcttcttatagatgggcttttttatcttgtatgagctagcatttacttcgatgctttgccatttggatgagcattgaagtttgtcttcacaacctcatcttgtgcctcagcgacttgcatgacatcgatcagttcgttgtatggattgtaagcatcttgtaagtagttgcgagtactttagatagcgctcgggtggaaagtagataagtctttttcctatcttttcctgatctgtgataactttatcacaaagtgacaagttggtacaaatttgatgtaaggttgaattatattcatccacggttttgtaaccaacaaacataaggcatgcctaatcttgttatgctttgggttagatcatgtacttaaacttctcgaaccagtttttcaatgtggcccagaggccgcttgccttcttttctgccatgcattcattttttagtgttggcaagagatggtgctataaaaaataaatgtgtgtttggtcattt

SEQ ID NO: 33679 - DNA, 2139 bp, Zea Mays
aataaaaaaaaaaccgcccatagcgcgcaggacaggccgtacggcgtacggtgtcggcggacggccgcgatgggcgggggcgacgacgcggcggcgggcgttggagacgggttcgcgtgggatgccgactcccagctctactaccacgccagtactgctttttaccatgaccctgttgctggatggtactacagcagcagagatagccaatattacgtctacaaaaatggaaattacatgccattgacaacagatctggaaaatgaacccacagccaatcatccatatgatgaggccaaccaagatgtcttggaacactcttcaggcttggaaacaactatacttgacaatgagaatgaaataccaggacctccatcagaatggatggaggaaacactgataaacttgtatttgtcaggctactcaaacaatgaagtcaatgctgaaagttcactagtaatcgcacattcaaatgaggaagacagaattgaaacaaccgggaacaaactagatagcttgacctcggacagtgcttcagcctctctgcatgatgctacatcacagcaaactgaagttgaaacagaaacaaagaattccgcttatgtgtatgaatctttgggggaagaggaagagaaatggcacgctcagtatggtcaggtcgagaggtcaaatgatgatcaacatttacctccaacaattgatatatgggattgggatgtggtccaagaccatgttaacaaaggtcagcccgtggttaggcttgtgggatgtttatctaggggttcaaataagcttcatccttctcttcctactcgtggtggccttgtaaggactgctcctgtgcgtgaagttcatcttgacctcgtgcaagtttcaacagggaagctgtacaggctaaggaaccctagcagaaagtacttagccactttatccgcatatgactcctccaacccaacaaaggattgggggtttcctgatattaatttgaataagcaatccactgcaaagtgccaatctgaagttcttgctgataaatcttgtggcggaggaagtgtctcagctgctaataccatggagccgaacacaaaagtttacagggacagagctgctgagagaaggatcctacatcgtggcttaggggttgggcctggacagaagcagagtaacaccaacaatttcgatgaatacgaggaatcaatcgaggacatggattcaatgggagttgcgtcagctgatttgaatttccaatccagcggtttgctttcggctaagagaataatggagaacatgggctggaagcagggagaagcccttggaaaaagcagaaagggcattgtagaacctatacagccttccatcaacaaacatggtgccggtttgggatggaggcaaacccgctaagatgttcctttgaagattccagtctttgtatttgtatcctctgaagcctgtcagatttggtgttcttaattcaagtgcaactacaacggaagaattgaggcaactgacttgtgcttgctgcttaaatctggcgtttttttggacagcagtatattcacaggctttcccttctcatttttcttctcatgggcacgagagtaatcagctggggctttgttcttgttcttgtcaccaccttgtctgctcctcttcttatagatgggcttttttatcttgtatgagctagcatttacttcgatgctttgccatttggatgagcattgaagtttgtcttcacaacctcatcttgtgcctcagcgacttgcatgacatcgatcagttcgttgtatggattgtaagcatcttgtaagtagttgcgagtactttagatagcgctcgggtggaaagtagataagtctttttcctatcttttcctgatctgtgataactttatcacaaagtgacaagttggtacaaatttgatgtaaggttgaattatattcatccacggttttgtaaccaacaaacataaggcatgcctaatcttgttatgctttgggttagatcatgtacttaaacttctcgaaccagtttttcaatgtggcccagaggccgcttgccttcttttctgccatgcattcattttttagtgttggcaagagatggtgctataaaaaataaatgtgtgtttggtcattt

SEQ ID NO: 33680 - DNA, 2136 bp, Zea Mays
aataaaaaaaaaaccgcccatagcgcgcaggacaggccgtacggcgtacggtgtcggcggacggccgcgatgggcgggggcgacgacgcggcggcgggcgttggagacgggttcgcgtgggatgccgactcccagctctactaccacgccagtactgctttttaccatgaccctgttgctggatggtactacagcagcagagatagccaatattacgtctacaaaaatggaaattacatgccattgacaacagatctggaaaatgaacccacagccaatcatccatatgatgaggccaaccaagatgtcttggaacactcttgcttggaaacaactatacttgacaatgagaatgaaataccaggacctccatcagaatggatggaggaaacactgataaacttgtatttgtcaggctactcaaacaatgaagtcaatgctgaaagttcactagtaatcgcacattcaaatgaggaagacagaattgaaacaaccgggaacaaactagatagcttgacctcggacagtgcttcagcctctctgcatgatgctacatcacagcaaactgaagttgaaacagaaacaaagaattccgcttatgtgtatgaatctttgggggaagaggaagagaaatggcacgctcagtatggtcaggtcgagaggtcaaatgatgatcaacatttacctccaacaattgatatatgggattgggatgtggtccaagaccatgttaacaaaggtcagcccgtggttaggcttgtgggatgtttatctaggggttcaaataagcttcatccttctcttcctactcgtggtggccttgtaaggactgctcctgtgcgtgaagttcatcttgacctcgtgcaagtttcaacagggaagctgtacaggctaaggaaccctagcagaaagtacttagccactttatccgcatatgactcctccaacccaacaaaggattgggggtttcctgatattaatttgaataagcaatccactgcaaagtgccaatctgaagttcttgctgataaatcttgtggcggaggaagtgtctcagctgctaataccatggagccgaacacaaaagtttacagggacagagctgctgagagaaggatcctacatcgtggcttaggggttgggcctggacagaagcagagtaacaccaacaatttcgatgaatacgaggaatcaatcgaggacatggattcaatgggagttgcgtcagctgatttgaatttccaatccagcggtttgctttcggctaagagaataatggagaacatgggctggaagcagggagaagcccttggaaaaagcagaaagggcattgtagaacctatacagccttccatcaacaaacatggtgccggtttgggatggaggcaaacccgctaagatgttcctttgaagattccagtctttgtatttgtatcctctgaagcctgtcagatttggtgttcttaattcaagtgcaactacaacggaagaattgaggcaactgacttgtgcttgctgcttaaatctggcgtttttttggacagcagtatattcacaggctttcccttctcatttttcttctcatgggcacgagagtaatcagctggggctttgttcttgttcttgtcaccaccttgtctgctcctcttcttatagatgggcttttttatcttgtatgagctagcatttacttcgatgctttgccatttggatgagcattgaagtttgtcttcacaacctcatcttgtgcctcagcgacttgcatgacatcgatcagttcgttgtatggattgtaagcatcttgtaagtagttgcgagtactttagatagcgctcgggtggaaagtagataagtctttttcctatcttttcctgatctgtgataactttatcacaaagtgacaagttggtacaaatttgatgtaaggttgaattatattcatccacggttttgtaaccaacaaacataaggcatgcctaatcttgttatgctttgggttagatcatgtacttaaacttctcgaaccagtttttcaatgtggcccagaggccgcttgccttcttttctgccatgcattcattttttagtgttggcaagagatggtgctataaaaaataaatgtgtgtttggtcattt

SEQ ID NO: 33681 - DNA, 1962 bp, Zea Mays
aataaaaaaaaaaccgcccatagcgcgcaggacaggccgtacggcgtacggtgtcggcggacggccgcgatgggcgggggcgacgacgcggcggcgggcgttggagacgggttcgcgtgggatgccgactcccagctctactaccacgccagtactgctttttaccatgaccctgttgctggatggtactacagcagcagagatagccaatattacgtctacaaaaatggaaattacatgccattgacaacagatctggaaaatgaacccacagccaatcatccatatgatgaggccaaccaagatgtcttggaacactcttaggaagagaaatggcacgctcagtatggtcaggtcgagaggtcaaatgatgatcaacatttacctccaacaattgatatatgggattgggatgtggtccaagaccatgttaacaaaggtcagcccgtggttaggcttgtgggatgtttatctaggggttcaaataagcttcatccttctcttcctactcgtggtggccttgtaaggactgctcctgtgcgtgaagttcatcttgacctcgtgcaagtttcaacagggaagctgtacaggctaaggaaccctagcagaaagtacttagccactttatccgcatatgactcctccaacccaacaaaggattgggggtttcctgatattaatttgaataagcaatccactgcaaagtgccaatctgaagttcttgctgataaatcttgtggcggaggaagtgtctcagctgctaataccatggagccgaacacaaaagtttacagggacagagctgctgagagaaggatcctacatcgtggcttaggggttgggcctggacagaagcagagtaacaccaacaatttcgatgaatacgaggaatcaatcgaggacatggattcaatgggagttgcgtcagctgatttgaatttccaatccagcggtttgctttcggctaagagaataatggagaacatgggctggaagcagggagaagcccttggaaaaagcagaaagggcattgtagaacctatacagccttccatcaacaaacatggtgccggtttgggatggaggcaaacccgctaagatgttcctttgaagattccagtctttgtatttgtatcctctgaaggtaagttccaattgtatcgaataaaccggagggaactgaattgaacttgattctaaattttgctgcttctctcacacagttttaaaaagttgcaacttgtacttaaatgtggtctatgtgtattagcctgtcagatttggtgttcttaattcaagtgcaactacaacggaagaattgaggcaactgacttgtgcttgctgcttaaatctggcgtttttttggacagcagtatattcacaggctttcccttctcatttttcttctcatgggcacgagagtaatcagctggggctttgttcttgttcttgtcaccaccttgtctgctcctcttcttatagatgggcttttttatcttgtatgagctagcatttacttcgatgctttgccatttggatgagcattgaagtttgtcttcacaacctcatcttgtgcctcagcgacttgcatgacatcgatcagttcgttgtatggattgtaagcatcttgtaagtagttgcgagtactttagatagcgctcgggtggaaagtagataagtctttttcctatcttttcctgatctgtgataactttatcacaaagtgacaagttggtacaaatttgatgtaaggttgaattatattcatccacggttttgtaaccaacaaacataaggcatgcctaatcttgttatgctttgggttagatcatgtacttaaacttctcgaaccagtttttcaatgtggcccagaggccgcttgccttcttttctgccatgcattcattttttagtgttggcaagagatggtgctataaaaaataaatgtgtgtttggtcattt

SEQ ID NO: 33682 - DNA, 2234 bp, Zea Mays
aataaaaaaaaaaccgcccatagcgcgcaggacaggccgtacggcgtacggtgtcggcggacggccgcgatgggcgggggcgacgacgcggcggcgggcgttggagacgggttcgcgtgggatgccgactcccagctctactaccacgccagtactgctttttaccatgaccctgttgctggatggtactacagcagcagagatagccaatattacgtctacaaaaatggaaattacatgccattgacaacagatctggaaaatgaacccacagccaatcatccatatgatgaggccaaccaagatgtcttggaacactcttcaggcttggaaacaactatacttgacaatgagaatgaaataccaggacctccatcagaatggctactcaaacaatgaagtcaatgctgaaagttcactagtaatcgcacattcaaatgaggaagacagaattgaaacaaccgggaacaaactagatagcttgacctcggacagtgcttcagcctctctgcatgatgctacatcacagcaaactgaagttgaaacagaaacaaagaattccgcttatgtgtatgaatctttgggggaagaggaagagaaatggcacgctcagtatggtcaggtcgagaggtcaaatgatgatcaacatttacctccaacaattgatatatgggattgggatgtggtccaagaccatgttaacaaaggtcagcccgtggttaggcttgtgggatgtttatctaggggttcaaataagcttcatccttctcttcctactcgtggtggccttgtaaggactgctcctgtgcgtgaagttcatcttgacctcgtgcaagtttcaacagggaagctgtacaggctaaggaaccctagcagaaagtacttagccactttatccgcatatgactcctccaacccaacaaaggattgggggtttcctgatattaatttgaataagcaatccactgcaaagtgccaatctgaagttcttgctgataaatcttgtggcggaggaagtgtctcagctgctaataccatggcaagagccgaacacaaaagtttacagggacagagctgctgagagaaggatcctacatcgtggcttaggggttgggcctggacagaagcagagtaacaccaacaatttcgatgaatacgaggaatcaatcgaggacatggattcaatgggagttgcgtcagctgatttgaatttccaatccagcggtttgctttcggctaagagaataatggagaacatgggctggaagcagggagaagcccttggaaaaagcagaaagggcattgtagaacctatacagccttccatcaacaaacatggtgccggtttgggatggaggcaaacccgctaagatgttcctttgaagattccagtctttgtatttgtatcctctgaaggtaagttccaattgtatcgaataaaccggagggaactgaattgaacttgattctaaattttgctgcttctctcacacagttttaaaaagttgcaacttgtacttaaatgtggtctatgtgtattagcctgtcagatttggtgttcttaattcaagtgcaactacaacggaagaattgaggcaactgacttgtgcttgctgcttaaatctggcgtttttttggacagcagtatattcacaggctttcccttctcatttttcttctcatgggcacgagagtaatcagctggggctttgttcttgttcttgtcaccaccttgtctgctcctcttcttatagatgggcttttttatcttgtatgagctagcatttacttcgatgctttgccatttggatgagcattgaagtttgtcttcacaacctcatcttgtgcctcagcgacttgcatgacatcgatcagttcgttgtatggattgtaagcatcttgtaagtagttgcgagtactttagatagcgctcgggtggaaagtagataagtctttttcctatcttttcctgatctgtgataactttatcacaaagtgacaagttggtacaaatttgatgtaaggttgaattatattcatccacggttttgtaaccaacaaacataaggcatgcctaatcttgttatgctttgggttagatcatgtacttaaacttctcgaaccagtttttcaatgtggcccagaggccgcttgccttcttttctgccatgcattcattttttagtgttggcaagagatggtgctataaaaaataaatgtgtgtttggtcattt

SEQ ID NO: 33683 - DNA, 2104 bp, Zea Mays
aataaaaaaaaaaccgcccatagcgcgcaggacaggccgtacggcgtacggtgtcggcggacggccgcgatgggcgggggcgacgacgcggcggcgggcgttggagacgggttcgcgtgggatgccgactcccagctctactaccacgccagtactgctttttaccatgaccctgttgctggatggtactacagcagcagagatagccaatattacgtctacaaaaatggaaattacatgccattgacaacagatctggaaaatgaacccacagccaatcatccatatgatgaggccaaccaagatgtcttggaacactcttcaggcttggaaacaactatacttgacaatgagaatgaaataccaggacctccatcagaatggctactcaaacaatgaagtcaatgctgaaagttcactagtaatcgcacattcaaatgaggaagacagaattgaaacaaccgggaacaaactagatagcttgacctcggacagtgcttcagcctctctgcatgatgctacatcacagcaaactgaagttgaaacagaaacaaagaattccgcttatgtgtatgaatctttgggggaagaggaagagaaatggcacgctcagtatggtcaggtcgagaggtcaaatgatgatcaacatttacctccaacaattgatatatgggattgggatgtggtccaagaccatgttaacaaaggtcagcccgtggttaggcttgtgggatgtttatctaggggttcaaataagcttcatccttctcttcctactcgtggtggccttgtaaggactgctcctgtgcgtgaagttcatcttgacctcgtgcaagtttcaacagggaagctgtacaggctaaggaaccctagcagaaagtacttagccactttatccgcatatgactcctccaacccaacaaaggattgggggtttcctgatattaatttgaataagcaatccactgcaaagtgccaatctgaagttcttgctgataaatcttgtggcggaggaagtgtctcagctgctaataccatggagccgaacacaaaagtttacagggacagagctgctgagagaaggatcctacatcgtggcttaggggttgggcctggacagaagcagagtaacaccaacaatttcgatgaatacgaggaatcaatcgaggacatggattcaatgggagttgcgtcagctgatttgaatttccaatccagcggtttgctttcggctaagagaataatggagaacatgggctggaagcagggagaagcccttggaaaaagcagaaagggcattgtagaacctatacagccttccatcaacaaacatggtgccggtttgggatggaggcaaacccgctaagatgttcctttgaagattccagtctttgtatttgtatcctctgaagcctgtcagatttggtgttcttaattcaagtgcaactacaacggaagaattgaggcaactgacttgtgcttgctgcttaaatctggcgtttttttggacagcagtatattcacaggctttcccttctcatttttcttctcatgggcacgagagtaatcagctggggctttgttcttgttcttgtcaccaccttgtctgctcctcttcttatagatgggcttttttatcttgtatgagctagcatttacttcgatgctttgccatttggatgagcattgaagtttgtcttcacaacctcatcttgtgcctcagcgacttgcatgacatcgatcagttcgttgtatggattgtaagcatcttgtaagtagttgcgagtactttagatagcgctcgggtggaaagtagataagtctttttcctatcttttcctgatctgtgataactttatcacaaagtgacaagttggtacaaatttgatgtaaggttgaattatattcatccacggttttgtaaccaacaaacataaggcatgcctaatcttgttatgctttgggttagatcatgtacttaaacttctcgaaccagtttttcaatgtggcccagaggccgcttgccttcttttctgccatgcattcattttttagtgttggcaagagatggtgctataaaaaataaatgtgtgtttggtcattt

SEQ ID NO: 33684 - DNA, 2101 bp, Zea Mays
aataaaaaaaaaaccgcccatagcgcgcaggacaggccgtacggcgtacggtgtcggcggacggccgcgatgggcgggggcgacgacgcggcggcgggcgttggagacgggttcgcgtgggatgccgactcccagctctactaccacgccagtactgctttttaccatgaccctgttgctggatggtactacagcagcagagatagccaatattacgtctacaaaaatggaaattacatgccattgacaacagatctggaaaatgaacccacagccaatcatccatatgatgaggccaaccaagatgtcttggaacactcttgcttggaaacaactatacttgacaatgagaatgaaataccaggacctccatcagaatggctactcaaacaatgaagtcaatgctgaaagttcactagtaatcgcacattcaaatgaggaagacagaattgaaacaaccgggaacaaactagatagcttgacctcggacagtgcttcagcctctctgcatgatgctacatcacagcaaactgaagttgaaacagaaacaaagaattccgcttatgtgtatgaatctttgggggaagaggaagagaaatggcacgctcagtatggtcaggtcgagaggtcaaatgatgatcaacatttacctccaacaattgatatatgggattgggatgtggtccaagaccatgttaacaaaggtcagcccgtggttaggcttgtgggatgtttatctaggggttcaaataagcttcatccttctcttcctactcgtggtggccttgtaaggactgctcctgtgcgtgaagttcatcttgacctcgtgcaagtttcaacagggaagctgtacaggctaaggaaccctagcagaaagtacttagccactttatccgcatatgactcctccaacccaacaaaggattgggggtttcctgatattaatttgaataagcaatccactgcaaagtgccaatctgaagttcttgctgataaatcttgtggcggaggaagtgtctcagctgctaataccatggagccgaacacaaaagtttacagggacagagctgctgagagaaggatcctacatcgtggcttaggggttgggcctggacagaagcagagtaacaccaacaatttcgatgaatacgaggaatcaatcgaggacatggattcaatgggagttgcgtcagctgatttgaatttccaatccagcggtttgctttcggctaagagaataatggagaacatgggctggaagcagggagaagcccttggaaaaagcagaaagggcattgtagaacctatacagccttccatcaacaaacatggtgccggtttgggatggaggcaaacccgctaagatgttcctttgaagattccagtctttgtatttgtatcctctgaagcctgtcagatttggtgttcttaattcaagtgcaactacaacggaagaattgaggcaactgacttgtgcttgctgcttaaatctggcgtttttttggacagcagtatattcacaggctttcccttctcatttttcttctcatgggcacgagagtaatcagctggggctttgttcttgttcttgtcaccaccttgtctgctcctcttcttatagatgggcttttttatcttgtatgagctagcatttacttcgatgctttgccatttggatgagcattgaagtttgtcttcacaacctcatcttgtgcctcagcgacttgcatgacatcgatcagttcgttgtatggattgtaagcatcttgtaagtagttgcgagtactttagatagcgctcgggtggaaagtagataagtctttttcctatcttttcctgatctgtgataactttatcacaaagtgacaagttggtacaaatttgatgtaaggttgaattatattcatccacggttttgtaaccaacaaacataaggcatgcctaatcttgttatgctttgggttagatcatgtacttaaacttctcgaaccagtttttcaatgtggcccagaggccgcttgccttcttttctgccatgcattcattttttagtgttggcaagagatggtgctataaaaaataaatgtgtgtttggtcattt

SEQ ID NO: 33685 - DNA, 686 bp, Zea Mays
atcgaaccactctgtgcaggtacaagatatccctcaccgctgaagatgacactgacactgccgagtttatcttctttggacgaatggcgcagcgcctcattaaaaaaaatgtggacaccctcatctcgactaatccacccggtttcattccaagagaaattacagatctactggaaaagtctttcgagtggaatgttagcttcaccgaaagcacaattatttatggcagtgtttccttccaagtgaatgctataaacgcagaaatggatggtggcaacatgcttccaactacaccgtcctcacagccgtcgtcgaccatattttctcaagtaggacacggatcaggtgttgcacaaaacagaggggctgccttcatccgcgagccgtcactaacaccagagagtcacaaagtttcatctagcgccaagtgtaacatacagacaaccccacatcagggagacaatctgctgcaaggaacagagattatcacttctccgcctaacgtgcaggcgccatcaggagctgcttacagcgtgctagatgggtctacaaacaaggctcacaaaagtgttgtcggaaaaaggtctcgaacatcaccgtccaagaaggttgccaagaaactttttagagatgaagacacaggagatgacgatgttgctggttccgcagacgttgatgctgagtag

SEQ ID NO: 33686 - DNA, 1943 bp, Zea Mays
ctcaaacgagccgctaacttcctagaggcagccgtaggaagttagctgtccatgctaacttcctatggctaactctaggaagttagctgcccagctaacttcctacgacctcctctaggaagttaggtttccgctgttgaccagtcaaatgaaaagctaacttcctatggctggctctaggaagttagctgcccaactaacttcctacggcctcctttaggaagttaggtttcagctgttgaccagtcaaatgaaaagctaacttcctacggctggctctaggaagttacttaacttcctagagtaaatgtacaaactctaggaagttacgtaacttcctacgactttactctaggaagttattttttattttaaacctcccctcgaccttatctcttctctcacctttctcaaccccatctctctctcgcgtctatctcctcccttagtgccgcccgccatcatcgcccccgccgcacccgcccacgccgcgcccgctcccggcctcggccccgtccgccgtggaggcccccgccgcgcccgcccccggcactagccccgtccgccatggaagcccccgccgtacccacccctggccccgtccgccatggacgcccgtgcccgcccccggcctcgtccgccatggacgcccccgcactggccgcatccgccatggaagccctcgccgcgcccgcccctggccccgaccccgtccgccgtggagtggatttggaatttgaccccgctgtcgtgctcgcacgtacatgatgcctctaaaccagagccatctgctgcagggggaaatgaacgaaccgatcaacaaccctcatttgattagtacttcattcaatctattattactgttactgagttcaggactcaggtagcagtcgatgccacattgttagattgcgatctgcaaaaacgctactgattcataaataaaatcgacccagcatgtacacacgcacagcttcaggctggtccaagcaaaaactgcattcatgtttttgcttgtacactgcaccgtactcatattggttttagcagtaagagcgtgcttatgggtgcaaaatgtcatagtgaaagatgttttattgcattgcatttagttaataacatgtcattcaaagttttgtggtaaaatttcttctgacctggatatggcgcggaaaatttgaacggtcctatgggagaattataccagaaaagagaagggtatgcgttactagtagcttcccccaaactgctggcgctatgatcaaaatgtgctttcccaatttagccactgcatgttgcctcataatttctagtttttcgatatctgacaatgccctgaccgccgcggaatgtcacgccaccggacaccgacatctactccattccgagggttcttgccccgatgccgtagaagtacgcgaggtgcacgaagaaaaactttggccgttaccacgtgagcgagccaccagttgagcatttgcgcgattcactgtacaagacagagagggatgtcatgaaggtgattagtccagctatgtttggtagtgaagggcgatgtccagagagtaagaatgaggcgacacagtatggactcgatatgactgagcaataatatcttgagcattcgattccatggatagctgccaatgatgttgtacatttatattagacccctccagctaccttgtcgatgcatgaacaagaagacaggttagactttgttgaaaccctcttcactagtggaggtatcgaccatcactcgtcattgtaacccgatggtgatcgacgaccatgagcttccatgttattgcgttctgatacttgagacttttattatgactatgtataagatattttctcttattagtactggatgatgagatgtgtcttattatgactatggatgagacttttgtgatgtaattgatgagactatggatgag

SEQ ID NO: 33687 - DNA, 1972 bp, Zea Mays
ctcaaacgagccgctaacttcctagaggcagccgtaggaagttagctgtccatgctaacttcctatggctaactctaggaagttagctgcccagctaacttcctacgacctcctctaggaagttaggtttccgctgttgaccagtcaaatgaaaagctaacttcctatggctggctctaggaagttagctgcccaactaacttcctacggcctcctttaggaagttaggtttcagctgttgaccagtcaaatgaaaagctaacttcctacggctggctctaggaagttacttaacttcctagagtaaatgtacaaactctaggaagttacgtaacttcctacgactttactctaggaagttattttttattttaaacctcccctcgaccttatctcttctctcacctttctcaaccccatctctctctcgcgtctatctcctcccttagtgccgcccgccatcatcgcccccgccgcacccgcccacgccgcgcccgctcccggcctcggccccgtccgccgtggaggcccccgccgcgcccgcccccggcactagccccgtccgccatggaagcccccgccgtacccacccctggccccgtccgccatggacgcccgtgcccgcccccggcctcgtccgccatggacgcccccgcactggccgcatccgccatggaagccctcgccgcgcccgcccctggccccgaccccgtccgccgtggagtggatttggaatttgaccccgctgtcgtgctcgcacgtacatgatgcctctaaaccagagccatctgctgcaggaggagtgctgaatttcttttgattgcagggggaaatgaacgaaccgatcaacaaccctcatttgattagtacttcattcaatctattattactgttactgagttcaggactcaggtagcagtcgatgccacattgttagattgcgatctgcaaaaacgctactgattcataaataaaatcgacccagcatgtacacacgcacagcttcaggctggtccaagcaaaaactgcattcatgtttttgcttgtacactgcaccgtactcatattggttttagcagtaagagcgtgcttatgggtgcaaaatgtcatagtgaaagatgttttattgcattgcatttagttaataacatgtcattcaaagttttgtggtaaaatttcttctgacctggatatggcgcggaaaatttgaacggtcctatgggagaattataccagaaaagagaagggtatgcgttactagtagcttcccccaaactgctggcgctatgatcaaaatgtgctttcccaatttagccactgcatgttgcctcataatttctagtttttcgatatctgacaatgccctgaccgccgcggaatgtcacgccaccggacaccgacatctactccattccgagggttcttgccccgatgccgtagaagtacgcgaggtgcacgaagaaaaactttggccgttaccacgtgagcgagccaccagttgagcatttgcgcgattcactgtacaagacagagagggatgtcatgaaggtgattagtccagctatgtttggtagtgaagggcgatgtccagagagtaagaatgaggcgacacagtatggactcgatatgactgagcaataatatcttgagcattcgattccatggatagctgccaatgatgttgtacatttatattagacccctccagctaccttgtcgatgcatgaacaagaagacaggttagactttgttgaaaccctcttcactagtggaggtatcgaccatcactcgtcattgtaacccgatggtgatcgacgaccatgagcttccatgttattgcgttctgatacttgagacttttattatgactatgtataagatattttctcttattagtactggatgatgagatgtgtcttattatgactatggatgagacttttgtgatgtaattgatgagactatggatgag

SEQ ID NO: 33688 - DNA, 1892 bp, Zea Mays
acctttctcaaccccatctctctctcgcgtctatctcctcccttagtgccgcccgccatcatcgcccccgccgcacccgcccacgccgcgcccgctcccggcctcggccccgtccgccgtggaggcccccgccgcgcccgcccccggcactagccccgtccgccatggaagcccccgccgtacccacccctggccccgtccgccatggacgcccgtgcccgcccccggcctcgtccgccatggacgcccccgcactggccgcatccgccatggaagccctcgccgcgcccgcccctggccccgaccccgtccgccgtggagtggatttggaatttgaccccgctgtcgtgctcgcacgtacatgatgcctctaaaccagagccatctgctgcagggggaaatgaacgaaccgatcaacaaccctcatttgattagtacttcattcaatctattattactgttactgagttcaggactcaggtagcagtcgatgccacattgttagattgcgatctgcaaaaacgctactgattcataaataaaatcgacccagcatgtacacacgcacagcttcaggctggtccaagcaaaaactgcattcatgtttttgcttgtacactgcaccgtactcatattggttttagcagtaagagcgtgcttatgggtgcaaaatgtcatagtgaaagatgttttattgcattgcatttagttaataacatgtcattcaaagttttgtggtaaaatttcttctgacctggatatggcgcggaaaatttgaacggtcctatgggagaattataccagaaaagagaagggtatgcgttactagtagcttcccccaaactgctggcgctatgatcaaaatgtgctttcccaatttagccactgcatgttgcctcataatttctagtttttcgatatctgacaatgccctgaccgccgcggaatgtcacgccaccggacaccgacatctactccattccgagggttcttgccccgatgccgtagaagtacgcgaggtgcacgaagaaaaactttggccgttaccacgtgagcgagccaccagttgagcatttgcgcgattcactgtacaagacagagagggatgtcatgaaggtatgctgggatcttctttttttcctgatctcttgactccccctattttgcttctccctgctaaatgtcaagatggaatctactttgcaagttactacccctatctagcacttacgtgtaggctactgtgcttgtgtgaagttgatttagtcaagcatcttataaagcatttcgtagagctttgagttcatcatcatgaagcagtttattttcagaatttttctattgtttgttgtcctagttttgtaaattctgtagaccctaaaacaggaatattcaaacagtgaagcaccctcttagatcagagaaacaagacacattgcagtctatgttaagggtgtggcactataacaacattatattgggcgagccagcctgcaccgtagtgagaatttactagtaaataatcccagatttcatgtatctttgtttgtctgaaggccctaggtctcattttgttccaaaatgtcccagtcagctgaaatagaaatatccacctatgcttctgtattaccctactttgatagcttctgttaaggtcagtttaaatttgatactgccctggaaggtgagctacgactgttaatgcatactccctccggtgtcctattagttgtagttttggaccatatttgagtcaaacttataaaactttgatgtactatgctcgaatccaggtgattagtccagctatgtttggtagtgaagggcgatgtccagagagtaagaatgaggcgacacagtatggactcgatatgactgagcaataatatctt

SEQ ID NO: 33689 - DNA, 1748 bp, Zea Mays
cgtacctcaacttcgtgctgatatgtgacatggtgactatagcacgccatctaaatctaacgcttgtggtccctgaactggataaaaggtctttttgggctgacccaagtgattttggagatattttcgacgtggaccacttcattaattccttgagagatgagctgatgatagttaaagagcttcctttgaaactacagttaagaactaagaagagactgtactcgatgcctcctgtcagctggtcgaatgaaacatactacctaaagcggatattacctcttgcgaggaagcacaaggtaattcatttcgataaatcagacgcccgccttgcaaacaatggccttccgattcagctgcagatgctgcgttgccgagtgaactttgaggctctgagattcacaccacagatcgaggcccttggcagaaagctcatctccactctccagagacgaagtgggcagtttgttgtgcttcacttgcgctacgaaatggacatgctctccttttcaggctgcacacatggctgctctggtaaagaaactgaggagctcactaagatgagatatgcttatccatggtggaaagagaaagagatcgattcggaagtgaagaggctccaaggactctgtcccctcacaccagaggagatcactctagtgcttaaagctctagggttcacaaaggacactctgatatacattgcttccggtgaaatctatggcggtgaaaggcgcctggccgtgctcaaggctgcgtaccctaaactagtaaggaaggagaagattttatctcccgatgaactgcggccgttccagaaccattcgacccagatggcagcgctggattacatggtctctctagcaagcgacattttcattcccagctacgacggaaatatggcaagggttgtcgaaggccaccgcaggtatatggatttccgcaagaccatcgtcttggacagaaagaagctcgtcgagctgttggaccttttccaagggggcgctctatcctgggacgaattctcggacgcagtgaaggaggcacacaggagccgcacgggccagcctgcggaaagaaaggtcgtcccagggcagcccaaggaagaggactacttctacgctaatcctctagaatgcctcggctccaacgggggactacgggacgtctcctgacgacgctttcctggaaacacgccgccgatgaacgatgacaccacctcagccctacagcacaccgtgtgtgttcgtgttcatcctcaccagtcaccgccaccgccacctttgtacagctgaccaaaggccctgcccatctaccacaagtgcatgcaggttcaccagatcagaacgcctgcgaccacatttcctcctcacagaataaagcaggaaaagaagctgggaaccctacggggttcttcagaaagaagagatgccgctcgtgcatccagtctgctcctttcctaccatctgtcgtagttgttgttgtaacccttctgtcagttttttcattctattgttcggttgctccccttcaactgctccagttttcagttcttctagccggggcgggtagctcatgcaaaagtaggagtccagctttctggaagtttcttgtactaggtccgcgatgcataacagagatttctgaatcctgacagaaccttattactttcccttgagggatcaaatttcggcgacggaataattgtttggtttccagcatctcatctatggacggctgtggttgct

SEQ ID NO: 33690 - DNA, 1825 bp, Zea Mays
cttcgttcggtacacgggagattgagtatgaatttacaaaagcaatggctacctactagtgacttgcaatggtggcctcaatcaaatgcgagccgggatatgtgacatggtgactatagcacgccatctaaatctaacgcttgtggtccctgaactggataaaaggtctttttgggctgacccaagtgattttggagatattttcgacgtggaccacttcattaattccttgagagatgagctgatgatagttaaagagcttcctttgaaactacagttaagaactaagaagagactgtactcgatgcctcctgtcagctggtcgaatgaaacatactacctaaagcggatattacctcttgcgaggaagcacaaggtaattcatttcgataaatcagacgcccgccttgcaaacaatggccttccgattcagctgcagatgctgcgttgccgagtgaactttgaggctctgagattcacaccacagatcgaggcccttggcagaaagctcatctccactctccagagacgaagtgggcagtttgttgtgcttcacttgcgctacgaaatggacatgctctccttttcaggctgcacacatggctgctctggtaaagaaactgaggagctcactaagatgagatatgcttatccatggtggaaagagaaagagatcgattcggaagtgaagaggctccaaggactctgtcccctcacaccagaggagatcactctagtgcttaaagctctagggttcacaaaggacactctgatatacattgcttccggtgaaatctatggcggtgaaaggcgcctggccgtgctcaaggctgcgtaccctaaactagtaaggaaggagaagattttatctcccgatgaactgcggccgttccagaaccattcgacccagatggcagcgctggattacatggtctctctagcaagcgacattttcattcccagctacgacggaaatatggcaagggttgtcgaaggccaccgcaggtatatggatttccgcaagaccatcgtcttggacagaaagaagctcgtcgagctgttggaccttttccaagggggcgctctatcctgggacgaattctcggacgcagtgaaggaggcacacaggagccgcacgggccagcctgcggaaagaaaggtcgtcccagggcagcccaaggaagaggactacttctacgctaatcctctagaatgcctcggctccaacgggggactacgggacgtctcctgacgacgctttcctggaaacacgccgccgatgaacgatgacaccacctcagccctacagcacaccgtgtgtgttcgtgttcatcctcaccagtcaccgccaccgccacctttgtacagctgaccaaaggccctgcccatctaccacaagtgcatgcaggttcaccagatcagaacgcctgcgaccacatttcctcctcacagaataaagcaggaaaagaagctgggaaccctacggggttcttcagaaagaagagatgccgctcgtgcatccagtctgctcctttcctaccatctgtcgtagttgttgttgtaacccttctgtcagttttttcattctattgttcggttgctccccttcaactgctccagttttcagttcttctagccggggcgggtagctcatgcaaaagtaggagtccagctttctggaagtttcttgtactaggtccgcgatgcataacagagatttctgaatcctgacagaaccttattactttcccttgagggatcaaatttcggcgacggaataattgtttggtttccagcatctcatctatggacggctgtggttgct

SEQ ID NO: 33691 - DNA, 1854 bp, Zea Mays
gtcataccataccatgcagtgattaggggacttcttcgttcggtacacgggagattgagaatttacaaaagcaatggctacctactagtgacttgcaatggtggcctcaatcaaatgcgagccgggatatgtgacatggtgactatagcacgccatctaaatctaacgcttgtggtccctgaactggataaaaggtctttttgggctgacccaagtgattttggagatattttcgacgtggaccacttcattaattccttgagagatgagctgatgatagttaaagagcttcctttgaaactacagttaagaactaagaagagactgtactcgatgcctcctgtcagctggtcgaatgaaacatactacctaaagcggatattacctcttgcgaggaagcacaaggtaattcatttcgataaatcagacgcccgccttgcaaacaatggccttccgattcagctgcagatgctgcgttgccgagtgaactttgaggctctgagattcacaccacagatcgaggcccttggcagaaagctcatctccactctccagagacgaagtgggcagtttgttgtgcttcacttgcgctacgaaatggacatgctctccttttcaggctgcacacatggctgctctggtaaagaaactgaggagctcactaagatgagatatgcttatccatggtggaaagagaaagagatcgattcggaagtgaagaggctccaaggactctgtcccctcacaccagaggagatcactctagtgcttaaagctctagggttcacaaaggacactctgatatacattgcttccggtgaaatctatggcggtgaaaggcgcctggccgtgctcaaggctgcgtaccctaaactagtaaggaaggagaagattttatctcccgatgaactgcggccgttccagaaccattcgacccagatggcagcgctggattacatggtctctctagcaagcgacattttcattcccagctacgacggaaatatggcaagggttgtcgaaggccaccgcaggtatatggatttccgcaagaccatcgtcttggacagaaagaagctcgtcgagctgttggaccttttccaagggggcgctctatcctgggacgaattctcggacgcagtgaaggaggcacacaggagccgcacgggccagcctgcggaaagaaaggtcgtcccagggcagcccaaggaagaggactacttctacgctaatcctctagaatgcctcggctccaacgggggactacgggacgtctcctgacgacgctttcctggaaacacgccgccgatgaacgatgacaccacctcagccctacagcacaccgtgtgtgttcgtgttcatcctcaccagtcaccgccaccgccacctttgtacagctgaccaaaggccctgcccatctaccacaagtgcatgcaggttcaccagatcagaacgcctgcgaccacatttcctcctcacagaataaagcaggaaaagaagctgggaaccctacggggttcttcagaaagaagagatgccgctcgtgcatccagtctgctcctttcctaccatctgtcgtagttgttgttgtaacccttctgtcagttttttcattctattgttcggttgctccccttcaactgctccagttttcagttcttctagccggggcgggtagctcatgcaaaagtaggagtccagctttctggaagtttcttgtactaggtccgcgatgcataacagagatttctgaatcctgacagaaccttattactttcccttgagggatcaaatttcggcgacggaataattgtttggtttccagcatctcatctatggacggctgtggttgct

SEQ ID NO: 33692 - DNA, 2257 bp, Zea Mays
aagccccgactcttccatccctccctgcccttcccctgcccgccgatcgcttgccccactcccttgcttccgtggcgcacacgccgcgcacgcgtgctcgcctctcctggaaccgtctccgccgccctcccgcgtcggcgtcgcggcgcaagagggtaccctgaatttcgtcagtgccaagtgacgaccgcttttgcccatttgtgatagctgaatctctgtggttcaaaggcgattgattttggtttgctgacgcacgcctaatgagctcccaagtctccacatcacacggtcttcatcccccggggaagcttgggacatttgagtcaccccatgcctggccgctgtcagcgcctacggcccagcccgaagcgggacgcggtgatgaccaggaggtcaggctgttgtcggttgcctggaaccaagattgtggatgcttcgcggctggtaccagcaatgggtttaggatctttaactgcgaccctttcaaggagactttcaggagggatcttaagagcggcggttttgggatcgtcgagatgttgttccgttgcaacatccttgcccttgtaggaggcggctccaatgtgcagtatccgccgaacaaggtgatgatttgggatgaccaccagagccgttgcattggagagttcgccttccgctcagatgtccgagccgtaaagttggcgaaggactacatcgtgattgtcctcgagcgcaagatatttgtctacaactttaccgatttgaagctgctctaccagattgacaccctgtcaaatcccaaaggactttgctgtctctctcataattccaatacttcagtattggcctgccctggggtgcaccagggtcatgttcgcgtggagcatttcgggctgaaaatggcgaagacaatctcagctcatgattcacacatctcttgcatgtcactgacaatggatggtctcctactggcaacagctagcaccaagggcactttgatcagaatattcaacacaatggatggcactcgcctacaagaggtacgcagagggcttgacagagcagaaatatatagcattgcagtgtcgcccaatgtgcagtggttggcagtgtccagcgacaaaggtactgttcatattttctccctgagagtcagagttgctggggaggatgcaagcaatgagcaacgcactgctgaaagtccacggatggatcaccagagctcttccagttctattgatcctcttattcaggcgaacactggatccaatgcgagttcatcactgtcatttatgagagggatcctgccgaagtatttcagttcagagtggtcatttgctcagttccatttaccagaagtcacccgttacatagtagcctttggtgctcagaatactgtaatgatggttggcctggatggcaggtacttaccttagtgaattaaattttacaattttaagattttactctcagcagatttggaatacctacatttttattgctggttgtgagcaaaaaaaaaaatttccccacctgagttcacttattgagttatgtgggagtttcatttcagttagtagtagggtagatttggcagactcggttcctacctagcgagtgccaccgtcttgtacgcatcgcttgttccaaataatcatgtttctacctccagcttctacaggtgcagcttcgaccaagtgaacggagggcagatgttacagaaggagtatttccggtttctcaagtccgacagcccacctttaaggagcgcagccatctgacctacctctctcaccctgtaaataccgaaggttgtgcccggtccattgtacatatcaccatcttctcgccggctaaagttattacaggcagcgggaataaggagagctggccgtgtcggatcgccgcaacccacaggattccaaccttgaggtttctggagcggttggtgtcccatccaagctgcaagcatcatttgccatctctcttctttcttctagcgagaaccacaaccacccattggtacactacatataacgtaaaaagttcgataacgaatttgaccgtgtggtctgcaatgccgtgtaagaaatctccgacttgttcttgcctgtggcttgttgatcttgatgatgactgctgcgcaagtgcaatctggttctgcgtgttgtgagatcgcgttgctggtagcggtaggcgtatgattaacatgtttgatcgcgtcttggcttgttaatgcgtggaaatcacatataataatataaatataaat

SEQ ID NO: 33693 - DNA, 2000 bp, Zea Mays
caagccccgactcttccatccctccctgcccttcccctgcccgccgatcgcttgccccactcccttgcttccgtggcgcacacgccgcgcacgcgtgctcgcctctcctggaaccgtctccgccgccctcccgcgtcggcgtcgcggcgcaagagggtaccctgaatttcgtcagtgccaagtgacgaccgcttttgcccatttgtgatagctgaatctctgtggttcaaaggcgattgattttggtttgctgacgcacgcctaatgagctcccaagtctccacatcacacggtcttcatcccccggggaagcttgggacatttgagtcaccccatgcctggccgctgtcagcgcctacggcccagcccgaagcgggacgcggtgatgaccaggaggtcaggctgttgtcggttgcctggaaccaagattgtggatgcttcgcggctggtaccagcaatgggtttaggatctttaactgcgaccctttcaaggagactttcaggagggatcttaagagcggcggttttgggatcgtcgagatgttgttccgttgcaacatccttgcccttgtaggaggcggctccaatgtgcagtatccgccgaacaaggtgatgatttgggatgaccaccagagccgttgcattggagagttcgccttccgctcagatgtccgagccgtaaagttggcgaaggactacatcgtgattgtcctcgagcgcaagatatttgtctacaactttaccgatttgaagctgctctaccagattgacaccctgtcaaatcccaaaggactttgctgtctctctcataattccaatacttcagtattggcctgccctggggtgcaccagggtcatgttcgcgtggagcatttcgggctgaaaatggcgaagacaatctcagctcatgattcacacatctcttgcatgtcactgacaatggatggtctcctactggcaacagctagcaccaagggcactttgatcagaatattcaacacaatggatggcactcgcctacaagaggtacgcagagggcttgacagagcagaaatatatagcattgcagtgtcgcccaatgtgcagtggttggcagtgtccagcgacaaaggtactgttcatattttctccctgagagtcagagttgctggggaggatgcaagcaatgagcaacgcactgctgaaagtccacggatggatcaccagagctcttccagttctattgatcctcttattcaggcgaacactggatccaatgcgagttcatcactgtcatttatgagagggatcctgccgaagtatttcagttcagagtggtcatttgctcagttccatttaccagaagtcacccgttacatagtagcctttggtgctcagaatactgtaatgatggttggcctggatggcaggtgcagcttcgaccaagtgaacggagggcagatgttacagaaggagtatttccggtttctcaagtccgacagcccacctttaaggagcgcagccatctgacctacctctctcaccctgtaaataccgaaggttgtgcccggtccattgtacatatcaccatcttctcgccggctaaagttattacaggcagcgggaataaggagagctggccgtgtcggatcgccgcaacccacaggattccaaccttgaggtttctggagcggttggtgtcccatccaagctgcaagcatcatttgccatctctcttctttcttctagcgagaaccacaaccacccattggtacactacatataacgtaaaaagttcgataacgaatttgaccgtgtggtctgcaatgccgtgtaagaaatctccgacttgttcttgcctgtggcttgttgatcttgatgatgactgctgcgcaagtgcaatctggttctgcgtgttgtgagatcgcgttgctggtagcggtaggcgtatgattaacatgtttgatcgcgtcttggcttgttaatgcgtggaaatcacatataataatataaatataaat

SEQ ID NO: 33694 - DNA, 1952 bp, Zea Mays
atggacgcgctgccgcctctgcagcgcgccacgtcgccgccgccccagccccggccccagccgcccgtgccgtccaggaggtacggcgtgcacttctcggcgtccagcttcatccaggcgccgctcaccacgctgctcgagtactccggcatcctccgccccgatccaggcggcggaacccagcaggatggggccggggctgggccgggcgaggtgtcgatccggattgtggcgcccggcgaggcggggacgtcgtctgagaggcccgaggaggtgatcgtggaggaggaggaagaggatggacacgcaacgagaacgcgcccggaggacccgtcacctgcggctggtggcggggagggcggcagggaatcctcctcatcgtaccagcggtacgacatacagcaggtggccaggtgggtggagcagatactgccattctcactgctgctgctcgtcgtcttcatccgacaacatttgcaaggtttctttgtgacaatttggattgctgcggtgatgttcaagtccaatgatatcctgcgtaagcagactgctctgaagagggagagaaaaattccagttcttgtcgggattacaatattatttgttgttcacgtatctgggttttattggtgttacaagaacggggaccttataagacctctcatgatgcttcctccaaaagaaataccaccattttggcacgcaatattcatcatcttggtgaatgatacaatggtgcgccaaactgctatggttgtcaaatgtttgctgctgatgtactacaagaacagcagaggccgtagctatcgtaggcagggtcagatgctgacgattgtggaatattttctacttttgtaccgcgcattattgcctacacctgtgtggtaccgttttttcctgaacaaggagtatggaagcttattttcgtctctaaccactggcttgtatctcactttcaagttgacatcagtcgtggaaaaggttcaatcatttttgacggcattgagagcgttatctcataaagacttccattgtggctcatatgcaacaagcgagcaggtggctgttgctggagatttgtgcgcgatatgccaagagaagatgcacgttcccatccttttgcgctgcaaacatgtcttctgtgaagattgtgtgtccgaatggttcgagagggagcggacttgcccgctgtgcagggcactggtgaagccagcagacctccggtcgttcggtgacggttcaacaagcctcttcttccagctattctaatctgagagagccaaaagagctgggcaagctggggcgctccaccctgtgcagatgttaggtgtgtgtgtgtgtgtgagtgttgctgctggcaacgcgtgcgagcagtgcggccctgatgcggtgctgggagagtgtacaccgagctgaagctgaaggcgtacatggttttgtattgtgattgtgcatattttcatcccatgtataggcactcgcgggatgcttgagcacctgaggatttttacctgaccttatacgcacaaactactacgtaaatagaaatggcaccataccttcaccattctcacaaaatggtgttagcagttgctgtataacgtgcgtgctgccctgctccggtgatcagcaaaggcccaaaataattgcagagaggaactggaaaggaactccaaggaacaagtaaaatagtgcaggagattctcaacgcccgacgccgacagtcgacagatgatatggttatgcacgcggcagtggaaccaaacatacctgcaccgtagcctgtgccgtgccgccatgacagacggggccggcttcgtcctgaggtgacagctcacaaatgaacagtaaacagatccagcgtgtctttttaatataatgacgggtatatgtttgattggactatggacgtgaaaaatattgttgtggttgtgagctataaaaaaaccgtt

SEQ ID NO: 33695 - DNA, 2018 bp, Zea Mays
cgccgccgcggcgggctcggtctcctctggaagctcccctacggccgcgcgccgtcccgcccgatggacgcgctgccgcctctgcagcgcgccacgtcgccgccgccccagccccggccccagccgcccgtgccgtccaggaggtacggcgtgcacttctcggcgtccagcttcatccaggcgccgctcaccacgctgctcgagtactccggcatcctccgccccgatccaggcggcggaacccagcaggatggggccggggctgggccgggcgaggtgtcgatccggattgtggcgcccggcgaggcggggacgtcgtctgagaggcccgaggaggtgatcgtggaggaggaggaagaggatggacacgcaacgagaacgcgcccggaggacccgtcacctgcggctggtggcggggagggcggcagggaatcctcctcatcgtaccagcggtacgacatacagcaggtggccaggtttctttgtgacaatttggattgctgcggtgatgttcaagtccaatgatatcctgcgtaagcagactgctctgaagagggagagaaaaattccagttcttgtcgggattacaatattatttgttgttcacgtatctgggttttattggtgttacaagaacggggaccttataagacctctcatgatgcttcctccaaaagaaataccaccattttggcacgcaatattcatcatcttggtgaatgatacaatggtgcgccaaactgctatggttgtcaaatgtttgctgctgatgtactacaagaacagcagaggccgtagctatcgtaggcagggtcagatgctgacgattgtggaatattttctacttttgtaccgcgcattattgcctacacctgtgtggtaccgttttttcctgaacaaggagtatggaagcttattttcgtctctaaccactggcttgtatctcactttcaagttgacatcagtcgtggaaaaggttcaatcatttttgacggcattgagagcgttatctcataaagacttccattgtggctcatatgcaacaagcgagcaggtggctgttgctggagatttgtgcgcgatatgccaagagaagatgcacgttcccatccttttgcgctgcaaacatgtcttctgtgaagattgtgtgtccgaatggttcgagagggagcggacttgcccgctgtgcagggcactggtgaagccagcagacctccggtcgttcggtgacggttcaacaagcctcttcttccagctattctaatctgagagagccaaaagagctgggcaagctggggcgctccaccctgtgcagatgttaggtgtgtgtgtgtgtgtgagtgttgctgctggcaacgcgtgcgagcagtgcggccctgatgcggtgctgggagagtgtacaccgagctgaagctgaaggcgtacatggttttgtattgtgattgtgcatattttcatcccatgtataggcactcgcgggatgcttgagcacctgaggatttttacctgaccttatacgcacaaactactacgtaaatagaaatggtgagtatatacaatggttccggatgcgtcgataaaatcctcacggtccttgcttatgctatttttgacaggcaccataccttcaccattctcacaaaatggtgttagcagttgctgtataacgtgcgtgctgccctgctccggtgatcagcaaaggcccaaaataattgcagagaggaactggaaaggaactccaaggaacaagtaaaatagtgcaggagattctcaacgcccgacgccgacagtcgacagatgatatggttatgcacgcggcagtggaaccaaacatacctgcaccgtagcctgtgccgtgccgccatgacagacggggccggcttcgtcctgaggtgacagctcacaaatgaacagtaaacagatccagcgtgtctttttaatataatgacgggtatatgtttgattggactatggacgtgaaaaatattgttgtggttgtgagctataaaaaaaccgtt

SEQ ID NO: 33696 - DNA, 1954 bp, Zea Mays
attgcagcagatgtattgagttttgtcatagccagccggtaaaccttgtcagggtttatggttaaccttgcccgggcatacatgccctataaaacgaagatagtcaattgctcaacgtaataaaattgagagtaaaccaaaagaataggcacaagaaaactggcaagaagatatattgtgtggaaagcacattcactgataattttcagttaaaatggattcggtactctgcagtcaagttcgcactacccatacttttcatattctgttcttgtatctgaacagattgtaatatatttcacagattaatatggcctagaccacagacacccaaaatgacataacacaatggcaaagatgctaatataagcgcacctgatgcatggttatctgctattaatatgaccatcttgcagggtataggctctctatttgtttcccaacatggtaagctgttgtctgcataagaactctattaatgtccacatggtgaactgacctaatacccatagaccatagctaagtaaggattatttggcaaataaaaaatttgaatggcacacagtggttgcaacaagagatatgactagggcagttggttgttaaacaaaccaaggatcaaggtcagaattgaagacgacagttttgcatgatatgcaacattcagggatgttactcggtcaaacggtcggtacaatgtattgctttatcaaggatgttggccgtcatccgtgtaatgaacagaatggtcacctagagcagttcacagtcacaggtcttttcaccaatatagaaaatgtagtgttaacagttgcaatgagctcatgtgcatgcagctgaacgaaaataacagcaagagtgacgaacaaatttacagtccatcctaatatggtatgtaacttctggccgtgttgctgtattgcttcaatgaaagatgccaaagccaatccgtttgatcaacagaatgggcacaaagtgcagttcactaactgcatgtttggatcccatgaattgaaaccaatatctagaaagtgcttctcattttattgttagattacttttcaattcctctcaattcctgggaacacagaaccaaacaaggcctaagtcttatcatggatatagcccattgggatagccagctatcagtttagtcttaacagtcgtggtatgctcatgtgcagtatgctgaagcatcagaagagcagtaccgcagtagtggcacacaaactaccaggtgttctgactatagccaaccagaaacataatacctagcccagagggaaaacgagaaaggaatgctactcacggcaaaggcgacaagggcggtggctagggcgaggaagccgtacttggccatgccctcggagaggccgacgaaggtgctggcgatgccgaacatgatcctccacagcgcgacgcagacgacgactgcccccgcgccgacgaggatcatgtagttgcgccgccagaaggcctcgacctgcaggccgacggccgcgcggtaccgcgcggccgcgctcctcgccgcctccatgggccgccccagccccttgaccccctggcccagcggcgccagcttcgacccgccgctcgccaccgacctgaccccgcccgccagccgctgcggcagcaccccgtgccgcagcctcgtcgcatcggtgcgcgcggtggtgaagaagcgggaggaggaggaggaggaggaggaggagatgaaggtgggggagtgggcggggatgggagtacgagtggaagtgggtagcgcgcggcgcgcggcggcgggtgtgggggaggggtggaggaggaggcggcggtggagggtgtgcagggcgcgccgcgaggaggcgaaggcgaccgccatgatcggcttggggggtcgaatcgagatcgggttcgcagtcggcgggcaccggaggggaagtcagaagagggattgaacgggcggaggctttgg

SEQ ID NO: 33697 - DNA, 537 bp, Zea Mays
ataaaccaacgaacatgaggctttgatatcaattgaaaagattacaatgcgtggctataactaaggagagagatgatgaattaaacttttataaatctttttgggttaatcaaaacctaactacaaactcaactttactcatctcaattccatgaccgcagacattcagcaaaaaaaaaaaaggctttaacaactgaccaaccactaaattacattgtttcgccgaagtgttctgttgcggaacatgcaaaattattcctttctcctcaacaacttgagactggtgacgccgaatcgaccacctggaagtctggaactcaaccgaactcagaagcaatcttctcttgctgtggaaacgcggactgctacactccgggagggggagagaagtataaaacaatgcacaaggtggaaaatcgatgcagttaaatcatgtcacgaagctttctccaggctctcagcctcctcccgccgcctccgttcttcagcctgctgacgcaacctttcctcctcgcgcctcaatgcttccgcttcctc

SEQ ID NO: 33698 - DNA, 1835 bp, Zea Mays
catcaactggctcaccacgctgacaacatccctttgctctattcaaattacgttggactgcacgatggctaacatagaactgatctagtccaccgggctgaatttcatgctcttcttcattgtcttctgaattcgacaacacatcttgatcgaacacagtgtcaaaatcggcataaaccccataatcattaagatgcaggttctcttgttgttcatccatttggatatttagatcaaaagaatggagtatttgatgtggaggaacaaaaggaaagactccaccaacctcaggctggtgagtgctttaaatgctcgaggtagagtgtgttttataggcgtgagaaaggagcagtggcagaacaacggcagacgaacgtcaattttaaatattgaatgtttttcgtttttttaatgtgtttggcgcgtgtgcctgtgtacacatttctacttttggcgccagatggataataaattaataaatgctgagatgactagctacatcatccgtatgtgacacaagaatatttacatttaatagagggtattcttgtaatctctcatattactactctaacgccttgcgatgctaaaacgacttggctcatgggacggacggagggagtagtggtttagaacaaacaggccctagatggtccacgatctaaacgtgattttttttcttctaaaaacaacgctaaaaaaatccggcccactttaccgttgcggcggacaagcagagtcgcggcggccgaaccgccacctccctttgcgcctcactcatcagtcatggcgtcgctgccgcctggacctccggcgtggtcggtgaccctgagcctaaggcaccgtggcgggctggagatccgtgccgccgcggagaacttgctcccagggtggggccgcggcggggagcgcatgtccctcctgctccgcctccgccgctgcctcctcctctccgtcacatccaattgcggcggtcgtcccgcggcgaccacacagcccgggccgccgccgcgcggcagcagggtcgtccgcttcctgcggagcaggtgggcgcggctgccgcgggccacctccatttggaggcgcaagaaacagcccccggcgcgcgccgccgtgccgccggactgccgggaccagcggagtcgaacgctggcgcggcctgtcttctgggcaacggcatcgacgccagcggcgacgacgcggttcgtcgtcgtcgtcgtcgtcgccgcccttgccgtgaccgtgtctatcgtcacggcgttccgcatcacgggcggcatcagcaaccggagaggaggctgcgacagcaaaccgattgcgcgatgggccaggttgttggagttgctggagcatccccctctcaactgcaactacaggtgtctccttggtgcgccaaagcgagggctggagtggatcttcagcaagtagatgttctgtcagatgaaagccacctgcgttgcgtaggagctaggaaaggttcgatctgactgctgatagtatcctaggttaatttagagtttgtgttatacatgacgactgggatcgatatctgcatgagcatggcaggcattcaaggagcaagttcgtcacagccacttcagtttgatctggttctgtgtgcatttgcaatagcaattcagtggttgtcaacacggttatgtatttatataagatgaattggtcttcaacatttcttttcttttttaaaaaagggttgccatagcagggatctggcattgtgagagttgcaatttcagagtataaaaggcccagtgaatctaattgctatatttatgtaactttttgacgaacttaaaacttgcaatattcagaag

SEQ ID NO: 33699 - DNA, 2157 bp, Zea Mays
tctgaaacttctactgatccgttacatgacgtagagagagggccctaggatacatttcctttctcttttttttttggttaccttttggctttatggagaagctttgagcaagccagcttttctgcgtccatcagccacagctgatttcactgcgatagttttcttcaagcagtagttttgttcctgtcaactgaccaactggtagtggtaagcaggtacgatgtgctcggtagcgaggctggcgtttgtgcttgcactggccatagccgcctcgtcaattgaggttgcggagagcagagattttaatatctttggtaagctttcaatctactgatttttgctccttactctctttattctttgttgaatgttgatccatagcagtgaattatcaggtctagtgatagtttcttttcgatggagatctcgtgatagtttcaattagtttatctaaattccttctttgtttgacaagttcgtatcttcatttagtccggtgacatgttaaagaaagcaattacgtctaagccatcagttctactcaatgtagagggcgtagcttcagcttagctgctattcctcacaggaactcaagtttttctgaagttttgcatttctggccaatcctttcttctgtcttcaattcagctcagggcagcttgcctgatgcaaccaagggatcgtctggtctagctgcaaccagtggaaagttgtgtcagttatgcgagcagtactcatccgaggcgctcctctatctcacacaaaacgagacccagactgagattcttagcattctacaccatgaatgtgccagccttgcccctctcaaacagcagtgcatcacgctggttgactactacgtaccccttttcttcttggaggtctccatggttacccctgagaagttctgcgagtcgatgcatctctgcaagaaggggatgaagattagcctacccacccgggagggtacttgtggtttgtgccaccatgttgttgttgaaattcttatcatgcttaaagaccccaacatgcagctggaagtaatcgacctactcaccaaaacatgcagcaaggcgcagaactatgaacagtaggtgagctaagttcaagaaagggaacctcagatgtgctatgagtgcacggggctatattcaatggtatctgagaacaaaaaaaaacagcgagaattgagaaaccttgaactgattgagcacttcagaaagtgaatacttacaaactagaccaacctaggtgacattttattttatttaaatacaaaataggcatctaaatatttacatcaaagagaacttgaacctagattgtctaggcacgcatccatgcctcgaccaactgagctagttcggctttctaattttagctgtttattccaatctgcctaaagatatatgaagttaggctgttgctgatgcctgcaccctgcagaactgtatcttaagttaggttgttgctgatgcctgcaccctgcaggtttgtgcaaaatactccatatacagaacagggggtctctttctttgaaatctgatgtttgctacctctgttatcttctgttcataacattcttcttttcatccctcagtgcaagcggctggtcctcaagtatattccacttattctggtgaagggccagaaattccttgagacaacggatgtctgctctgtgatacatgcatgcaaagcaggcacacaagcatcaatggaagccatgcctctgtctgccatgttgtgaaggtgatgcgaatcagaataaggcttatttgcctaggagatcaaattggggagaaacgatgaaaagtcagatgactgttttaagctctcttcctctattgctgaaacactattgatcggtgaaaattcggctgtgtaaaaatcttgtgtaaatttgggggtatatccattgtttctctgaagtatacagcaactgcagctacatcaatctcttcggcattgggttgagaagttctaagcagtaattgcattttactgtatcatctatttgtttgtaactactgggagttattaattccttgtttctctgttgctctgtcaaattctctgtaacattagagttatactaaaacattaagtttgctttcgaaataataaaaacatttataatacagagatggtttattt

SEQ ID NO: 33700 - DNA, 1823 bp, Zea Mays
tctgaaacttctactgatccgttacatgacgtagagagagggccctaggatacatttcctttctcttttttttttggttaccttttggctttatggagaagctttgagcaagccagcttttctgcgtccatcagccacagctgatttcactgcgatagttttcttcaagcagtagttttgttcctgtcaactgaccaactggtagtggtaagcaggtacgatgtgctcggtagcgaggctggcgtttgtgcttgcactggccatagccgcctcgtcaattgaggttgcggagagcagagattttaatatctttgctcagggcagcttgcctgatgcaaccaagggatcgtctggtctagctgcaaccagtggaaagttgtgtcagttatgcgagcagtactcatccgaggcgctcctctatctcacacaaaacgagacccagactgagattcttagcattctacaccatgaatgtgccagccttgcccctctcaaacagcagtgcatcacgctggttgactactacgtaccccttttcttcttggaggtctccatggttacccctgagaagttctgcgagtcgatgcatctctgcaagaaggggatgaagattagcctacccacccgggagggtacttgtggtttgtgccaccatgttgttgttgaaattcttatcatgcttaaagaccccaacatgcagctggaagtaatcgacctactcaccaaaacatgcagcaaggcgcagaactatgaacagtaggtgagctaagttcaagaaagggaacctcagatgtgctatgagtgcacggggctatattcaatggtatctgagaacaaaaaaaaacagcgagaattgagaaaccttgaactgattgagcacttcagaaagtgaatacttacaaactagaccaacctaggtgacattttattttatttaaatacaaaataggcatctaaatatttacatcaaagagaacttgaacctagattgtctaggcacgcatccatgcctcgaccaactgagctagttcggctttctaattttagctgtttattccaatctgcctaaagatatatgaagttaggctgttgctgatgcctgcaccctgcagaactgtatcttaagttaggttgttgctgatgcctgcaccctgcaggtttgtgcaaaatactccatatacagaacagggggtctctttctttgaaatctgatgtttgctacctctgttatcttctgttcataacattcttcttttcatccctcagtgcaagcggctggtcctcaagtatattccacttattctggtgaagggccagaaattccttgagacaacggatgtctgctctgtgatacatgcatgcaaagcaggcacacaagcatcaatggaagccatgcctctgtctgccatgttgtgaaggtgatgcgaatcagaataaggcttatttgcctaggagatcaaattggggagaaacgatgaaaagtcagatgactgttttaagctctcttcctctattgctgaaacactattgatcggtgaaaattcggctgtgtaaaaatcttgtgtaaatttgggggtatatccattgtttctctgaagtatacagcaactgcagctacatcaatctcttcggcattgggttgagaagttctaagcagtaattgcattttactgtatcatctatttgtttgtaactactgggagttattaattccttgtttctctgttgctctgtcaaattctctgtaacattagagttatactaaaacattaagtttgctttcgaaataataaaaacatttataatacagagatggtttattt

SEQ ID NO: 33701 - DNA, 1121 bp, Zea Mays
cttgaagcgaactgaattcttcagtacgatgtgctcggtagcgaggctggcgtttgtgcttgcactggccatagccgcctcgtcaattgaggttgcggagagcagagattttaatatctttgctcagggcagcttgcctgatgcaaccaagggatcgtctggtctagctgcaaccagtggaaagttgtgtcagttatgcgagcagtactcatccgaggcgctcctctatctcacacaaaacgagacccagactgagattcttagcattctacaccatgaatgtgccagccttgcccctctcaaacagcagtgcatcacgctggttgactactacgtaccccttttcttcttggaggtctccatggttacccctgagaagttctgcgagtcgatgcatctctgcaagaaggggatgaagattagcctacccacccgggagggtacttgtggtttgtgccaccatgttgttgttgaaattcttatcatgcttaaagaccccaacatgcagctggaagtaatcgacctactcaccaaaacatgcagcaaggcgcagaactatgaacatgcaagcggctggtcctcaagtatattccacttattctggtgaagggccagaaattccttgagacaacggatgtctgctctgtgatacatgcatgcaaagcaggcacacaagcatcaatggaagccatgcctctgtctgccatgttgtgaaggtgatgcgaatcagaataaggcttatttgcctaggagatcaaattggggagaaacgatgaaaagtcagatgactgttttaagctctcttcctctattgctgaaacactattgatcggtgaaaattcggctgtgtaaaaatcttgtgtaaatttgggggtatatccattgtttctctgaagtatacagcaactgcagctacatcaatctcttcggcattgggttgagaagttctaagcagtaattgcattttactgtatcatctatttgtttgtaactactgggagttattaattccttgtttctctgttgctctgtcaaattctctgtaacattagagttatactaaaacattaagtttgctttcgaaataataaaaacatttataatacagagatggtttattt

SEQ ID NO: 33702 - DNA, 1782 bp, Zea Mays
gattatgcctttctagcacctcctggccaccaaagaagcaaaaatcttccaggttcccacccacacggccacacccactgttctacatgctcatgcatcctcctaatgtaacctgaagctttaagaaaacaaagtgctcccggaagactccaagctgcagctaccggccttcctctcccccattccaattccgagaacaggggcggcggagtcaaccaggtacgatgtgctcggtagcgaggctggcgtttgtgcttgcactggccatagccgcctcgtcaattgaggttgcggagagcagagattttaatatctttgctcagggcagcttgcctgatgcaaccaagggatcgtctggtctagctgcaaccagtggaaagttgtgtcagttatgcgagcagtactcatccgaggcgctcctctatctcacacaaaacgagacccagactgagattcttagcattctacaccatgaatgtgccagccttgcccctctcaaacagcaggtctccatggttacccctgagaagttctgcgagtcgatgcatctctgcaagaaggggatgaagattagcctacccacccgggagggtacttgtggtttgtgccaccatgttgttgttgaaattcttatcatgcttaaagaccccaacatgcagctggaagtaatcgacctactcaccaaaacatgcagcaaggcgcagaactatgaacagtaggtgagctaagttcaagaaagggaacctcagatgtgctatgagtgcacggggctatattcaatggtatctgagaacaaaaaaaaacagcgagaattgagaaaccttgaactgattgagcacttcagaaagtgaatacttacaaactagaccaacctaggtgacattttattttatttaaatacaaaataggcatctaaatatttacatcaaagagaacttgaacctagattgtctaggcacgcatccatgcctcgaccaactgagctagttcggctttctaattttagctgtttattccaatctgcctaaagatatatgaagttaggctgttgctgatgcctgcaccctgcagaactgtatcttaagttaggttgttgctgatgcctgcaccctgcaggtttgtgcaaaatactccatatacagaacagggggtctctttctttgaaatctgatgtttgctacctctgttatcttctgttcataacattcttcttttcatccctcagtgcaagcggctggtcctcaagtatattccacttattctggtgaagggccagaaattccttgagacaacggatgtctgctctgtgatacatgcatgcaaagcaggcacacaagcatcaatggaagccatgcctctgtctgccatgttgtgaaggtgatgcgaatcagaataaggcttatttgcctaggagatcaaattggggagaaacgatgaaaagtcagatgactgttttaagctctcttcctctattgctgaaacactattgatcggtgaaaattcggctgtgtaaaaatcttgtgtaaatttgggggtatatccattgtttctctgaagtatacagcaactgcagctacatcaatctcttcggcattgggttgagaagttctaagcagtaattgcattttactgtatcatctatttgtttgtaactactgggagttattaattccttgtttctctgttgctctgtcaaattctctgtaacattagagttatactaaaacattaagtttgctttcgaaataataaaaacatttataatacagagatggtttattt

SEQ ID NO: 33703 - DNA, 1331 bp, Zea Mays
gattatgcctttctagcacctcctggccaccaaagaagcaaaaatcttccaggttcccacccacacggccacacccactgttctacatgctcatgcatcctcctaatgtaacctgaagctttaagaaaacaaagtgctcccggaagactccaagctgcagctaccggccttcctctcccccattccaattccgagaacaggggcggcggagtcaaccagtggtaagcaggtacgatgtgctcggtagcgaggctggcgtttgtgcttgcactggccatagccgcctcgtcaattgaggttgcggagagcagagattttaatatctttgctcagggcagcttgcctgatgcaaccaagggatcgtctggtctagctgcaaccagtggaaagttgtgtcagttatgcgagcagtactcatccgaggcgctcctctatctcacacaaaacgagacccagactgagattcttagcattctacaccatgaatgtgccagccttgcccctctcaaacagcagtgcatcacgctggttgactactacgtaccccttttcttcttggaggtctccatggttacccctgagaagttctgcgagtcgatgcatctctgcaagaaggggatgaagattagcctacccacccgggagggtacttgtggtttgtgccaccatgttgttgttgaaattcttatcatgcttaaagaccccaacatgcagctggaagtaatcgacctactcaccaaaacatgcagcaaggcgcagaactatgaacagtagtgcaagcggctggtcctcaagtatattccacttattctggtgaagggccagaaattccttgagacaacggatgtctgctctgtgatacatgcatgcaaagcaggcacacaagcatcaatggaagccatgcctctgtctgccatgttgtgaaggtgatgcgaatcagaataaggcttatttgcctaggagatcaaattggggagaaacgatgaaaagtcagatgactgttttaagctctcttcctctattgctgaaacactattgatcggtgaaaattcggctgtgtaaaaatcttgtgtaaatttgggggtatatccattgtttctctgaagtatacagcaactgcagctacatcaatctcttcggcattgggttgagaagttctaagcagtaattgcattttactgtatcatctatttgtttgtaactactgggagttattaattccttgtttctctgttgctctgtcaaattctctgtaacattagagttatactaaaacattaagtttgctttcgaaataataaaaacatttataatacagagatggtttattt

SEQ ID NO: 33704 - DNA, 1837 bp, Zea Mays
gattatgcctttctagcacctcctggccaccaaagaagcaaaaatcttccaggttcccacccacacggccacacccactgttctacatgctcatgcatcctcctaatgtaacctgaagctttaagaaaacaaagtgctcccggaagactccaagctgcagctaccggccttcctctcccccattccaattccgagaacaggggcggcggagtcaaccagtggtaagcaggtacgatgtgctcggtagcgaggctggcgtttgtgcttgcactggccatagccgcctcgtcaattgaggttgcggagagcagagattttaatatctttgctcagggcagcttgcctgatgcaaccaagggatcgtctggtctagctgcaaccagtggaaagttgtgtcagttatgcgagcagtactcatccgaggcgctcctctatctcacacaaaacgagacccagactgagattcttagcattctacaccatgaatgtgccagccttgcccctctcaaacagcagtgcatcacgctggttgactactacgtaccccttttcttcttggaggtctccatggttacccctgagaagttctgcgagtcgatgcatctctgcaagaaggggatgaagattagcctacccacccgggagggtacttgtggtttgtgccaccatgttgttgttgaaattcttatcatgcttaaagaccccaacatgcagctggaagtaatcgacctactcaccaaaacatgcagcaaggcgcagaactatgaacagtaggtgagctaagttcaagaaagggaacctcagatgtgctatgagtgcacggggctatattcaatggtatctgagaacaaaaaaaaacagcgagaattgagaaaccttgaactgattgagcacttcagaaagtgaatacttacaaactagaccaacctaggtgacattttattttatttaaatacaaaataggcatctaaatatttacatcaaagagaacttgaacctagattgtctaggcacgcatccatgcctcgaccaactgagctagttcggctttctaattttagctgtttattccaatctgcctaaagatatatgaagttaggctgttgctgatgcctgcaccctgcagaactgtatcttaagttaggttgttgctgatgcctgcaccctgcaggtttgtgcaaaatactccatatacagaacagggggtctctttctttgaaatctgatgtttgctacctctgttatcttctgttcataacattcttcttttcatccctcagtgcaagcggctggtcctcaagtatattccacttattctggtgaagggccagaaattccttgagacaacggatgtctgctctgtgatacatgcatgcaaagcaggcacacaagcatcaatggaagccatgcctctgtctgccatgttgtgaaggtgatgcgaatcagaataaggcttatttgcctaggagatcaaattggggagaaacgatgaaaagtcagatgactgttttaagctctcttcctctattgctgaaacactattgatcggtgaaaattcggctgtgtaaaaatcttgtgtaaatttgggggtatatccattgtttctctgaagtatacagcaactgcagctacatcaatctcttcggcattgggttgagaagttctaagcagtaattgcattttactgtatcatctatttgtttgtaactactgggagttattaattccttgtttctctgttgctctgtcaaattctctgtaacattagagttatactaaaacattaagtttgctttcgaaataataaaaacatttataatacagagatggtttattt

SEQ ID NO: 33705 - DNA, 1322 bp, Zea Mays
gaaaagattatgcctttctagcacctcctggccaccaaagaagcaaaaatcttccaggttcccacccacacggccacacccactgttctacatgctcatgcatcctcctaatgtaacctgaagctttaagaaaacaaagtgctcccggaagactccaagctgcagctaccggccttcctctcccccattccaattccgagaacaggggcggcggagtcaaccaggtacgatgtgctcggtagcgaggctggcgtttgtgcttgcactggccatagccgcctcgtcaattgaggttgcggagagcagagattttaatatctttgctcagggcagcttgcctgatgcaaccaagggatcgtctggtctagctgcaaccagtggaaagttgtgtcagttatgcgagcagtactcatccgaggcgctcctctatctcacacaaaacgagacccagactgagattcttagcattctacaccatgaatgtgccagccttgcccctctcaaacagcagtgcatcacgctggttgactactacgtaccccttttcttcttggaggtctccatggttacccctgagaagttctgcgagtcgatgcatctctgcaagaaggggatgaagattagcctacccacccgggagggtacttgtggtttgtgccaccatgttgttgttgaaattcttatcatgcttaaagaccccaacatgcagctggaagtaatcgacctactcaccaaaacatgcagcaaggcgcagaactatgaacatgcaagcggctggtcctcaagtatattccacttattctggtgaagggccagaaattccttgagacaacggatgtctgctctgtgatacatgcatgcaaagcaggcacacaagcatcaatggaagccatgcctctgtctgccatgttgtgaaggtgatgcgaatcagaataaggcttatttgcctaggagatcaaattggggagaaacgatgaaaagtcagatgactgttttaagctctcttcctctattgctgaaacactattgatcggtgaaaattcggctgtgtaaaaatcttgtgtaaatttgggggtatatccattgtttctctgaagtatacagcaactgcagctacatcaatctcttcggcattgggttgagaagttctaagcagtaattgcattttactgtatcatctatttgtttgtaactactgggagttattaattccttgtttctctgttgctctgtcaaattctctgtaacattagagttatactaaaacattaagtttgctttcgaaataataaaaacatttataatacagagatggtttattt

SEQ ID NO: 33706 - DNA, 1967 bp, Zea Mays
gttcaaccttaccttgtaagaaaagattatgcctttctagcacctcctggccaccaaagaagcaaaaatcttccaggttcccacccacacggccacacccactgttctacatgctcatgcatcctcctaatgtaacctgaagctttaagaaaacaaagtgctcccggaagactccaagctgcagctaccggccttcctctcccccattccaattccgagaacaggggcggcggagtcaaccaggtgagctgcgtctttaattccccattcatatgttagcttctcctgggctctctgtactaccgtctcccctcggttcttgatttgctgcccagttcgaccccttgtccctgaatccaaggacctccgattcttcggaaccggaagctacctggaaaggaaacgaggggcaaaataaagcgcaaaagcgagcgtaaaatgctttgctaatctgctgcaaaggcgtatttggagtggtgccagaatagtagcagctctgctggcgtggagcgagctgaatctcgtgaatctgttgcctggaatgtggatgcggaccaattggtactatcttggcttgactccaaatacgtgaatctgatggctacatcttgaagcgaactgaattcttcagttacgtcgggctgaatgaatctgaaacttctactgatccgttacatgacgtagagagagggccctaggatacatttcctttctcttttttttttggttaccttttggctttatggagaagctttgagcaagccagcttttctgcgtccatcagccacagctgatttcactgcgatagttttcttcaagcagtagttttgttcctgtcaactgaccaactggtagtggtaagcaggtacgatgtgctcggtagcgaggctggcgtttgtgcttgcactggccatagccgcctcgtcaattgaggttgcggagagcagagattttaatatctttgctcagggcagcttgcctgatgcaaccaagggatcgtctggtctagctgcaaccagtggaaagttgtgtcagttatgcgagcagtactcatccgaggcgctcctctatctcacacaaaacgagacccagactgagattcttagcattctacaccatgaatgtgccagccttgcccctctcaaacagcagtgcatcacgctggttgactactacgtaccccttttcttcttggaggtctccatggttacccctgagaagttctgcgagtcgatgcatctctgcaagaaggggatgaagattagcctacccacccgggagggtacttgtggtttgtgccaccatgttgttgttgaaattcttatcatgcttaaagaccccaacatgcagctggaagtaatcgacctactcaccaaaacatgcagcaaggcgcagaactatgaacagtagtgcaagcggctggtcctcaagtatattccacttattctggtgaagggccagaaattccttgagacaacggatgtctgctctgtgatacatgcatgcaaagcaggcacacaagcatcaatggaagccatgcctctgtctgccatgttgtgaaggtgatgcgaatcagaataaggcttatttgcctaggagatcaaattggggagaaacgatgaaaagtcagatgactgttttaagctctcttcctctattgctgaaacactattgatcggtgaaaattcggctgtgtaaaaatcttgtgtaaatttgggggtatatccattgtttctctgaagtatacagcaactgcagctacatcaatctcttcggcattgggttgagaagttctaagcagtaattgcattttactgtatcatctatttgtttgtaactactgggagttattaattccttgtttctctgttgctctgtcaaattctctgtaacattagagttatactaaaacattaagtttgctttcgaaataataaaaacatttataatacagagatggtttattt

SEQ ID NO: 33707 - DNA, 2189 bp, Zea Mays
atcagttcaaccttaccttgtaagaaaagattatgcctttctagcacctcctggccaccaaagaagcaaaaatcttccaggttcccacccacacggccacacccactgttctacatgctcatgcatcctcctaatgtaacctgaagctttaagaaaacaaagtgctcccggaagactccaagctgcagctaccggccttcctctcccccattccaattccgagaacaggggcggcggagtcaaccaggtacgatgtgctcggtagcgaggctggcgtttgtgcttgcactggccatagccgcctcgtcaattgaggttgcggagagcagagattttaatatctttggtaagctttcaatctactgatttttgctccttactctctttattctttgttgaatgttgatccatagcagtgaattatcaggtctagtgatagtttcttttcgatggagatctcgtgatagtttcaattagtttatctaaattccttctttgtttgacaagttcgtatcttcatttagtccggtgacatgttaaagaaagcaattacgtctaagccatcagttctactcaatgtagagggcgtagcttcagcttagctgctattcctcacaggaactcaagtttttctgaagttttgcatttctggccaatcctttcttctgtcttcaattcagctcagggcagcttgcctgatgcaaccaagggatcgtctggtctagctgcaaccagtggaaagttgtgtcagttatgcgagcagtactcatccgaggcgctcctctatctcacacaaaacgagacccagactgagattcttagcattctacaccatgaatgtgccagccttgcccctctcaaacagcagtgcatcacgctggttgactactacgtaccccttttcttcttggaggtctccatggttacccctgagaagttctgcgagtcgatgcatctctgcaagaaggggatgaagattagcctacccacccgggagggtacttgtggtttgtgccaccatgttgttgttgaaattcttatcatgcttaaagaccccaacatgcagctggaagtaatcgacctactcaccaaaacatgcagcaaggcgcagaactatgaacagtaggtgagctaagttcaagaaagggaacctcagatgtgctatgagtgcacggggctatattcaatggtatctgagaacaaaaaaaaacagcgagaattgagaaaccttgaactgattgagcacttcagaaagtgaatacttacaaactagaccaacctaggtgacattttattttatttaaatacaaaataggcatctaaatatttacatcaaagagaacttgaacctagattgtctaggcacgcatccatgcctcgaccaactgagctagttcggctttctaattttagctgtttattccaatctgcctaaagatatatgaagttaggctgttgctgatgcctgcaccctgcagaactgtatcttaagttaggttgttgctgatgcctgcaccctgcaggtttgtgcaaaatactccatatacagaacagggggtctctttctttgaaatctgatgtttgctacctctgttatcttctgttcataacattcttcttttcatccctcagtgcaagcggctggtcctcaagtatattccacttattctggtgaagggccagaaattccttgagacaacggatgtctgctctgtgatacatgcatgcaaagcaggcacacaagcatcaatggaagccatgcctctgtctgccatgttgtgaaggtgatgcgaatcagaataaggcttatttgcctaggagatcaaattggggagaaacgatgaaaagtcagatgactgttttaagctctcttcctctattgctgaaacactattgatcggtgaaaattcggctgtgtaaaaatcttgtgtaaatttgggggtatatccattgtttctctgaagtatacagcaactgcagctacatcaatctcttcggcattgggttgagaagttctaagcagtaattgcattttactgtatcatctatttgtttgtaactactgggagttattaattccttgtttctctgttgctctgtcaaattctctgtaacattagagttatactaaaacattaagtttgctttcgaaataataaaaacatttataatacagagatggtttattt

SEQ ID NO: 33708 - DNA, 1860 bp, Zea Mays
caaccatcagttcaaccttaccttgtaagaaaagattatgcctttctagcacctcctggccaccaaagaagcaaaaatcttccaggttcccacccacacggccacacccactgttctacatgctcatgcatcctcctaatgtaacctgaagctttaagaaaacaaagtgctcccggaagactccaagctgcagctaccggccttcctctcccccattccaattccgagaacaggggcggcggagtcaaccaggtacgatgtgctcggtagcgaggctggcgtttgtgcttgcactggccatagccgcctcgtcaattgaggttgcggagagcagagattttaatatctttgctcagggcagcttgcctgatgcaaccaagggatcgtctggtctagctgcaaccagtggaaagttgtgtcagttatgcgagcagtactcatccgaggcgctcctctatctcacacaaaacgagacccagactgagattcttagcattctacaccatgaatgtgccagccttgcccctctcaaacagcagtgcatcacgctggttgactactacgtaccccttttcttcttggaggtctccatggttacccctgagaagttctgcgagtcgatgcatctctgcaagaaggggatgaagattagcctacccacccgggagggtacttgtggtttgtgccaccatgttgttgttgaaattcttatcatgcttaaagaccccaacatgcagctggaagtaatcgacctactcaccaaaacatgcagcaaggcgcagaactatgaacagtaggtgagctaagttcaagaaagggaacctcagatgtgctatgagtgcacggggctatattcaatggtatctgagaacaaaaaaaaacagcgagaattgagaaaccttgaactgattgagcacttcagaaagtgaatacttacaaactagaccaacctaggtgacattttattttatttaaatacaaaataggcatctaaatatttacatcaaagagaacttgaacctagattgtctaggcacgcatccatgcctcgaccaactgagctagttcggctttctaattttagctgtttattccaatctgcctaaagatatatgaagttaggctgttgctgatgcctgcaccctgcagaactgtatcttaagttaggttgttgctgatgcctgcaccctgcaggtttgtgcaaaatactccatatacagaacagggggtctctttctttgaaatctgatgtttgctacctctgttatcttctgttcataacattcttcttttcatccctcagtgcaagcggctggtcctcaagtatattccacttattctggtgaagggccagaaattccttgagacaacggatgtctgctctgtgatacatgcatgcaaagcaggcacacaagcatcaatggaagccatgcctctgtctgccatgttgtgaaggtgatgcgaatcagaataaggcttatttgcctaggagatcaaattggggagaaacgatgaaaagtcagatgactgttttaagctctcttcctctattgctgaaacactattgatcggtgaaaattcggctgtgtaaaaatcttgtgtaaatttgggggtatatccattgtttctctgaagtatacagcaactgcagctacatcaatctcttcggcattgggttgagaagttctaagcagtaattgcattttactgtatcatctatttgtttgtaactactgggagttattaattccttgtttctctgttgctctgtcaaattctctgtaacattagagttatactaaaacattaagtttgctttcgaaataataaaaacatttataatacagagatggtttattt

SEQ ID NO: 33709 - DNA, 1187 bp, Zea Mays
tggatactgtgtcttgcaacatcatgatatctaggtatgtgaatgaagggtgcaccctgatggcgctgtggtttttccgtgacatggcaagccggggtattgttgttgatcagtatacggctgttgctctgctcacttgttgtgggcgcctgaagaataagattattgggaggtctgtcctggcgcactgaccttatgagcatttgaagacgcagaaattactcatgttgacgataaagtagatcctattagagacatggaaactattagtgaagagctcagactaaagttttcattggattttgttgatttacaagatcagttgtacaacacttaaaccttttttcgacactattttgtttctattttctgcaggatatagagttcatgaaaaagaaacttaaggaccttggtaagccaatgaagaggagcaatgataagctgctcaaaattgagcatgaattatgtgagaggattgatccagcataatgtcgaggagactggagactaaacttggaggtgctactgaaggatgtgactttgagtcaaagggtaaaagtgataatgagatgtgtgtgttgtattttcattcctcgggacaataatgttatttgtaggtagaagttattgtacatatgttatgtgttttctgcctgatcgtcgtttatgcttgcctcttaaagtaacaagtagcacatggagagcttgaattgaattcaagcttggatatgattggaaaatatttgtattagatcacctagaagggtgattgatgcttgttattggccaagcagtagtgtagcgggaagagaattcacattgcgtgaaatcatgttgatagctaagaggtggaagttgaagtaagccgggaagggtgaggtattgggaactgtggcatttaaagttcagtaagcagcagtaaaatgtagtggtgtggtcgtgtatatatgatgtgcacattttgaactcagacattctttattgagtgctgctagaattacattgagctccctccacttctgatacttgcctggttttgtgtcaattggatctgtttgtctgtcctcaccactgttgtctgtttttgctaatttgggcattatctatgacagaagaagaacgattatgaattattgattaaattgaacagaatattgttctaagaacaaaaacagattatttcactg

SEQ ID NO: 33710 - DNA, 2393 bp, Zea Mays
tatatatctactacttattaagacactaagagtagcctgtcgttctgccttcgatcgatctcgaccgtccacgtccggctcgctcgttcctcccatctgctcaaccgtccgcccacacgaactcgtcggttcgtcacctcattctcgacgcccaccttgcttccacgccctcacaaaactcacggaggccattgtcatcggcgcccttccgcctcatcctttccacgcccactactcttgccccctcccacgacctcaactctgccatggcacctcttcacgaagtattcctcctccacgacgcccttgccctccagtggtcgacgcctccacctcgagcacacctgcctcatgcccgcggcctaatctgctcaactgagggagagcgaggtggtggtagcacgtcgacaattcggtcgggagtcgacactcgggcttggggtatcgtctcgcttgcccgtagcccctttgcttcttgccatccggcttctcggcggcggagaagaggaggggaatggcgcaccgactgttgtgggacgtgcaggcgaacgggtgggagcgatcaaatttcaccatcgtctgcgagtcatgcctcggcgacaaaccctacgtccagatgatatagagttcatgaaaaagaaacttaaggaccttggtaagccaatgaagaggagcaatgataagctgctcaaaattgagcatgaattatgtgagaggattgatccagcataatgtcgaggagactggagactaaacttggaggtgctactgaaggatgtgactttgagtcaaagggtaaaagtgataatgagatgtgtgtgttgtattttcattcctcgggacaataatgttatttgtaggtagaagttattgtacatatgttatgtgttttctgcctgatcgtcgtttatgcttgcctcttaaagtaacaagtagcacatggagagcttgaattgaattcaagcttggatatgattggaaaatatttgtattagatcacctagaagggtgattgatgcttgttattggccaagcaggtaggtatcacatttgtctttcttttgttgttgtaggttttttagttgtaactgtcttttgtgttgcttgtttgaatctgggctggaagaaaaaggtgcaaaattgaatatgaattggtcttggaaaattcaaacacattgattttaaatattatgagatccttatgtttcttgttctttagaacaactgcatcctatatgattactcatatgggctttagtttcaagtggattatgtaattcttttgtttcagttcactgctgcacatcttaacatgactgcattgtgggctacaatatgtctctcttcatgctttggtgatgaacatttgacgcttagtttcataatagaagtattgtattaaacatataaggtagtgagtgaaccagctctttagttgtctactgccatgagtgtaatgactatctctgctaattcttagtttggtggtacagtggtactatccgatttcatagtgtaactttgatttaacagagatatatatgtctgcatgagacctatttaactgagccagtactagacacatgtaataggcatctacatgtgttgtcactcgacaaccgtaaatgattagtgaatttaaaataactgactctacatatgccatatgggctttgtagtagtgagattcgatgttccctgaaacaatatgcactttatgtagcttttgaatgatgattccttccatttgcagacaataggtagtcagatgaagattgtaaaaaacaagcatgctcaacccttcaagaatacacagtttgagcttgaatttggaaaggggatatgccacaattcagagttttttgaacagaatttctagagcagttgttcctataaaataatattttaggtcttgaagccaccaccgttggattgacatgatctgtggtattctggtgatctcattatagcagacttcatttcttattgtgcttatacagtagtgtagcgggaagagaattcacattgcgtgaaatcatgttgatagctaagaggtggaagttgaagtaagccgggaagggtgaggtattgggaactgtggcatttaaagttcagtaagcagcagtaaaatgtagtggtgtggtcgtgtatatatgatgtgcacattttgaactcagacattctttattgagtgctgctagaattacattgagctccctccacttctgatacttgcctggttttgtgtcaattggatctgtttgtctgtcctcaccactgttgtctgtttttgctaatttgggcattatctatgacagaagaagaacgattatgaattattgattaaattgaacagaatattgttctaagaacaaaaacagattatttcactg

SEQ ID NO: 33711 - DNA, 3536 bp, Zea Mays
tatatatctactacttattaagacactaagagtagcctgtcgttctgccttcgatcgatctcgaccgtccacgtccggctcgctcgttcctcccatctgctcaaccgtccgcccacacgaactcgtcggttcgtcacctcattctcgacgcccaccttgcttccacgccctcacaaaactcacggaggccattgtcatcggcgcccttccgcctcatcctttccacgcccactactcttgccccctcccacgacctcaactctgccatggcacctcttcacgaagtattcctcctccacgacgcccttgccctccagtggtcgacgcctccacctcgagcacacctgcctcatgcccgcggcctaatctgctcaactgagggagagcgaggtggtggtagcacgtcgacaattcggtcgggagtcgacactcgggcttggggtatcgtctcgcttgcccgtagcccctttgcttcttgccatccggcttctcggcggcggagaagaggaggggaatggcgcaccgactgttgtgggacgtgcaggcgaacgggtgggagcgatcaaatttcaccatcgtctgcgagtcatgcctcggcgacaaaccctacgtccagatggatacagaggagatgcggtttcagggtttgaacgttactaattatgcttctcttgtcatgatgggggactatgggaagtcaatcaaagatctggccctcgctcgcatccctactgtcagtgagagggggttctaggtgatggctaatgccctggtcctaaagaagcttaggcatatgactattgtctcctacccgggactcatggatcttgctcttgcatctgttgccaagtttagcccaagtttgaggcttgttaacctcaagaagtgcagcaaggtctcagacggatgtctgaaggaatttacataatcatctaaggcctggagagtttgcagatcgaggaatgcagcaaggttactcttacgggcattattgctttcttcctcaactgcagcccaaagttcaagtccctctctctgtccaagtgcatcgagatcaaggacatatgctctgcatctgcacagcttccagtatgcaaatcgcttcggtccctggccatcaaggattgctcaggcttcaccgacaccagccttcctatggtgggcatgttctgtcctcagctggagaacatcaatttgagtggccttagtgcaatcaccgacaatggcttccttccactaatgaagagctcggacagtgggctggtcgacattgatttgaacagctgcgagaatctcacggtcacgaacgcggctgtttctgccttggttaaggcccatgacgcttcccttgccacctcagtctcgagggatgcagcaagatcactgatgcaagcctgttcgccatctgtgagagctgcagccagctcatcgagctcggcctttcgaactgcatggtcagtgactacaacgtcgcggtcttggaagcgacgaagcagctcaggctgtgtgtcctcttgctgtgtggctgtatgaaggtcacccagaagagcgtgagcttgaagcccttcatcaaacgtttctaagagcatttgaagacgcagaaattactcatgttgacgataaagtagatcctattagagacatggaaactattagtgaagagctcagactaaagttttcattggattttgttgatttacaagatcagttgtacaacacttaaaccttttttcgacactattttgtttctattttctgcaggatatagagttcatgaaaaagaaacttaaggaccttggtaagccaatgaagaggagcaatgataagctgctcaaaattgagcatgaattatgtgagaggattgatccagcataatgtcgaggagactggagactaaacttggaggtgctactgaaggatgtgactttgagtcaaagggtaaaagtgataatgagatgtgtgtgttgtattttcattcctcgggacaataatgttatttgtaggtagaagttattgtacatatgttatgtgttttctgcctgatcgtcgtttatgcttgcctcttaaagtaacaagtagcacatggagagcttgaattgaattcaagcttggatatgattggaaaatatttgtattagatcacctagaagggtgattgatgcttgttattggccaagcaggtaggtatcacatttgtctttcttttgttgttgtaggttttttagttgtaactgtcttttgtgttgcttgtttgaatctgggctggaagaaaaaggtgcaaaattgaatatgaattggtcttggaaaattcaaacacattgattttaaatattatgagatccttatgtttcttgttctttagaacaactgcatcctatatgattactcatatgggctttagtttcaagtggattatgtaattcttttgtttcagttcactgctgcacatcttaacatgactgcattgtgggctacaatatgtctctcttcatgctttggtgatgaacatttgacgcttagtttcataatagaagtattgtattaaacatataaggtagtgagtgaaccagctctttagttgtctactgccatgagtgtaatgactatctctgctaattcttagtttggtggtacagtggtactatccgatttcatagtgtaactttgatttaacagagatatatatgtctgcatgagacctatttaactgagccagtactagacacatgtaataggcatctacatgtgttgtcactcgacaaccgtaaatgattagtgaatttaaaataactgactctacatatgccatatgggctttgtagtagtgagattcgatgttccctgaaacaatatgcactttatgtagcttttgaatgatgattccttccatttgcagacaataggtagtcagatgaagattgtaaaaaacaagcatgctcaacccttcaagaatacacagtttgagcttgaatttggaaaggggatatgccacaattcagagttttttgaacagaatttctagagcagttgttcctataaaataatattttaggtcttgaagccaccaccgttggattgacatgatctgtggtattctggtgatctcattatagcagacttcatttcttattgtgcttatacagtagtgtagcgggaagagaattcacattgcgtgaaatcatgttgatagctaagaggtggaagttgaagtaagccgggaagggtgaggtattgggaactgtggcatttaaagttcagtaagcagcagtaaaatgtagtggtgtggtcgtgtatatatgatgtgcacattttgaactcagacattctttattgagtgctgctagaattacattgagctccctccacttctgatacttgcctggttttgtgtcaattggatctgtttgtctgtcctcaccactgttgtctgtttttgctaatttgggcattatctatgacagaagaagaacgattatgaattattgattaaattgaacagaatattgttctaagaacaaaaacagattatttcactg

SEQ ID NO: 33712 - DNA, 1430 bp, Zea Mays
tatatatctactacttattaagacactaagagtagcctgtcgttctgccttcgatcgatctcgaccgtccacgtccggctcgctcgttcctcccatctgctcaaccgtccgcccacacgaactcgtcggttcgtcacctcattctcgacgcccaccttgcttccacgccctcacaaaactcacggaggccattgtcatcggcgcccttccgcctcatcctttccacgcccactactcttgccccctcccacgacctcaactctgccatggcacctcttcacgaagtattcctcctccacgacgcccttgccctccagtggtcgacgcctccacctcgagcacacctgcctcatgcccgcggcctaatctgctcaactgagggagagcgaggtggtggtagcacgtcgacaattcggtcgggagtcgacactcgggcttggggtatcgtctcgcttgcccgtagcccctttgcttcttgccatccggcttctcggcggcggagaagaggaggggaatggcgcaccgactgttgtgggacgtgcaggcgaacgggtgggagcgatcaaatttcaccatcgtctgcgagtcatgcctcggcgacaaaccctacgtccagatgatatagagttcatgaaaaagaaacttaaggaccttggtaagccaatgaagaggagcaatgataagctgctcaaaattgagcatgaattatgtgagaggattgatccagcataatgtcgaggagactggagactaaacttggaggtgctactgaaggatgtgactttgagtcaaagggtaaaagtgataatgagatgtgtgtgttgtattttcattcctcgggacaataatgttatttgtaggtagaagttattgtacatatgttatgtgttttctgcctgatcgtcgtttatgcttgcctcttaaagtaacaagtagcacatggagagcttgaattgaattcaagcttggatatgattggaaaatatttgtattagatcacctagaagggtgattgatgcttgttattggccaagcagtagtgtagcgggaagagaattcacattgcgtgaaatcatgttgatagctaagaggtggaagttgaagtaagccgggaagggtgaggtattgggaactgtggcatttaaagttcagtaagcagcagtaaaatgtagtggtgtggtcgtgtatatatgatgtgcacattttgaactcagacattctttattgagtgctgctagaattacattgagctccctccacttctgatacttgcctggttttgtgtcaattggatctgtttgtctgtcctcaccactgttgtctgtttttgctaatttgggcattatctatgacagaagaagaacgattatgaattattgattaaattgaacagaatattgttctaagaacaaaaacagattatttcactg

SEQ ID NO: 33713 - DNA, 1083 bp, Zea Mays
gtccgtcagttatttctcttcctcctccaaaccaccgatgtcgctaccggttctatccctgcgctgccattgctcgtccgcatcctccttggatttccctcccagggttttctgatgcgctcatacatggggcagcaagaagatgggatgtctgatggcttgtacacttacaagcatcaccgcgagcgaggagctgatatccacaccatctttgtgaagaagagcaaattcaggattctgctgtcatttatcggcacaacgttccttcttgtgtctgtttgctgcgccctgttatcgaaggatggtttatgtctttgttccctttggagcatttcatttgccagtgtaattgcgaaatgcctgcgatgtgaccctgtgaagaaagagtcattggtgatcatgccgacttttggaattcaattagagcaacacttttggagtggaagagttcatcgcaaatttgtgcccattggcaagattctaagaccagtgctgaatgagcatgtgacccctgtctcatgctactggagcttggccttgcttgtacgcgaagaatatgagctcatgcttgttttcaagagcttgaatccaccagtcaagatgttggttccaatctggaaagcgttatgtgcattcgtagactccaatacgctgggcaattctgcattgcctcaatccacatgattacatgaacatgcttaaacaagttggtggctgtgtgcagccctgatgataattcgaacatatggttcgctgaagactttgctgactgacaacataatgtttagtttcgatacaaatgatgatggaatgtacggaatgttaccgacactggggctattacgtctcacgtggagtgtgaattgtgaaaggatcgtgatgcttaagagtggatgaattgagattctctaaaaaactctttcgataattaagtcctaattgcaagcttaatcaaaagttttgcaccctaatctttaaccttgtactatcaatggcaattctacaaaatgtaaatttttgaagtaaattactcaatagtcatgcatagtaatacaagggttagaaaactcctcgatgtttttt

SEQ ID NO: 33714 - DNA, 1048 bp, Zea Mays
gtccgtcagttatttctcttcctcctccaaaccaccgatgtcgctaccggttctatccctgcgctgccattgctcgtccgcatcctccttggatttccctcccaggctgatgtgagctgtgcaggaaggttagggttttctgatgcgctcatacatggggcagcaagaagatgggatgtctgatggcttgtacacttacaagcatcaccgcgagcgaggagctgatatccacaccatctttgtgaagaagagcaaattcaggattctgctgtcatttatcggcacaacgttccttcttgtgtctgtttgctgcgccctgttatcgaagtgctgcaaaagagagagaaaaattacatttcttggtatccatgttgaaaatgagtacaggaaagttccgtttcacagtggaagagttcatcgcaaatttgtgcccattggcaagattctaagaccagtgctgaatgagcatgtgacccctgtctcatgctactggagcttggccttgcttgtacgcgaagaatatgagctcatgcttgttttcaagagcttgaatccaccagtcaagatgttggttccaatctggaaagcgttatgtgcattcgtagactccaatacgctgggcaattctgcattgcctcaatccacatgattacatgaacatgcttaaacaagttggtggctgtgtgcagccctgatgataattcgaacatatggttcgctgaagactttgctgactgacaacataatgtttagtttcgatacaaatgatgatggaatgtacggaatgttaccgacactggggctattacgtctcacgtggagtgtgaattgtgaaaggatcgtgatgcttaagagtggatgaattgagattctctaaaaaactctttcgataattaagtcctaattgcaagcttaatcaaaagttttgcaccctaatctttaaccttgtactatcaatggcaattctacaaaatgtaaatttttgaagtaaattactcaatagtcatgcatagtaatacaagggttagaaaactcctcgatgtttttt

SEQ ID NO: 33715 - DNA, 1053 bp, Zea Mays
gtccgtcagttatttctcttcctcctccaaaccaccgatgtcgctaccggttctatccctgcgctgccattgctcgtccgcatcctccttggatttccctcccagcaagaagatgggatgtctgatggcttgtacacttacaagcatcaccgcgagcgaggagctgatatccacaccatctttgtgaagaagagcaaattcaggattctgctgtcatttatcggcacaacgttccttcttgtgtctgtttgctgcgccctgttatcgaaggatggtttatgtctttgttccctttggagcatttcatttgccagtgtaattgcgaaatgcctgcgatgtgaccctgtgaagaaagagtcattggtgatcatgccgacttttggaattcaattagagcaacacttttggagtggaagagttcatcgcaaatttgtgcccattggcaagattctaagaccagtgctgaatgagcatgtgacccctgtctcatgctactggagcttggccttgcttgtacgcgaagaatatgagctcatgcttgttttcaagagcttgaatccaccagtcaagatgttggttccaatctggaaagcgttatgtgcattcgtagactccaatacgctgggcaattctgcattgcctcaatccacatgattacatgaacatgcttaaacaagttggtggctgtgtgcagccctgatgataattcgaacatatggttcgctgaagactttgctgactgacaacataatgtttagtttcgatacaaatgatgatggaatgtacggaatgttaccgacactggggctattacgtctcacgtggagtgtgaattgtgaaaggatcgtgatgcttaagagtggatgaattgagattctctaaaaaactctttcgataattaagtcctaattgcaagcttaatcaaaagttttgcaccctaatctttaaccttgtactatcaatggcaattctacaaaatgtaaatttttgaagtaaattactcaatagtcatgcatagtaatacaagggttagaaaactcctcgatgtttttt

SEQ ID NO: 33716 - DNA, 1029 bp, Zea Mays
gtccgtcagttatttctcttcctcctccaaaccaccgatgtcgctaccggttctatccctgcgctgccattgctcgtccgcatcctccttggatttccctcccaggaaggttagggttttctgatgcgctcatacatggggcagcaagaagatgggatgtctgatggcttgtacacttacaagcatcaccgcgagcgaggagctgatatccacaccatctttgtgaagaagagcaaattcaggattctgctgtcatttatcggcacaacgttccttcttgtgtctgtttgctgcgccctgttatcgaagtgctgcaaaagagagagaaaaattacatttcttggtatccatgttgaaaatgagtacaggaaagttccgtttcacagtggaagagttcatcgcaaatttgtgcccattggcaagattctaagaccagtgctgaatgagcatgtgacccctgtctcatgctactggagcttggccttgcttgtacgcgaagaatatgagctcatgcttgttttcaagagcttgaatccaccagtcaagatgttggttccaatctggaaagcgttatgtgcattcgtagactccaatacgctgggcaattctgcattgcctcaatccacatgattacatgaacatgcttaaacaagttggtggctgtgtgcagccctgatgataattcgaacatatggttcgctgaagactttgctgactgacaacataatgtttagtttcgatacaaatgatgatggaatgtacggaatgttaccgacactggggctattacgtctcacgtggagtgtgaattgtgaaaggatcgtgatgcttaagagtggatgaattgagattctctaaaaaactctttcgataattaagtcctaattgcaagcttaatcaaaagttttgcaccctaatctttaaccttgtactatcaatggcaattctacaaaatgtaaatttttgaagtaaattactcaatagtcatgcatagtaatacaagggttagaaaactcctcgatgtttttt

SEQ ID NO: 33717 - DNA, 1523 bp, Zea Mays
atttcagactgcaagggtgttgtggcaaatagcacacacatggagtggctctgggcctaaaagccaatcgacggtccagacgtatagattgtacaagcctttggagacatcgtgtccgtcagttatttctcttcctcctccaaaccaccgatgtcgctaccggttctatccctgcgctgccattgctcgtccgcatcctccttggatttccctcccaggtacgcctactccatgcgcacgcattcctattccgattcctgcacattccgtggaccgatttggaaaagctgaactggtacatagcgtatctttctctcaccagtctgctgacggtgatgtttataagcgaatctgtactcatatagatttcttgtcttcttacatcgtcaactgtccagctagagatttctgttttcttagatatcttctgtcttcttaaggggagacgaggagggcgcataaaattcacaagaactgtttttgatagattcacaatttgccgtctgagcatgcgaaggctgatgtgagctgtgcaggaaggttagggttttctgatgcgctcatacatggggcagcaagaagatgggatgtctgatggcttgtacacttacaagcatcaccgcgagcgaggagctgatatccacaccatctttgtgaagaagagcaaattcaggattctgctgtcatttatcggcacaacgttccttcttgtgtctgtttgctgcgccctgttatcgaaggatggtttatgtctttgttccctttggagcatttcatttgccagtgtaattgcgaaatgcctgcgatgtgaccctgtgaagaaagagtcattggtgatcatgccgacttttggaattcaattagagcaacacttttggagtggaagagttcatcgcaaatttgtgcccattggcaagattctaagaccagtgctgaatgagcatgtgacccctgtctcatgctactggagcttggccttgcttgtacgcgaagaatatgagctcatgcttgttttcaagagcttgaatccaccagtcaagatgttggttccaatctggaaagcgttatgtgcattcgtagactccaatacgctgggcaattctgcattgcctcaatccacatgattacatgaacatgcttaaacaagttggtggctgtgtgcagccctgatgataattcgaacatatggttcgctgaagactttgctgactgacaacataatgtttagtttcgatacaaatgatgatggaatgtacggaatgttaccgacactggggctattacgtctcacgtggagtgtgaattgtgaaaggatcgtgatgcttaagagtggatgaattgagattctctaaaaaactctttcgataattaagtcctaattgcaagcttaatcaaaagttttgcaccctaatctttaaccttgtactatcaatggcaattctacaaaatgtaaatttttgaagtaaattactcaatagtcatgcatagtaatacaagggttagaaaactcctcgatgtttttt

SEQ ID NO: 33718 - DNA, 1004 bp, Zea Mays
agttgatttaagtatctttaaataatggaactcctaactctacaccaaatgctagtggaggtacaaagagtagcaagaaatcgggtgggcagaagaaatcattggaagcagcaggctctatgcaaccttcaagcaaaaagcagaagacatctggaggctcccaggaacaaagtatcgatgaactaaatgatgtcacagccgctagtggtgttaatattagggctgatggcagtggtgctacagaattggaaaaagaaaaagaagaaagtcgcccaaagaacgtcaagcccaacaaggaagaagatgataaaatgagggcgaatgctgcaaacgtcgctgcccggcaagcagttggaggaagtgatatgctctcaaagtggcagttgatggctgagcaagccagacagaagcgagaaggcattgatgtgtctgctgcttcacagccaggcagagggccaggttccaggcaattatccaaatttgggaaaggtcctggtgagcacccagaaggttcaaagaggagccattcgatggcattcggaactggaggcatgaaaagacccggcaggacagcgtttgctggtccacagcgattgatctccgtgaaggatgtcatttgtgcccttgagagggagcctcagatgacaaaatcaaggctaatctaccggctgcacgagcgattgcctgtagattctaccgtagattagaccggaatagtcatatactttattgtgggcatgcccaattgcccttgcatggtattgaacagcgaagaagcatacccgccactcccatttgttgtgctttggagcggcactgtatattggtgtaaaatttgtatcgcaaaggcggcgaattaccagcaaaaaagggtttctgtacaaaattcactgtaagcggggtctggcatttgccttttctgcaaccacgtctgtgaggttatttctagcagactactcatctcaatatctatatttttaagggttaattagatttttgccatt

SEQ ID NO: 33719 - DNA, 1827 bp, Zea Mays
aaacataatactataatagacacatgtgcttcatcattaccaacgaaaagtgcatgacaaataaacaaaatcaagcgtaatgaagtcaacaaagatgatttcttaagagttatcaggaatattgttggggatcaaatgctcaagcaggcagctcataaagtttttgtacagatgcaagcacaggcgcaaagaaatagccaggcaaattcaagtcagcagtctttattctctcaactttctgcacagcagatggcttccagtggttcagcacagttacatgatcagaaaattcggccacctggaccacccaaccaaggccagaaaaaccaggtgtcatcttcacctcaggcttttgcaccaccatcaggcacccaaccgcagaatagtgtacactatcttgctcatgataaccctaaccaaaaccctgatgcaaagggaacaaatgttgtaccaaatcaaccatctagaatgaacacatcagttccattgcaaacaaagaacaaacagcatcaaccaacacagttgcagcaggcctcacaacaaatatatggagcaagtaatcctggtgcccaggcttaccctcggtcaatcactggttctcttagatcaccgagtcttgttccagaaacacagccatccatgcatgctcctggaatggctcctgcaaaaatggttcctcctcctactcatccaatgatgcagcacaatgcaactgcatggcaaatgcatcaaaacagggaattgaaaactaacgctccccctccaaatgctaatatgaagcaaaattctgaatctgttggcaaagtacgcatggctggcacaggaaattcttcagctaaaggaaagcagggaactcctaactctacaccaaatgctagtggaggtacaaagagtagcaagaaatcgggtgggcagaagaaatcattggaagcagcaggctctatgcaaccttcaagcaaaaagcagaagacatctggaggctcccaggaacaaagtatcgatgaactaaatgatgtcacagccgctagtggtgttaatattagggctgatggcagtggtgctacagaattggaaaaagaaaaagaagaaagtcgcccaaagaacgtcaagcccaacaaggaagaagatgataaaatgagggcgaatgctgcaaacgtcgctgcccggcaagcagttggaggaagtgatatgctctcaaagtggcagttgatggctgagcaagccagacagaagcgagaaggcattgatgtgtctgctgcttcacagccaggcagagggccaggttccaggcaattatccaaatttgggaaaggtcctggtgagcacccagaaggttcaaagaggagccattcgatggcattcggaactggaggcatgaaaagacccggcaggacagcgtttgctggtccacagcgattgatctccgtgaaggatgtcatttgtgcccttgagagggagcctcagatgacaaaatcaaggctaatctaccggctgcacgagcgattgcctgtagattctaccgtagattagaccggaatagtcatatactttattgtgggcatgcccaattgcccttgcatggtattgaacagcgaagaagcatacccgccactcccatttgttgtgctttggagcggcactgtatattggtgtaaaatttgtatcgcaaaggcggcgaattaccagcaaaaaagggtttctgtacaaaattcactgtaagcggggtctggcatttgccttttctgcaaccacgtctgtgaggttatttctagcagactactcatctcaatatctatatttttaagggttaattagatttttgccatt

SEQ ID NO: 33720 - DNA, 2326 bp, Zea Mays
gttgctcaccttagattgaggcaggccccagcaagttgccctggacaatttagacgatgacagcagcttagttggtgctttgtgctaggatagcagtgctatgtcaaaagctccagatgatcatttgcaagcaactgagcaggaaggaagtgtccattcaagtcaacaagcagggcaacaacatgtgaatacagcagaccagttctcaaaaacagaactaactgaaggttcaaaaattgaacagcctgtccaagtagagcaacagagttcccacctacaacaagcatatccagaaattcaactacagcaggctgaaacagatagcttccagttagctgaaaaagaaacagggtattttggtcaacagagttctgcaggcgccaaggtggatgtagcccagccttcagtagttcagcagaatgcaaagcaaactgttggtcaacaagcatcatctggtacccaggatacaaagaaaggaccatcgataccatttaatatgttaattccaatcctacaggcacatcttgacagagacaaagatatgcagcttcaaactgtttgggcaaaacttaggcgtaatgaagtcaacaaagatgatttcttaagagttatcaggaatattgttggggatcaaatgctcaagcaggcagctcataaagtttttgtacagatgcaagcacaggcgcaaagaaatagccaggcaaattcaagtcagcagtctttattctctcaactttctgcacagcagatggcttccagtggttcagcacagttacatgatcagaaaattcggccacctggaccacccaaccaaggccagaaaaaccaggtgtcatcttcacctcaggcttttgcaccaccatcaggcacccaaccgcagaatagtgtacactatcttgctcatgataaccctaaccaaaaccctgatgcaaagggaacaaatgttgtaccaaatcaaccatctagaatgaacacatcagttccattgcaaacaaagaacaaacagcatcaaccaacacagttgcagcaggcctcacaacaaatatatggagcaagtaatcctggtgcccaggcttaccctcggtcaatcactggttctcttagatcaccgagtcttgttccagaaacacagccatccatgcatgctcctggaatggctcctgcaaaaatggttcctcctcctactcatccaatgatgcagcacaatgcaactgcatggcaaatgcatcaaaacagggaattgaaaactaacgctccccctccaaatgctaatatgaagcaaaattctgaatctgttggcaaagtacgcatggctggcacaggaaattcttcagctaaaggaaagcagggaactcctaactctacaccaaatgctagtggaggtacaaagagtagcaagaaatcgggtgggcagaagaaatcattggaagcagcaggctctatgcaaccttcaagcaaaaagcagaagacatctggaggctcccaggaacaaagtatcgatgaactaaatgatgtcacagccgctagtggtgttaatattagggctgatggcagtggtgctacagaattggaaaaagaaaaagaagaaagtcgcccaaagaacgtcaagcccaacaaggaagaagatgataaaatgagggcgaatgctgcaaacgtcgctgcccggcaagcagttggaggaagtgatatgctctcaaagtggcagttgatggctgagcaagccagacagaagcgagaaggcattgatgtgtctgctgcttcacagccaggcagagggccaggttccaggcaattatccaaatttgggaaaggtcctggtgagcacccagaaggttcaaagaggagccattcgatggcattcggaactggaggcatgaaaagacccggcaggacagcgtttgctggtccacagcgattgatctccgtgaaggatgtcatttgtgcccttgagagggagcctcagatgacaaaatcaaggctaatctaccggctgcacgagcgattgcctgtagattctaccgtagattagaccggaatagtcatatactttattgtgggcatgcccaattgcccttgcatggtattgaacagcgaagaagcatacccgccactcccatttgttgtgctttggagcggcactgtatattggtgtaaaatttgtatcgcaaaggcggcgaattaccagcaaaaaagggtttctgtacaaaattcactgtaagcggggtctggcatttgccttttctgcaaccacgtctgtgaggttatttctagcagactactcatctcaatatctatatttttaagggttaattagatttttgccatt

SEQ ID NO: 33721 - DNA, 2471 bp, Zea Mays
ctttttacagccagcgcgcgtggaggcctcctctcctgagccagcgcgtggagctctcccagacggccgccctcctcagccagctgcccacaacagtcagccgaccggcacagaccagcagccagtgcgagtgtggtgtgcccgtcaagtgcggcaagtgcggcagggcgaccgtcgacgcgggcaccctacgcaagccttcttctccagggcgtcgtttgccagcgacgagcaccaccagtgctatgtcaaaagctccagatgatcatttgcaagcaactgagcaggaaggaagtgtccattcaagtcaacaagcagggcaacaacatgtgaatacagcagaccagttctcaaaaacagaactaactgaaggttcaaaaattgaacagcctgtccaagtagagcaacagagttcccacctacaacaagcatatccagaaattcaactacagcaggctgaaacagatagcttccagttagctgaaaaagaaacagggtattttggtcaacagagttctgcaggcgccaaggtggatgtagcccagccttcagtagttcagcagaatgcaaagcaaactgttggtcaacaagcatcatctggtacccaggatacaaagaaaggaccatcgataccatttaatatgttaattccaatcctacaggcacatcttgacagagacaaagatatgcagcttcaaactgtttgggcaaaacttaggcgtaatgaagtcaacaaagatgatttcttaagagttatcaggaatattgttggggatcaaatgctcaagcaggcagctcataaagtttttgtacagatgcaagcacaggcgcaaagaaatagccaggcaaattcaagtcagcagtctttattctctcaactttctgcacagcagatggcttccagtggttcagcacagttacatgatcagaaaattcggccacctggaccacccaaccaaggccagaaaaaccaggtgtcatcttcacctcaggcttttgcaccaccatcaggcacccaaccgcagaatagtgtacactatcttgctcatgataaccctaaccaaaaccctgatgcaaagggaacaaatgttgtaccaaatcaaccatctagaatgaacacatcagttccattgcaaacaaagaacaaacagcatcaaccaacacagttgcagcaggcctcacaacaaatatatggagcaagtaatcctggtgcccaggcttaccctcggtcaatcactggttctcttagatcaccgagtcttgttccagaaacacagccatccatgcatgctcctggaatggctcctgcaaaaatggttcctcctcctactcatccaatgatgcagcacaatgcaactgcatggcaaatgcatcaaaacagggaattgaaaactaacgctccccctccaaatgctaatatgaagcaaaattctgaatctgttggcaaagtacgcatggctggcacaggaaattcttcagctaaaggaaagcagggaactcctaactctacaccaaatgctagtggaggtacaaagagtagcaagaaatcgggtgggcagaagaaatcattggaagcagcaggctctatgcaaccttcaagcaaaaagcagaagacatctggaggctcccaggaacaaagtatcgatgaactaaatgatgtcacagccgctagtggtgttaatattagggctgatggcagtggtgctacagaattggaaaaagaaaaagaagaaagtcgcccaaagaacgtcaagcccaacaaggaagaagatgataaaatgagggcgaatgctgcaaacgtcgctgcccggcaagcagttggaggaagtgatatgctctcaaagtggcagttgatggctgagcaagccagacagaagcgagaaggcattgatgtgtctgctgcttcacagccaggcagagggccaggttccaggcaattatccaaatttgggaaaggtcctggtgagcacccagaaggttcaaagaggagccattcgatggcattcggaactggaggcatgaaaagacccggcaggacagcgtttgctggtccacagcgattgatctccgtgaaggatgtcatttgtgcccttgagagggagcctcagatgacaaaatcaaggctaatctaccggctgcacgagcgattgcctgtagattctaccgtagattagaccggaatagtcatatactttattgtgggcatgcccaattgcccttgcatggtattgaacagcgaagaagcatacccgccactcccatttgttgtgctttggagcggcactgtatattggtgtaaaatttgtatcgcaaaggcggcgaattaccagcaaaaaagggtttctgtacaaaattcactgtaagcggggtctggcatttgccttttctgcaaccacgtctgtgaggttatttctagcagactactcatctcaatatctatatttttaagggttaattagatttttgccatt

SEQ ID NO: 33722 - DNA, 2297 bp, Zea Mays
ctttttacagccagcgcgcgtggaggcctcctctcctgagccagcgcgtggagctctcccagacggccgccctcctcagccagctgcccacaacagtcagccgaccggcacaggaaggaagtgtccattcaagtcaacaagcagggcaacaacatgtgaatacagcagaccagttctcaaaaacagaactaactgaaggttcaaaaattgaacagcctgtccaagtagagcaacagagttcccacctacaacaagcatatccagaaattcaactacagcaggctgaaacagatagcttccagttagctgaaaaagaaacagggtattttggtcaacagagttctgcaggcgccaaggtggatgtagcccagccttcagtagttcagcagaatgcaaagcaaactgttggtcaacaagcatcatctggtacccaggatacaaagaaaggaccatcgataccatttaatatgttaattccaatcctacaggcacatcttgacagagacaaagatatgcagcttcaaactgtttgggcaaaacttaggcgtaatgaagtcaacaaagatgatttcttaagagttatcaggaatattgttggggatcaaatgctcaagcaggcagctcataaagtttttgtacagatgcaagcacaggcgcaaagaaatagccaggcaaattcaagtcagcagtctttattctctcaactttctgcacagcagatggcttccagtggttcagcacagttacatgatcagaaaattcggccacctggaccacccaaccaaggccagaaaaaccaggtgtcatcttcacctcaggcttttgcaccaccatcaggcacccaaccgcagaatagtgtacactatcttgctcatgataaccctaaccaaaaccctgatgcaaagggaacaaatgttgtaccaaatcaaccatctagaatgaacacatcagttccattgcaaacaaagaacaaacagcatcaaccaacacagttgcagcaggcctcacaacaaatatatggagcaagtaatcctggtgcccaggcttaccctcggtcaatcactggttctcttagatcaccgagtcttgttccagaaacacagccatccatgcatgctcctggaatggctcctgcaaaaatggttcctcctcctactcatccaatgatgcagcacaatgcaactgcatggcaaatgcatcaaaacagggaattgaaaactaacgctccccctccaaatgctaatatgaagcaaaattctgaatctgttggcaaagtacgcatggctggcacaggaaattcttcagctaaaggaaagcagggaactcctaactctacaccaaatgctagtggaggtacaaagagtagcaagaaatcgggtgggcagaagaaatcattggaagcagcaggctctatgcaaccttcaagcaaaaagcagaagacatctggaggctcccaggaacaaagtatcgatgaactaaatgatgtcacagccgctagtggtgttaatattagggctgatggcagtggtgctacagaattggaaaaagaaaaagaagaaagtcgcccaaagaacgtcaagcccaacaaggaagaagatgataaaatgagggcgaatgctgcaaacgtcgctgcccggcaagcagttggaggaagtgatatgctctcaaagtggcagttgatggctgagcaagccagacagaagcgagaaggcattgatgtgtctgctgcttcacagccaggcagagggccaggttccaggcaattatccaaatttgggaaaggtcctggtgagcacccagaaggttcaaagaggagccattcgatggcattcggaactggaggcatgaaaagacccggcaggacagcgtttgctggtccacagcgattgatctccgtgaaggatgtcatttgtgcccttgagagggagcctcagatgacaaaatcaaggctaatctaccggctgcacgagcgattgcctgtagattctaccgtagattagaccggaatagtcatatactttattgtgggcatgcccaattgcccttgcatggtattgaacagcgaagaagcatacccgccactcccatttgttgtgctttggagcggcactgtatattggtgtaaaatttgtatcgcaaaggcggcgaattaccagcaaaaaagggtttctgtacaaaattcactgtaagcggggtctggcatttgccttttctgcaaccacgtctgtgaggttatttctagcagactactcatctcaatatctatatttttaagggttaattagatttttgccatt

SEQ ID NO: 33723 - DNA, 2298 bp, Zea Mays
ctttttacagccagcgcgcgtggaggcctcctctcctgagccagcgcgtggagctctcccagacggccgccctcctcagccagctgcccacaacagtcagccgaccggcacagaccagcagccagtgcgagtgtggtgtgcccgtcaagtgcggcaagtgcggcagggcgaccgtcgacgcgggcaccctacgcaagccttcttctccagggcgtcgtttgccagcgacgagcaccaccaggtgctttgtgctaggatagcagtgctatgtcaaaagctccagatgatcatttgcaagcaactgagcaggaaggaagtgtccattcaagtcaacaagcagggcaacaacatgtgaatacagcagaccagttctcaaaaacagaactaactgaaggttcaaaaattgaacagcctgtccaagtagagcaacagagttcccacctacaacaagcatatccagaaattcaactacagcaggctgaaacagatagcttccagttagctgaaaaagaaacagggtattttggtcaacagagttctgcaggcgccaaggtggatgtagcccagccttcagtagttcagcagaatgcaaagcaaactgttggtcaacaagcatcatctggtacccaggatacaaagaaaggaccatcgataccatttaatatgttaattccaatcctacaggcacatcttgacagagacaaagatatgcagcttcaaactgtttgggcaaaacttaggcgtaatgaagtcaacaaagatgatttcttaagagttatcaggaatattgttggggatcaaatgctcaagcaggcagctcataaagtttttgtacagatgcaagcacaggcgcaaagaaatagccaggcaaattcaagtcagcagtctttattctctcaactttctgcacagcagatggcttccagtggttcagcacagttacatgatcagaaaattcggccacctggaccacccaaccaaggccagaaaaaccaggtgtcatcttcacctcaggcttttgcaccaccatcaggcacccaaccgcagaatagtgtacactatcttgctcatgataaccctaaccaaaaccctgatgcaaagggaacaaatgttgtaccaaatcaaccatctagaatgaacacatcagttccattgcaaacaaagaacaaacagcatcaaccaacacagttgcagcaggcctcacaacaaatatatggagcaagtaatcctggtgcccaggcttaccctcggtcaatcactggttctcttagatcaccgagtcttgttccagaaacacagccatccatgcatgctcctggaatggctcctgcaaaaatggttcctcctcctactcatccaatgatgcagcacaatgcaactgcatggcaaatgcatcaaaacagggaattgaaaactaacgctccccctccaaatgctaatatgaagcaaaattctgaatctgttggcaaagtacgcatggctggcacaggaaattcttcagctaaaggaaagcaggctgatggcagtggtgctacagaattggaaaaagaaaaagaagaaagtcgcccaaagaacgtcaagcccaacaaggaagaagatgataaaatgagggcgaatgctgcaaacgtcgctgcccggcaagcagttggaggaagtgatatgctctcaaagtggcagttgatggctgagcaagccagacagaagcgagaaggcattgatgtgtctgctgcttcacagccaggcagagggccaggttccaggcaattatccaaatttgggaaaggtcctggtgagcacccagaaggttcaaagaggagccattcgatggcattcggaactggaggcatgaaaagacccggcaggacagcgtttgctggtccacagcgattgatctccgtgaaggatgtcatttgtgcccttgagagggagcctcagatgacaaaatcaaggctaatctaccggctgcacgagcgattgcctgtagattctaccgtagattagaccggaatagtcatatactttattgtgggcatgcccaattgcccttgcatggtattgaacagcgaagaagcatacccgccactcccatttgttgtgctttggagcggcactgtatattggtgtaaaatttgtatcgcaaaggcggcgaattaccagcaaaaaagggtttctgtacaaaattcactgtaagcggggtctggcatttgccttttctgcaaccacgtctgtgaggttatttctagcagactactcatctcaatatctatatttttaagggttaattagatttttgccatt

SEQ ID NO: 33724 - DNA, 2335 bp, Zea Mays
ctttttacagccagcgcgcgtggaggcctcctctcctgagccagcgcgtggagctctcccagacggccgccctcctcagccagctgcccacaacagtcagccgaccggcacagcagccagtgcgagtgtggtgtgcccgtcaagtgcggcaagtgcggcagggcgaccgtcgacgcgggcaccctacgcaagccttcttctccagggcgtcgtttgccagcgacgagcaccaccaggtgctttgtgctaggatagcagtgctatgtcaaaagctccagatgatcatttgcaagcaactgagcaggaaggaagtgtccattcaagtcaacaagcagggcaacaacatgtgaatacagcagaccagttctcaaaaacagaactaactgaaggttcaaaaattgaacagcctgtccaagtagagcaacagagttcccacctacaacaagcatatccagaaattcaactacagcaggctgaaacagatagcttccagttagctgaaaaagaaacagggtattttggtcaacagagttctgcaggcgccaaggtggatgtagcccagccttcagtagttcagcagaatgcaaagcaaactgttggtcaacaagcatcatctggtacccaggatacaaagaaaggaccatcgataccatttaatatgttaattccaatcctacagatgcaagcacaggcgcaaagaaatagccaggcaaattcaagtcagcagtctttattctctcaactttctgcacagcagatggcttccagtggttcagcacagttacatgatcagaaaattcggccacctggaccacccaaccaaggccagaaaaaccaggtgtcatcttcacctcaggcttttgcaccaccatcaggcacccaaccgcagaatagtgtacactatcttgctcatgataaccctaaccaaaaccctgatgcaaagggaacaaatgttgtaccaaatcaaccatctagaatgaacacatcagttccattgcaaacaaagaacaaacagcatcaaccaacacagttgcagcaggcctcacaacaaatatatggagcaagtaatcctggtgcccaggcttaccctcggtcaatcactggttctcttagatcaccgagtcttgttccagaaacacagccatccatgcatgctcctggaatggctcctgcaaaaatggttcctcctcctactcatccaatgatgcagcacaatgcaactgcatggcaaatgcatcaaaacagggaattgaaaactaacgctccccctccaaatgctaatatgaagcaaaattctgaatctgttggcaaagtacgcatggctggcacaggaaattcttcagctaaaggaaagcagggaactcctaactctacaccaaatgctagtggaggtacaaagagtagcaagaaatcgggtgggcagaagaaatcattggaagcagcaggctctatgcaaccttcaagcaaaaagcagaagacatctggaggctcccaggaacaaagtatcgatgaactaaatgatgtcacagccgctagtggtgttaatattagggctgatggcagtggtgctacagaattggaaaaagaaaaagaagaaagtcgcccaaagaacgtcaagcccaacaaggaagaagatgataaaatgagggcgaatgctgcaaacgtcgctgcccggcaagcagttggaggaagtgatatgctctcaaagtggcagttgatggctgagcaagccagacagaagcgagaaggcattgatgtgtctgctgcttcacagccaggcagagggccaggttccaggcaattatccaaatttgggaaaggtcctggtgagcacccagaaggttcaaagaggagccattcgatggcattcggaactggaggcatgaaaagacccggcaggacagcgtttgctggtccacagcgattgatctccgtgaaggatgtcatttgtgcccttgagagggagcctcagatgacaaaatcaaggctaatctaccggctgcacgagcgattgcctgtagattctaccgtagattagaccggaatagtcatatactttattgtgggcatgcccaattgcccttgcatggtattgaacagcgaagaagcatacccgccactcccatttgttgtgctttggagcggcactgtatattggtgtaaaatttgtatcgcaaaggcggcgaattaccagcaaaaaagggtttctgtacaaaattcactgtaagcggggtctggcatttgccttttctgcaaccacgtctgtgaggttatttctagcagactactcatctcaatatctatatttttaagggttaattagatttttgccatt

SEQ ID NO: 33725 - DNA, 2485 bp, Zea Mays
ctttttacagccagcgcgcgtggaggcctcctctcctgagccagcgcgtggagctctcccagacggccgccctcctcagccagctgcccacaacagtcagccgaccggcacagccagtgcgagtgtggtgtgcccgtcaagtgcggcaagtgcggcagggcgaccgtcgacgcgggcaccctacgcaagccttcttctccagggcgtcgtttgccagcgacgagcaccaccaggtgctttgtgctaggatagcagtgctatgtcaaaagctccagatgatcatttgcaagcaactgagcaggaaggaagtgtccattcaagtcaacaagcagggcaacaacatgtgaatacagcagaccagttctcaaaaacagaactaactgaaggttcaaaaattgaacagcctgtccaagtagagcaacagagttcccacctacaacaagcatatccagaaattcaactacagcaggctgaaacagatagcttccagttagctgaaaaagaaacagggtattttggtcaacagagttctgcaggcgccaaggtggatgtagcccagccttcagtagttcagcagaatgcaaagcaaactgttggtcaacaagcatcatctggtacccaggatacaaagaaaggaccatcgataccatttaatatgttaattccaatcctacaggcacatcttgacagagacaaagatatgcagcttcaaactgtttgggcaaaacttaggcgtaatgaagtcaacaaagatgatttcttaagagttatcaggaatattgttggggatcaaatgctcaagcaggcagctcataaagtttttgtacagatgcaagcacaggcgcaaagaaatagccaggcaaattcaagtcagcagtctttattctctcaactttctgcacagcagatggcttccagtggttcagcacagttacatgatcagaaaattcggccacctggaccacccaaccaaggccagaaaaaccaggtgtcatcttcacctcaggcttttgcaccaccatcaggcacccaaccgcagaatagtgtacactatcttgctcatgataaccctaaccaaaaccctgatgcaaagggaacaaatgttgtaccaaatcaaccatctagaatgaacacatcagttccattgcaaacaaagaacaaacagcatcaaccaacacagttgcagcaggcctcacaacaaatatatggagcaagtaatcctggtgcccaggcttaccctcggtcaatcactggttctcttagatcaccgagtcttgttccagaaacacagccatccatgcatgctcctggaatggctcctgcaaaaatggttcctcctcctactcatccaatgatgcagcacaatgcaactgcatggcaaatgcatcaaaacagggaattgaaaactaacgctccccctccaaatgctaatatgaagcaaaattctgaatctgttggcaaagtacgcatggctggcacaggaaattcttcagctaaaggaaagcagggaactcctaactctacaccaaatgctagtggaggtacaaagagtagcaagaaatcgggtgggcagaagaaatcattggaagcagcaggctctatgcaaccttcaagcaaaaagcagaagacatctggaggctcccaggaacaaagtatcgatgaactaaatgatgtcacagccgctagtggtgttaatattagggctgatggcagtggtgctacagaattggaaaaagaaaaagaagaaagtcgcccaaagaacgtcaagcccaacaaggaagaagatgataaaatgagggcgaatgctgcaaacgtcgctgcccggcaagcagttggaggaagtgatatgctctcaaagtggcagttgatggctgagcaagccagacagaagcgagaaggcattgatgtgtctgctgcttcacagccaggcagagggccaggttccaggcaattatccaaatttgggaaaggtcctggtgagcacccagaaggttcaaagaggagccattcgatggcattcggaactggaggcatgaaaagacccggcaggacagcgtttgctggtccacagcgattgatctccgtgaaggatgtcatttgtgcccttgagagggagcctcagatgacaaaatcaaggctaatctaccggctgcacgagcgattgcctgtagattctaccgtagattagaccggaatagtcatatactttattgtgggcatgcccaattgcccttgcatggtattgaacagcgaagaagcatacccgccactcccatttgttgtgctttggagcggcactgtatattggtgtaaaatttgtatcgcaaaggcggcgaattaccagcaaaaaagggtttctgtacaaaattcactgtaagcggggtctggcatttgccttttctgcaaccacgtctgtgaggttatttctagcagactactcatctcaatatctatatttttaagggttaattagatttttgccatt

SEQ ID NO: 33726 - DNA, 2474 bp, Zea Mays
ctttttacagccagcgcgcgtggaggcctcctctcctgagccagcgcgtggagctctcccagacggccgccctcctcagccagctgcccacaacagtcagccgaccggcacagaccagcagccagtgcgagtgtggtgtgcccgtcaagtgcggcaagtgcggcagggcgaccgtcgacgcgggcaccctacgcaagccttcttctccagggcgtcgtttgccagcgacgagcaccaccagcagtgctatgtcaaaagctccagatgatcatttgcaagcaactgagcaggaaggaagtgtccattcaagtcaacaagcagggcaacaacatgtgaatacagcagaccagttctcaaaaacagaactaactgaaggttcaaaaattgaacagcctgtccaagtagagcaacagagttcccacctacaacaagcatatccagaaattcaactacagcaggctgaaacagatagcttccagttagctgaaaaagaaacagggtattttggtcaacagagttctgcaggcgccaaggtggatgtagcccagccttcagtagttcagcagaatgcaaagcaaactgttggtcaacaagcatcatctggtacccaggatacaaagaaaggaccatcgataccatttaatatgttaattccaatcctacaggcacatcttgacagagacaaagatatgcagcttcaaactgtttgggcaaaacttaggcgtaatgaagtcaacaaagatgatttcttaagagttatcaggaatattgttggggatcaaatgctcaagcaggcagctcataaagtttttgtacagatgcaagcacaggcgcaaagaaatagccaggcaaattcaagtcagcagtctttattctctcaactttctgcacagcagatggcttccagtggttcagcacagttacatgatcagaaaattcggccacctggaccacccaaccaaggccagaaaaaccaggtgtcatcttcacctcaggcttttgcaccaccatcaggcacccaaccgcagaatagtgtacactatcttgctcatgataaccctaaccaaaaccctgatgcaaagggaacaaatgttgtaccaaatcaaccatctagaatgaacacatcagttccattgcaaacaaagaacaaacagcatcaaccaacacagttgcagcaggcctcacaacaaatatatggagcaagtaatcctggtgcccaggcttaccctcggtcaatcactggttctcttagatcaccgagtcttgttccagaaacacagccatccatgcatgctcctggaatggctcctgcaaaaatggttcctcctcctactcatccaatgatgcagcacaatgcaactgcatggcaaatgcatcaaaacagggaattgaaaactaacgctccccctccaaatgctaatatgaagcaaaattctgaatctgttggcaaagtacgcatggctggcacaggaaattcttcagctaaaggaaagcagggaactcctaactctacaccaaatgctagtggaggtacaaagagtagcaagaaatcgggtgggcagaagaaatcattggaagcagcaggctctatgcaaccttcaagcaaaaagcagaagacatctggaggctcccaggaacaaagtatcgatgaactaaatgatgtcacagccgctagtggtgttaatattagggctgatggcagtggtgctacagaattggaaaaagaaaaagaagaaagtcgcccaaagaacgtcaagcccaacaaggaagaagatgataaaatgagggcgaatgctgcaaacgtcgctgcccggcaagcagttggaggaagtgatatgctctcaaagtggcagttgatggctgagcaagccagacagaagcgagaaggcattgatgtgtctgctgcttcacagccaggcagagggccaggttccaggcaattatccaaatttgggaaaggtcctggtgagcacccagaaggttcaaagaggagccattcgatggcattcggaactggaggcatgaaaagacccggcaggacagcgtttgctggtccacagcgattgatctccgtgaaggatgtcatttgtgcccttgagagggagcctcagatgacaaaatcaaggctaatctaccggctgcacgagcgattgcctgtagattctaccgtagattagaccggaatagtcatatactttattgtgggcatgcccaattgcccttgcatggtattgaacagcgaagaagcatacccgccactcccatttgttgtgctttggagcggcactgtatattggtgtaaaatttgtatcgcaaaggcggcgaattaccagcaaaaaagggtttctgtacaaaattcactgtaagcggggtctggcatttgccttttctgcaaccacgtctgtgaggttatttctagcagactactcatctcaatatctatatttttaagggttaattagatttttgccatt

SEQ ID NO: 33727 - DNA, 1922 bp, Zea Mays
ctttttacagccagcgcgcgtggaggcctcctctcctgagccagcgcgtggagctctcccagacggccgccctcctcagccagctgcccacaacagtcagccgaccggcacaggcacatcttgacagagacaaagatatgcagcttcaaactgtttgggcaaaacttaggcgtaatgaagtcaacaaagatgatttcttaagagttatcaggaatattgttggggatcaaatgctcaagcaggcagctcataaagtttttgtacagatgcaagcacaggcgcaaagaaatagccaggcaaattcaagtcagcagtctttattctctcaactttctgcacagcagatggcttccagtggttcagcacagttacatgatcagaaaattcggccacctggaccacccaaccaaggccagaaaaaccaggtgtcatcttcacctcaggcttttgcaccaccatcaggcacccaaccgcagaatagtgtacactatcttgctcatgataaccctaaccaaaaccctgatgcaaagggaacaaatgttgtaccaaatcaaccatctagaatgaacacatcagttccattgcaaacaaagaacaaacagcatcaaccaacacagttgcagcaggcctcacaacaaatatatggagcaagtaatcctggtgcccaggcttaccctcggtcaatcactggttctcttagatcaccgagtcttgttccagaaacacagccatccatgcatgctcctggaatggctcctgcaaaaatggttcctcctcctactcatccaatgatgcagcacaatgcaactgcatggcaaatgcatcaaaacagggaattgaaaactaacgctccccctccaaatgctaatatgaagcaaaattctgaatctgttggcaaagtacgcatggctggcacaggaaattcttcagctaaaggaaagcagggaactcctaactctacaccaaatgctagtggaggtacaaagagtagcaagaaatcgggtgggcagaagaaatcattggaagcagcaggctctatgcaaccttcaagcaaaaagcagaagacatctggaggctcccaggaacaaagtatcgatgaactaaatgatgtcacagccgctagtggtgttaatattagggctgatggcagtggtgctacagaattggaaaaagaaaaagaagaaagtcgcccaaagaacgtcaagcccaacaaggaagaagatgataaaatgagggcgaatgctgcaaacgtcgctgcccggcaagcagttggaggaagtgatatgctctcaaagtggcagttgatggctgagcaagccagacagaagcgagaaggcattgatgtgtctgctgcttcacagccaggcagagggccaggttccaggcaattatccaaatttgggaaaggtcctggtgagcacccagaaggttcaaagaggagccattcgatggcattcggaactggaggcatgaaaagacccggcaggacagcgtttgctggtccacagcgattgatctccgtgaaggatgtcatttgtgcccttgagagggagcctcagatgacaaaatcaaggctaatctaccggctgcacgagcgattgcctgtagattctaccgtagattagaccggaatagtcatatactttattgtgggcatgcccaattgcccttgcatggtattgaacagcgaagaagcatacccgccactcccatttgttgtgctttggagcggcactgtatattggtgtaaaatttgtatcgcaaaggcggcgaattaccagcaaaaaagggtttctgtacaaaattcactgtaagcggggtctggcatttgccttttctgcaaccacgtctgtgaggttatttctagcagactactcatctcaatatctatatttttaagggttaattagatttttgccatt

SEQ ID NO: 33728 - DNA, 2451 bp, Zea Mays
ctttttacagccagcgcgcgtggaggcctcctctcctgagccagcgcgtggagctctcccagacggccgccctcctcagccagctgcccacaacagtcagccgaccggcacagaccagcagccagtgcgagtgtggtgtgcccgtcaagtgcggcaagtgcggcagggcgaccgtcgacgcgggcaccctacgcaagccttcttctccagggcgtcgtttgccagcgacgagcaccaccaggtgctttgtgctaggatagcagtgctatgtcaaaagctccagatgatcatttgcaagcaactgagcaggaaggaagtgtccattcaagtcaacaagcagggcaacaacatgtgaatacagcagaccagttctcaaaaacagaactaactgaaggttcaaaaattgaacagcctgtccaagtagagcaacagagttcccacctacaacaagcatatccagaaattcaactacagcaggctgaaacagatagcttccagttagctgaaaaagaaacagggtattttggtcaacagagttctgcaggcgccaaggtggatgtagcccagccttcagtagttcagcagaatgcaaagcaaactgttggtcaacaagcatcatctggtacccaggatacaaagaaaggaccatcgataccatttaatatgttaattccaatcctacaggcacatcttgacagagacaaagatatgcagcttcaaactgtttgggcaaaacttaggcgtaatgaagtcaacaaagatgatttcttaagagttatcaggaatattgttggggatcaaatgctcaagcaggcagctcataaagtttttgtacagatgcaagcacaggcgcaaagaaatagccaggcaaattcaagtcagcagtctttattctctcaactttctgcacagcagatggcttccagtggttcagcacagttacatgatcagaaaattcggccacctggaccacccaaccaaggccagaaaaaccaggtgtcatcttcacctcaggcttttgcaccaccatcaggcacccaaccgcagaatagtgtacactatcttgctcatgataaccctaaccaaaaccctgatgcaaagggaacaaatgttgtaccaaatcaaccatctagaatgaacacatcagttccattgcaaacaaagaacaaacagcatcaaccaacacagttgcagcaggcctcacaacaaatatatggagcaagtaatcctggtgcccaggcttaccctcggtcaatcactggttctcttagatcaccgagtcttgttccagaaacacagccatccatgcatgctcctggaatggctcctgcaaaaatggttcctcctcctactcatccaatgatgcagcacaatgcaactgcatggcaaatgcatcaaaacagggaattgaaaactaacgctccccctccaaatgctaatatgaagcaaaattctgaatctgttggcaaagtacgcatggctggcacaggaaattcttcagctaaaggaaagcagggaactcctaactctacaccaaatgctagtggaggtacaaagagtagcaagaaatcgggtgggcagaagaaatcattggaagcagcaggctcccaggaacaaagtatcgatgaactaaatgatgtcacagccgctagtggtgttaatattagggctgatggcagtggtgctacagaattggaaaaagaaaaagaagaaagtcgcccaaagaacgtcaagcccaacaaggaagaagatgataaaatgagggcgaatgctgcaaacgtcgctgcccggcaagcagttggaggaagtgatatgctctcaaagtggcagttgatggctgagcaagccagacagaagcgagaaggcattgatgtgtctgctgcttcacagccaggcagagggccaggttccaggcaattatccaaatttgggaaaggtcctggtgagcacccagaaggttcaaagaggagccattcgatggcattcggaactggaggcatgaaaagacccggcaggacagcgtttgctggtccacagcgattgatctccgtgaaggatgtcatttgtgcccttgagagggagcctcagatgacaaaatcaaggctaatctaccggctgcacgagcgattgcctgtagattctaccgtagattagaccggaatagtcatatactttattgtgggcatgcccaattgcccttgcatggtattgaacagcgaagaagcatacccgccactcccatttgttgtgctttggagcggcactgtatattggtgtaaaatttgtatcgcaaaggcggcgaattaccagcaaaaaagggtttctgtacaaaattcactgtaagcggggtctggcatttgccttttctgcaaccacgtctgtgaggttatttctagcagactactcatctcaatatctatatttttaagggttaattagatttttgccatt

SEQ ID NO: 33729 - DNA, 2541 bp, Zea Mays
agagcatttgtcaccacttcgtccgcccgcatctaaattagcggagcgcaaaaggaaatatagccagcgcgcgtggaggcctcctctcctgagccagcgcgtggagctctcccagacggccgccctcctcagccagctgcccacaacagtcagccgaccggcacagcagccagtgcgagtgtggtgtgcccgtcaagtgcggcaagtgcggcagggcgaccgtcgacgcgggcaccctacgcaagccttcttctccagggcgtcgtttgccagcgacgagcaccaccaggtgctttgtgctaggatagcagtgctatgtcaaaagctccagatgatcatttgcaagcaactgagcaggaaggaagtgtccattcaagtcaacaagcagggcaacaacatgtgaatacagcagaccagttctcaaaaacagaactaactgaaggttcaaaaattgaacagcctgtccaagtagagcaacagagttcccacctacaacaagcatatccagaaattcaactacagcaggctgaaacagatagcttccagttagctgaaaaagaaacagggtattttggtcaacagagttctgcaggcgccaaggtggatgtagcccagccttcagtagttcagcagaatgcaaagcaaactgttggtcaacaagcatcatctggtacccaggatacaaagaaaggaccatcgataccatttaatatgttaattccaatcctacaggcacatcttgacagagacaaagatatgcagcttcaaactgtttgggcaaaacttaggcgtaatgaagtcaacaaagatgatttcttaagagttatcaggaatattgttggggatcaaatgctcaagcaggcagctcataaagtttttgtacagatgcaagcacaggcgcaaagaaatagccaggcaaattcaagtcagcagtctttattctctcaactttctgcacagcagatggcttccagtggttcagcacagttacatgatcagaaaattcggccacctggaccacccaaccaaggccagaaaaaccaggtgtcatcttcacctcaggcttttgcaccaccatcaggcacccaaccgcagaatagtgtacactatcttgctcatgataaccctaaccaaaaccctgatgcaaagggaacaaatgttgtaccaaatcaaccatctagaatgaacacatcagttccattgcaaacaaagaacaaacagcatcaaccaacacagttgcagcaggcctcacaacaaatatatggagcaagtaatcctggtgcccaggcttaccctcggtcaatcactggttctcttagatcaccgagtcttgttccagaaacacagccatccatgcatgctcctggaatggctcctgcaaaaatggttcctcctcctactcatccaatgatgcagcacaatgcaactgcatggcaaatgcatcaaaacagggaattgaaaactaacgctccccctccaaatgctaatatgaagcaaaattctgaatctgttggcaaagtacgcatggctggcacaggaaattcttcagctaaaggaaagcagggaactcctaactctacaccaaatgctagtggaggtacaaagagtagcaagaaatcgggtgggcagaagaaatcattggaagcagcaggctctatgcaaccttcaagcaaaaagcagaagacatctggaggctcccaggaacaaagtatcgatgaactaaatgatgtcacagccgctagtggtgttaatattagggctgatggcagtggtgctacagaattggaaaaagaaaaagaagaaagtcgcccaaagaacgtcaagcccaacaaggaagaagatgataaaatgagggcgaatgctgcaaacgtcgctgcccggcaagcagttggaggaagtgatatgctctcaaagtggcagttgatggctgagcaagccagacagaagcgagaaggcattgatgtgtctgctgcttcacagccaggcagagggccaggttccaggcaattatccaaatttgggaaaggtcctggtgagcacccagaaggttcaaagaggagccattcgatggcattcggaactggaggcatgaaaagacccggcaggacagcgtttgctggtccacagcgattgatctccgtgaaggatgtcatttgtgcccttgagagggagcctcagatgacaaaatcaaggctaatctaccggctgcacgagcgattgcctgtagattctaccgtagattagaccggaatagtcatatactttattgtgggcatgcccaattgcccttgcatggtattgaacagcgaagaagcatacccgccactcccatttgttgtgctttggagcggcactgtatattggtgtaaaatttgtatcgcaaaggcggcgaattaccagcaaaaaagggtttctgtacaaaattcactgtaagcggggtctggcatttgccttttctgcaaccacgtctgtgaggttatttctagcagactactcatctcaatatctatatttttaagggttaattagatttttgccatt

SEQ ID NO: 33730 - DNA, 2434 bp, Zea Mays
gtacacccccggtggtctctgtgtcaagtctcaactctcaagtggacagggcgaccgccgaccccgacgcctacactacaccctacccttctacaggccggcgaactcaagtctcaagtgcggcagggcgaccgccgacgcgggcactctacgcaagccttcttctctagggcgtcgtttgccggcgacgagcaccacgagcagtgctatgtcaaaagctccagatgatcatttgcaagcaactgagcaggaaggaagtgtccattcaagtcaacaagcagggcaacaacatgtgaatacagcagaccagttctcaaaaacagaactaactgaaggttcaaaaattgaacagcctgtccaagtagagcaacagagttcccacctacaacaagcatatccagaaattcaactacagcaggctgaaacagatagcttccagttagctgaaaaagaaacagggtattttggtcaacagagttctgcaggcgccaaggtggatgtagcccagccttcagtagttcagcagaatgcaaagcaaactgttggtcaacaagcatcatctggtacccaggatacaaagaaaggaccatcgataccatttaatatgttaattccaatcctacaggcacatcttgacagagacaaagatatgcagcttcaaactgtttgggcaaaacttaggcgtaatgaagtcaacaaagatgatttcttaagagttatcaggaatattgttggggatcaaatgctcaagcaggcagctcataaagtttttgtacagatgcaagcacaggcgcaaagaaatagccaggcaaattcaagtcagcagtctttattctctcaactttctgcacagcagatggcttccagtggttcagcacagttacatgatcagaaaattcggccacctggaccacccaaccaaggccagaaaaaccaggtgtcatcttcacctcaggcttttgcaccaccatcaggcacccaaccgcagaatagtgtacactatcttgctcatgataaccctaaccaaaaccctgatgcaaagggaacaaatgttgtaccaaatcaaccatctagaatgaacacatcagttccattgcaaacaaagaacaaacagcatcaaccaacacagttgcagcaggcctcacaacaaatatatggagcaagtaatcctggtgcccaggcttaccctcggtcaatcactggttctcttagatcaccgagtcttgttccagaaacacagccatccatgcatgctcctggaatggctcctgcaaaaatggttcctcctcctactcatccaatgatgcagcacaatgcaactgcatggcaaatgcatcaaaacagggaattgaaaactaacgctccccctccaaatgctaatatgaagcaaaattctgaatctgttggcaaagtacgcatggctggcacaggaaattcttcagctaaaggaaagcagggaactcctaactctacaccaaatgctagtggaggtacaaagagtagcaagaaatcgggtgggcagaagaaatcattggaagcagcaggctctatgcaaccttcaagcaaaaagcagaagacatctggaggctcccaggaacaaagtatcgatgaactaaatgatgtcacagccgctagtggtgttaatattagggctgatggcagtggtgctacagaattggaaaaagaaaaagaagaaagtcgcccaaagaacgtcaagcccaacaaggaagaagatgataaaatgagggcgaatgctgcaaacgtcgctgcccggcaagcagttggaggaagtgatatgctctcaaagtggcagttgatggctgagcaagccagacagaagcgagaaggcattgatgtgtctgctgcttcacagccaggcagagggccaggttccaggcaattatccaaatttgggaaaggtcctggtgagcacccagaaggttcaaagaggagccattcgatggcattcggaactggaggcatgaaaagacccggcaggacagcgtttgctggtccacagcgattgatctccgtgaaggatgtcatttgtgcccttgagagggagcctcagatgacaaaatcaaggctaatctaccggctgcacgagcgattgcctgtagattctaccgtagattagaccggaatagtcatatactttattgtgggcatgcccaattgcccttgcatggtattgaacagcgaagaagcatacccgccactcccatttgttgtgctttggagcggcactgtatattggtgtaaaatttgtatcgcaaaggcggcgaattaccagcaaaaaagggtttctgtacaaaattcactgtaagcggggtctggcatttgccttttctgcaaccacgtctgtgaggttatttctagcagactactcatctcaatatctatatttttaagggttaattagatttttgccatt

SEQ ID NO: 33731 - DNA, 2465 bp, Zea Mays
aatttgcccgactactccagccgcttctgcgccttttcttctaccgtacacccccggtggtctctgtgtcaagtctcaactctcaagtggacagggcgaccgccgaccccgacgcctacactacaccctacccttctacaggccggcgaactcaagtctcaagtgcggcagggcgaccgccgacgcgggcactctacgcaagccttcttctctagggcgtcgtttgccggcgacgagcaccacgaggtactttgtgctaggatagcagtgctatgtcaaaagctccagatgatcatttacaagcaactgagcaggaaggaagtgtccatccaagtcaacaagcagggcaacaacatgtgaatgcagcataccagttctcgaaaacagaactaactgaaggttcaaaaaatgaacagcctgtccaagtagagcaactgagttcccacctacaacaagcatatccagaaattcaactacagcaggctgaaacagatagcttccagttagctgaaaaagaaacagggtattttggtcaacagagttttgcaggcgccaaggtggatgtagcccagccttcagtagttcagcagaatgtaaagcaaactgttggtcaacaagcatcatctggtacccaggatacaaggaaaggaccatcgataccatttaatatgttaattccaatcctacaggcacatcttgacagagacaaagatatgcagcttcaaactgtttgggcaaaacttaggcgtaatgaagtcaacaaagatgatttcttaagagttaccgtgaatattgttggggatcaaatgctcaagcaggcagctcataaagtttttgtacagatgcaagcacagatgcaaagaaatagccaggcaaattcaagtcagcagtctttattctctcaactttctgcacagcagatggcttccagtggttcagcacagttacatgatcagaaaattcggccacctggaccacccaaccaaggccagaaaaaccaggtgtcatcttcacctcaggcttttgcaccaccatcaggtacccaaccgcagaatagtgtacactatcttgctcatgataaccctaaccaaaaccctgatgcaaagggaacaaatgttgtaccaaatcaaccatctagaatgaacacatcagttccattgcaaacaaaggacaaacagcatcaaccaacacagttgcagcaggcctcacaacaaatatatggagcaaataatcctggtgcccaggcttaccctcggtcaatcactggttctcttagatcaccgagtcctgttccagaaacacagccatccatgcatgctcctggaatggctcctgcaaaaatggttcctcctcctactcatccaatgatgcagcacaatgcaactgcatggaaaatgcatcaaaacagggaattgaaaactaacgctccccctccaaatgctaatatgaagcaaaattctgaatctgttggcaaagtgcgcatggctggcacaggaaattcttcagctaaaggaaagcagggaactcctaactctacaccgaatgctagtggaggtacaaagagtagcaagaaatcgggcgggcagaagaaatcattggaagcagcaggctctatgcaaccttcaagcaaaaagcagaagaaatctggagccccccaggaacaaagtatcgatgaactaaatgatgtcacagccgctagtggtgttaatattagggataacaaagagatagatatttgccgggaaatgctggataaaatgggttatccgaagcttgaacttggtctatctgcaatgccgaaggaccaacttgcagacaaccttgcttataacagcttgaagggtcttatccttagcaaggctttgatggctcagaaagatgccgaagatgaaagcactcggatagccttcgaaaacctacgctcggaagttatatcacttcggaatgaggcccttgagaaggacaaaatcttgctttctttagttgagaggttaaagtctagcgacgctagattggctagtctttctgaagtggaacaaaaaatggagaaatttgaaaagaagaaagaagcagatgcgaagcgtattgctgatttagaatatgctctatctattcaagcgagattgcaaagattcgaagtagaaggactggagaagaagcttgatgaaatcactgaaaacttcaatgtcgaacagacagaacgtgagatatctgataccaaacgattgagagttcaaaagaatgtttaaaagcttcgtcaggcgaaggaggaatgctacaaggttgccatgcaatgttgcaacaaactgaagagtacttttgctaaggaagaggaagaacagttactgtctgcccctaaggaagagagctttgcttcacaagaagcacgaagaattgcacaggaagaagaaaatattttcctacgtaagggtccacttctgaggaaactagcagaaatcggttag

SEQ ID NO: 33732 - DNA, 3023 bp, Zea Mays
ctaccgtacacccccggtggtctctgtgtcaagtctcaactctcaagtggacagggcgaccgccgaccccgacgcctacactacaccctacccttctacaggccggcgaactcaagtctcaagtgcggcagggcgaccgccgacgcgggcactctacgcaagccttcttctctagggcgtcgtttgccggcgacgagcaccacgaggtactttgtgctaggatagcagtgctatgtcaaaagctccagatgatcatttacaagcaactgagcaggaaggaagtgtccatccaagtcaacaagcagggcaacaacatgtgaatgcagcataccagttctcgaaaacagaactaactgaaggttcaaaaaatgaacagcctgtccaagtagagcaactgagttcccacctacaacaagcatatccagaaattcaactacagcaggctgaaacagatagcttccagttagctgaaaaagaaacagggtattttggtcaacagagttttgcaggcgccaaggtggatgtagcccagccttcagtagttcagcagaatgtaaagcaaactgttggtcaacaagcatcatctggtacccaggatacaaggaaaggaccatcgataccatttaatatgttaattccaatcctacaggcacatcttgacagagacaaagatatgcagcttcaaactgtttgggcaaaacttaggcgtaatgaagtcaacaaagatgatttcttaagagttaccgtgaatattgttggggatcaaatgctcaagcaggcagctcataaagtttttgtacaatgcaagcacagatgcaaagaaatagccaggcaaattcaagtcagcagtctttattctctcaactttctgcacagcagatggcttccagtggttcagcacagttacatgatcagaaaattcggccacctggaccacccaaccaaggccagaaaaaccaggtgtcatcttcacctcaggcttttgcaccaccatcaggtacccaaccgcagaatagtgtacactatcttgctcatgataaccctaaccaaaaccctgatgcaaagggaacaaatgttgtaccaaatcaaccatctagaatgaacacatcagttccattgcaaacaaaggacaaacagcatcaaccaacacagttgcagcaggcctcacaacaaatatatggagcaaataatcctggtgcccaggcttaccctcggtcaatcactggttctcttagatcaccgagtcctgttccagaaacacagccatccatgcatgctcctggaatggctcctgcaaaaatggttcctcctcctactcatccaatgatgcagcacaatgcaactgcatggaaaatgcatcaaaacagggaattgaaaactaacgctccccctccaaatgctaatatgaagcaaaattctgaatctgttggcaaagtgcgcatggctggcacaggaaattcttcagctaaaggaaagcagggaactcctaactctacaccgaatgctagtggaggtacaaagagtagcaagaaatcgggcgggcagaagaaatcattggaagcagcaggctctatgcaaccttcaagcaaaaagcagaagaaatctggagccccccaggaacaaagtatcgatgaactaaatgatgtcacagccgctagtggtgttaatattagggataacaaagagatagatatttgccgggaaatgctggataaaatgggttatccgaagcttgaacttggtctatctgcaatgccgaaggaccaacttgcagacaaccttgcttataacagcttgaagggtcttatccttagcaaggctttgatggctcagaaagatgccgaagatgaaagcactcggatagccttcgaaaacctacgctcggaagttatatcacttcggaatgaggcccttgagaaggacaaaatcttgctttctttagttgagaggttaaagtctagcgacgctagattggctagtctttctgaagtggaacaaaaaatggagaaatttgaaaagaagaaagaagcagatgcgaagcgtattgctgatttagaatatgctctatctattcaagcgagattgcaaagattcgaagtagaaggactggagaagaagcttgatgaaatcactgaaaacttcaatgtcgaacagacagaacgtgagatatctgataccaaacgattgagagttcaaaagaatgtttaaaagcttcgtcaggcgaaggaggaatgctacaaggttgccatgcaatgttgcaacaaactgaagagtacttttgctaaggttggcgcattctctactaaacgagactttatccgtggttatcctgacggagttatcagattgattgaaggcgaggccgaagcttttgatgaaatccttagtgataggggggatttttgtgcctgcatcgacgcccgaggagctatctctctgctcgaaaaagctggctatgagcatgtgaaggctgtaattcagccagaattctcagtttcagcgagtgatgtcaaggatccttcagccgaaggcatcgcctttagtggaaaattttattctgaagtatgggtgaatggtggccgaaaaatggcagatgaggctattagacaaaatgaagaagaatctcgtactgctttataagaagtaaggaaagctgaagaagccgcagaacgtgaaagacttatagccgagctttctccttctccggagccgtacgaccctgaggccgatccagccctgaagggcgctcttgatgtgattaggataacaaatgaggctgttgacgaagctgtgaatagactcttgaacgaagctgctgaaaaaattctgaaggaggatgaacatactttatatatgaaaacacttgtagaatttttgtgtactgctctgttatgtacttgtaataaatttctttgtggagcgtgaaatcttcgtacgtaccgtttttgtgccacatgcgaaaaaatactttcccttttttcacgcttcataaagaaaaatatcccttttcagccgaagtgaca

SEQ ID NO: 33733 - DNA, 3064 bp, Zea Mays
aatttgcccgactactccagccgcttctgcgccttttcttctaccgtacacccccggtggtctctgtgtcaagtctcaactctcaagtggacagggcgaccgccgaccccgacgcctacactacaccctacccttctacaggccggcgaactcaagtctcaagtgcggcagggcgaccgccgacgcgggcactctacgcaagccttcttctctagggcgtcgtttgccggcgacgagcaccacgaggtactttgtgctaggatagcagtgctatgtcaaaagctccagatgatcatttacaagcaactgagcaggaaggaagtgtccatccaagtcaacaagcagggcaacaacatgtgaatgcagcataccagttctcgaaaacagaactaactgaaggttcaaaaaatgaacagcctgtccaagtagagcaactgagttcccacctacaacaagcatatccagaaattcaactacagcaggctgaaacagatagcttccagttagctgaaaaagaaacagggtattttggtcaacagagttttgcaggcgccaaggtggatgtagcccagccttcagtagttcagcagaatgtaaagcaaactgttggtcaacaagcatcatctggtacccaggatacaaggaaaggaccatcgataccatttaatatgttaattccaatcctacaggcacatcttgacagagacaaagatatgcagcttcaaactgtttgggcaaaacttaggcgtaatgaagtcaacaaagatgatttcttaagagttaccgtgaatattgttggggatcaaatgctcaagcaggcagctcataaagtttttgtacagatgcaagcacagatgcaaagaaatagccaggcaaattcaagtcagcagtctttattctctcaactttctgcacagcagatggcttccagtggttcagcacagttacatgatcagaaaattcggccacctggaccacccaaccaaggccagaaaaaccaggtgtcatcttcacctcaggcttttgcaccaccatcaggtacccaaccgcagaatagtgtacactatcttgctcatgataaccctaaccaaaaccctgatgcaaagggaacaaatgttgtaccaaatcaaccatctagaatgaacacatcagttccattgcaaacaaaggacaaacagcatcaaccaacacagttgcagcaggcctcacaacaaatatatggagcaaataatcctggtgcccaggcttaccctcggtcaatcactggttctcttagatcaccgagtcctgttccagaaacacagccatccatgcatgctcctggaatggctcctgcaaaaatggttcctcctcctactcatccaatgatgcagcacaatgcaactgcatggaaaatgcatcaaaacagggaattgaaaactaacgctccccctccaaatgctaatatgaagcaaaattctgaatctgttggcaaagtgcgcatggctggcacaggaaattcttcagctaaaggaaagcagggaactcctaactctacaccgaatgctagtggaggtacaaagagtagcaagaaatcgggcgggcagaagaaatcattggaagcagcaggctctatgcaaccttcaagcaaaaagcagaagaaatctggagccccccaggaacaaagtatcgatgaactaaatgatgtcacagccgctagtggtgttaatattagggataacaaagagatagatatttgccgggaaatgctggataaaatgggttatccgaagcttgaacttggtctatctgcaatgccgaaggaccaacttgcagacaaccttgcttataacagcttgaagggtcttatccttagcaaggctttgatggctcagaaagatgccgaagatgaaagcactcggatagccttcgaaaacctacgctcggaagttatatcacttcggaatgaggcccttgagaaggacaaaatcttgctttctttagttgagaggttaaagtctagcgacgctagattggctagtctttctgaagtggaacaaaaaatggagaaatttgaaaagaagaaagaagcagatgcgaagcgtattgctgatttagaatatgctctatctattcaagcgagattgcaaagattcgaagtagaaggactggagaagaagcttgatgaaatcactgaaaacttcaatgtcgaacagacagaacgtgagatatctgataccaaacgattgagagttcaaaagaatgtttaaaagcttcgtcaggcgaaggaggaatgctacaaggttgccatgcaatgttgcaacaaactgaagagtacttttgctaaggttggcgcattctctactaaacgagactttatccgtggttatcctgacggagttatcagattgattgaaggcgaggccgaagcttttgatgaaatccttagtgataggggggatttttgtgcctgcatcgacgcccgaggagctatctctctgctcgaaaaagctggctatgagcatgtgaaggctgtaattcagccagaattctcagtttcagcgagtgatgtcaaggatccttcagccgaaggcatcgcctttagtggaaaattttattctgaagtatgggtgaatggtggccgaaaaatggcagatgaggctattagacaaaatgaagaagaatctcgtactgctttataagaagtaaggaaagctgaagaagccgcagaacgtgaaagacttatagccgagctttctccttctccggagccgtacgaccctgaggccgatccagccctgaagggcgctcttgatgtgattaggataacaaatgaggctgttgacgaagctgtgaatagactcttgaacgaagctgctgaaaaaattctgaaggaggatgaacatactttatatatgaaaacacttgtagaatttttgtgtactgctctgttatgtacttgtaataaatttctttgtggagcgtgaaatcttcgtacgtaccgtttttgtgccacatgcgaaaaaatactttcccttttttcacgcttcataaagaaaaatatcccttttcagccgaagtgaca

SEQ ID NO: 33734 - DNA, 2413 bp, Zea Mays
cgggcgcccgcggcaccaccagccaaccgcgcgcctccacgtcgcggatcgcgctacgagcccttggctcgacagacgacaggtcagccgcaacagctttctcgttcgatcccttcccccccttcactttctcctcctcgtgaagcgagctctccacgcccctgcgattccatttccatcctgcccgctcccaacttcaaaacggccgcggcgcagatccacacgcacgggcaggcaggcaggcatacggacaggaccgccgccgcagctttcaaatcccggggcggattaccctgcagacggagcccacagcccagcaccgcagcagtccaccgggatctcgccttcgtcgccccgtgtcgcgtcgcgccggtggccgagcctggggacgctagctagagcctactactgtagaccgtagagccatggggaacagcatctaccggttcctatgcggcctgtgcgcgccctcgtcgtcggagcacgggctccacggcgcgcaccccgccgtcgccgcgctcggccgcgacgtcctcagcttccagagcacctcgcaggttccggacgagctgagccggcacgtcgtctcctccaagaaagcgcaggcgaattggtacaagaagctgctggtggcatggaagaaagcccggccgcctccgaagacgcccgaggaagccgcggccttcgttgtgcagacgctcaagaaccatcagaaagcagatgtggagggcctgttgtctttctacggcctgccgcatccgaacgcggcggcagcagcagcaggcgcgcccgccgctcgcccgccgcccaagaaggcccagcagggcgccaagttcgagctgcacacgctccccattgaccccaagtctgtggccgacggcgacacggtgaacgtgtacgtcgacgcggcggacccgcgggaggccggcagcgtgccccgcgaggtgcagaaggctgcggcggagcgggccagggcgcgggctgccaaggactaccagaaggccgacgcgctgcagaaggtcatagtcgacgcagggtacaggccggttcctaacgcgagaggcgaggaggtgctggcgaagaagtacaggatcaggctgagggggatcgatgcgcccgagagcgcgatgccgtatggcaaggaagccaaggaggcgctgctcaaacttgtccaggggaagagcttgaagggtcttatccttagcaaggctttgatggctcagaaagatgccgaagatgaaagcactcggatagccttcgaaaacctacgctcggaagttatatcacttcggaatgaggcccttgagaaggacaaaatcttgctttctttagttgagaggttaaagtctagcgacgctagattggctagtctttctgaagtggaacaaaaaatggagaaatttgaaaagaagaaagaagcagatgcgaagcgtattgctgatttagaatatgctctatctattcaagcgagattgcaaagattcgaagtagaaggactggagaagaagcttgatgaaatcactgaaaacttcaatgtcgaacagacagaacgtgagatatctgataccaaacgattgagagttcaaaagaatgtttaaaagcttcgtcaggcgaaggaggaatgctacaaggttgccatgcaatgttgcaacaaactgaagagtacttttgctaaggttggcgcattctctactaaacgagactttatccgtggttatcctgacggagttatcagattgattgaaggcgaggccgaagcttttgatgaaatccttagtgataggggggatttttgtgcctgcatcgacgcccgaggagctatctctctgctcgaaaaagctggctatgagcatgtgaaggctgtaattcagccagaattctcagtttcagcgagtgatgtcaaggatccttcagccgaaggcatcgcctttagtggaaaattttattctgaagtatgggtgaatggtggccgaaaaatggcagatgaggctattagacaaaatgaagaagaatctcgtactgctttataagaagtaaggaaagctgaagaagccgcagaacgtgaaagacttatagccgagctttctccttctccggagccgtacgaccctgaggccgatccagccctgaagggcgctcttgatgtgattaggataacaaatgaggctgttgacgaagctgtgaatagactcttgaacgaagctgctgaaaaaattctgaaggaggatgaacatactttatatatgaaaacacttgtagaatttttgtgtactgctctgttatgtacttgtaataaatttctttgtggagcgtgaaatcttcgtacgtaccgtttttgtgccacatgcgaaaaaatactttcccttttttcacgcttcataaagaaaaatatcccttttcagccgaagtgaca

SEQ ID NO: 33735 - DNA, 1633 bp, Zea Mays
gtacacccccggtggtctctgtgtcaagtctcaactctcaagtggacagggcgaccgccgaccccgacgcctacactacaccctacccttctacaggccggcgaactcaagtctcaagtgcggcagggcgaccgccgacgcgggcactctacgcaagccttcttctctagggcgtcgtttgccggcgacgagcaccacgaggaaggaagtgtccatccaagtcaacaagcagggcaacaacatgtgaatgcagcataccagttctcgaaaacagaactaactgaaggttcaaaaaatgaacagcctgtccaagtagagcaactgagttcccacctacaacaagcatatccagaaattcaactacagcaggctgaaacagatagcttccagttagctgaaaaagaaacagggtattttggtcaacagagttttgcaggcgccaaggtggatgtagcccagccttcagtagttcagcagaatgtaaagcaaactgttggtcaacaagcatcatctggtacccaggatacaaggaaaggaccatcgataccatttaatatgttaattccaatcctacaggcacatcttgacagagacaaagatatgcagcttcaaactgtttgggcaaaacttaggcgtaatgaagtcaacaaagatgatttcttaagagttaccgtgaatattgttggggatcaaatgctcaagcaggcagctcataaagtttttgtacagatgcaagcacagatgcaaagaaatagccaggcaaattcaagtcagcagtctttattctctcaactttctgcacagcagatggcttccagtggttcagcacagttacatgatcagaaaattcggccacctggaccacccaaccaaggccagaaaaaccaggtgtcatcttcacctcaggcttttgcaccaccatcaggtacccaaccgcagaatagtgtacactatcttgctcatgataaccctaaccaaaaccctgatgcaaagggaacaaatgttgtaccaaatcaaccatctagaatgaacacatcagttccattgcaaacaaaggacaaacagcatcaaccaacacagttgcagcaggcctcacaacaaatatatggagcaaataatcctggtgcccaggcttaccctcggtcaatcactggttctcttagatcaccgagtcctgttccagaaacacagccatccatgcatgctcctggaatggctcctgcaaaaatggttcctcctcctactcatccaatgatgcagcacaatgcaactgcatggaaaatgcatcaaaacagggaattgaaaactaacgctccccctccaaatgctaatatgaagcaaaattctgaatctgttggcaaagtgcgcatggctggcacaggaaattcttcagctaaaggaaagcagggaactcctaactctacaccgaatgctagtggaggtacaaagagtagcaagaaatcgggcgggcagaagaaatcattggaagcagcaggctctatgcaaccttcaagcaaaaagcagaagaaatctggagccccccaggaacaaagtatcgatgaactaaatgatgtcacagccgctagtggtgttaatattagggataacaaagagatagatatttgccgggaaa

SEQ ID NO: 33736 - DNA, 1696 bp, Zea Mays
gtacacccccggtggtctctgtgtcaagtctcaactctcaagtggacagggcgaccgccgaccccgacgcctacactacaccctacccttctacaggccggcgaactcaagtctcaagtgcggcagggcgaccgccgacgcgggcactctacgcaagccttcttctctagggcgtcgtttgccggcgacgagcaccacgaggtactttgtgctaggatagcagtgctatgtcaaaagctccagatgatcatttacaagcaactgagcaggaaggaagtgtccatccaagtcaacaagcagggcaacaacatgtgaatgcagcataccagttctcgaaaacagaactaactgaaggttcaaaaaatgaacagcctgtccaagtagagcaactgagttcccacctacaacaagcatatccagaaattcaactacagcaggctgaaacagatagcttccagttagctgaaaaagaaacagggtattttggtcaacagagttttgcaggcgccaaggtggatgtagcccagccttcagtagttcagcagaatgtaaagcaaactgttggtcaacaagcatcatctggtacccaggatacaaggaaaggaccatcgataccatttaatatgttaattccaatcctacaggcacatcttgacagagacaaagatatgcagcttcaaactgtttgggcaaaacttaggcgtaatgaagtcaacaaagatgatttcttaagagttaccgtgaatattgttggggatcaaatgctcaagcaggcagctcataaagtttttgtacagatgcaagcacagatgcaaagaaatagccaggcaaattcaagtcagcagtctttattctctcaactttctgcacagcagatggcttccagtggttcagcacagttacatgatcagaaaattcggccacctggaccacccaaccaaggccagaaaaaccaggtgtcatcttcacctcaggcttttgcaccaccatcaggtacccaaccgcagaatagtgtacactatcttgctcatgataaccctaaccaaaaccctgatgcaaagggaacaaatgttgtaccaaatcaaccatctagaatgaacacatcagttccattgcaaacaaaggacaaacagcatcaaccaacacagttgcagcaggcctcacaacaaatatatggagcaaataatcctggtgcccaggcttaccctcggtcaatcactggttctcttagatcaccgagtcctgttccagaaacacagccatccatgcatgctcctggaatggctcctgcaaaaatggttcctcctcctactcatccaatgatgcagcacaatgcaactgcatggaaaatgcatcaaaacagggaattgaaaactaacgctccccctccaaatgctaatatgaagcaaaattctgaatctgttggcaaagtgcgcatggctggcacaggaaattcttcagctaaaggaaagcagggaactcctaactctacaccgaatgctagtggaggtacaaagagtagcaagaaatcgggcgggcagaagaaatcattggaagcagcaggctctatgcaaccttcaagcaaaaagcagaagaaatctggagccccccaggaacaaagtatcgatgaactaaatgatgtcacagccgctagtggtgttaatattaggctgctgtgacatcagatatagttgct

SEQ ID NO: 33737 - DNA, 910 bp, Zea Mays
acatttaccaatgacagggagtagtgctgggaattgggccgggccggcccaggcccatcatgcttcgtgccaaacggtttgagacagtaaaacctaaaaaacttttaggcgtgtcgtaccagcccgaagtgtaaaaacagtggtccaactcggccctaaaccacgttgtgccttcgttgagccatgtcggcccaaactcgggggatcgatgcgcccgagagcgcgatgccgtatggcaaggaagccaaggaggcgctgctcaaacttgtccaggggaagagcttgaaggtctacgtgtacgacgaggaccggtacggtagatgcgtcggagacatctactgcgacggggtatttgtgcaggagcaaatgctgaagaagggtttcgcgtggcactacaccgcctacgatcaacgcccggagctggccaagtgggagaaacaagcgcagaccggccggaagggcctgtgggcggcgtcgaagccacagaaaccatgggagtggaggaaggacaagcgcaacgggacagcatgaacaaacccccccgtgcatggttcagtgtgtgtgtgtccatgaacacctgatacattgatgtacctgcagacttttaggacggtatgtgtcggggattcagtagcggtgcagtatggttgtgtgtacactgtaatagacgattccttacagttacagggatgtgaagcaggacaagagagattggcgtgatccctaatttcgtatggggattcgtcgtgcaactgtatcaaatgcattgtaccatcatttacacccatgtgacctgtcatcatttacactcatgtgacctgttgtgaaggagagtagctgagattgtgacctgtgttgtatgcaaagcaaatgttgatggtgggagcagttccacgtagccgaaccaagt

SEQ ID NO: 33738 - DNA, 1678 bp, Zea Mays
cttcaacttgttcataatacaccaacagtcttccaggccaagtgtttggaaacgggtgagactgttgccataaagaaggttcttcaagacaagcgttacaagaaccgcgaactgcagaccatacgcctccttgaccaccctaatgttgttgctttgaagcattgcttcttttcaacaactgagaaggatgagctttatctaaatttggtccttgattatgttccgaagatagttcatcgagttgtgaaacatcacaacaagatgcaccaacacatgccacttatttatgtgaagctttatatgtaccagatatgtagagcattggcttacattcatggtactatcggtgtctgccagagatattaagccacaaaatcttttgtacaggtgaacccacacacccaccagcttaaactatgtgactttggtagtgcaaaagttctggtcaagggggaaccaaacatatcatacatctgctcgcgatactatagggctccagagctcatatttggtgccactgagtataccacagcgattgacatttggtctgctggttgtgttcttgctgagcttatgctagggcaggtgaaagtggtgtggaccaactcgtagaaatcatcaaggtccttggtactccaacaagggaagaaattaaatgcatgaacccgaattgcacagagtttaagttcccacaaatcaaagcacacccatggcacaaggtattcaacaaaaggatgccgccagaagctgttgatctggtctctcggctactccagtactccccaaatctgagatgcactgctgtggaggcgcttgtccacccattctttgacgagcttcgagatcctaatactcgtcttccaaatggccgcttcctgccaccccttttcaacttcaagcctcacgaattgaaaggagtcccagcagacattgttgcgagattggttccagaacatgcgaagaagcaatgctcttatgttggatcgtgagatgaccgtgccttgggactggaacctgaggttgcaatcgtgcatttcccctggtatgttggatgatcttgaggcatgcgagcctgtcgttgaagatgcaaggttacctactttacgacgtacgccaatgcgacctgtgtagctgtgagtagtctaatgttgcagtgacatgtaatggcgcacccccgtcctactaacagatgcttactggagattgccatagctgatcttgtaatttgttatagggcagtatgaatatatttatggtagcttgaatctatttgtggattcacttcgtttttccatgtttccttgtctccagacctggactggactgctatcggtttttgtttcagaattcctagctacctgttgcctagtgcctcccagcttgctcctgtcgattatttgcacactggcgatggtacctgttcttgattgttgccgaaaaaccttttggttgagatgtagtacattgttatttgatcagtctggaagtatgctgatttgatcgctcttatcagggacgaagccagataacaaagtcattgggcagttccactaatcatcatctaaatacactagttaacaatatatttgtatagtaatttctaaattttataggggtcagctgacccaacaaaaccccctagctctgccctggctcttatcagaaacttgcactattg

SEQ ID NO: 33739 - DNA, 1691 bp, Zea Mays
ccacagcaccactctcttttccattatactttaccactttacaaatagacccttcaacttgttcataatacaccaacagtcttccaggccaagtgtttggaaacgggtgagactgttgccataaagaaggttcttcaagacaagcgttacaagaaccgcgaactgcagaccatacgcctccttgaccaccctaatgttgttgctttgaagcattgcttcttttcaacaactgagaaggatgagctttatctaaatttggtccttgattatgttccgaagatagttcatcgagttgtgaaacatcacaacaagatgcaccaacacatgccacttatttatgtgaagctttatatgtaccagatatgtagagcattggcttacattcatggtactatcggtgtctgccagagatattaagccacaaaatcttttgtacaggtgaacccacacacccaccagcttaaactatgtgactttggtagtgcaaaagttctggtcaagggggaaccaaacatatcatacatctgctcgcgatactatagggctccagagctcatatttggtgccactgagtataccacagcgattgacatttggtctgctggttgtgttcttgctgagcttatgctagggcaggtccttggtactccaacaagggaagaaattaaatgcatgaacccgaattgcacagagtttaagttcccacaaatcaaagcacacccatggcacaaggtattcaacaaaaggatgccgccagaagctgttgatctggtctctcggctactccagtactccccaaatctgagatgcactgctgtggaggcgcttgtccacccattctttgacgagcttcgagatcctaatactcgtcttccaaatggccgcttcctgccaccccttttcaacttcaagcctcacgaattgaaaggagtcccagcagacattgttgcgagattggttccagaacatgcgaagaagcaatgctcttatgttggatcgtgagatgaccgtgccttgggactggaacctgaggttgcaatcgtgcatttcccctggtatgttggatgatcttgaggcatgcgagcctgtcgttgaagatgcaaggttacctactttacgacgtacgccaatgcgacctgtgtagctgtgagtagtctaatgttgcagtgacatgtaatggcgcacccccgtcctactaacagatgcttactggagattgccatagctgatcttgtaatttgttatagggcagtatgaatatatttatggtagcttgaatctatttgtggattcacttcgtttttccatgtttccttgtctccagacctggactggactgctatcggtttttgtttcagaattcctagctacctgttgcctagtgcctcccagcttgctcctgtcgattatttgcacactggcgatggtacctgttcttgattgttgccgaaaaaccttttggttgagatgtagtacattgttatttgatcagtctggaagtatgctgatttgatcgctcttatcagggacgaagccagataacaaagtcattgggcagttccactaatcatcatctaaatacactagttaacaatatatttgtatagtaatttctaaattttataggggtcagctgacccaacaaaaccccctagctctgccctggctcttatcagaaacttgcactattg

SEQ ID NO: 33740 - DNA, 1713 bp, Zea Mays
ctagcttcaactcctccgatggataaacagcagatgcagccaactccaactccgatggcaaacagcagagagccaagtgtttggaaacgggtgagactgttgccataaagaaggttcttcaagacaagcgttacaagaaccgcgaactgcagaccatacgcctccttgaccaccctaatgttgttgctttgaagcattgcttcttttcaacaactgagaaggatgagctttatctaaatttggtccttgattatgttccgaagatagttcatcgagttgtgaaacatcacaacaagatgcaccaacacatgccacttatttatgtgaagctttatatgtaccagatatgtagagcattggcttacattcatggtactatcggtgtctgccagagatattaagccacaaaatcttttgtacaggtgaacccacacacccaccagcttaaactatgtgactttggtagtgcaaaagttctggtcaagggggaaccaaacatatcatacatctgctcgcgatactatagggctccagagctcatatttggtgccactgagtataccacagcgattgacatttggtctgctggttgtgttcttgctgagcttatgctagggcaggtgaaagtggtgtggaccaactcgtagaaatcatcaaggtccttggtactccaacaagggaagaaattaaatgcatgaacccgaattgcacagagtttaagttcccacaaatcaaagcacacccatggcacaaggtattcaacaaaaggatgccgccagaagctgttgatctggtctctcggctactccagtactccccaaatctgagatgcactgctgtggaggcgcttgtccacccattctttgacgagcttcgagatcctaatactcgtcttccaaatggccgcttcctgccaccccttttcaacttcaagcctcacgaattgaaaggagtcccagcagacattgttgcgagattggttccagaacatgcgaagaagcaatgctcttatgttggatcgtgagatgaccgtgccttgggactggaacctgaggttgcaatcgtgcatttcccctggtatgttggatgatcttgaggcatgcgagcctgtcgttgaagatgcaaggttacctactttacgacgtacgccaatgcgacctgtgtagctgtgagtagtctaatgttgcagtgacatgtaatggcgcacccccgtcctactaacagatgcttactggagattgccatagctgatcttgtaatttgttatagggcagtatgaatatatttatggtagcttgaatctatttgtggattcacttcgtttttccatgtttccttgtctccagacctggactggactgctatcggtttttgtttcagaattcctagctacctgttgcctagtgcctcccagcttgctcctgtcgattatttgcacactggcgatggtacctgttcttgattgttgccgaaaaaccttttggttgagatgtagtacattgttatttgatcagtctggaagtatgctgatttgatcgctcttatcagggacgaagccagataacaaagtcattgggcagttccactaatcatcatctaaatacactagttaacaatatatttgtatagtaatttctaaattttataggggtcagctgacccaacaaaaccccctagctctgccctggctcttatcagaaacttgcactattg

SEQ ID NO: 33741 - DNA, 1789 bp, Zea Mays
catcatctcactctttgtaatccctcctgaaccactaccatcaatttctgtcttcttcgcagtctcctcagtactcattttcacagaagcacagatcatcagcagcagaagaagctagcttcaactcctccgatggataaacagcagatgcagccaactccaactccgatggcaaacagcagagagccaagtgtttggaaacgggtgagactgttgccataaagaaggttcttcaagacaagcgttacaagaaccgcgaactgcagaccatacgcctccttgaccaccctaatgttgttgctttgaagcattgcttcttttcaacaactgagaaggatgagctttatctaaatttggtccttgattatgttccgaagatagttcatcgagttgtgaaacatcacaacaagatgcaccaacacatgccacttatttatgtgaagctttatatgtaccagatatgtagagcattggcttacattcatggtactatcggtgtctgccagagatattaagccacaaaatcttttgtacaggtgaacccacacacccaccagcttaaactatgtgactttggtagtgcaaaagttctggtcaagggggaaccaaacatatcatacatctgctcgcgatactatagggctccagagctcatatttggtgccactgagtataccacagcgattgacatttggtctgctggttgtgttcttgctgagcttatgctagggcaggtccttggtactccaacaagggaagaaattaaatgcatgaacccgaattgcacagagtttaagttcccacaaatcaaagcacacccatggcacaaggtattcaacaaaaggatgccgccagaagctgttgatctggtctctcggctactccagtactccccaaatctgagatgcactgctgtggaggcgcttgtccacccattctttgacgagcttcgagatcctaatactcgtcttccaaatggccgcttcctgccaccccttttcaacttcaagcctcacgaattgaaaggagtcccagcagacattgttgcgagattggttccagaacatgcgaagaagcaatgctcttatgttggatcgtgagatgaccgtgccttgggactggaacctgaggttgcaatcgtgcatttcccctggtatgttggatgatcttgaggcatgcgagcctgtcgttgaagatgcaaggttacctactttacgacgtacgccaatgcgacctgtgtagctgtgagtagtctaatgttgcagtgacatgtaatggcgcacccccgtcctactaacagatgcttactggagattgccatagctgatcttgtaatttgttatagggcagtatgaatatatttatggtagcttgaatctatttgtggattcacttcgtttttccatgtttccttgtctccagacctggactggactgctatcggtttttgtttcagaattcctagctacctgttgcctagtgcctcccagcttgctcctgtcgattatttgcacactggcgatggtacctgttcttgattgttgccgaaaaaccttttggttgagatgtagtacattgttatttgatcagtctggaagtatgctgatttgatcgctcttatcagggacgaagccagataacaaagtcattgggcagttccactaatcatcatctaaatacactagttaacaatatatttgtatagtaatttctaaattttataggggtcagctgacccaacaaaaccccctagctctgccctggctcttatcagaaacttgcactattg

SEQ ID NO: 33742 - DNA, 1791 bp, Zea Mays
tttcattcatcatctcactctttgtaatccctcctgaaccactaccatcaatttctgtcttcttcgcagtctcctcagtactcattttcacagaagcacagatcatcagcagcagaagaagctagcttcaactcctccgatggataaacagcagatgcagccaactccaactccgatggcaaacagcagagagccaagtgtttggaaacgggtgagactgttgccataaagaaggttcttcaagacaagcgttacaagaaccgcgaactgcagaccatacgcctccttgaccaccctaatgttgttgctttgaagcattgcttcttttcaacaactgagaaggatgagctttatctaaatttggtccttgattatgttccgaagatagttcatcgagttgtgaaacatcacaacaagatgcaccaacacatgccacttatttatgtgaagctttatatgtaccagatatgtagagcattggcttacattcatggtactatcggtgtctgccagagatattaagccacaaaatcttttggtgaacccacacacccaccagcttaaactatgtgactttggtagtgcaaaagttctggtcaagggggaaccaaacatatcatacatctgctcgcgatactatagggctccagagctcatatttggtgccactgagtataccacagcgattgacatttggtctgctggttgtgttcttgctgagcttatgctagggcaggtccttggtactccaacaagggaagaaattaaatgcatgaacccgaattgcacagagtttaagttcccacaaatcaaagcacacccatggcacaaggtattcaacaaaaggatgccgccagaagctgttgatctggtctctcggctactccagtactccccaaatctgagatgcactgctgtggaggcgcttgtccacccattctttgacgagcttcgagatcctaatactcgtcttccaaatggccgcttcctgccaccccttttcaacttcaagcctcacgaattgaaaggagtcccagcagacattgttgcgagattggttccagaacatgcgaagaagcaatgctcttatgttggatcgtgagatgaccgtgccttgggactggaacctgaggttgcaatcgtgcatttcccctggtatgttggatgatcttgaggcatgcgagcctgtcgttgaagatgcaaggttacctactttacgacgtacgccaatgcgacctgtgtagctgtgagtagtctaatgttgcagtgacatgtaatggcgcacccccgtcctactaacagatgcttactggagattgccatagctgatcttgtaatttgttatagggcagtatgaatatatttatggtagcttgaatctatttgtggattcacttcgtttttccatgtttccttgtctccagacctggactggactgctatcggtttttgtttcagaattcctagctacctgttgcctagtgcctcccagcttgctcctgtcgattatttgcacactggcgatggtacctgttcttgattgttgccgaaaaaccttttggttgagatgtagtacattgttatttgatcagtctggaagtatgctgatttgatcgctcttatcagggacgaagccagataacaaagtcattgggcagttccactaatcatcatctaaatacactagttaacaatatatttgtatagtaatttctaaattttataggggtcagctgacccaacaaaaccccctagctctgccctggctcttatcagaaacttgcactattg

SEQ ID NO: 33743 - DNA, 1833 bp, Zea Mays
ctcatttcattcatcatctcactctttgtaatccctcctgaaccactaccatcaatttctgtcttcttcgcagtctcctcagtactcattttcacagaagcacagatcatcagcagcagaagaagctagcttcaactcctccgatggataaacagcagatgcagccaactccaactccgatggcaaacagcagagagccaagtgtttggaaacgggtgagactgttgccataaagaaggttcttcaagacaagcgttacaagaaccgcgaactgcagaccatacgcctccttgaccaccctaatgttgttgctttgaagcattgcttcttttcaacaactgagaaggatgagctttatctaaatttggtccttgattatgttccgaagatagttcatcgagttgtgaaacatcacaacaagatgcaccaacacatgccacttatttatgtgaagctttatatgtaccagatatgtagagcattggcttacattcatggtactatcggtgtctgccagagatattaagccacaaaatcttttggtgaacccacacacccaccagcttaaactatgtgactttggtagtgcaaaagttctggtcaagggggaaccaaacatatcatacatctgctcgcgatactatagggctccagagctcatatttggtgccactgagtataccacagcgattgacatttggtctgctggttgtgttcttgctgagcttatgctagggcaggtgaaagtggtgtggaccaactcgtagaaatcatcaaggtccttggtactccaacaagggaagaaattaaatgcatgaacccgaattgcacagagtttaagttcccacaaatcaaagcacacccatggcacaaggtattcaacaaaaggatgccgccagaagctgttgatctggtctctcggctactccagtactccccaaatctgagatgcactgctgtggaggcgcttgtccacccattctttgacgagcttcgagatcctaatactcgtcttccaaatggccgcttcctgccaccccttttcaacttcaagcctcacgaattgaaaggagtcccagcagacattgttgcgagattggttccagaacatgcgaagaagcaatgctcttatgttggatcgtgagatgaccgtgccttgggactggaacctgaggttgcaatcgtgcatttcccctggtatgttggatgatcttgaggcatgcgagcctgtcgttgaagatgcaaggttacctactttacgacgtacgccaatgcgacctgtgtagctgtgagtagtctaatgttgcagtgacatgtaatggcgcacccccgtcctactaacagatgcttactggagattgccatagctgatcttgtaatttgttatagggcagtatgaatatatttatggtagcttgaatctatttgtggattcacttcgtttttccatgtttccttgtctccagacctggactggactgctatcggtttttgtttcagaattcctagctacctgttgcctagtgcctcccagcttgctcctgtcgattatttgcacactggcgatggtacctgttcttgattgttgccgaaaaaccttttggttgagatgtagtacattgttatttgatcagtctggaagtatgctgatttgatcgctcttatcagggacgaagccagataacaaagtcattgggcagttccactaatcatcatctaaatacactagttaacaatatatttgtatagtaatttctaaattttataggggtcagctgacccaacaaaaccccctagctctgccctggctcttatcagaaacttgcactattg

SEQ ID NO: 33744 - DNA, 1641 bp, Zea Mays
gtcaaggttcttttgggattgtctttgtggaattttggccaagtgtttggaaacgggtgagactgttgccataaagaaggttcttcaagacaagcgttacaagaaccgcgaactgcagaccatacgcctccttgaccaccctaatgttgttgctttgaagcattgcttcttttcaacaactgagaaggatgagctttatctaaatttggtccttgattatgttccgaagatagttcatcgagttgtgaaacatcacaacaagatgcaccaacacatgccacttatttatgtgaagctttatatgtaccagatatgtagagcattggcttacattcatggtactatcggtgtctgccagagatattaagccacaaaatcttttgtacaggtgaacccacacacccaccagcttaaactatgtgactttggtagtgcaaaagttctggtcaagggggaaccaaacatatcatacatctgctcgcgatactatagggctccagagctcatatttggtgccactgagtataccacagcgattgacatttggtctgctggttgtgttcttgctgagcttatgctagggcaggtccttggtactccaacaagggaagaaattaaatgcatgaacccgaattgcacagagtttaagttcccacaaatcaaagcacacccatggcacaaggtattcaacaaaaggatgccgccagaagctgttgatctggtctctcggctactccagtactccccaaatctgagatgcactgctgtggaggcgcttgtccacccattctttgacgagcttcgagatcctaatactcgtcttccaaatggccgcttcctgccaccccttttcaacttcaagcctcacgaattgaaaggagtcccagcagacattgttgcgagattggttccagaacatgcgaagaagcaatgctcttatgttggatcgtgagatgaccgtgccttgggactggaacctgaggttgcaatcgtgcatttcccctggtatgttggatgatcttgaggcatgcgagcctgtcgttgaagatgcaaggttacctactttacgacgtacgccaatgcgacctgtgtagctgtgagtagtctaatgttgcagtgacatgtaatggcgcacccccgtcctactaacagatgcttactggagattgccatagctgatcttgtaatttgttatagggcagtatgaatatatttatggtagcttgaatctatttgtggattcacttcgtttttccatgtttccttgtctccagacctggactggactgctatcggtttttgtttcagaattcctagctacctgttgcctagtgcctcccagcttgctcctgtcgattatttgcacactggcgatggtacctgttcttgattgttgccgaaaaaccttttggttgagatgtagtacattgttatttgatcagtctggaagtatgctgatttgatcgctcttatcagggacgaagccagataacaaagtcattgggcagttccactaatcatcatctaaatacactagttaacaatatatttgtatagtaatttctaaattttataggggtcagctgacccaacaaaaccccctagctctgccctggctcttatcagaaacttgcactattg

SEQ ID NO: 33745 - DNA, 1643 bp, Zea Mays
tgaagcggtgaatcatcgtctaagatggatgaccatagttcaaggccaagtgtttggaaacgggtgagactgttgccataaagaaggttcttcaagacaagcgttacaagaaccgcgaactgcagaccatacgcctccttgaccaccctaatgttgttgctttgaagcattgcttcttttcaacaactgagaaggatgagctttatctaaatttggtccttgattatgttccgaagatagttcatcgagttgtgaaacatcacaacaagatgcaccaacacatgccacttatttatgtgaagctttatatgtaccagatatgtagagcattggcttacattcatggtactatcggtgtctgccagagatattaagccacaaaatcttttggtgaacccacacacccaccagcttaaactatgtgactttggtagtgcaaaagttctggtcaagggggaaccaaacatatcatacatctgctcgcgatactatagggctccagagctcatatttggtgccactgagtataccacagcgattgacatttggtctgctggttgtgttcttgctgagcttatgctagggcaggtccttggtactccaacaagggaagaaattaaatgcatgaacccgaattgcacagagtttaagttcccacaaatcaaagcacacccatggcacaaggtattcaacaaaaggatgccgccagaagctgttgatctggtctctcggctactccagtactccccaaatctgagatgcactgctgtggaggcgcttgtccacccattctttgacgagcttcgagatcctaatactcgtcttccaaatggccgcttcctgccaccccttttcaacttcaagcctcacgaattgaaaggagtcccagcagacattgttgcgagattggttccagaacatgcgaagaagcaatgctcttatgttggatcgtgagatgaccgtgccttgggactggaacctgaggttgcaatcgtgcatttcccctggtatgttggatgatcttgaggcatgcgagcctgtcgttgaagatgcaaggttacctactttacgacgtacgccaatgcgacctgtgtagctgtgagtagtctaatgttgcagtgacatgtaatggcgcacccccgtcctactaacagatgcttactggagattgccatagctgatcttgtaatttgttatagggcagtatgaatatatttatggtagcttgaatctatttgtggattcacttcgtttttccatgtttccttgtctccagacctggactggactgctatcggtttttgtttcagaattcctagctacctgttgcctagtgcctcccagcttgctcctgtcgattatttgcacactggcgatggtacctgttcttgattgttgccgaaaaaccttttggttgagatgtagtacattgttatttgatcagtctggaagtatgctgatttgatcgctcttatcagggacgaagccagataacaaagtcattgggcagttccactaatcatcatctaaatacactagttaacaatatatttgtatagtaatttctaaattttataggggtcagctgacccaacaaaaccccctagctctgccctggctcttatcagaaacttgcactattg

SEQ ID NO: 33746 - DNA, 1799 bp, Zea Mays
cacagaggctacatatagcagccaatgagtcaagtgaagcggtgaatcatcgtctaagatggatgaccatagttcaagtagttctttgttcaaatcgaccgaaactggacacataattgtcaccactactggtggcaagaatggtcaaccaaaacaggccaagtgtttggaaacgggtgagactgttgccataaagaaggttcttcaagacaagcgttacaagaaccgcgaactgcagaccatacgcctccttgaccaccctaatgttgttgctttgaagcattgcttcttttcaacaactgagaaggatgagctttatctaaatttggtccttgattatgttccgaagatagttcatcgagttgtgaaacatcacaacaagatgcaccaacacatgccacttatttatgtgaagctttatatgtaccagatatgtagagcattggcttacattcatggtactatcggtgtctgccagagatattaagccacaaaatcttttgtacaggtgaacccacacacccaccagcttaaactatgtgactttggtagtgcaaaagttctggtcaagggggaaccaaacatatcatacatctgctcgcgatactatagggctccagagctcatatttggtgccactgagtataccacagcgattgacatttggtctgctggttgtgttcttgctgagcttatgctagggcaggtgaaagtggtgtggaccaactcgtagaaatcatcaaggtccttggtactccaacaagggaagaaattaaatgcatgaacccgaattgcacagagtttaagttcccacaaatcaaagcacacccatggcacaaggtattcaacaaaaggatgccgccagaagctgttgatctggtctctcggctactccagtactccccaaatctgagatgcactgctgtggaggcgcttgtccacccattctttgacgagcttcgagatcctaatactcgtcttccaaatggccgcttcctgccaccccttttcaacttcaagcctcacgaattgaaaggagtcccagcagacattgttgcgagattggttccagaacatgcgaagaagcaatgctcttatgttggatcgtgagatgaccgtgccttgggactggaacctgaggttgcaatcgtgcatttcccctggtatgttggatgatcttgaggcatgcgagcctgtcgttgaagatgcaaggttacctactttacgacgtacgccaatgcgacctgtgtagctgtgagtagtctaatgttgcagtgacatgtaatggcgcacccccgtcctactaacagatgcttactggagattgccatagctgatcttgtaatttgttatagggcagtatgaatatatttatggtagcttgaatctatttgtggattcacttcgtttttccatgtttccttgtctccagacctggactggactgctatcggtttttgtttcagaattcctagctacctgttgcctagtgcctcccagcttgctcctgtcgattatttgcacactggcgatggtacctgttcttgattgttgccgaaaaaccttttggttgagatgtagtacattgttatttgatcagtctggaagtatgctgatttgatcgctcttatcagggacgaagccagataacaaagtcattgggcagttccactaatcatcatctaaatacactagttaacaatatatttgtatagtaatttctaaattttataggggtcagctgacccaacaaaaccccctagctctgccctggctcttatcagaaacttgcactattg

SEQ ID NO: 33747 - DNA, 1731 bp, Zea Mays
gtcgagatcacctgaggaggcattggcgggaatagaggtcgtcagtagccacagaggctacatatagcagccaatgagtcaagtgaagcggtgaatcatcgtctaagatggatgaccatagttcaaggccaagtgtttggaaacgggtgagactgttgccataaagaaggttcttcaagacaagcgttacaagaaccgcgaactgcagaccatacgcctccttgaccaccctaatgttgttgctttgaagcattgcttcttttcaacaactgagaaggatgagctttatctaaatttggtccttgattatgttccgaagatagttcatcgagttgtgaaacatcacaacaagatgcaccaacacatgccacttatttatgtgaagctttatatgtaccagatatgtagagcattggcttacattcatggtactatcggtgtctgccagagatattaagccacaaaatcttttgtacaggtgaacccacacacccaccagcttaaactatgtgactttggtagtgcaaaagttctggtcaagggggaaccaaacatatcatacatctgctcgcgatactatagggctccagagctcatatttggtgccactgagtataccacagcgattgacatttggtctgctggttgtgttcttgctgagcttatgctagggcaggtccttggtactccaacaagggaagaaattaaatgcatgaacccgaattgcacagagtttaagttcccacaaatcaaagcacacccatggcacaaggtattcaacaaaaggatgccgccagaagctgttgatctggtctctcggctactccagtactccccaaatctgagatgcactgctgtggaggcgcttgtccacccattctttgacgagcttcgagatcctaatactcgtcttccaaatggccgcttcctgccaccccttttcaacttcaagcctcacgaattgaaaggagtcccagcagacattgttgcgagattggttccagaacatgcgaagaagcaatgctcttatgttggatcgtgagatgaccgtgccttgggactggaacctgaggttgcaatcgtgcatttcccctggtatgttggatgatcttgaggcatgcgagcctgtcgttgaagatgcaaggttacctactttacgacgtacgccaatgcgacctgtgtagctgtgagtagtctaatgttgcagtgacatgtaatggcgcacccccgtcctactaacagatgcttactggagattgccatagctgatcttgtaatttgttatagggcagtatgaatatatttatggtagcttgaatctatttgtggattcacttcgtttttccatgtttccttgtctccagacctggactggactgctatcggtttttgtttcagaattcctagctacctgttgcctagtgcctcccagcttgctcctgtcgattatttgcacactggcgatggtacctgttcttgattgttgccgaaaaaccttttggttgagatgtagtacattgttatttgatcagtctggaagtatgctgatttgatcgctcttatcagggacgaagccagataacaaagtcattgggcagttccactaatcatcatctaaatacactagttaacaatatatttgtatagtaatttctaaattttataggggtcagctgacccaacaaaaccccctagctctgccctggctcttatcagaaacttgcactattg

SEQ ID NO: 33748 - DNA, 1769 bp, Zea Mays
gtcgagatcacctgaggaggcattggcgggaatagaggtcgtcagtagccacagaggctacatatagcagccaatgagtcaagtgaagcggtgaatcatcgtctaagatggatgaccatagttcaaggccaagtgtttggaaacgggtgagactgttgccataaagaaggttcttcaagacaagcgttacaagaaccgcgaactgcagaccatacgcctccttgaccaccctaatgttgttgctttgaagcattgcttcttttcaacaactgagaaggatgagctttatctaaatttggtccttgattatgttccgaagatagttcatcgagttgtgaaacatcacaacaagatgcaccaacacatgccacttatttatgtgaagctttatatgtaccagatatgtagagcattggcttacattcatggtactatcggtgtctgccagagatattaagccacaaaatcttttgtacaggtgaacccacacacccaccagcttaaactatgtgactttggtagtgcaaaagttctggtcaagggggaaccaaacatatcatacatctgctcgcgatactatagggctccagagctcatatttggtgccactgagtataccacagcgattgacatttggtctgctggttgtgttcttgctgagcttatgctagggcaggtgaaagtggtgtggaccaactcgtagaaatcatcaaggtccttggtactccaacaagggaagaaattaaatgcatgaacccgaattgcacagagtttaagttcccacaaatcaaagcacacccatggcacaaggtattcaacaaaaggatgccgccagaagctgttgatctggtctctcggctactccagtactccccaaatctgagatgcactgctgtggaggcgcttgtccacccattctttgacgagcttcgagatcctaatactcgtcttccaaatggccgcttcctgccaccccttttcaacttcaagcctcacgaattgaaaggagtcccagcagacattgttgcgagattggttccagaacatgcgaagaagcaatgctcttatgttggatcgtgagatgaccgtgccttgggactggaacctgaggttgcaatcgtgcatttcccctggtatgttggatgatcttgaggcatgcgagcctgtcgttgaagatgcaaggttacctactttacgacgtacgccaatgcgacctgtgtagctgtgagtagtctaatgttgcagtgacatgtaatggcgcacccccgtcctactaacagatgcttactggagattgccatagctgatcttgtaatttgttatagggcagtatgaatatatttatggtagcttgaatctatttgtggattcacttcgtttttccatgtttccttgtctccagacctggactggactgctatcggtttttgtttcagaattcctagctacctgttgcctagtgcctcccagcttgctcctgtcgattatttgcacactggcgatggtacctgttcttgattgttgccgaaaaaccttttggttgagatgtagtacattgttatttgatcagtctggaagtatgctgatttgatcgctcttatcagggacgaagccagataacaaagtcattgggcagttccactaatcatcatctaaatacactagttaacaatatatttgtatagtaatttctaaattttataggggtcagctgacccaacaaaaccccctagctctgccctggctcttatcagaaacttgcactattg

SEQ ID NO: 33749 - DNA, 1775 bp, Zea Mays
ggacgttcgaggtcgagatcacctgaggaggcattggcgggaatagaggtcgtcagtagccacagaggctacatatagcagccaatgagtcaagtgaagcggtgaatcatcgtctaagatggatgaccatagttcaaggccaagtgtttggaaacgggtgagactgttgccataaagaaggttcttcaagacaagcgttacaagaaccgcgaactgcagaccatacgcctccttgaccaccctaatgttgttgctttgaagcattgcttcttttcaacaactgagaaggatgagctttatctaaatttggtccttgattatgttccgaagatagttcatcgagttgtgaaacatcacaacaagatgcaccaacacatgccacttatttatgtgaagctttatatgtaccagatatgtagagcattggcttacattcatggtactatcggtgtctgccagagatattaagccacaaaatcttttggtgaacccacacacccaccagcttaaactatgtgactttggtagtgcaaaagttctggtcaagggggaaccaaacatatcatacatctgctcgcgatactatagggctccagagctcatatttggtgccactgagtataccacagcgattgacatttggtctgctggttgtgttcttgctgagcttatgctagggcaggtgaaagtggtgtggaccaactcgtagaaatcatcaaggtccttggtactccaacaagggaagaaattaaatgcatgaacccgaattgcacagagtttaagttcccacaaatcaaagcacacccatggcacaaggtattcaacaaaaggatgccgccagaagctgttgatctggtctctcggctactccagtactccccaaatctgagatgcactgctgtggaggcgcttgtccacccattctttgacgagcttcgagatcctaatactcgtcttccaaatggccgcttcctgccaccccttttcaacttcaagcctcacgaattgaaaggagtcccagcagacattgttgcgagattggttccagaacatgcgaagaagcaatgctcttatgttggatcgtgagatgaccgtgccttgggactggaacctgaggttgcaatcgtgcatttcccctggtatgttggatgatcttgaggcatgcgagcctgtcgttgaagatgcaaggttacctactttacgacgtacgccaatgcgacctgtgtagctgtgagtagtctaatgttgcagtgacatgtaatggcgcacccccgtcctactaacagatgcttactggagattgccatagctgatcttgtaatttgttatagggcagtatgaatatatttatggtagcttgaatctatttgtggattcacttcgtttttccatgtttccttgtctccagacctggactggactgctatcggtttttgtttcagaattcctagctacctgttgcctagtgcctcccagcttgctcctgtcgattatttgcacactggcgatggtacctgttcttgattgttgccgaaaaaccttttggttgagatgtagtacattgttatttgatcagtctggaagtatgctgatttgatcgctcttatcagggacgaagccagataacaaagtcattgggcagttccactaatcatcatctaaatacactagttaacaatatatttgtatagtaatttctaaattttataggggtcagctgacccaacaaaaccccctagctctgccctggctcttatcagaaacttgcactattg

SEQ ID NO: 33750 - DNA, 1397 bp, Zea Mays
ccatccaactcacacacaggctcaccccaccaacagcaaggcgaagatgtcggggcgcggcaagggcgggaagggcctgggcaagggcggaccggcgatccggcggctggcgcgcaggggcggcgtgaagcgcatctccgggctcatctacgaggagacccgcggcgtcctcaagatcttcctggagaacaccgtcacagccatggacgtcgtctacgcgctcaagcgccagggccgcaccctctacggcttcggcggctaggctatgccggtcgcgctcgcgcctcgctgtcgtcgctgcggttcttgtttctgcaattcgcaaggtgtggcttgacggggaaaatgctggttaatgtagcactagatcaagcatgttgtgcgtgtctgaagaaatgccaattgtgacttgctgtttgttcaaacatgttccgtttcttcacatatcaacacccgtcgtccctgcgtgtgttacaaatgtagttaacttagtcatgatgtgtcttgcgcgcattccatctctgtccaatatgcttaatgtatttctgtactaggtaatccattacctctgtttcattttatttcaatgacgaactagcttattggatttcgtatgtccaaagtaaatatttcgcttacagggcctcattggagcacgtgaacggtcgttagctgctgattatatgttgcaatggatgcgttgagtactagcctctaggatatcactggcttggtgaaccgcacacacaagactgaactattcatccgaagagagtcaaatttaccagtgattctcaaagttgtttgggagtgtcatctaagcatcaagagtttcaaaatacaattttgactatctaaaattataacaggtcttattccatgatatattttgtttttttctaaatcagggctactagtttaaatgaaaatccaatataacatttaaagaacaattttagtttcaaaattacaaaatctataatcccatgtacaaataaaacgtgtcgtacttaaattttaaatttcatttaaaaaaccatatgatttttggaggtttctaagttcttcatttaaattgataaaatagagaaaaaatcaacttgaagactaaatgtcgttcttacgtagagcaaattttagagcaactcctatagaaactctaaacaacgaaataaattgaaatgtaggacctaaatttaaaaggagcctcattttaataaaatcaatctaaacattttaggacccaactttaagggcagcatatttgggactcataagcatggtcctatacagttccgctccttccaacctccacggaaatttcttgcttctctgccgctcgtacaattgttcaattcaattgacttcatctataattattcggttcatttgacttc

SEQ ID NO: 33751 - DNA, 1531 bp, Zea Mays
cgccattctcccgccagcacgctctcctgcgctcccgctcccacgccctcccgctttcgcgccatcccactcgcatccacgcccatgctgttgcgctctggccgccgcaatcttccatcgccgccgcaatgttcaggccgccgcgaccctgtcgaatagagagtggagaaaaagggatgggtatcggatctgcagagagtcaatcccagtttcttctaggaagggtggaagaagaggcatatcatctggagggagagtccgctgactccactatcagatccatgcgccaccaggtggttcccctcacagccaacgatcggatcccagaagatgtgccaagtggtagccaattcgacggtaccatggattctaggtattacacaaatctcctggttaatggtattgaagaatctcaagcaactcgtagtgatgtaagaatccaacatggtcgtgcaacagccaagagttctcagggtagaagcaaaaattttagagatgaggaggacattcttcttgtgtcagcttggctgaatgtgggcatggatcctattcaaggagttgatcaaacacatggcacactatggagaaggatacatgaatatttcaatgcaaacaagaaggttgaagctaggaatcacagtggttggtcaattgatgacaaggtcgcaaatgcatgtgtaatgttcaaggccgaagacccaaaggataagaagttttcatacctgcattgctggaaaatcttgaaggacaagcccaagtggatggataggcggaaggaaattggaagtgcaaaaaaatcagccactaagaaacagaagacaacgacaaattcttctccagcatcagttgcaaatgcaattgccgtagatgcccctcttgggggtgctgatcatgatgaaccatcatgtaggcccgacggtaagaagaaggagaaacaaaagctacgacaacgttcgtccatggaagttgtagactatctaattgcaaagaagaaagattctgaccttgaaaaggacttgaagaaagaggagaggtgcaataaagcctttgctctacaggaagaaaggatcaaattggacaaagaaaagtttgcgttccaaagacagctcgaagaggacagaataattggtttggaccttagcaccatgaactataaacaacagcagtattatgaagatcgtcagaacgagattcttgcaagacgtttcaatatctagaattttctagttttagttaagtatgctagatttttgcttcatagtccaagatgatttttgctgctagatttttctgttcgcatggtactcaaaaagggactgaatgttttcaagtttcgtgtattggactgaaaaaagggactgcatggtacacaagaacagaaaaaaattacaagatctcgtttggatgtttcttgaaaacgtaaatatttgatttatagattatcctcacctgttgtgaacacgtaactccacacatgattgcaggcaattgaagtggaaataaacagtaaccatgtttactgcacaacttt

SEQ ID NO: 33752 - DNA, 983 bp, Zea Mays
caccgcccgtcaagaggcgattccttaactgacgctgcgactccgatcacccatcaccgctgccctctctcctctgcctacgccggcgccgacgccggggctagaccgtcggggagtcatgtcgcggtctttgagcatgagaggtagcatgaggtcgcgccgcgacctacctcctcccgggaagacaattgaaaggcttgagagtatggttgatggaggaaatttctatgaagctcaacaaatgtacaagtcaaccagcgcaaggtatattgctgtccataagtattcagaagccttggacatccttcaatcaggcgctttggtacaattgaagcttggacaggttacctgtggtggtgaacttgctgtcctctttgttgacatcctcatcacaggagagtttccatatagtgaacaattttttggtcaggttttttcttttataaagcaacacagtgcataagtttcttctactgatcatccaaatatttcctattgtttcagtttgaattcccttcaattatctagccaatccatttgcacagtatatcattttttagttactcctatcttgtctgtcctgcaaaatatgaagagcctaaaatattgttgaaagcggtgacccctagtgccaaatatgattttagcatatttaattctcttttttcttttctatctttacatacagaaagtcttattgatccccctatggttctgcacgaactgaataaaacaatccccttttagtaaattgacgcatgcaataagttcagttgatagatatcacatttttgtgatagtaactatattgtgtaacattagatcgtatcagaaagatatatgaggcattcccaaggataaccgttccacatttccttggagaggactatgatgatgagggacataaattgtctgaagctatttctgctgccaaagtgcgcgcagagagttgttcatcattcctgaaagctgccatcaggtag

SEQ ID NO: 33753 - DNA, 600 bp, Zea Mays
ctttaagattcgcgcaagcacgatcaccgcccgtcaagaggcgattccttaactgacgctgcgactccgatcacccatcaccgctgccctctctcctctgcctacgccggcgccgacgccggggctagaccgtcggggagtcatgtcgcggtctttgagcatgagaggtagcatgaggtcgcgccgcgacctacctcctcccgggaagacaattgaaaggcttgagagtatggttgatggaggaaatttctatgaagctcaacaaatgtacaagtcaaccagcgcaaggtatattgctgtccataagtattcagaagccttggacatccttcaatcaggcgctttggtacaattgaagcttggacaggttacctgtggtggtgaacttgctgtcctctttgttgacatcctcatcacaggagagtttccatatagtgaacaattttttgaaagatatatgaggcattcccaaggataaccgttccacatttccttggagaggactatgatgatgagggacataaattgtctgaagctatttctgctgccaaagtgcgcgcagagagttgttcatcattcctgaaagctgccatcaggtag

SEQ ID NO: 33754 - DNA, 1085 bp, Zea Mays
ccctatttgtgatcaagaatttgaagatattgatcacttgctggtggggtgtgttttttctagacaattctggtacagatggctcgggcaggtcaacctgcagggcctcactcagcctggcgataggagcactatggattggtggaagaaggcctttgatcagttgcagggcattgctgcaaaatggcttaattcccttatcatcctggggttctggacactttggaaccacaggaacggctgcgtttttgagatgctcatctctgatgttgcttcggccattaggaaagttgagaaggaattggagctgtgggagatggcagggtccaagagtctctctcctaacggctcccattcctgcgatttagtggggagttcctttgttgtgtagtttatttactgtttttttggccaccgtttggtgttcctctttgttcttgtatttggtctactttggaccttctttttcttcttaatataatgatgcgcagctctcctgcacgctcaagaaaaaaaaaattcaccaatggggacgctcatttccctatatgcaaaatctgcactgttaagagattcgctaggcttgagagagatgcttatcctctttttaggacacttcgacagaagtataagacaagcacagatcgtgacgctgtgtttcaggagttactggacgaaatagctgcaaaattttacaatatacagcgccagaaccctttagaaggacttttcagcgaaatgttcaggatataatgcatgagaaaagaattttatgtcgatgctttcatcaaaaccattggctaaaataatacagttgctgccacggcagctcatgatcaatgaagggcaccaactgatgtgtttggtttgtccaaatgggcgaggtatgcagacggggtccagcattaaactattcagagagctccgtgttgagcaatatgatcacttgatcagtcagaacgaattaagtttttgacagatgtaattaagcaaaaaaaaaatcttgtttacctgtactattcagagagacgcgttattggtttggactttgggttctgttgcagcggaatgacgaccaaaagcag

SEQ ID NO: 33755 - DNA, 1109 bp, Zea Mays
ccctatttgtgatcaagaatttgaagatattgatcacttgctggtggggtgtgttttttctagacaattctggtacagatggctcgggcaggtcaacctgcagggcctcactcagcctggcgataggagcactatggattggtggaagaaggcctttgatcagttgcagggcattgctgcaaaatggcttaattcccttatcatcctggggttctggacactttggaaccacaggaacggctgcgtttttgagatgctcatctctgatgttgcttcggccattaggaaagttgagaaggaattggagctgtgggagatggcagggtccaagagtctctctcctaacggctcccattcctgcgatttagtggggagttcctttgttgtgtagtttatttactgtttttttggccaccgtttggtgttcctctttgttcttgtatttggtctactttggaccttctttttcttcttaatataatgatgcgcagctctcctgcacgctcaagaaaaaaaaaattcaccaatggggacgctcatttccctatatgcaaaatctgcactgttaagagattcgctaggcttgagagagatgcttatcctctttttaggacacttcgacagaagtataagacaagcacagatcgtgacgctgtgtttcaggagttactggacgaaatagctgcaaaattttacaatatacagcgccagaaccctttagaaggacttttcagcgaaatgttcaggatataatgcatgagaaaagaattttatgtcgatgctttcatcaaaaccattggctaaaataatacagttgctgccacggcagctcatgatcaatgaaggtgcttggctgcttgcccaactagaatgtccaaagccatacatttagcatcttactgcatgaagatatatacttgactctggaaaatcgttgattagtctcagattgttacggagcatgtgtaacttaattttgttttctattacatgttttcctttgttgcccttgccctgtccacttttagagatgtatcttgcgtgacccagagatcaaaatggtaacctatttatattcattgattttaatatacggtgtttatcggtaa

SEQ ID NO: 33756 - DNA, 1324 bp, Zea Mays
attttttctaaaaaattcttaaattcatatttagggagttgtttacatagctattggagatgctctaaggggtacatgtttcccttatcttccgggtgcccatattgagatgtccatcagttagagggttactgcagagtgcaaagatgcaacctgctgaagaatttatgtaatcctttctttcggcgttcagccaaactgaaaggattcagataagcaggccatatcataggccccatccagttcccgctcagcagtcaccacccatcattaatcatcaaaccaaagaaaaaggcactacttagccgtggggcatgcacagcttctgtgcaaaattccaattgctgtaaaattggatcagcatttcaaaaaaaaaacatttttatggtttcctatcttcttttgctcctcaatttactcctcccttcgaacttcttagacccacttttgcattttcctctctgcttggttttcttctgcgccttgttgcccttcttcctctcgtccaagttgctcccatccccatcggaagcttcgccatcagaatctccgaacccagtgagcttctcgtactcctcttcatcgatgtctccacgtttgagcttcttcagaagccggtactcgtgcgccagctcatccaggtcctccttggtttggattgactgacgctgcttgcccgtcttcttccgctttggcttctccggcttctctggaggtctcttcctctccggctttggattttgagcctcctcttctgctttccttttcagcgccttcttgcgttgtttttctcgagctttatccctgcagtgaagcaaaacagaaaatcatgtcaaccccaatgtgatactaccacacaaaaagaactagtggcaccatctttcgactacgaagtgctgagtaggttatggaaaaaaggaaaaatcagactcagtgcagactatcgctcgaaatcacaaaacacaatacaacaaagcttttttcatgccctcctattcaaagctcaatctttagatatattccatctttttaaatcttcttttactgcttcttcttatgtcaacttaggttttttctgcctctcctctcattgctatgtagcatgtcttatgttctctagatgtctttgttgaacatatccaaaccatctcaaacaatattagacaaacttttcttgaattggtgcacctaagcttatgaggtatatcatagtatgaggctcaagcccttcttgtatggccgtaaatccaacacaacaaacacatttccttaccacttatccattgagcatgtctttttgagatcaatatttgcgccatacaac

SEQ ID NO: 33757 - DNA, 2447 bp, Zea Mays
ctctattccgccctgtgttctcgaacggtcccaaaccctaggcctaggcgcgaccagagtccatgtcggggtcttacggatccgacgactaccgcggcggcggcggcggcggcgtggtggtggaggcgggggcagaggaggatacaatcaaagtggtggtagtgaccgtggttttgatgaccaccgtggtggcagaggtggcagctatggaggacgagaccaggagaaccaaaagggtagtgaaggtggctacaatgctggtggttatggacaaactcctcaaggtcctccttcctacggtggtcctgcagtgccgcctcctaatagctacagtggtggcccaggctcatacccaccaagctatggtgccccgcctccacaccaatatggtggtgccccaggcgggcaaggcggcctgcctcctacatatgctggtggatatggtggtcagtccatgcctgggggtggaggatctgggggtgcaccgccaccttatcgtggcggcgctagtgtttatactggtagtgctggtcctgaaccagctggaaaagtcaagcaatgtgatgaaaattgtgacgagacatgtgacaacgcaaggatttacatatcaaatttgcctcctgatgtcactgttgaggaattacaggagctatttggaggaatcggccaggttgggaggatcaagcaaaaacgtggttacaaagaccagtggccctggaacataaaaatctacactgatgactctggaaaagccaaaggagatgcttgccttgcctatgaagatccttctgctgctcattcagctggtggattttacaataattatgacatgagaggctacaaaatcagcgttacgatggctgaaaaatcagcacccagagcagcaccttcttatggtcatggcggtggccgcggtggtggatatggtggaggtggacgcagggataattacagagatggtgggggccatggacccaatagaaaccagggtggtggttcgcgttcccgaccatactgaaagcaactaatattcttactgtgattgttgcctgtgagaaaccatttctattcctgttctacggatttgtactcattcaggcgcataagatggggatataagctccaaatgctggtaggtttgtgatactatttcagccggtggatcactcctgtaagctttggattttgctgcaaagaacaggtagcgtggtttatcatgtgataggtttattagatttcgtctatattagatgacatatcaaacaacattcatagaatgttccacacccatttttgtttgaatgcacagagggtttgtagcatgtacttagcttaggttgccacaaacatttggcttcatatagatggtgaattgtgcctctgggtaataagcttgttttggtaaagagcctactcttggataaaggctgcagctccacttgtgccccaactaaacatccttagcaacacaatttgactttttttgtgctaaagtgatgatttataaatagaaaaggaacaagaattgggtggattattgcttcatttgccatttgaggcctctcgggagtatgggactgggtcactgggagctcatgcctttggttaattgacctggagactttgacaacttcatagtgcacaatccttgcaccgatcagacatatcagtcgcctgtgcgtgcagatggcgaaccagcattggtattttcgtgtgctgaggcctttattgtatttaccttcttatttttattaagctttcatgaagtatgtgaatgattgtactgcttgagcagtaaccaattaagtacacgacgggaaagctactggctgttgcagaagccggtagtgtattattattacaatcgggagacaagtcatgtgggcaagcgcaagtgtattgtagcctacgttgcgattatttggaatcgaaattttagcgatcccactggcaacgtaatgctccccttgttccgaaactaaacggatttttggagattctgaacgccaattgtcttgtaagttcgatataaaatatatagaaaacattatggatatttatggcattaaattcgttagtcatatgataatgagatatatttctatagtgtgttcgtaactagtgacataaatgttgatattttttctatattaataaatttggtcaaatgtaaaaagtgtttgacgtaaacaaaatctaaggcaccaagcgactaatttgattgaagcatttcttagcgaaactaatataaacaaatattaacgtctgagtaaagtacaccaaagatctataaactcaaaacgaatttttaggtccctaaacttgttttgccatgtcatccagttctataaactcaaacgatttttttagtctcaaacgattttttagtctctaaacttgttccggtatacactatagtccaaaccgacccaatctcgcaacatggg

SEQ ID NO: 33758 - DNA, 2429 bp, Zea Mays
tctcgagcgctctattccgccctgtgttctcgaacggtcccaaaccctaggcctaggcgcgaccagagtccatgtcggggtcttacggatccgacgactaccgcggcggcggcggcggcggcgtggtggtggaggcgggggcagaggaggatacaatcaaagtggtggtagtgaccgtggttttgatgaccaccgtggtggcagaggtggcagctatggaggacgagaccaggagaaccaaaagggtagtgaaggtggctacaatgctggtggttatggacaaactcctcaaggtcctccttcctacggtggtcctgcaggctcatacccaccaagctatggtgccccgcctccacaccaatatggtggtgccccaggcgggcaaggcggcctgcctcctacatatgctggtggatatggtggtcagtccatgcctgggggtggaggatctgggggtgcaccgccaccttatcgtggcggcgctagtgtttatactggtagtgctggtcctgaaccagctggaaaagtcaagcaatgtgatgaaaattgtgacgagacatgtgacaacgcaaggatttacatatcaaatttgcctcctgatgtcactgttgaggaattacaggagctatttggaggaatcggccaggttgggaggatcaagcaaaaacgtggttacaaagaccagtggccctggaacataaaaatctacactgatgactctggaaaagccaaaggagatgcttgccttgcctatgaagatccttctgctgctcattcagctggtggattttacaataattatgacatgagaggctacaaaatcagcgttacgatggctgaaaaatcagcacccagagcagcaccttcttatggtcatggcggtggccgcggtggtggatatggtggaggtggacgcagggataattacagagatggtgggggccatggacccaatagaaaccagggtggtggttcgcgttcccgaccatactgaaagcaactaatattcttactgtgattgttgcctgtgagaaaccatttctattcctgttctacggatttgtactcattcaggcgcataagaggcagatggggatataagctccaaatgctggtaggtttgtgatactatttcagccggtggatcactcctgtaagctttggattttgctgcaaagaacaggtagcgtggtttatcatgtgataggtttattagatttcgtctatattagatgacatatcaaacaacattcatagaatgttccacacccatttttgtttgaatgcacagagggtttgtagcatgtacttagcttaggttgccacaaacatttggcttcatatagatggtgaattgtgcctctgggtaataagcttgttttggtaaagagcctactcttggataaaggctgcagctccacttgtgccccaactaaacatccttagcaacacaatttgactttttttgtgctaaagtgatgatttataaatagaaaaggaacaagaattgggtggattattgcttcatttgccatttgaggcctctcgggagtatgggactgggtcactgggagctcatgcctttggttaattgacctggagactttgacaacttcatagtgcacaatccttgcaccgatcagacatatcagtcgcctgtgcgtgcagatggcgaaccagcattggtattttcgtgtgctgaggcctttattgtatttaccttcttatttttattaagctttcatgaagtatgtgaatgattgtactgcttgagcagtaaccaattaagtacacgacgggaaagctactggctgttgcagaagccggtagtgtattattattacaatcgggagacaagtcatgtgggcaagcgcaagtgtattgtagcctacgttgcgattatttggaatcgaaattttagcgatcccactggcaacgtaatgctccccttgttccgaaactaaacggatttttggagattctgaacgccaattgtcttgtaagttcgatataaaatatatagaaaacattatggatatttatggcattaaattcgttagtcatatgataatgagatatatttctatagtgtgttcgtaactagtgacataaatgttgatattttttctatattaataaatttggtcaaatgtaaaaagtgtttgacgtaaacaaaatctaaggcaccaagcgactaatttgattgaagcatttcttagcgaaactaatataaacaaatattaacgtctgagtaaagtacaccaaagatctataaactcaaaacgaatttttaggtccctaaacttgttttgccatgtcatccagttctataaactcaaacgatttttttagtctcaaacgattttttagtctctaaacttgttccggtatacactatagtccaaaccgacccaatctcgcaacatggg

SEQ ID NO: 33759 - DNA, 1001 bp, Zea Mays
ctcgaacggtcccaaaccctaggcctaggcgcgaccagagtccatgtcggggtcttacggatccgacgactaccgcggcggcggcggcggcggcgtggtggtggaggcgggggcagaggaggatacaatcaaagtggtggtagtgaccgtggttttgatgaccaccgtggtggcagaggtggcagctatggaggacgagaccaggagaaccaaaagggtagtgaaggtggctacaatgctggtggttatggacaaactcctcaaggtcctccttcctacggtggtcctgcaggtgactatgcagcacctacgagctcttatggaggcaacaatgcttatggttcagaatctgcagtgccgcctcctaatagctacagtggtggcccaggctcatacccaccaagctatggtgccccgcctccacaccaatatggtggtgccccaggcgggcaaggcggcctgcctcctacatatgctggtggatatggtggtcagtccatgcctgggggtggaggatctgggggtgcaccgccaccttatcgtggcggcgctagtgtttatactggtagtgctggtcctgaaccagctggaaaagtcaagcaatgtgatgaaaattgtgacgagacatgtgacaacgcaaggatttacatatcaaatttgcctcctgatgtcactgttgaggaattacaggagctatttggaggaatcggccaggttgggaggatcaagcaaaaacgtggttacaaagaccagtggccctggaacataaaaatctacactgatgactctggaaaagccaaaggagatgcttgccttgcctatgaagatccttctgctgctcattcagctggtggattttacaataattatgacatgagaggctacaaaatcagcgttacgatggctgaaaaatcagcacccagagcagcaccttcttatggtcatggcaagagtgacttcatcaaggtgattacacaagcggcagggaaccacttcaaatt

SEQ ID NO: 33760 - DNA, 1103 bp, Zea Mays
ccctaagttaacctatatgggttagaaggtatgcattcgtgttcataatattgtatttgactaaaaagactgggcctacgcatgggggctccaaaacagaggtggacttctgaggaagaggctgctcttagagctggagtagccagacatggagttggaaattggcgcatgatattgaatgatccagaacttagctccacattgcgctaccgctcgaatgttgacctaaaggacaaatggcgcaacatgaatgtaattgtcacttcatcgagtactcgtgacagggggagaacttccacgaggagaacccgagctgctcctaagaataatgaccaattgttggcaatgagcacaatcacttctgaggttgatgatgagattgttgatgtaaagcccatagtatcaatgtctgttgaaggatggaatacttcaaattcaaagaaatctcactcaaggctagacaatattataatggaggctataaagaacttgaatgagcctacagggtcccacagaactactattgctaattacatagaggagcaatattggccacctagtgattttgatcacttattgtctgcaaaactgaagtatttagctaccagtgggaaattgttgaaggtgaatcggaagtacaggatagcacctagtttgctggaagacgtgcaaagagaacccttgaaattagggagtgatgctagtagaacccttacaagatcccaagtcgatgctgaattggtccgtatggcaactatgactgttgaggcggcggcggcagctgctgctcatgcagttgcagaggcagaggctatcatggcagaagctgaagcagctgctagggaagcagaagctgcggaagcagaggcccgagctgcacaggcctttgctgaagcagcagttttgacactgaagaacagaaatgctgcgaaattggtatagctcgagtccatgaatcttagatatgccctcttgtccttccacacgtagaatccagttccgtagctctgtatgcaactaattggttactaaaagaacctgaaatcagaagttttcacaaacacaccgacttattcaccgaagattatgatttccaaagtaat

SEQ ID NO: 33761 - DNA, 1255 bp, Zea Mays
atcatctaaaaaggctaatataataaaaaaaaactgcgcgcactgctgtcaccgcggcggagggaaaaatcgggcgtaccccggtgcccgttcaccgccgttcacgccgcgtgtgcgctctggctctgccgctctctctctctcctgcgcgtggcgcaactgccgtcctataccaggcgcccaggtctagcctcgtcggtgccttcgccaggtctttctcgggcccttcgccaacgacgagcgcccgctagaggtggacttctgaggaagaggctgctcttagagctggagtagccagacatggagttggaaattggcgcatgatattgaatgatccagaacttagctccacattgcgctaccgctcgaatgttgacctaaaggacaaatggcgcaacatgaatgtaattgtcacttcatcgagtactcgtgacagggggagaacttccacgaggagaacccgagctgctcctaagaataatgaccaattgttggcaatgagcacaatcacttctgaggttgatgatgagattgttgatgtaaagcccatagtatcaatgtctgttgaaggatggaatacttcaaattcaaagaaatctcactcaaggctagacaatattataatggaggctataaagaacttgaatgagcctacagggtcccacagaactactattgctaattacatagaggagcaatattggccacctagtgattttgatcacttattgtctgcaaaactgaagtatttagctaccagtgggaaattgttgaaggtgaatcggaagtacaggatagcacctagtttgctggaagacgtgcaaagagaacccttgaaattagggagtgatgctagtagaacccttacaagatcccaagtcgatgctgaattggtccgtatggcaactatgactgttgaggcggcggcggcagctgctgctcatgcagttgcagaggcagaggctatcatggcagaagctgaagcagctgctagggaagcagaagctgcggaagcagaggcccgagctgcacaggcctttgctgaagcagcagttttgacactgaagaacagaaatgctgcgaaattggtatagctcgagtccatgaatcttagatatgccctcttgtccttccacacgtagaatccagttccgtagctctgtatgcaactaattggttactaaaagaacctgaaatcagaagttttcacaaacacaccgacttattcaccgaagattatgatttccaaagtaat

SEQ ID NO: 33762 - DNA, 1281 bp, Zea Mays
atcatctaaaaaggctaatataataaaaaaaaactgcgcgcactgctgtcaccgcggcggagggaaaaatcgggcgtaccccggtgcccgttcaccgccgttcacgccgcgtgtgcgctctggctctgccgctctctctctctcctgcgcgtggcgcaactgccgtcctataccaggcgcccaggtctagcctcgtcggtgccttcgccaggtctttctcgggcccttcgccaacgacgagcgcccgctaggttagaaggtatgcattcgtgttcataatattgtatttgactaaaaagactgggcctacgcatgggggctccaaaacagaggtggacttctgaggaagaggctgctcttagagctggagtagccagacatggagttggaaattggcgcatgatattgaatgatccagaacttagctccacattgcgctaccgctcgaatgttgacctaaagggggagaacttccacgaggagaacccgagctgctcctaagaataatgaccaattgttggcaatgagcacaatcacttctgaggttgatgatgagattgttgatgtaaagcccatagtatcaatgtctgttgaaggatggaatacttcaaattcaaagaaatctcactcaaggctagacaatattataatggaggctataaagaacttgaatgagcctacagggtcccacagaactactattgctaattacatagaggagcaatattggccacctagtgattttgatcacttattgtctgcaaaactgaagtatttagctaccagtgggaaattgttgaaggtgaatcggaagtacaggatagcacctagtttgctggaagacgtgcaaagagaacccttgaaattagggagtgatgctagtagaacccttacaagatcccaagtcgatgctgaattggtccgtatggcaactatgactgttgaggcggcggcggcagctgctgctcatgcagttgcagaggcagaggctatcatggcagaagctgaagcagctgctagggaagcagaagctgcggaagcagaggcccgagctgcacaggcctttgctgaagcagcagttttgacactgaagaacagaaatgctgcgaaattggtatagctcgagtccatgaatcttagatatgccctcttgtccttccacacgtagaatccagttccgtagctctgtatgcaactaattggttactaaaagaacctgaaatcagaagttttcacaaacacaccgacttattcaccgaagattatgatttccaaagtaat

SEQ ID NO: 33763 - DNA, 1329 bp, Zea Mays
atcatctaaaaaggctaatataataaaaaaaaactgcgcgcactgctgtcaccgcggcggagggaaaaatcgggcgtaccccggtgcccgttcaccgccgttcacgccgcgtgtgcgctctggctctgccgctctctctctctcctgcgcgtggcgcaactgccgtcctataccaggcgcccaggtctagcctcgtcggtgccttcgccaggtctttctcgggcccttcgccaacgacgagcgcccgctagaaggtatgcattcgtgttcataatattgtatttgactaaaaagactgggcctacgcatgggggctccaaaacagaggtggacttctgaggaagaggctgctcttagagctggagtagccagacatggagttggaaattggcgcatgatattgaatgatccagaacttagctccacattgcgctaccgctcgaatgttgacctaaaggacaaatggcgcaacatgaatgtaattgtcacttcatcgagtactcgtgacagggggagaacttccacgaggagaacccgagctgctcctaagaataatgaccaattgttggcaatgagcacaatcacttctgaggttgatgatgagattgttgatgtaaagcccatagtatcaatgtctgttgaaggatggaatacttcaaattcaaagaaatctcactcaaggctagacaatattataatggaggctataaagaacttgaatgagcctacagggtcccacagaactactattgctaattacatagaggagcaatattggccacctagtgattttgatcacttattgtctgcaaaactgaagtatttagctaccagtgggaaattgttgaaggtgaatcggaagtacaggatagcacctagtttgctggaagacgtgcaaagagaacccttgaaattagggagtgatgctagtagaacccttacaagatcccaagtcgatgctgaattggtccgtatggcaactatgactgttgaggcggcggcggcagctgctgctcatgcagttgcagaggcagaggctatcatggcagaagctgaagcagctgctagggaagcagaagctgcggaagcagaggcccgagctgcacaggcctttgctgaagcagcagttttgacactgaagaacagaaatgctgcgaaattggtatagctcgagtccatgaatcttagatatgccctcttgtccttccacacgtagaatccagttccgtagctctgtatgcaactaattggttactaaaagaacctgaaatcagaagttttcacaaacacaccgacttattcaccgaagattatgatttccaaagtaat

SEQ ID NO: 33764 - DNA, 988 bp, Zea Mays
atcatctaaaaaggctaatataataaaaaaaaactgcgcgcactgctgtcaccgcggcggagggaaaaatcgggcgtaccccggtgcccgttcaccgccgttcacgccgcgtgtgcgctctggctctgccgctctctctctctcctgcgcgtggcgcaactgccgtcctataccaggcgcccaggtctagcctcgtcggtgccttcgccaggtctttctcgggcccttcgccaacgacgagcgcccgctaggttagaaggtatgcattcgtgttcataatattgtatttgactaaaaagactgggcctacgcatgggggctccaaaacagaggtggacttctgaggaagaggctgctcttagagctggagtagccagacatggagttggaaattggcgcatgatattgaatgatccagaacttagctccacattgcgctaccgctcgaatgttgacctaaaggacaaatggcgcaacatgaatgtaattgtcacttcatcgagtactcgtgacagggggagaacttccacgaggagaacccgagctgctcctaagaataatgaccaattgttggcaatgagcacaatcacttctgaggttgatgatgagattgttgatgtaaagcccatagtatcaatgtctgttgaaggatggaatacttcaaattcaaagaaatctcactcaaggctagacaatattataatggaggctataaagaacttgaatgagcctacagggtcccacagaactactattgctaattacatagaggagcaatattggccacctagtgattttgatcacttattgtctgcaaaactgaagtatttagctaccagtgggaaattgttgaagggtcaagaaggccagctgacttcccaggatgcaaccatgtatatctctgaaagcagttgcaacgtgaggggccttttgtgaaacccagggttcaaaccctgatcctacagcaccacaactgggtgcccaacca

SEQ ID NO: 33765 - DNA, 862 bp, Zea Mays
atcatctaaaaaggctaatataataaaaaaaaactgcgcgcactgctgtcaccgcggcggagggaaaaatcgggcgtaccccggtgcccgttcaccgccgttcacgccgcgtgtgcgctctggctctgccgctctctctctctcctgcgcgtggcgcaactgccgtcctataccaggcgcccaggtctagcctcgtcggtgccttcgccaggtctttctcgggcccttcgccaacgacgagcgcccgctaggttagaaggtatgcattcgtgttcataatattgtatttgactaaaaagactgggcctacgcatgggggctccaaaacagaggtggacttctgaggaagaggctgctcttagagctggagtagccagacatggagttggaaattggcgcatgatattgaatgatccagaacttagctccacattgcgctaccgctcgaatgttgacctaaaggacaaatggcgcaacatgaatgtaattgtcacttcatcgagtactcgtgacagggggagaacttccacgaggagaacccgagctgctcctaagaataatgaccaattgttggcaatgagcacaatcacttctgaggttgatgatgagattgttgatgtaaagcccatagtatcaatgtctgttgaaggatggaatacttcaaattcaaagaaatctcactcaaggctagacaatattataatggaggctataaagaacttgaatgagcctacagggtcccacagaactactattgctaattacatagaggagcaatattggccacctagtgattttgatcacttattgtctgcaaaactgaagtatttagctaccagtgggaaattgttgaaggtgatat

SEQ ID NO: 33766 - DNA, 675 bp, Zea Mays
cgcctgtctgtcatcactcatatcataagaagatgatcacatctcgcacacaagcatatgcatatcactcattccagagaatgagatgacaagacgttgttgcaccacttttatttgaaacgaacctgcactgcaggtgaggatgatgcctggttcaatggctgcgcgccaacctctgcaagggaagcaggagctgcagccatacgatggccgtgacccttcagcgctcggggccgggggtagtccagttcttctgccccggcagcaggaaagcgccgctccaccggccgtgcgggtagcgccgccgccggacatgtcgtcgtcgtcggggtcggggaggagtgcgacggaggcgagggccctgaaagtccacagcgaggccgagcggcggcgccgggagaggatcaacgctcatctggctacgctcaggaggatggttcctgataccaggcaggtcggtgtgtgatccttccaccctcaatgattcacttcatcacttgtgtgaatgaatcatctggcacacacactttgtgaaagactgaaacaatattttaccagcattaatcttcttggtttttcgcagtcctgatttttgtagaaattcggctggtttagtgagtattagtaaaagtaggcgaaatactggaagtaaaattggaaagaagttaatctcca

SEQ ID NO: 33767 - DNA, 3553 bp, Zea Mays
ccctgctagtcatacctggtgcacctacaaaaccataaaattttctgcactatttaagtatcaacaatggtaaactaaatcaatagcagaaactgctatcaattaaaacaaaatggatagttcagttcagactcaaaagtcacgtttcgcatcatgttttaaatcaattcatgaaagcagctcctaccaatactaacctgatggtagagttcttgttggcaaagaaacaggcacttggttcatttccactggtgcacttgaggaagcacttgcggttgaaccgaatgacggcacatgaacactgtttatgtttaatgggtatgttgaagctgatctgggtactaatggaatactactgtggcgtgctctcacattcctctgaaacccttcttggtgaatcaagtgttggatatcccaaccactttggtcaatgcttaaaggtatttgacggagaaagggctcagcaagtggagctgcatttggctgcacagagttagatggctgagtactggaagaacttccaacataataaccagtagcactgatccctgcagggtgtacactgggaccttttcgcttcattgcagcccttctgttgtccatatgggaacccactggagcgaagccttcctcagacctatgtggataattcacagcagggtctggtaaatggctaccagaacttccagcatgaaaatgaacaaagggagcatgcgaggttcctgggttcccaactctataacctagagtctgcacagtgcgacttgaagatggaagatcatttattctaagtcccatatttccatgacttgaatgaccaattctaaggggcgcatcacttccatgatgcaggagaagcttctggcctgagattagaaaaaatgttatttattttatcacacatttcgataaaatttaaacaagtaaagagtacttgagtcagtccagctacctagaggcagtgattcattgtgtgggatgttcttgggttgaatttgatccatctctggcagctcgagatggccctcattatttcgagccataaaacaagtcaggcccaactgcacttaataatctggagatgaaaaacaaaatggatatcaataatttggtatcacgtaaccagactcaaatgaaagcatgtgttgccacgaagtttatcacaaactagttcattccaaaatatggcactacatatattgtgtgtaagatatcacaaaacaagtaccaaaatcgttcaagttcattccatgttcaatcttcaatgtttgatttccagtacatggatatacaacacaagaattcagaatttcaatcaattcatacaactgaaagatcacaccaaaaacatggaagaaacaccctttatgagacatgtgcattgtgaaatatatgcagtccaaatcattcttccgtaattgacaagcaaatgcactataaggttttacgctgaatcattcacatcccttgacaggtaaacagctggtaaatagacaacagaatacagaccttagcacttgaaagtgtccttatcacccacaatgatagtacaagatacaaactgacaaaggaaattatctaaactcagctacatggaaccttacagcgaaaatgatccatgataatgtcaagtagaatttcaaatatagcataaaggccccaaaaactagaaaattaacatttttttataaacaggcactctatcaaatagatttacaaacacaatgtatatcacattattccttccaaactttgtatacattcttagtaagaaatcaaacaaaattagttttgctttacatagcacaaacaagcaaactataaaaagaaaaggcagatgcaaatgagagaagaaaggcttcaaacggtacatgcccagagggaccaaactatgacattcctaaaattactggcgggtgagcttctgcccttcatctggtcattggtaaatccaccctacaccaagttcaacagataactagcttggatttctttcggataaggttcgtcttgcaaatattaatcagagcaagcatgcaaagctgaggacaagctgaagtagtttttctcgtgtatcagttcttgctttccaaatttacatagctgagaggttagaaaacaccttccctatgcatgatcagtcacataaccaaaaaaaatgttaaagatacactaaataagcactacggtttaccaatattcgctgcagtctaacatcatcgtacaaatgacaatgtcgaattcatgtttacactataattaaacagaaacctggattagaaccaaggtgataaggcagcaaatataataatataaatctaaatcctaaaggggaagggttaatcaacacatcacagaaccaaccgaataaatgacaaacaaacaatgcttccagtgaacatcattaaaaaaatcagatgcctcaagtagcgaaaacacaaccagcaaatccaaatacagcgagaggataacaccaatgatgcatggagtacacagataacaggtgcttggtggaggtcagagaagaattcctacctaacttctccgcatacacagataacaggtgcttggtggaggtccgagaagaattcctacttagcatctccgcatcctatttgagtagttaatcaagtaaggcaaatgcgaacacccatcagacccatctatctggagttttatagcacattctccgtcgatggaacctaagatgtcaaaagcagatacgacgtacccaaggggtagcttggattgaaacagtaggaccatcctggacaggcattccaatataaataaagtttttttgccatttttaaaaaataaaaataaaatttgattcgacagtcgacacacacaaaactattctccaacagttctctaaattaactttctaaatttaacaacttgtcatctaacctcattttctctctacatttagcaactatttaacaactccctaaacaaaaatgttgactgcattatatagtttttgtgacttagtttttaggtggataaatacaaaacaaaattacaacctatatttagagaactattgcagaactcacatctttttactccaaaagccatttagcaacttcttaaatatgtgatttagagagctaaaatttacataactattggagttactcttacgaactgaggtaagtagaagatgcagaagacatataaatggtaaccttcgatgaacaattacgacgattcgtataggtacgacagtattgcttatggggggggcaaaaaaaagggggtgtatttttaaatctgtgcccctagttcagattcaaaaatcccaaataaaaagggagtgcatccactaaacggaaagcacaggttgggctgtaaaagaagcaaactttgcctattaattgtaccctatccggaaacgaattatggtagctcatgatggcttaccagaagaaaaaaaggaaacgtcccctaatcatgcaatttgcaaaaaaggaaacgtcccctaatcatgcaatttgcaatcccacataggtactaataaacaacaagcaggccgattggatcaacg

SEQ ID NO: 33768 - DNA, 523 bp, Zea Mays
ggaacacgcagctcgcgctcagagtttgtgtcattaccttcctgctccttcgcttgcaaatccaatcgcagctgcgcaatagttctctcgttctcctccatgtgtcgagccaacagtgctcgatcttcctctgccttcttctgcccgatctccatcgcttccatcttcccggtcaaccgttccaccgccagcatcatccgctcccagcgctcctcccctttttgctcggtccccgccattgcttccaggatcagccgcgtctgaacggatggcttcgtggaaggcgccgtgatgcccaccctccgaggatcaacagctctgataccacttgtgatgacccgtggccgcggctagggttcgccgggcgtgagtcggtagcagaccggcgaaaagaacgaagccaaggacaccgaatgttgcatttgacaaatgactactctcaggcctgcaaactgcacattacaacgtgaagttggttattgaaagcaagagaagaaggaagacaagtaagacaaaacagaag

SEQ ID NO: 33769 - DNA, 3597 bp, Zea Mays
ctgttctttatagtcattccatttaacttcctgtaatctatacagaacctccagctgccatcttttttttgcacaagtaaaactggagaagcaaacggacttacactaggaactatcaaccctgctgctagcagttcagtaatttgcttttcaatctcagttttgtgagctggagaatatcgataaggccttgagtttactggaatagaccctggcaacagaggaatgtgatgatcataaggtctgattggaggcaatttcgaaggcacagcaaaaacatcttcgaattcctttaaaatctcctgtagaactgcatcatttttcccaattgtttcttctgaaacctgctctaaaagcacaaatacccagacttcctctcccttcatccatttctccagctgcaacacagatacttgtcgcacttcctgcacttctctagcaccaccctgtaacctgaccttcttcccttgatcagtaaaggttaataccttgttattccagtcacactccataggactgtgagccttcagccaatcataccccaggatcacatcatatgcttccaagtctaacaccctcatagcagtgttgtacaggtgccccccagaactccacactacttccttaactcttttgtcactgatcatagctgctccatttgccaccttaacccgcacagtggaacaatcttcagtgatcaaccccaattttgctacaattctctggctgataaaagttgcagagctaccagaatcaatgagcatgaccaacatctgatcctgaaccagagcttggaccctcatacatccatcacattccgtgccactaatagcattccaggacaactgatgtaactcctccacacacttctcctcatcttccaacttctgcaatacctcatcagtcaaaaccaggcccatatcttccacggtcagattatgcagttgagttaccaccctcttgggacattttgcttgatggcctggctcaaatttatctccacaaataaaacacaacccattcgctcttctatattctctcaactgtctttccttgctcaactcaggatacaatattcctgccctattctccccccttactcctgcaacctgagttttaagaacttgtcccttttggtttctaactctattcttctctgcaatctcctgatacaccttggccaacctcttcgccttatccactgtcttaggcatccgagccatgacttgattctgaatttcaggtttcaaccctttaatatagtgtgtcacaaacagggtctcacctaactcaggattatgcagggtagcaacatatctaatatcatcaaaagcttgagagtactcctccactccttgctgctgagtcacattaaccaaatctctcatagcttgagggtattcatccactccaaactgctccctaactgcttgtgtaaactgcccccaatcacccaatccatgtttcagcttatacacttgtaaccacttcgacgcattcccctccatgtgcatagaagctgaactcgcccacaaccactccggcacctggtaaacagtgaaataatcaacacaccgatcaaaccagactcccggatcactgccctgaaacttgggaaatgtccacttcggaaatgggcctgtcctattctctcttcctccaccccactgctctctacgatctcttccacgctccattcctccaccccgatcatcccctcgaggaacacgcagctcgcgctcagagtttgtgtcattaccttcctgctccttcgcttgcaaatccaatcgcagctgcgcaatagttctctcgttctcctccatgtgtcgagccaacagtgctcgatcttcctctgccttcttctgcccgatctccatcgcttccatcttcccggtcaaccgttccaccgccagcatcatccgctcccagcgctcctcccctttttgctcggtccccgccattgcttccaggatcagccgcgtctgaacggatggcttcgtggaaggcgccgtgatgcccaccctccgaggatcaacagctctgataccacttgtgatgacccgtggccgcggctagggttcgccgggcgtgagtcggtagcagaccggcgaaaagaacgaagccaaggacaccgaatgttgcatttgacaaatgactactctcaggcctgcaaactgcacattacaacgtgaagttggttattgaaaggtatgctatgctcatcttctctcctacctacccctcttttggtttatgaaaaaattatgtgaaaggacagaccacatttcatattggctacatgacatttgttattgagaacttgccaaagtaagaattttgggatgatggtgggggtgtgcggtatctgttcaccgagtttccagtcgttcgttgcaagattttcattttttcagtcgtggagtgtgttgtcaagctccgagtaatatcttcttctactattactcctaacctgattcctgatcacccatatagtgcttaccctatatatttagtgcaaactttctcttttaatatatagcttatgaccttgccatcccgattttatattgttaacttaactgtatctgtttttcttacatatttacttatcattttcccattgtacgatttattccctgcatttccctatcctccatttggtacttaattacttgttagaaggtgcaaatcaactcctcaattgttgcgagatcaatacagtttaatcattaacgattatcttttattacacattattcagtatggatagtttccgcatatttctagcacacatcctattattgtgggtggcttccagacactaggttcatcgagtcctccaatatgagttgaaaagcttaagagtgctctctggggtatgcttaagtgttaatagtatcaatttcttgcaaaaaaggaagggctaataaattcaagatcttttcatctcattctataattgtgtgctgttgtaaacatctccttcattttttagctgtgtaatgatcttgtggtggactttgtgctccatagattgtggatacatgattgatgcaaaaataaataataaaagatgtgtcctcgctatggtcaaaagtttcatactgctacctgaatgttttagatggctataggacatacataaatttttcactgaactcctatgcgaactaatgtaatcattcagttttgaatccactccttttctacctaaacacatttatgagctcacatctgcctcgccaatatatatatctttgcgtggggctaaataatagccttggtggttgctgtgtaatccagcgatgctactctattgtacatatatatatctttgctatgccatattatgtatatggttacattagaaatacttatgtcagcttacattcttttgatagggcgcccatagctgcaaacatagctgtgaccacatgatgatgacgatttactacagcaggcacttgcaatgtcaatggagggtggtgcttcaggatctgcagctgtgactgactctgctatggcagaagctagtgcagttgaccctgacttagcgttggcaagagaagaaggaagacaagtaagacaaaacagaag

SEQ ID NO: 33770 - DNA, 1057 bp, Zea Mays
aagcatggggccaatgctgatcttgtgaatgctctgaagctggtccaacctatcaaggacaagttttcaagtgttacctatgcagatctgtttcagcttgccagcgccacagctattgaggaagtaggtgtccctaaaatccctatgatctatggaagggttggcgttattgcccttgacaatgcgcgccaaagtagcctgcttccgacccgcacatctccctccggttctcgccatgggcgccggcgccaacaaccacgaggagtcgagccccctcatcccagctgcggtcgccgcccccgcgtacgagaagcccgtgtcggcccacgccttcggcggcgtcccgcgggagagctggaactccgggatcctctcctgcctcggccgcaacgacgagttctgcagcagcgacgtcgaagtgtgtcttcttggaacggtagcaccatgtgtgctctatggtagcaatgttgagaggcttgctgctggacaaggcacatttgcaaacagctgtttgccttacactgggctgtatttgcttgggaactctctctttgggtggaactgccttgccccatggttctctcatcccactcgtactgcgccgcagggttccccaccctggattcaacaatgggcactccgtctttgtcatgatgccgcccatggagcagaccatggggcgtggcatgtgagctattccaccaccttccctaccctagttttatctgtgcttcccgtggtttatcatctgctgctgttggccttgatgtgtgatgtgtcgccgtcagtaaatacgagtttgtgatatgaggtcgtgctgggaactttggattgtttgcttcttatcgactgcagtttggattctggacagtcacttatctcctgtgttactgtgtttgtacggtggtcctcgatgggcctgtcaatgtgaaatgcatttcgtcgtaccttattctgaatgtttttccctccaaaatatgagccccatacactaatatggcggtagctctcgtcacaaaccctcggatacagcagcgtttgtgcgtggaaagaaaaa

SEQ ID NO: 33771 - DNA, 1989 bp, Zea Mays
aagcatggggccaatgctgatcttgtgaatgctctgaagctggtccaacctatcaaggacaagttttcaagtgttacctatgcagatctgtttcagcttgccagcgccacagctattgaggaagtaggtgtccctaaaatccctatgatctatggaagggttggcgttattgcccttgacaatgcgcgccaaagtgctaagattattgaccaatctcttaccccaggaaagatttatgatggagatgggttcaattacatcaaagaatcttttgaaaatggtactcttcaccttattgggttgttgagtgatggtggtgtacagttaagttacaagcgtaccacaagatttacttttatttgctctatccagttacttctgaaaggtgttagtgagagaggagcaaaaaaaattcgtgtgcacaaccttaccgatgggcgtgacgttttggatggaagcagggttggtttcgtggagaccctagagaatgatcttttggagcttcgaggcaagggtattgatgcacagattgcatctggtggtggaaggatgtatgttaccatggaccgttatgagaatgactgggatgtggttaaacgtgactgggatgctcaggtgctcgaagaagcaccctacaaattcaaaagtgcacttgaggctgtgaaaacactgagagcacaacccaaggctaatgatcaatacttgcccccatttgtgatagttgatgacagcggcaaagctgttggacctgtattagatggtgatgcagttgtcactatcaacttccgagccgatcgcatggttatgcttgcgaaagcactagagtatgcagattttaacaactttgaccgtgtacctgtccccgaaattcgatatgctgggatgcttcaatatgatggtgagttgaagcttccaaatcgctaccttgtttccacaccagagataaatagaacatctggggagtacttggtgaagaatggcatccgcacctttgcttgcaggcaaccagggaagacaacgcgttcatcctcccacgcgcttcctccgccctattttagtctgctcgacacgccaccggccactgacatcccatatcgccaagtccccttccctcgcctcgcgttagtagcctgcttccgacccgcacatctccctccggttctcgccatgggcgccggcgccaacaaccacgaggagtcgagccccctcatcccagctgcggtcgccgcccccgcgtacgagaagcccgtgtcggcccacgccttcggcggcgtcccgcgggagagctggaactccgggatcctctcctgcctcggccgcaacgacgagttctgcagcagcgacgtcgaagtgtgtcttcttggaacggtagcaccatgtgtgctctatggtagcaatgttgagaggcttgctgctggacaaggcacatttgcaaacagctgtttgccttacactgggctgtatttgcttgggaactctctctttgggtggaactgccttgccccatggttctctcatcccactcgtactgcgccgcagggttccccaccctggattcaacaatgggcactccgtctttgtcatgatgccgcccatggagcagaccatggggcgtggcatgtgagctattccaccaccttccctaccctagttttatctgtgcttcccgtggtttatcatctgctgctgttggccttgatgtgtgatgtgtcgccgtcagtaaatacgagtttgtgatatgaggtcgtgctgggaactttggattgtttgcttcttatcgactgcagtttggattctggacagtcacttatctcctgtgttactgtgtttgtacggtggtcctcgatgggcctgtcaatgtgaaatgcatttcgtcgtaccttattctgaatgtttttccctccaaaatatgagccccatacactaatatggcggtagctctcgtcacaaaccctcggatacagcagcgtttgtgcgtggaaagaaaaa

SEQ ID NO: 33772 - DNA, 1233 bp, Zea Mays
aagcatggggccaatgctgatcttgtgaatgctctgaagctggtccaacctatcaaggacaagttttcaagtgttacctatgcagatctgtttcagcttgccagcgccacagctattgaggaagtaggtgtccctaaaatccctatgatctatggaagggttggcgttattgcccttgacaatgcgcgccaaagtagcctgcttccgacccgcacatctccctccggttctcgccatgggcgccggcgccaacaaccacgaggagtcgagccccctcatcccagctgcggtcgccgcccccgcgtacgagaagcccgtgtcggcccacgccttcggcggcgtcccgcgggagagctggaactccgggatcctctcctgcctcggccgcaacgacgagttctgcagcagcgacgtcgaagtgtgtcttcttggaacggtagcaccatgtgtgctctatggtagcaatgttgagaggcttgctgctggacaaggcacatttgcaaacagctgtttgccttacactgggctgtatttgcttgggaactctctctttgggtggaactgccttgccccatggttctctcatcccactcgtactgctattcgacaacgctacaatcttgagggtagctttgaggctttcaccaggcaatgtgggtgctgcggcgatctggtcgaggacgaggagaggcgtgagcacctagaggccgcctgtgaccttgcgacccactacctctgccacccctgcgccctctgccaggagggtcgcgagctgcgccgcagggttccccaccctggattcaacaatgggcactccgtctttgtcatgatgccgcccatggagcagaccatggggcgtggcatgtgagctattccaccaccttccctaccctagttttatctgtgcttcccgtggtttatcatctgctgctgttggccttgatgtgtgatgtgtcgccgtcagtaaatacgagtttgtgatatgaggtcgtgctgggaactttggattgtttgcttcttatcgactgcagtttggattctggacagtcacttatctcctgtgttactgtgtttgtacggtggtcctcgatgggcctgtcaatgtgaaatgcatttcgtcgtaccttattctgaatgtttttccctccaaaatatgagccccatacactaatatggcggtagctctcgtcacaaaccctcggatacagcagcgtttgtgcgtggaaagaaaaa

SEQ ID NO: 33773 - DNA, 1837 bp, Zea Mays
aagcatggggccaatgctgatcttgtgaatgctctgaagctggtccaacctatcaaggacaagttttcaagtgttacctatgcagatctgtttcagcttgccagcgccacagctattgaggaagtaggtgtccctaaaatccctatgatctatggaagggttggcgttattgcccttgacaatgcgcgccaaagtagcctgcttccgacccgcacatctccctccggttctcgccatgggcgccggcgccaacaaccacgaggagtcgagccccctcatcccagctgcggtcgccgcccccgcgtacgagaagcccgtgtcggcccacgccttcggcggcgtcccgcgggagagctggaactccgggatcctctcctgcctcggccgcaacgacgagttctgcagcagcgacgtcgaagtgtgtacgtgccgtgccccttgtcctcgaaatcgatactctttgttcgagtcgtgcgtaatcttgggggtagagatatgcgtggttttgcgcttggggatctcgaggaggaataggtggttgtattaccacgaattttgagttagatatcttcggaaatggctaaattgttcatttccagatttagataccatgcctaaatgtagtgccctgataccatgaattagctgagatccaacacctattttattgatcacaattgtacttttatgtatacaacggcacatgatgctcttgatctgctccataaaaagctaaaagtgcatgatctaggaatagaaggagcgggtgcctttgttaaccatagcattttgcaaacttttaccatgaatttatgattgccgaacttgttaactgaatttatcagttgaactactttgcttatagcatacacacttaacacaatatcagcctgtgaaattctgggaaggtggattttgctttttttcccttgtaattcgcaatttcacagatgatcttgaattacttcatttttttaatttagatgttgaaccaagaactaactacatattgtttggatgtatcaggtcttcttggaacggtagcaccatgtgtgctctatggtagcaatgttgagaggcttgctgctggacaaggcacatttgcaaacagctgtttgccttacactgggctgtatttgcttgggaactctctctttgggtggaactgccttgccccatggttctctcatcccactcgtactgctattcgacaacgctacaatcttgagggtagctttgaggctttcaccaggcaatgtgggtgctgcggcgatctggtcgaggacgaggagaggcgtgagcacctagaggccgcctgtgaccttgcgacccactacctctgccacccctgcgccctctgccaggagggtcgcgagctgcgccgcagggttccccaccctggattcaacaatgggcactccgtctttgtcatgatgccgcccatggagcagaccatggggcgtggcatgtgagctattccaccaccttccctaccctagttttatctgtgcttcccgtggtttatcatctgctgctgttggccttgatgtgtgatgtgtcgccgtcagtaaatacgagtttgtgatatgaggtcgtgctgggaactttggattgtttgcttcttatcgactgcagtttggattctggacagtcacttatctcctgtgttactgtgtttgtacggtggtcctcgatgggcctgtcaatgtgaaatgcatttcgtcgtaccttattctgaatgtttttccctccaaaatatgagccccatacactaatatggcggtagctctcgtcacaaaccctcggatacagcagcgtttgtgcgtggaaagaaaaa

SEQ ID NO: 33774 - DNA, 2151 bp, Zea Mays
atggagatgtgcagaggtgggaggaagggatcgcgggcggccgagaccttgccgatggccgccatcgcggggctcggccacggcgacgcgagtgcaggtgcgggcgccgatggagatgtgcagaggtgggaggaagggatcgcgggcggccgagaccttgccgatgtcatattcaccaacgagtcaaacattgtgcgctggaagaacaagcgacaacaagctgttgactccaaagttggccgccttgataactttattgaatgtgttaaagcccctattcaggaagtaggtgtccctaaaatccctatgatctatggaagggttggcgttattgcccttgacaatgcgcgccaaagtgctaagattattgaccaatctcttaccccaggaaagatttatgatggagatgggttcaattacatcaaagaatcttttgaaaatggtactcttcaccttattgggttgttgagtgatggtggtgtacagttaagttacaagcgtaccacaagatttacttttatttgctctatccagttacttctgaaaggtgttagtgagagaggagcaaaaaaaattcgtgtgcacaaccttaccgatgggcgtgacgttttggatggaagcagggttggtttcgtggagaccctagagaatgatcttttggagcttcgaggcaagggtattgatgcacagattgcatctggtggtggaaggatgtatgttaccatggaccgttatgagaatgactgggatgtggttaaacgtgactgggatgctcaggtgctcgaagaagcaccctacaaattcaaaagtgcacttgaggctgtgaaaacactgagagcacaacccaaggctaatgatcaatacttgcccccatttgtgatagttgatgacagcggcaaagctgttggacctgtattagatggtgatgcagttgtcactatcaacttccgagccgatcgcatggttatgcttgcgaaagcactagagtatgcagattttaacaactttgaccgtgtacctgtccccgaaattcgatatgctgggatgcttcaatatgatggtgagttgaagcttccaaatcgctaccttgtttccacaccagagataaatagaacatctggggagtacttggtgaagaatggcatccgcacctttgcttgcaggcaaccagggaagacaacgcgttcatcctcccacgcgcttcctccgccctattttagtctgctcgacacgccaccggccactgacatcccatatcgccaagtccccttccctcgcctcgcgttagtagcctgcttccgacccgcacatctccctccggttctcgccatgggcgccggcgccaacaaccacgaggagtcgagccccctcatcccagctgcggtcgccgcccccgcgtacgagaagcccgtgtcggcccacgccttcggcggcgtcccgcgggagagctggaactccgggatcctctcctgcctcggccgcaacgacgagttctgcagcagcgacgtcgaagtgtgtcttcttggaacggtagcaccatgtgtgctctatggtagcaatgttgagaggcttgctgctggacaaggcacatttgcaaacagctgtttgccttacactgggctgtatttgcttgggaactctctctttgggtggaactgccttgccccatggttctctcatcccactcgtactgcgccgcagggttccccaccctggattcaacaatgggcactccgtctttgtcatgatgccgcccatggagcagaccatggggcgtggcatgtgagctattccaccaccttccctaccctagttttatctgtgcttcccgtggtttatcatctgctgctgttggccttgatgtgtgatgtgtcgccgtcagtaaatacgagtttgtgatatgaggtcgtgctgggaactttggattgtttgcttcttatcgactgcagtttggattctggacagtcacttatctcctgtgttactgtgtttgtacggtggtcctcgatgggcctgtcaatgtgaaatgcatttcgtcgtaccttattctgaatgtttttccctccaaaatatgagccccatacactaatatggcggtagctctcgtcacaaaccctcggatacagcagcgtttgtgcgtggaaagaaaaa

SEQ ID NO: 33775 - DNA, 2327 bp, Zea Mays
atggagatgtgcagaggtgggaggaagggatcgcgggcggccgagaccttgccgatggccgccatcgcggggctcggccacggcgacgcgagtgcaggtgcgggcgccgatggagatgtgcagaggtgggaggaagggatcgcgggcggccgagaccttgccgatgtcatattcaccaacgagtcaaacattgtgcgctggaagaacaagcgacaacaagctgttgactccaaagttggccgccttgataactttattgaatgtgttaaagcccctattcaggaagtaggtgtccctaaaatccctatgatctatggaagggttggcgttattgcccttgacaatgcgcgccaaagtgctaagattattgaccaatctcttaccccaggaaagatttatgatggagatgggttcaattacatcaaagaatcttttgaaaatggtactcttcaccttattgggttgttgagtgatggtggtgtacagttaagttacaagcgtaccacaagatttacttttatttgctctatccagttacttctgaaaggtgttagtgagagaggagcaaaaaaaattcgtgtgcacaaccttaccgatgggcgtgacgttttggatggaagcagggttggtttcgtggagaccctagagaatgatcttttggagcttcgaggcaagggtattgatgcacagattgcatctggtggtggaaggatgtatgttaccatggaccgttatgagaatgactgggatgtggttaaacgtgactgggatgctcaggtgctcgaagaagcaccctacaaattcaaaagtgcacttgaggctgtgaaaacactgagagcacaacccaaggctaatgatcaatacttgcccccatttgtgatagttgatgacagcggcaaagctgttggacctgtattagatggtgatgcagttgtcactatcaacttccgagccgatcgcatggttatgcttgcgaaagcactagagtatgcagattttaacaactttgaccgtgtacctgtccccgaaattcgatatgctgggatgcttcaatatgatggtgagttgaagcttccaaatcgctaccttgtttccacaccagagataaatagaacatctggggagtacttggtgaagaatggcatccgcacctttgcttgcaggcaaccagggaagacaacgcgttcatcctcccacgcgcttcctccgccctattttagtctgctcgacacgccaccggccactgacatcccatatcgccaagtccccttccctcgcctcgcgttagtagcctgcttccgacccgcacatctccctccggttctcgccatgggcgccggcgccaacaaccacgaggagtcgagccccctcatcccagctgcggtcgccgcccccgcgtacgagaagcccgtgtcggcccacgccttcggcggcgtcccgcgggagagctggaactccgggatcctctcctgcctcggccgcaacgacgagttctgcagcagcgacgtcgaagtgtgtcttcttggaacggtagcaccatgtgtgctctatggtagcaatgttgagaggcttgctgctggacaaggcacatttgcaaacagctgtttgccttacactgggctgtatttgcttgggaactctctctttgggtggaactgccttgccccatggttctctcatcccactcgtactgctattcgacaacgctacaatcttgagggtagctttgaggctttcaccaggcaatgtgggtgctgcggcgatctggtcgaggacgaggagaggcgtgagcacctagaggccgcctgtgaccttgcgacccactacctctgccacccctgcgccctctgccaggagggtcgcgagctgcgccgcagggttccccaccctggattcaacaatgggcactccgtctttgtcatgatgccgcccatggagcagaccatggggcgtggcatgtgagctattccaccaccttccctaccctagttttatctgtgcttcccgtggtttatcatctgctgctgttggccttgatgtgtgatgtgtcgccgtcagtaaatacgagtttgtgatatgaggtcgtgctgggaactttggattgtttgcttcttatcgactgcagtttggattctggacagtcacttatctcctgtgttactgtgtttgtacggtggtcctcgatgggcctgtcaatgtgaaatgcatttcgtcgtaccttattctgaatgtttttccctccaaaatatgagccccatacactaatatggcggtagctctcgtcacaaaccctcggatacagcagcgtttgtgcgtggaaagaaaaa

SEQ ID NO: 33776 - DNA, 1301 bp, Zea Mays
cgacgagagaaggtccacctgatttggatctacagcggggcgggtgccggagagctcctatggctgtattgatctgggaggacgaggatatagaggagataggttttccccttaaatcattttggagctcggacctgctgcacttgcgccaatgttcatgagtaagtaaaaaaacagcccgttgacctggccgcctccctcgcataagcccaagccgcctccgtcgaccgtggttcccggcggtttcttcttccgacgatatcagcgacactcctggtcccgatcgtctccctcgctgcatagccctctcgccaggtcgtttcgttgctttgaaccatcgaggatatatttttacatcctgctttttctatcaagatcaggtcgctgaagcacttggaacaatcgtagcttgcttttgaaacgttacatcccctaaaggaccaggttcaaacagggacagcaacgcatcaaagaaaaaaaacagacaccaaatctttcaagaactgaagattttaatttctcagatcgtcgacaaccttttaacacaaaaatttgctacatctaattggataaagtggcttggccaattcggtgagccacgactcggcggcggcgacgacgcttggggcggcctcctcgatggtgggggaggcggtgctcgggcgcgaggtggtactggacggagagctgtgagcgtggctgcaacgaagaaggacaagcagtgtagaaggaggagtctgcatgcgccagctatgagatgaagcgagaaaggaaaccaaatacaaaatacattgggccaacatgggtcgtgtaatagtggattgtagttccacaaatcacaggggtgcgtttggatgcgtgtatcaagccagccagactctcgtaacgcagccaagccctatgtggccagactctatgcatgcaactggttactgtttggatgtctgtatgcgtagcatccggtccagctgagactttgtttggtttgctggttgcaccaagccccgttagtccctgtacgttcactttggctagtcaacacacacccacaagcacgcggcgagcctggctcctgaggaacgaccgattctagcgtatgtgatgagcctggctcccagaagaatcttgcatcgttgtggcctgacccaactccccaaccagcccaccaaacatgaccaagctgcatccatggagacaggcccaggtaaatacaggcatccaaacatgaccagggtggaggcctgtaacacccaaattctgaatttggaattggtagaagaaatctaaacaaagtatcattg

SEQ ID NO: 33777 - DNA, 1442 bp, Zea Mays
aaacggcctggcgtccccagcgagggtgagggcgacgtcggggaccaacagccgtgtgtcctctctcctcgtgtgctccgtctgtctccacagttggtacaggccctctcgccaggtcgtttcgttgctttgaaccatcgaggatatatttttacatcctgctttttctatcaagatcaggtcgctgaagcacttggaacaatcgtagcttgcttttgaaacgttacatcccctaaaggaccaggttcaaacagggacagcaacgcatcaaagaaaaaaaacagacaccaaatctttcaagaactgaagattttaatttctcagatcgtcgacaaccttttaagttgtgaaatgccctctgtataattatatatgtctgctcaactcctttaaagacatttcgtgtaaatatagcaatctaggtttaaatattgtaacaaacatattagctcctggcacatctaacttaactctattttatatataagcctgttatgctctatattgtctttcatgctctatattatctaaaaaacacaactaacatgaaccatcttcaatactaaagttacaaattatttcccacgcgtgcaaggcgcgcgaacgttactagtgatacataatcaaagatcagattgcaacaactgacctcactctttgtctctatcatgctctaactggcagcacaaaaatttgctacatctaattggataaagtggcttggccaattcggtgagccacgactcggcggcggcgacgacgcttggggcggcctcctcgatggtgggggaggcggtgctcgggcgcgaggtggtactggacggagagctgtgagcgtggctgcaacgaagaaggacaagcagtgtagaaggaggagtctgcatgcgccagctatgagatgaagcgagaaaggaaaccaaatacaaaatacattgggccaacatgggtcgtgtaatagtggattgtagttccacaaatcacaggggtgcgtttggatgcgtgtatcaagccagccagactctcgtaacgcagccaagccctatgtggccagactctatgcatgcaactggttactgtttggatgtctgtatgcgtagcatccggtccagctgagactttgtttggtttgctggttgcaccaagccccgttagtccctgtacgttcactttggctagtcaacacacacccacaagcacgcggcgagcctggctcctgaggaacgaccgattctagcgtatgtgatgagcctggctcccagaagaatcttgcatcgttgtggcctgacccaactccccaaccagcccaccaaacatgaccaagctgcatccatggagacaggcccaggtaaatacaggcatccaaacatgaccagggtggaggcctgtaacacccaaattctgaatttggaattggtagaagaaatctaaacaaagtatcattg

SEQ ID NO: 33778 - DNA, 1118 bp, Zea Mays
aaacggcctggcgtccccagcgagggtgagggcgacgtcggggaccaacagccgtgtgtcctctctcctcgtgtgctccgtctgtctccacagttggtacaggccctctcgccaggtcgtttcgttgctttgaaccatcgaggatatatttttacatcctgctttttctatcaagatcaggtcgctgaagcacttggaacaatcgtagcttgcttttgaaacgttacatcccctaaaggaccaggttcaaacagggacagcaacgcatcaaagaaaaaaaacagacaccaaatctttcaagaactgaagattttaatttctcagatcgtcgacaaccttttaagttgtgaaatgccctctcacaaaaatttgctacatctaattggataaagtggcttggccaattcggtgagccacgactcggcggcggcgacgacgcttggggcggcctcctcgatggtgggggaggcggtgctcgggcgcgaggtggtactggacggagagctgtgagcgtggctgcaacgaagaaggacaagcagtgtagaaggaggagtctgcatgcgccagctatgagatgaagcgagaaaggaaaccaaatacaaaatacattgggccaacatgggtcgtgtaatagtggattgtagttccacaaatcacaggggtgcgtttggatgcgtgtatcaagccagccagactctcgtaacgcagccaagccctatgtggccagactctatgcatgcaactggttactgtttggatgtctgtatgcgtagcatccggtccagctgagactttgtttggtttgctggttgcaccaagccccgttagtccctgtacgttcactttggctagtcaacacacacccacaagcacgcggcgagcctggctcctgaggaacgaccgattctagcgtatgtgatgagcctggctcccagaagaatcttgcatcgttgtggcctgacccaactccccaaccagcccaccaaacatgaccaagctgcatccatggagacaggcccaggtaaatacaggcatccaaacatgaccagggtggaggcctgtaacacccaaattctgaatttggaattggtagaagaaatctaaacaaagtatcattg

SEQ ID NO: 33779 - DNA, 1006 bp, Zea Mays
tctcaaacggcctggcgtccccagcgagggtgagggcgacgtcggggaccaacagccgtgtgtcctctctcctcgtgtgctccgtctgtctccacagttggtacaggccctctcgccaggtcgtttcgttgctttgaaccatcgaggatatatttttacatcctgctttttctatcaagatcaggtcgctgaagcacttggaacaatcgtagcttgcttttgaaacgttacatcccctaaaggaccagcacaaaaatttgctacatctaattggataaagtggcttggccaattcggtgagccacgactcggcggcggcgacgacgcttggggcggcctcctcgatggtgggggaggcggtgctcgggcgcgaggtggtactggacggagagctgtgagcgtggctgcaacgaagaaggacaagcagtgtagaaggaggagtctgcatgcgccagctatgagatgaagcgagaaaggaaaccaaatacaaaatacattgggccaacatgggtcgtgtaatagtggattgtagttccacaaatcacaggggtgcgtttggatgcgtgtatcaagccagccagactctcgtaacgcagccaagccctatgtggccagactctatgcatgcaactggttactgtttggatgtctgtatgcgtagcatccggtccagctgagactttgtttggtttgctggttgcaccaagccccgttagtccctgtacgttcactttggctagtcaacacacacccacaagcacgcggcgagcctggctcctgaggaacgaccgattctagcgtatgtgatgagcctggctcccagaagaatcttgcatcgttgtggcctgacccaactccccaaccagcccaccaaacatgaccaagctgcatccatggagacaggcccaggtaaatacaggcatccaaacatgaccagggtggaggcctgtaacacccaaattctgaatttggaattggtagaagaaatctaaacaaagtatcattg

SEQ ID NO: 33780 - DNA, 1109 bp, Zea Mays
ggcctctcaaacggcctggcgtccccagcgagggtgagggcgacgtcggggaccaacagccgtgtgtcctctctcctcgtgtgctccgtctgtctccacagttggtacaggccctctcgccaggtcgtttcgttgctttgaaccatcgaggatatatttttacatcctgctttttctatcaagatcaggtcgctgaagcacttggaacaatcgtagcttgcttttgaaacgttacatcccctaaaggaccaggttcaaacagggacagcaacgcatcaaagaaaaaaaacagacaccaaatctttcaagaactgaagattttaatttctcagatcgtcgacaaccttttaacacaaaaatttgctacatctaattggataaagtggcttggccaattcggtgagccacgactcggcggcggcgacgacgcttggggcggcctcctcgatggtgggggaggcggtgctcgggcgcgaggtggtactggacggagagctgtgagcgtggctgcaacgaagaaggacaagcagtgtagaaggaggagtctgcatgcgccagctatgagatgaagcgagaaaggaaaccaaatacaaaatacattgggccaacatgggtcgtgtaatagtggattgtagttccacaaatcacaggggtgcgtttggatgcgtgtatcaagccagccagactctcgtaacgcagccaagccctatgtggccagactctatgcatgcaactggttactgtttggatgtctgtatgcgtagcatccggtccagctgagactttgtttggtttgctggttgcaccaagccccgttagtccctgtacgttcactttggctagtcaacacacacccacaagcacgcggcgagcctggctcctgaggaacgaccgattctagcgtatgtgatgagcctggctcccagaagaatcttgcatcgttgtggcctgacccaactccccaaccagcccaccaaacatgaccaagctgcatccatggagacaggcccaggtaaatacaggcatccaaacatgaccagggtggaggcctgtaacacccaaattctgaatttggaattggtagaagaaatctaaacaaagtatcattg

SEQ ID NO: 33781 - DNA, 474 bp, Zea Mays
cacctgcaccatgccggagcggtctcgaagggtgacgaaggtgagcccggcgtgcgcgcggcgtagcgcaacccagccgcatagccttaccctgcgcccagcgtccccggcgcccagctcgctgcacagcgcatccctgggcggccactgcagcggctgcaacctctctaccttcacaccagccggggcgggcgccgacacttcctccggcggggtcgcagccgcatcggtggccgccgcggacactagggttcggaactggggcgcggggacagaggccgaggtggaggtggtggagagcgggaggaggcggcggaggtgcaaggcggatggcctgggctttagacgggagaggagggacaagggcgaggcgcggaggagggaggaggacattgggaaccggagaagatagcaagcaggggaagcgcacagcgcagttttggactgaactagacgaagaggcgaagacgcctt

SEQ ID NO: 33782 - DNA, 3348 bp, Zea Mays
agcatatcatgcatccggtcactgtcgtgtaagaccagaccgtcaatggctcatctgcagctacgtgcttggacgtaagtgcaaatgatccggcggcaagcaagcatgcacgtcacggaggaacatgaataagtatctcagcttagcctcacttgccagaagccagaaggtcaatcaatcatcactcacccgttgttttgttccccgcactgcccgctgcagaggccacaggcatggcgccgcgctcggtgagcctgctgcttctgctgacgctcgtggtggccgccgacgacgaggccgcgctgattgcctttaaagccgcggcgatctttggcggcgacacgcttgcgtcgtggaacagtagcggtgccggcggattctgcggctgggtgggggtgacgtgcgggggcggggccaagcaccgccgagtggtggcactgagcctgcccttgcacgggctgagcggatcactctcgcctgccgtcgggaacctgtcgtttctcaggactctcaacctcagctccaacgcactcagcgggggcatccccgacagcctcggtcgcctccgcctgctccgagaactcgacctgagctccaacgccttctcaggcgaggtccccgccaacctgagctcctgcaccagcctagtcctcatgcgcctccgcttcaaccagctcaccgggagcgtgccctacgagttgggtgagaaactgatgaatctcgtggtgctcagtgtttggaacaacagcctcaccggcaccatcccagcgtcattagccaacctgtcgtcgcttagcatcctgtcacttgggttcaaccagctccacggcaccatcccgcctggcatcggcgccatccaggccctccagcacctcgacctcaatgacaaccacctctctggcgaacccccacattccttgtacaacctaacctcgttggaaaggttccagctcagtgataacatgctccatggcagaattcctgatgccataggcatcaggtttcacagcatgcagatgcttgagttttatgctaaccagttcaccgggtccatccctgtttcactcttcaacctcaccacactgcagatgcttgacctctcagaaaataggctcggtggatatgtgtctggtgcagttggaagattggtagctctgcaaagcctattactgtacgggaacctgctgcaggcggacgacaaggagggctgggaattcatcacgtccctgtcaaactgcacccagctcgtggaatttgaaatcggcctcaacgccggtttgactgggcagctgccaagttcaatagcgaatctatctagcctacagacgctccgctttgatggatctgggatctcaggaagcataccatcggccatcggcaatctgctcaacctacaagtcctcggtatgtcaagtactttcatatcaggggttattccagagagcattggcaggctgggaaacttgactgagatggatttgttcagcactgacttgtcaggcatcattcctttatctattggaaatctcaaagggttaaatgtctttgatgcacatcattgcaacttgggggggccaattccagcaagcataggcaacatgtcgaatctgttgacacttgatttatcaaagaactccctcgatggttcaatttccaatgagattttcaaactgtcatcccttctctatttaaacttatcatacaattcgctatcgggacatcttccttctgagatgagtagtttggggaacctgaaccaactagttctgtctgggaaccgattgtctggcgagatacctgagagtattggggaatgcactgtgctgcaataccttatattggataataactcaatcgatggaagcatacctcaaactctgagtaacataaaaggtctaaatgcactcaatttgtccatgaataaactaactggtgttatcccaagtaacattggaactatccaagatcttcaggtgttgtatctggcacacaacaacttgtcagggccaattccttcgctcctacagaatttgacagcattatcagaattggatctgtcattcaacaatctgcaaggggaagtgccaaaggagggtatcttccgatattcgactaacttttcaatcattgggaacagtgagctttgtggtggattacctcaacttcatttagctccatgccagacagatcccatgaaaaagaacagaaaagggcagttgaagcatcttaaaatagctctggcaacaataggtgccctattgatcttagctttctttattgcactccttcagtttattaagaagaaacttatacgaaatcgtaaccaacccttaccaccaatagttgaggaacagcatggaagagtttcttaccatgtattagcaaatggaacaaatggattttcagaagccaatttgcttggtaaaggaagctttggggcggtctacaaatgcactttacagcctgaggaaactgttaccgcggtgaaagtttttaaccttcagcaatctggatccactaaaagttttgtggctgaatgtgaagcattgagaatggtgcgtcaccgttgtctcattaaaatcatcacgtgctgctcaagcatgaatcaccaagatcaagagtttaaggctttagtttttgagttcatgccaaatggcagcttagaaggctggcttcatccaaattctgatattctcactatgacaaatactctaagcctagaacaaaggctagacattgctgtagatatcatggatgctttgaactatcttcataatcactgtcagccaccaattgctcactgcgatctcaagccaagcaacattcttcttgcagaagacatgagtgctcgagttggagacttcggcatatcacgaattcttccagaaaatgcaagtaaaatcctgcaaaattcaaatagcaccatcggaataagaggctcagttggttatgttgctccagagtatgctgaaggctctactgtctcaactattggtgatgtgtatagtctcggtatattgttgcttgagatgtttactggaaggagccccatagatgacatgttcggagacacagtagatttgcataattatgccaaacatgcactcagcgaaagaatcttagatattgttgattcaacaatctggctacatgtagagtcaacggatagtactataaggagcagaattaaggattgcttggtttctgtcttcaggctagccatatcctgctcaaagcttcgtccaggggatcgaacagtgatgagcgatgcagcagcagagatgcacgccatcagagatacataccacatgttttgctgctagcttggcatcaaacaatggacctcaa

SEQ ID NO: 33783 - DNA, 4306 bp, Zea Mays
ctcggtttcgtctccaacaaacttcactctgcaaacagtgtggaacagtataaattacagtgccgcattctctattttacacgatccgaagacagtcttaacagtgatagacatgtgatgcggattgtcgtgtggaagatggcacgcggactctcaccaagtcaagagctaaccttatacagaaagcagtggccactgtatatttttttggcaaacaaattcacttgtcactgatggtgcatcaggtcttgtaaatataagcatcaggccaccagctagtacagaacaccaatcacttttccgcgatcgtgtaatcgtgtgccaaggcaagaagcaaccggcatggcaatgcgatcgctgtgcttgccgctgctgttgttctccgtgtccatctcaatcccccccgccgtatcagcaaacgaagagctggcctcgcttctggccttcaaggtggcggcgatcagcggcgggtacggcgacccgcttgcttcgtggaacgagagcagcgccggtggcggtgggtactgtagctgggagggggtgagatgctggggcaagcaccggcaagtggtgaagctgagcctgccctcacgtgggctcacaggcgtcctctcgccagccatcggtaatctgtcatccctatggactctcaacctgagcaacaacgggttccacaacagcatcccggcgagcctcggccgcctgcaacgcctccataacctggacctaagccacaatgccttctctggtaagctccccgccaacctgagctcctgcaccagtctggtgtccttgggcctaagctccaaccagctccatgggcgtgtgcctcccgagctcggtggcagcctcaagcgcctcaggggcctcgatctcttcagcaacaacttcaccggcaccatcccggcatcgctggccaatctgtcgtctctgactactctggaccttggattaaaccagcttgagggcagcatcacgcccgatctaggcggcatccagggtctccaatggctctcactggattacaacaaactatctggcgagctcccgcgctccctattgaacttgtcttccttaataacgatgcaggtccaaggaaacatgctccatgggggcattccgtccgacatcggtagcaagttccccaacataacgatccttagctttggcaagaaccagctgacgggatccatccccgcttcactctccaacctcaccactctccaggatgtcgatcttatcacaaataggctaagtgggcatgtgccccgggcactggggaggctgcgagctttggaatcactaagcttgcacgacaacatgctagaagcaaatgacacggagggatgggaattcatggcttccttgtaaactgcagccagctccaaagcttgactatcagcaccaacatcggtcttactgggtggctgccagcctcaatagtgaatctctcgacgaccatgcaaggcctcatgttggctgacacagggatcgtaggaagcatccccttagaaattggcaatcttttcaacctccagttcttcagcgtgtcaaatacttccgtgtctggtgcggtcccagatagcattggcaagctggtaaacttggttgaattaaacctgtacaataccaatctgtcagggcttataccttcatctattggaaatctttcagagttagctgcgcttgttgcattcaatagcaatctggagggaccaattcccaaaagcatagggaggctgaagaacctctatgcccttgatatctcaagtaaccgcctaaacggttcaattcccgtcgagattttccagctaccactcctttctagatacttaggcttattacataattcattatcaggtaccctacccgctgaggttggtagcttgataaaccttaacatcctggcgctgtctagaaaccaactgtctggtgagatacctggtagcattggggactgcaccgtgttgcaggaacttgggctggatgacaacttatttgaaggagccatacctcaatctctgagcaatataaagggcctaactggactcaacttgtccatgaataagttgtctggcgtcattcctgaagccattggtagcatgcgcaaccttcaacagttgtatctggcacacaacaatttgtcagggacaatcccaataatattgcaaaacttgacattgtcagaattagatctatccttcaacaatctgcaaggggaagtgccaaaagaggggatattcaaaattttggctaacttgtcaattactggaaataatgatctttgtggtggggtaactgagcttcgtttacctccgtgccacataaatgtggtgaaaagtaacaaaaaagagaagttgaaatctcttacaataggcctagcaacaaccggtgcactcctgttcttagcttttgctattgctgctcaattgatctgcaagaagcttagacaaaggcagacgaggtcattccaaccaccaaaaatcgaggaacactatgaaagagtttcttaccagacactagaaaatggaaccaatggattttcagaagctaatttgcttggtaaaggaagctttggggaggtatataaatgcacttttcaagatgaaggaaatattgcagctgtgaaggtttttcgccttgagcagactagatctataaaaagttttgtggctgaatgtgaagctctaagaagggtgcgtcatcgttgtctcataaagatcatcacgtgctgctcaagcatcaatcaccaaggtcaagagttcaaagcacttgtttttgagttcatgcccaatggtatcttaaatgattggattcattcaaaatctgccatgcccactttgagaaatagtctaagcctggaacaaaggctaaacattgctgtcgatatcattgatgccctggactaccttcataatcactgtcagccaccaatcgtccattgtgatctgaagccaagcaacattcttcttgcagaagacatgagtgcccgagtcggagactttagcatatcaagaatacttccagaaagtgcaagtaaagccctccatattagcagatcgcctatggtggaatgtggagtggacaactctgcagtaatttgcaacgataattaagtagtaaaactgaaaatgggccataagactccatatggtccttggtatacataaccggatatgtatatgatgctgcatctctatcattttctgtctaaataaacaacctgcatttattgacaccagataaggtccagagtgtcctcaacgtcaatgtgcctccttttcttgaggattgtcattgagatgtattagtcaatatcctctccttccattgtcaacaactcatatttctgtaaataggtgcatgcaagtctaaaggatgttttgtaaatatgtcaaacagatcaacaatggagagtctcactggttgtcagtatgtttttttatgaataattggtaataagatgtgagtccaaatcctgccatatgaaagctgaaaagtttcaaacacccaccccagtccaaatcccacaagctagttataaatgtagcaaacattcagaataacaaagaatgagtggtactgatgtgattcttgaacaatcaacaccataggtgattgtccgcataccttccttgaaactatgtttgtctaaaaaaggaagataaagtttaacatcagaagaaatttaagtatttaaccatggcaaacttagttgaattaggtttctacaacaccctcttgccaggctcatacattcttctattggaaatccctcaaagtttgctaaaaattgttgtatgcctgcattcaatagcaatcttaaaggaccagttttaacttaactaggcaagctgaagaacctgtatgaccttgatatgtgacgaaccgtctgaacaactcaactcccatagagattttcaaactaccacttcaattccgaattttgtcatccaatatttcacataacaaagaaaaaaactaaccagcagagaacaatcacaataagaacgatctagatcagaagtgacaagtaataagcattcctttcgaaaagaagcgattaagaagtaaccactactacagatccatttagggacaccacctcattagcgtcatcatgatccacattgcaaccccaagtccaaactgattacatccatataatccattccaactcattactggtattagtgtattaccacggcagcacggctaccagtagggaatagcaggtaatgagatgaactgaggcacgactaccaataccactgctactatttccagtcctagaggctaacctaag

SEQ ID NO: 33784 - DNA, 1157 bp, Zea Mays
aaaaccgtacccgctgcgaggccatcccgcgccaggccaagtgatccgcaactccggtttcgttacgcgcgcttgctgctccctctcaccctgtcgctctcgcctctcaggctctcactcacagactcactcacctctctagactctagtagtataaactaccggcgcagcttgccctgctagctcacctcgtgctacctgcactgctcgatccaaaccgtccagtccaacaatccaatccaagcagagtttcagtcgattatcatcacagattccacaggcacaggcggaggtgggttcgggtctggctacgggggagaagcagaggacggtggtggtggtcgctgtggacgacagcgaccacagctaccacgcgctggagtggacggtgcggcacgtggcggcgcccggcggcgtggcgggcggggggggccgacctcgtcatcgtccacgccaagccctcgccgtcctccatcgtcagcttcggcggccccggagccggcgaggcgatcaggcacgtggacgccggcctgcgcaagacggcggaggccgtcgtcgccagggcgcgccgcgtctgcgccgccgccagctcggcgcgcgccctggtcgaggtggtggaaggcgagcccaggaccgtgctgtgcagcgcggcggagaagcaccgcgccgacctgctcgtgctgggcagccacggctacggcgccgtcaagagggcgctgctcgggagcgtcagcgactactgcgcgcaccacgcgcactgctccgtcatgatagtcaagcagccaacaaaatccaaatgaaaacaaaaaagaaaaaaaaattgacagcctgctgatgatgatgaaggtggtgatcgagcggccgcagcgcaaatccatgttaccccgttagcgattacaggcagcagccagcccacaggcccagtgatagcgcgctgtgtataaatatgtgcagcgtgtggagtgtgtcctgtgtatgtgttctgtgttgtttaattttgttgcgagtaactgcatgtaaaataaaggagatagggaaatagtaaattagcttccagcgtgaggaggaggtttgactagccacatatccatctaacagaattagattaaaaaaagtgaaatgatttcaccgtaaaaaatattagtgcactcctcctt

SEQ ID NO: 33785 - DNA, 519 bp, Zea Mays
aaaaccgtacccgctgcgaggccatcccgcgccaggccaagtgatccgcaactccggtttcgttacgcgcgcttgctgctccctctcaccctgtcgctctcgcctctcaggctctcactcacagactcactcacctctctagactctagtagtataaactaccggcgcagcttgccctgctagctcacctcgtgctacctgcactgctcgatccaaaccgtccagtccaacaatccaatccaagcagagtttcagtcgattatcatcacagattccacaggcccagtgatagcgcgctgtgtataaatatgtgcagcgtgtggagtgtgtcctgtgtatgtgttctgtgttgtttaattttgttgcgagtaactgcatgtaaaataaaggagatagggaaatagtaaattagcttccagcgtgaggaggaggtttgactagccacatatccatctaacagaattagattaaaaaaagtgaaatgatttcaccgtaaaaaatattagtgcactcctcctt

SEQ ID NO: 33786 - DNA, 1193 bp, Zea Mays
ctccatcgtaaaccacatttgtaacacaggcctttagcacgacgataagccattagagttgccgctttactttgatcagagtgttgtttagactgtttaggcacaccctgctggaaacggttgtgttgcttagttgtcgtttgataagagctcctttgggaattggtcatgatatttggtgtcagcaattcctcctgcaacaaagtgagagagacggcagtatccaaatccaacgggtgatgaatgaatacaacagactccgaacccgatcagtgtactctggaggatccgccagggtcggagatgaatccgataccaattataagatcactgctgatttgtggatgagttgagcaccgctctcggcactgtctcctctcacgaagatctttatggtatgaaaaaaaatatctggaattcttacacgacggcgagccgcctctcctccggacgctgctagccagccttcttctccaagtcacttttgcacagactccgaactccacctcgaatacctcactcaatcccagaacaaccacaaaaaagaaaaatgagaaaattactgggtccaatccggctcgctaactttactattgggctttcgaattctggtcggcctgtccaccttgacgttctcctcaggtactgtgacagtgaagatgacaagcgcggagtcctttgcttcggaatcaagatatggacgaccctgtgcaactcccacacatccatccatccatccatccatccatccatccatctatcagagttgcttcggttgcaagacgagaggaccaacagaaaaaaaaaggcattcgatgacacgcttgaggacacaccaccgtcacctacccctcttttgtttccccatgatagcgcacattgtgaagcaagcagtagcacgaggagctgtaactggacgagctattaaactcgggtaaagagtaggcgccgcgtcgtatcttgtcgtgcagaagcagcagcacagtagtacagcaggtcagtcttcttcgtctcttggacaaggagagagagagagagtaccgtacctaccaggctaccacactgatgatgccccagctgcttgttgctcggcggatcggccggctccggtggtgtgtgtgtgtgtcttttgtatggtaataaagagaataaggcaatgcatggaagattgccagattggaaaggggcctggg

SEQ ID NO: 33787 - DNA, 462 bp, Zea Mays
aaacttgctgagatagttatatcaacgcaaaagctaataccacagttttaacaaaagatgtcacagcattctctactaaaataaagtaaaactggtctcattggcgttggattccatgcagcagcagcaggttacgagagtgtgaatgtaagatcactgctgatttgtggataagttgagcaccgctcccggcactcatcttctctcaccaaggtctttagggtattgaaaaatatctggaattcttatacgacggcgagccgcctctcctccgaacgcagccggccaaccttcttctccaagtcacttttccacagactccgaaccccacctcaaatacctcactcaatcccagaacagccacaaaaagaaaaacgagacaattactgggtccaatccgacccgctaactttactattgggcttccgaattctagtcagcctgtccaccttgacgttgtcc

SEQ ID NO: 33788 - DNA, 1650 bp, Zea Mays
agcattagagtgcatttacagtacgttcacccccgcggcccgccccttcagccatcgcaaaactgagactcaaaaaggctatggccaaggctttggtgcccttctaccccctcgccggccgcctcggcaacaacagcgacgatggtaggacggagatcagctgcaacggcgaaggtgcactctttgttgtcgctcacgcggatgatgaactcactatcgacgacgtcaagaaattgaagccatcgccagagttgaggaggctgttcgttccacgcatcgagccatcgtccatcatgttggccatacaggtgactttcttgaagtctggaggggtggtgttaggaacagctctccaccacgccgccatagacgcttcaagtgcgttccactttttccagacatggtcggcattctgcaagcatggtgaccgtgctgccgtggagctcccgtgccacgaccgcaccctactccgcgcacggtcgccgcccacagtccaccccggcacactcttgacattgcagcctcggctaaccctctctgacctcgagggacctcttgccatcgaagtcttcaccatttccaaggatcaggtcgcctccctgaagcacctctgcggtggcacgagcaccttttgcgccgtcagcgctctcatctggcagtgtacgtgcgttgcgcgccgccttccaccggattctcaagtgcgcatggtatttcccgccgagctccgccgccggatgaggccgcccctcccgaaccactacttcggcaacgcagtgttcaggctatacgtcactggcgcggctggggatattggcacggcggcgttgggatccgtcgctacccgcatcaagggcgccatcaagcggttggatgacgagctggtgcggtccgccattgactacttcgagaacgagaaggccgccgagatgaacaagagacgggctctgagaggcaccctgccaaagacgttcctgaatattacaagctggttgggtaggccacagtacgacgcagattttgggtggggaaagccgcaattcatgtcgctggcggagtccttctgcggcggctttgtgcacttgatgaacgatgagaggacaacgtactacggtggtgccaccggcgacgtccgcatgatcgtgtgcatggaggctgtagatatgaaggagctagggcggttgctttatgtgaagctcaagcaagctgcttgtgctatgcactaaaaataagggccgtaaaaataaagctctagcaagctgctcgtgctatgcattaagaataagggcagtaaaaataaagctatagcaagctgctaatgctatgcactaaaaataaagctcttccaaactgctagtgttatgcactaaaaataataatatggtttgttactatatatgctaaaaataataataaatgagctaaggcagctgtattacaccttgttcggttgcatatggattggataaaactgaagggattaaattcctctctattcatttttaactcaacaagaaatttaatctcatccaattcccttcaatccactcctaacacaacaagctcctaagaataatcgtagtgccctcgcgtttgattattattatgtagttccaatactcaaaaccatatgtaattcctatgaatattaat

SEQ ID NO: 33789 - DNA, 1920 bp, Zea Mays
ccgttctttcctcctccacgcgaatccgcatctccacactccaatcagcgctcctccgtccccgttctttcctcctcccttcagccatcgcagtcgcagcgcaggttcttggctggttgctggtgtcgacagcgaagtccgcaactccaatcctgcctgcgctcctcccttcctccgtcctcactaagcacccgcgcacgccgcctgcctgtcgattgagatctctttcacgcccctttctgccatcgcacaactgaggtacggttctttgcttattgcagagtatagtatggatgcccgcagtgagtcgtcgtgtcgtgccttcagtaggagccgcagctagtaacatccattttgctggtcaataagtcgtgggaggaagaagatggattatttgaaggtgcaggtggtagagtcatcatttgtagtgccgagcgagccgacgccaacgaaggcgctctggctctcttgcttggacatggttcagtccaacaaagcccacaccccaacgatccacttgtacagctccaacgatgctgcggcggctgattttttcgacctgggcagactcaagaaggctacggccaaagccttggtggccttctaccccctcgccggccgcctcgtcgacagcgacgatggtaggaaggagatcagctgcaacggcgaaggtgcactctttgttgtcgctcgcgcggatggtgatctcactatcgatgaagtcaagaaattcaagccatcgccagagttgaggaggctgtttattccactcatcgagccatcgtccatcataatggccatacaggtgactttcttgaagtgtggaggtgtggtgttaggaacagctatccaccacgccgccacagacgtttcaagcgcgttccacttttttcagacatggtcggcgttctgcaagcatggtgacagtgctgccgtggagctcccgtgccacgaccgcaccctactccgcgcacggtccccgcccacagtccaccccgacgcgctctcgacattgcagcctcggctcgtcctcactgaacccgaggggcctcttgccatcgaaatcttcaccatttccagggaccatgtcgcctccctgaagcagctctgcggtggcacgagcaccttttgcgccgtcagcgctctcatctggcagtgcgcgtgcgttgcacgacggatcccaccggactctcaggtgcgcgtgatgttcccggccgacgtccgccgccggatgaggccgcccctcccgacccactacttcggcaacgcagtgatcaggctatacgccgctggcccggcaggggacattggcacggcggcgttggcatccgtcgctgcccgcatcaagggcgccgtcgagcggatggatgacgagctggtgcggtccgcgattgactactacgagatggccgagacgaacaagagacggactgggacaggcatcttaccacggacggacctgaatattaccagctggttgggtaggccacagcacgacgcagattttggctggggaaagccgcaatccatgtcgcgggcggagtctgtccgcggcggctctatgcacttgatgaacgacgacggtggtaccggcgacgtccgcgtgctcgtgtgcttggaggctgaaaatataaaggagctaggacggctgctttatgcaaagctctagcaagctgctagtgctatgctctaaaaataataatattaataataaggtttgttactatgcttaaggggaaccatactttttccctcgcgatttattattattatggcagtttcaataatgaaaaccatttgtaattcctgtgacaattaatttatgcgtccacgctagaaataaaaacttgtttgtaatactacagtttttttttgttatggcagtttcaataatgaaatccgtatgtaattcctgtgact

SEQ ID NO: 33790 - DNA, 1274 bp, Zea Mays
gtcccctcgattttttgtcatcacgccgccaccaaaatatgctccgatcttcaccttacctccgcgtgcatctaaacactagagaaaatgaggagctagtggcattggtctggagacatcaagagtcttcgccctgagaggagcccatgtggtcatcgctgctagaaacacagaggctgcatcagaagcaagaaagaccatcatggagaagaacccaacggcacgtattgatgttctgaagctagacctcagctccctcaagtctgtcagggcttttgtggaccagttcaactcgatgaaactccctctaaacatcctgataaataatgcaggcgtcatgttctgcccttttcaactgtctaaagacggggtcgagatgcagttcgcgacaaatcatctaggacactttctgcttaccaatctcctccttgataccatgaaggccactgccaagtctacgggcattgagggccgcattgtgaacctgtcatcagtcgcccaccaccatacgtatccgaagggaattgacttcgataacctcaacgatgagaaaatatacaacgacaaaatggcttatggacagtctaagctggcgaacttgctgcatgcgaaggagctctctagaaggctgaaggaagaaggagcaaacatcacagttaacagtgtccatcctggattgatcatgaccaatttgatgaggcactcctttgttctcatgaaggtgcttcaggttgccacttacatactgtggaagaatgtaccccagggagctgcgactacttgctacgtaggactgagccctcaactcaagggagtgacaggaaagtactttgctgactgcaacgtggagaagacgagcaaactggcgaggagcgaggagttggcgaagcagctctgggacttcagcgaggagctgatcaagtctgcgaagtgagagccgaaagagctggatcagagaaaatgttgtggtcctgcttggcatctagtggtacaagtgatgactgattagtatatagcacggaggaggaacctgggcgatggctggacctcatggtgttcaggaataaaatctgcttgctttcgtacattaattagtccggtgtggcaaacatcaatttgtagtgctgtcaatatctgttcaatatacgtgcagctcagttctgacttgaaaaatgcagagtcgtgtttgcctgaaacatgtcgtttcaaccagtgtttgattctttttcgttatttggttcagcatccgaattgtgagtacagctcttcttgtt

SEQ ID NO: 33791 - DNA, 1249 bp, Zea Mays
atgctttgtagtcaccaacattttgcacagcccggcatttatcccttggctactttagtactttgaggagctagtggcattggtctggagacatcaagagtcttcgccctgagaggagcccatgtggtcatcgctgctagaaacacagaggctgcatcagaagcaagaaagaccatcatggagaagaacccaacggcacgtattgatgttctgaagctagacctcagctccctcaagtctgtcagggcttttgtggaccagttcaactcgatgaaactccctctaaacatcctgataaataatgcaggcgtcatgttctgcccttttcaactgtctaaagacggggtcgagatgcagttcgcgacaaatcatctaggacactttctgcttaccaatctcctccttgataccatgaaggccactgccaagtctacgggcattgagggccgcattgtgaacctgtcatcagtcgcccaccaccatacgtatccgaagggaattgacttcgataacctcaacgatgagaaaatatacaacgacaaaatggcttatggacagtctaagctggcgaacttgctgcatgcgaaggagctctctagaaggctgaaggaagaaggagcaaacatcacagttaacagtgtccatcctggattgatcatgaccaatttgatgaggcactcctttgttctcatgaaggtgcttcaggttgccacttacatactgtggaagaatgtaccccagggagctgcgactacttgctacgtaggactgagccctcaactcaagggagtgacaggaaagtactttgctgactgcaacgtggagaagacgagcaaactggcgaggagcgaggagttggcgaagcagctctgggacttcagcgaggagctgatcaagtctgcgaagtgagagccgaaagagctggatcagagaaaatgttgtggtcctgcttggcatctagtggtacaagtgatgactgattagtatatagcacggaggaggaacctgggcgatggctggacctcatggtgttcaggaataaaatctgcttgctttcgtacattaattagtccggtgtggcaaacatcaatttgtagtgctgtcaatatctgttcaatatacgtgcagctcagttctgacttgaaaaatgcagagtcgtgtttgcctgaaacatgtcgtttcaaccagtgtttgattctttttcgttatttggttcagcatccgaattgtgagtacagctcttcttgtt

SEQ ID NO: 33792 - DNA, 1342 bp, Zea Mays
attttcagttacacatatccttccaagcgcaattttttttaaaaaaaaaactcagacggagtttggctgtgatctgtggccctgtgtgggtgtggactttgcatgcttgggctcgtcggcaaccggacaggaggacagcaaggcggaagcgcaaccgggcgtcgctggtccgacgggcggcacgtgtcagggagcgtgacaggggcggcagatccggacctccacgtccgtatccatatccacatccatccatcaaacacggaagagagagaggaagggagggagggagaggagagattattttggaccagttccaccgcttaatttgcaggaccgccaccccccgcggcgccgacgatcacctcaggcgtgcgcggatatggggcgccgcggctcctacgaccgcctcgaggcgctctccctggagatcgagcgcaagctgcacaaggccctgatgtccaactcacagcgtcttcagatacttcagcaattgtttgctgacatcgcattgaaggtggatgatcgcgctcgagatgcaattatgagtgagagtgatgatggcattgctccagcagatgaacgggaggatggttggctatgcttctatgagattcttgccaatcattttgttagagtgcctgaaagtggcaggcgtatacttgagttgattgtgcaactctggagccagtccttcgcggccaacatatttgcacttcttttccagaaatggttgtttgaagcccctcttgatgaaaaagaaatatcgctacgatatagctctgctcttgttcaaggtgctacaaatgtattttggattgacatacagacaaatacaagacattttctctctttgtatcattatctccttgaggacgttgctctagtccctgaaagacttagtaaaatatcattacaggctggtagagaccttttccttctgctctctagattcatgttcttctatgatcaagatcacatgctttctagtttcctagagcattttcccaatttcccaaattccttcttggttggtggaccagcagattactttgtaattgaactcgctgatcagcttcaaaagctaaaaattgagccagtactactacactacctctcccgcatgagcatacttcaagggttggaactgaggttgagtacaagcaccagactaaaggcctgcctctacagcttcacttctcctggtggccctacctacccaacacgggcggtgcggcacgcagcctggaacaccttggatttgctgttccctgacccagactgacctaacctcgctgacgcacactaaatgtacgcctgggtttcagtgctttttatgaaggtt

SEQ ID NO: 33793 - DNA, 974 bp, Zea Mays
atgctgtgttattgtttgaagcccctcttgatgaaaaagaaatatcgctacgatatagctctgctcttgttcaaggtgctacaaatgtattttggattgacatacagacaaatacaagacattttctctctttgtatcattatctccttgaggacgttgctctagtccctgaaagacttagtaaaatatcattacaggctggtagagaccttttccttctgctctctagattcatgttcttctatgatcaagatcacatgctttctagtttcctagagcattttcccaatttcccaaattccttcttggttggtggaccagcagattactttgtaattgaactcgctgatcagcttcaaaagctaaaaattgagccagtactactacactacctctcccgcatgagcatacttcaagggttggaactgaggttgagtacaagcaccagactaaaggcctgcctctacagcttcacttctcctggtggccctacctacccaacacgggcggtgcggcacgcagcctggaacaccttggatttgctgttccctatcggtcgttacccgaggcacgtgatcagcctgttcttccggctgctgtatccgtggtactggccttcctcttgctggaacttcgtgatgacctgtgccatgaccgtgtactactacatcctgaacctgctggtgtcgtgttgggagaacatgaggcggcggcccagtcaccggagaacgcacggtgaatgaagacgcggcggcccatccagtggcaccttgtgttgttgttgttgttcatttttctttcctttgcgcgagtggtgtagtagttagtagcagcggcttatgtgttcgtcgcgaaacaacattccctgtataatataaactgctgtacttgttcagctgttgttcatataggaagagccgaatgaagaggaacagctggtaatggagggagagcgtgtgcgcgcatttctcgct

SEQ ID NO: 33794 - DNA, 1310 bp, Zea Mays
ctatgatgtatgatgacatcattgacatggtagtcaaaaggaaataatagaacagatgttgtgaacttgtcatttccaaattgttatattgagattgctacactacactattggttcgtttcatgacaaaatgtatcttttgatggaatgatgcaattatgagtgagagtgatgatggcattgctccagcagatgaacgggaggatggttggctatgcttctatgagattcttgccaatcattttgttagagtgcctgaaagtggcaggcgtatacttgagttgattgtgcaactctggagccagtccttcgcggccaacatatttgcacttcttttccagaaatggttgtttgaagcccctcttgatgaaaaagaaatatcgctacgatatagctctgctcttgttcaaggtgctacaaatgtattttggattgacatacagacaaatacaagacattttctctctttgtatcattatctccttgaggacgttgctctagtccctgaaagacttagtaaaatatcattacaggctggtagagaccttttccttctgctctctagattcatgttcttctatgatcaagatcacatgctttctagtttcctagagcattttcccaatttcccaaattccttcttggttggtggaccagcagattactttgtaattgaactcgctgatcagcttcaaaagctaaaaattgagccagtactactacactacctctcccgcatgagcatacttcaagggttggaactgaggttgagtacaagcaccagactaaaggcctgcctctacagcttcacttctcctggtggccctacctacccaacacgggcggtgcggcacgcagcctggaacaccttggatttgctgttccctatcggtcgttacccgaggcacgtgatcagcctgttcttccggctgctgtatccgtggtactggccttcctcttgctggaacttcgtgatgacctgtgccatgaccgtgtactactacatcctgaacctgctggtgtcgtgttgggagaacatgaggcggcggcccagtcaccggagaacgcacggtgaatgaagacgcggcggcccatccagtggcaccttgtgttgttgttgttgttcatttttctttcctttgcgcgagtggtgtagtagttagtagcagcggcttatgtgttcgtcgcgaaacaacattccctgtataatataaactgctgtacttgttcagctgttgttcatataggaagagccgaatgaagaggaacagctggtaatggagggagagcgtgtgcgcgcatttctcgct

SEQ ID NO: 33795 - DNA, 1335 bp, Zea Mays
ataatgtcaccttctggaactttgagagctgtgtgcatatagataggcagagagtcggaagctatatcaaaatagttgtataacctccatgccctgatgtccaactcacagcgtcttcagatacttcagcaattgtttgctgacatcgcattgaaggtggatgatcgcgctcgagatgcaattatgagtgagagtgatgatggcattgctccagcagatgaacgggaggatggttggctatgcttctatgagattcttgccaatcattttgttagagtgcctgaaagtggcaggcgtatacttgagttgattgtgcaactctggagccagtccttcgcggccaacatatttgcacttcttttccagaaatggttgtttgaagcccctcttgatgaaaaagaaatatcgctacgatatagctctgctcttgttcaaggtgctacaaatgtattttggattgacatacagacaaatacaagacattttctctctttgtatcattatctccttgaggacgttgctctagtccctgaaagacttagtaaaatatcattacaggctggtagagaccttttccttctgctctctagattcatgttcttctatgatcaagatcacatgctttctagtttcctagagcattttcccaatttcccaaattccttcttggttggtggaccagcagattactttgtaattgaactcgctgatcagcttcaaaagctaaaaattgagccagtactactacactacctctcccgcatgagcatacttcaagggttggaactgaggttgagtacaagcaccagactaaaggcctgcctctacagcttcacttctcctggtggccctacctacccaacacgggcggtgcggcacgcagcctggaacaccttggatttgctgttccctatcggtcgttacccgaggcacgtgatcagcctgttcttccggctgctgtatccgtggtactggccttcctcttgctggaacttcgtgatgacctgtgccatgaccgtgtactactacatcctgaacctgctggtgtcgtgttgggagaacatgaggcggcggcccagtcaccggagaacgcacggtgaatgaagacgcggcggcccatccagtggcaccttgtgttgttgttgttgttcatttttctttcctttgcgcgagtggtgtagtagttagtagcagcggcttatgtgttcgtcgcgaaacaacattccctgtataatataaactgctgtacttgttcagctgttgttcatataggaagagccgaatgaagaggaacagctggtaatggagggagagcgtgtgcgcgcatttctcgct

SEQ ID NO: 33796 - DNA, 1255 bp, Zea Mays
ggactttgcatgcttgggctcgtcggcaaccggacaggaggacagcaaggcggaagcgcaaccgggcgtcgctggtccgacgggcggcacgtgtcagggagcgtgacaggggcggcagatccggacctccacgtccgtatccatatccacatccatccatcaaacacggaagagagagaggaagggagggagggagaggagagattattttggaccagttccaccgcttaatttgcaggaccgccaccccccgcggcgccgacgatcacctcaggcgtgcgcggatatggggcgccgcggctcctacgaccgcctcgaggcgctctccctggagatcgagcgcaagctgcacaaggccctgatgtccaactcacagcgtcttcagatacttcagcaattgtttgctgacatcgcattgaaggtggatgatcgcgctcgagatgcaattatgagtgagagtgatgatggcattgctccagcagatgaacgggaggatggttggctatgcttctatgagattcttgccaatcattttgttagagtgcctgaaagtggcaggcgtatacttgagttgattgtgcaactctggagccagtccttcgcggccaacatatttgcacttcttttccagaaatggttgtttgaagcccctcttgatgaaaaagaaatatcgctacgatatagctctgctcttgttcaaggtgctacaaatgtattttggattgacatacagacaaatacaagacattttctctctttgtatcattatctccttgaggacgttgctctagtccctgaaagacttagtaaaatatcattacaggctggtagagaccttttccttctgctctctagattcatgttcttctatgatcaagatcacatgctttctagtttcctagagcattttcccaatttcccaaattccttcttggttggtggaccagcagattactttgtaattgaactcgctgatcagcttcaaaagctaaaaattgagccagtactactacactacctctcccgcatgagcatacttcaagggttggaactgaggttgagtacaagcaccagactaaaggcctgcctctacagcttcacttctcctggtggccctacctacccaacacgggcggtgcggcacgcagcctggaacaccttggatttgctgttccctctgttgttcatataggaagagccgaatgaagaggaacagctggtaatggagggagagcgtgtgcgcgcatttctcgct

SEQ ID NO: 33797 - DNA, 1648 bp, Zea Mays
gcgcaattttttttaaaaaaaaaactcagacggagtttggctgtgatctgtggccctgtgtgggtgtggactttgcatgcttgggctcgtcggcaaccggacaggaggacagcaaggcggaagcgcaaccgggcgtcgctggtccgacgggcggcacgtgtcagggagcgtgacaggggcggcagatccggacctccacgtccgtatccatatccacatccatccatcaaacacggaagagagagaggaagggagggagggagaggagagattattttggaccagttccaccgcttaatttgcaggaccgccaccccccgcggcgccgacgatcacctcaggcgtgcgcggatatggggcgccgcggctcctacgaccgcctcgaggcgctctccctggagatcgagcgcaagctgcacaaggccctgatgtccaactcacagcgtcttcagatacttcagcaattgtttgctgacatcgcattgaaggtggatgatcgcgctcgagatgcaattatgagtgagagtgatgatggcattgctccagcagatgaacgggaggatggttggctatgcttctatgagattcttgccaatcattttgttagagtgcctgaaagtggcaggcgtatacttgagttgattgtgcaactctggagccagtccttcgcggccaacatatttgcacttcttttccagaaatggttgtttgaagcccctcttgatgaaaaagaaatatcgctacgatatagctctgctcttgttcaaggattgacatacagacaaatacaagacattttctctctttgtatcattatctccttgaggacgttgctctagtccctgaaagacttagtaaaatatcattacaggctggtagagaccttttccttctgctctctagattcatgttcttctatgatcaagatcacatgctttctagtttcctagagcattttcccaatttcccaaattccttcttggttggtggaccagcagattactttgtaattgaactcgctgatcagcttcaaaagctaaaaattgagccagtactactacactacctctcccgcatgagcatacttcaagggttggaactgaggttgagtacaagcaccagactaaaggcctgcctctacagcttcacttctcctggtggccctacctacccaacacgggcggtgcggcacgcagcctggaacaccttggatttgctgttccctatcggtcgttacccgaggcacgtgatcagcctgttcttccggctgctgtatccgtggtactggccttcctcttgctggaacttcgtgatgacctgtgccatgaccgtgtactactacatcctgaacctgctggtgtcgtgttgggagaacatgaggcggcggcccagtcaccggagaacgcacggtgaatgaagacgcggcggcccatccagtggcaccttgtgttgttgttgttgttcatttttctttcctttgcgcgagtggtgtagtagttagtagcagcggcttatgtgttcgtcgcgaaacaacattccctgtataatataaactgctgtacttgttcagctgttgttcatataggaagagccgaatgaagaggaacagctggtaatggagggagagcgtgtgcgcgcatttctcgct

SEQ ID NO: 33798 - DNA, 2014 bp, Zea Mays
cgtcttcccctcctccgcgctcccgtcatctacacctctcgctcccacccacgagtcccaccgccaccaccaccagtctatcccctcgccatttgtttcctccccgtgcatgaaaccctaaacctaaaccccacctcccttcccgagccatcccctccagcgcggcgatggcaaaggcgctgctttcctcctccctcctccccgcgctgcccggcgctgccggaggcagccggagcgctgcgaggccgatgctgctcccaccgctccggttgcggcgcggccggcgcggcgcctccgcttgcgaggtgagggcgggcctgcacgggctcgactccgtcggcgggccccaccttcaggccgcgctggagcgcgccgaggcggcgctatacacactcgctgacgccgcggtcgccgcggcggacaccgccgcgggcgcaggggccgacgcaggccaggctgcggcggtccaaaagaacagcggctggttcggcttcatctccgaggccctcgaggtcgtgctcaaggtgctcaaggatggtctttctgcagtccatgtgccatactcctacgggtttgccatcattctgctcactatcattgttaaggctgcgacattgcctctaaccaaaaagcaggtggaatcaactctggcaatgcagaatttacagccgcagattaaggcaatccagcagagatacgcaggcaaccaggaaaggatacagctagagactgctcggttatacaagcaagctggtgtaaaccctttagcaggatgttttccaacgttagcaacaattcctgtatggattggtctttaccaggccctttcaaatgtagcaaatgaggggctattgacagaaggatttttctggattccatcactgggaggtcctacaacaattgcagctcggcaaagtggttctggaattacatggctcttcccatttgtggatggtcatcctccgctaggctggcatgacacgatatgctaccttgtattgcctgtgctacttgttgcttctcagtatgtatctatggagatcatgaagccacctcagagcgatgacccatcacagaagaacacaatgctcattttgaaatttcttccatttatgattggctggttctctttgtcagtgccatcaggattgtctatttactggtttacaaacaatgtcctcagcacagcccagcaggtgtggttacggaaaatgggaggagcgaagcctgtagtgactgagggagacaatctcgcaagcaggtttaggcagctaaaggaagaagagaacaggagaaaattcagcaaagcacttgctgcaggagattcagatgcgtcgtcatcgacatatgacatggatgatgaagagtcggatgagacgatagaagagggaggacctgtggaggaagcatctactagcagtgacaagaaacttccaaactactcagggaagaagggcaaaagatcgaagaggaagcgcatggtgcagtaatcgttgcagcataattggatgcgatttttgtcacaactggttaattcagctgaccagttaggtgccgtagtatcatggagacagttttggtgggggccttttggaggcataattgcataaatctgaggtgcagacaattagacagtttccggggacacaagtatttgctgctaagctatccaatgaactagctcagtcagtatatatgctttagacctgagggtaatggacaggagaacaggagtggggtaaatgcacaagcagagagacaggatctgtagaggtaggcgagagatactccggtgtactctgtacatggttctaaaaaattgggcagaaactggattgtccagaccgttcatatacgttgtactagccggttgttgtactagccagttgcgctacggttgttatatattatataaatagatattgagatatttattcaaatataactattgtttatttctaaacactacaagaagggtattatataattgattaattgtaaaggcttgtttggg

SEQ ID NO: 33799 - DNA, 2385 bp, Zea Mays
ccgtcccccaccccacctccaacgacaacctccacctcgtcttcccctcctccgcgctcccgtcatctacacctctcgctcccacccacgagtcccaccgccaccaccaccagtctatcccctcgccatttgtttcctccccgtgcatgaaaccctaaacctaaaccccacctcccttcccgagccatcccctccagcgcggcgatggcaaaggcgctgctttcctcctccctcctccccgcgctgcccggcgctgccggaggcagccggagcgctgcgaggccgatgctgctcccaccgctccggttgcggcgcggccggcgcggcgcctccgcttgcgaggtgagggcgggcctgcacgggctcgactccgtcggcgggccccaccttcaggccgcgctggagcgcgccgaggcggcgctatacacactcgctgacgccgcggtcgccgcggcggacaccgccgcgggcgcaggggccgacgcaggccaggctgcggcggtccaaaagaacagcggctggttcggcttcatctccgaggccctcgaggtcgtgctcaaggtgctcaaggatggtctttctgcagtccatgtgccatactcctacgggtttgccatcattctgctcactatcattgttaaggctgcgacattgcctctaaccaaaaagcaggtggaatcaactctggcaatgcagaatttacagccgcagattaaggcaatccagcagagatacgcaggcaaccaggaaaggatacagctagagactgctcggttatacaagcaagctggtgtaaaccctttagcaggatgttttccaacgttagcaacaattcctgtatggattggtctttaccaggccctttcaaatgtagcaaatgaggggctattgacagaaggatttttctggattccatcactgggaggtcctacaacaattgcagctcggcaaagtggttctggaattacatggctcttcccatttgtggatggtcatcctccgctaggctggcatgacacgatatgctaccttgtattgcctgtgctacttgttgcttctcagtatgtatctatggagatcatgaagccacctcagagcgatgacccatcacagaagaacacaatgctcattttgaaatttcttccatttatgattggctggttctctttgtcagtgccatcaggattgtctatttactggtttacaaacaatgtcctcagcacagcccagcaggtgtggttacggaaaatgggaggagcgaagcctgtagtgactgagggaggtagtggaataattaccgcaggacgagcaaaacgctctaatgctcaacctgccggagagaggtttaggcagctaaaggaagaagagaacaggagaaaattcagcaaagcacttgctgcaggagattcagatgcgtcgtcatcgacatatgacatggatgatgaagagtcggatgagacgatagaagagggaggacctgtggaggaagcatctactagcagtgacaagaaacttccaaactactcagggaagaagggcaaaagatcgaagaggaagcgcatggtgcagtaatcgttgcagcataattggatgcgatttttgtcacaactggtaagttctattgaccctcagatactgttcataatgaatcatgtcacaaggaaccagggttgaacttctccgttttgtaaaaaattcttactgttccttttttagaaaatttaaaatttattcaaactcctgctccaaacagaagcaaaaacttaacagtcactgccaattcatatagaattaaccaacaatttaactttttatcattttcccttttggaagagagggtgccatccggtccacatcttgtcttgaaaaatgcgcacatattaataattttctattgcaggttaattcagctgaccagttaggtgccgtagtatcatggagacagttttggtgggggccttttggaggcataattgcataaatctgaggtgcagacaattagacagtttccggggacacaagtatttgctgctaagctatccaatgaactagctcagtcagtatatatgctttagacctgagggtaatggacaggagaacaggagtggggtaaatgcacaagcagagagacaggatctgtagaggtaggcgagagatactccggtgtactctgtacatggttctaaaaaattgggcagaaactggattgtccagaccgttcatatacgttgtactagccggttgttgtactagccagttgcgctacggttgttatatattatataaatagatattgagatatttattcaaatataactattgtttatttctaaacactacaagaagggtattatataattgattaattgtaaaggcttgtttggg

SEQ ID NO: 33800 - DNA, 2093 bp, Zea Mays
aaccgtcccccaccccacctccaacgacaacctccacctcgtcttcccctcctccgcgctcccgtcatctacacctctcgctcccacccacgagtcccaccgccaccaccaccagtctatcccctcgccatttgtttcctccccgtgcatgaaaccctaaacctaaaccccacctcccttcccgagccatcccctccagcgcggcgatggcaaaggcgctgctttcctcctccctcctccccgcgctgcccggcgctgccggaggcagccggagcgctgcgaggccgatgctgctcccaccgctccggttgcggcgcggccggcgcggcgcctccgcttgcgaggtgagggcgggcctgcacgggctcgactccgtcggcgggccccaccttcaggccgcgctggagcgcgccgaggcggcgctatacacactcgctgacgccgcggtcgccgcggcggacaccgccgcgggcgcaggggccgacgcaggccaggctgcggcggtccaaaagaacagcggctggttcggcttcatctccgaggccctcgaggtcgtgctcaaggtgctcaaggatggtctttctgcagtccatgtgccatactcctacgggtttgccatcattctgctcactatcattgttaaggctgcgacattgcctctaaccaaaaagcaggtggaatcaactctggcaatgcagaatttacagccgcagattaaggcaatccagcagagatacgcaggcaaccaggatacagctagagactgctcggttatacaagcaagctggtgtaaaccctttagcaggatgttttccaacgttagcaacaattcctgtatggattggtctttaccaggccctttcaaatgtagcaaatgaggggctattgacagaaggatttttctggattccatcactgggaggtcctacaacaattgcagctcggcaaagtggttctggaattacatggctcttcccatttgtggatggtcatcctccgctaggctggcatgacacgatatgctaccttgtattgcctgtgctacttgttgcttctcagtatgtatctatggagatcatgaagccacctcagagcgatgacccatcacagaagaacacaatgctcattttgaaatttcttccatttatgattggctggttctctttgtcagtgccatcaggattgtctatttactggtttacaaacaatgtcctcagcacagcccagcaggtgtggttacggaaaatgggaggagcgaagcctgtagtgactgagggaggtagtggaataattaccgcaggacgagcaaaacgctctaatgctcaacctgccggagagaggtttaggcagctaaaggaagaagagaacaggagaaaattcagcaaagcacttgctgcaggagattcagatgcgtcgtcatcgacatatgacatggatgatgaagagtcggatgagacgatagaagagggaggacctgtggaggaagcatctactagcagtgacaagaaacttccaaactactcagggaagaagggcaaaagatcgaagaggaagcgcatggtgcagtaatcgttgcagcataattggatgcgatttttgtcacaactggttaattcagctgaccagttaggtgccgtagtatcatggagacagttttggtgggggccttttggaggcataattgcataaatctgaggtgcagacaattagacagtttccggggacacaagtatttgctgctaagctatccaatgaactagctcagtcagtatatatgctttagacctgagggtaatggacaggagaacaggagtggggtaaatgcacaagcagagagacaggatctgtagaggtaggcgagagatactccggtgtactctgtacatggttctaaaaaattgggcagaaactggattgtccagaccgttcatatacgttgtactagccggttgttgtactagccagttgcgctacggttgttatatattatataaatagatattgagatatttattcaaatataactattgtttatttctaaacactacaagaagggtattatataattgattaattgtaaaggcttgtttggg

SEQ ID NO: 33801 - DNA, 2272 bp, Zea Mays
aaataatatgcatatagttttgttttaatgatatatgatagctcgtttagctcgcgaactgattcgttagcaaactaagctggttcgttaacgaaccgatcttaaatgtcagtgaaaaaatttaaatgaaccagggtactaagccagggtactggtctacagcaatactgcatcgctgcatcggataaaccgtcccccaccccacctccaacgacaacctccacctcgtcttcccctcctccgcgctcccgtcatctacacctctcgctcccacccacgagtcccaccgccaccaccaccagtctatcccctcgccatttgtttcctccccgtgcatgaaaccctaaacctaaaccccacctcccttcccgagccatcccctccagcgcggcgatggcaaaggcgctgctttcctcctccctcctccccgcgctgcccggcgctgccggaggcagccggagcgctgcgaggccgatgctgctcccaccgctccggttgcggcgcggccggcgcggcgcctccgcttgcgaggtgagggcgggcctgcacgggctcgactccgtcggcgggccccaccttcaggccgcgctggagcgcgccgaggcggcgctatacacactcgctgacgccgcggtcgccgcggcggacaccgccgcgggcgcaggggccgacgcaggccaggctgcggcggtccaaaagaacagcggctggttcggcttcatctccgaggccctcgaggtcgtgctcaaggtgctcaaggatggtctttctgcagtccatgtgccatactcctacgggtttgccatcattctgctcactatcattgttaaggctgcgacattgcctctaaccaaaaagcaggtggaatcaactctggcaatgcagaatttacagccgcagattaaggcaatccagcagagatacgcaggcaaccaggaaaggatacagctagagactgctcggttatacaagcaagctggtgtaaaccctttagcaggatgttttccaacgttagcaacaattcctgtatggattggtctttaccaggccctttcaaatgtagcaaatgagaaggatttttctggattccatcactgggaggtcctacaacaattgcagctcggcaaagtggttctggaattacatggctcttcccatttgtggatggtcatcctccgctaggctggcatgacacgatatgctaccttgtattgcctgtgctacttgttgcttctcagtatgtatctatggagatcatgaagccacctcagagcgatgacccatcacagaagaacacaatgctcattttgaaatttcttccatttatgattggctggttctctttgtcagtgccatcaggattgtctatttactggtttacaaacaatgtcctcagcacagcccagcaggtgtggttacggaaaatgggaggagcgaagcctgtagtgactgagggaggtagtggaataattaccgcaggacgagcaaaacgctctaatgctcaacctgccggagagaggtttaggcagctaaaggaagaagagaacaggagaaaattcagcaaagcacttgctgcaggagattcagatgcgtcgtcatcgacatatgacatggatgatgaagagtcggatgagacgatagaagagggaggacctgtggaggaagcatctactagcagtgacaagaaacttccaaactactcagggaagaagggcaaaagatcgaagaggaagcgcatggtgcagtaatcgttgcagcataattggatgcgatttttgtcacaactggttaattcagctgaccagttaggtgccgtagtatcatggagacagttttggtgggggccttttggaggcataattgcataaatctgaggtgcagacaattagacagtttccggggacacaagtatttgctgctaagctatccaatgaactagctcagtcagtatatatgctttagacctgagggtaatggacaggagaacaggagtggggtaaatgcacaagcagagagacaggatctgtagaggtaggcgagagatactccggtgtactctgtacatggttctaaaaaattgggcagaaactggattgtccagaccgttcatatacgttgtactagccggttgttgtactagccagttgcgctacggttgttatatattatataaatagatattgagatatttattcaaatataactattgtttatttctaaacactacaagaagggtattatataattgattaattgtaaaggcttgtttggg

SEQ ID NO: 33802 - DNA, 2360 bp, Zea Mays
tttcatttggtccccgcggtttaggtttttgttcctggctgcggctgttggattgtgctgaaagatctcagtttttatctccaaggaaggattactcatcgcgaatccggatctgtcggtggtggaaactggaaagttgccacttttatgaggcgaggctgtgaggaacccgtgtccctcccgtggatgtggtgagccctgattggcgcaccaggcgagaaggggcaggagcccagtaggtggtgacagagcagggtgagagggagaaccggagaagagaggtagccggtatacaagacaagcaggcaactataggaaggacgaaggaaaaggagaggagggagctctccatgggggagcccctcctcgcctccctctctatggagaacagcaacagccacccctgcacgctcctctccatggaccctgccggctcgcacctggcctccgccgagtcctcgggcggcggtagcgccgcgaccaatggggttggcaatggtgttgaccgggaactctttgtcattccgcggcgtgagtcggcgcaccctgttccgccggacatcaacctcccgctctctgcagatcactcaccgctgcctccgtcgtggagcctcgacacgttcgacatacttgatgtcactcttggaacacacaactacgagtctgaggttgcgcttacgcttccaaagccgaccggcaacggcaatggcagtgccgctatcggcgtcggcgcgaggaaatacgctaagagaggcgacagcatctggggcgcgtggttcttcttcaataactacttcaagcctgcacttgtggagaagtcaaaggggaagatggtgcgagacgcgtccaggaacatctcgggctttgacaagtctgatctacgtcttgatgtcttcctggtgcagcatgacatggagaacatgtacatgtgggttttcaaggagcggcccgacaatgcccttgggaagatgcagctccggagcttcatgaatgggcattccaagcatggggagccgtctttcccgttcagtgccgataagggctttgccaggtcacaccgcatgcagcgaaagcactaccgtgggctgtcaaacccgcagtgccttcatgggattgagatcgtggcctcgccaaatttgtccgcagttcctgagtctgacttgaagaggtgggctgaactgacaggcagggaacataatttttcagtaccatctgaagccagtgactttgagtcatggaggaatcttcccagcactgattttgaacttgacaggccacatccaccggccgcaaagagtgccactcatggccagaagaagggattgaatggttcaggtctcaacctttcaactccaccatcatcagacgatgggatggacctttcaccgaaatgtgccaaacgccgcaaggatttctttggccatggcgtagaggaggactgtgtgatggcgaacaattcttgttccgacagagagcaagaggcagaagctcacactggtgagccatcatggatgcacgagttcactggtgtggctaagcatgcaagcggccctgtcactgctgccaagacgatatatgaggatgaggaagggtacttaatcgtggtgagcatgcttttctccgatccacatagtgtcaaagtatcatggaggaacacgctgacgcacggcatcgtgaagataacatgcgtgagcactgcccggatgccctacattaagaaacacgacaggacgttcaagctgacggaccctttccccgagcactgccctcccggcgagtttgtgagagagatccctctggcgacacggattccagaagacgcgaagatcgaggcgtactatgacgagacaggaactgggctggaaatcatggtccccaagcaccgggttggaccagaggagcatgaagttcaggtgtgcatgaggcccccacatcttggtgacaacgatctcgtgctctcctagaacaggaaaacagctagcttttagatgttctggtgtcatgctcatgccatgagatactggaacataaactggtggtgccatggctcagtaagagccgtcctatttgctgctaaacatgtagcttgtaagttgagaattcctttccccccataaaagtttgtgatttaggcaaaaggttacctcctccctctgttaatttccctctgtacctctgctacacaagtgcatcactattggtgatcttccttgactatctgaaagctgactagtcaagattctgtgtatattcagatgaccaggttcgtaataatgttgttgatggctacctatgattttgaggctcggttgtcggtttcgaaaattatttgcaatgattgccttaaccgttttaatgtg

SEQ ID NO: 33803 - DNA, 1326 bp, Zea Mays
caggacctttttgtggcgggggggcctactcatattggtgcagaaacagaccttcgctttgtatactgtgcagctgcaatctgctcaatgctagatgactggacaggaatggacaagttaaaggcaaaggagtacattcttaactgccagtcatatgatggaggctttggtatggttcctggttctgaatctcatgaacttgatttttgcttgccactgagcaatgggttaaggttctcattgcttgtctttgtgttagcgagtcaggtggaggaactttttgtgctgttgctgctctccatctaatgggcttcatccaagttgattttggcatctgacttaagagattctacatcaatcgacacatgcatgctcctcgaatggtgtcttcagagacaagtcactgatggagggtttcaagggagaaggaacaagctcagtgatacatgctatgctttttgggttggaggcgtcttgaagatcttgggtgcataccacttgatcgacagctgtgctctgcggagtttcttgctcacctgccagtcgccttatggaggcttcacgaagttcccggatgatcggataccagacatctaccattcttactacggcctggcagccctctccttgttggaagaggaagggctggaacccctctgcgtcgaactggggatcctctccgctgctgcattatagaaacttgtgtttctaccgaatccagttactgtacaatgtttgtgggggggggggggggggggggtaatccagtacttaacacaggataaacagctgagaaatcgaagggagtaatttattgatagagtgagttggtccgtgctgtcagtgtgctgcgcagatcgtgtaacattacttcgtgagttcgaaaggcgtgtgacaattttgtttgcaaaagtgcgatgggcaggctaactgagccagtcttcttcccagttggttgatctgattgttgacagttgagttagctgaacgctttgtatgattgtatcgtcacttggaaaggtactcgaatgtttgacgtttctgtttccgtctgtttggcataactaaatggcttgtgtctgctgccgtgaacaactttacatattgcatgcttcttcacaacattttgtttcagttaacactctctttaggcatctgcatactcatcgcttttctctcagaattcaggtgagtgagagagagaaaaaaaaaccagctactactgttttggtcacagggttaccgtgactgatttataaagatcgatgatttccgatggatattagaaatagcagcttctgttggacagctgaaagggaagaaaat

SEQ ID NO: 33804 - DNA, 1535 bp, Zea Mays
caggacctttttgtggcgggggggcctactcatattggtgcagaaacagaccttcgctttgtatactgtgcagctgcaatctgctcaatgctagatgactggacaggaatggacaagttaaaggcaaaggagtacattcttaactgccagtcatatgatggaggctttggtatggttcctggttctgaatctcatggtggaggaactttttgtgctgttgctgctctccatctaatgggcttcatccaagttgattttggcatctgacttaagagattctacatcaatcgacacatgcatgctcctcgaatggtgtcttcaggttaaacttatactcaaccatgtctccgcaattagccatcgaggttgccttctcacgtgattctgtagcaataagaatttcttttatctactacgtaaacgtaccatttctttttatttacccatgccggataaatgcagtatttctatgcatctgaatattgtgccacatgtatgttagcatctatttgaaatcaacataggtggaataacaaaatagaacgggatcgcctttacccaatggtaaatcttacaaactgatttctctattacctgtgcagagacaagtcactgatggagggtttcaagggagaaggaacaagctcagtgatacatgctatgctttttgggttggaggcgtcttgaagatcttgggtgcataccacttgatcgacagctgtgctctgcggagtttcttgctcacctgccagtcgccttatggaggcttcacgaagttcccggatgatcggataccagacatctaccattcttactacggcctggcagccctctccttgttggaagaggaagggctggaacccctctgcgtcgaactggggatcctctccgctgctgcattatagaaacttgtgtttctaccgaatccagttactgtacaatgtttgtgggggggggggggggggggggtaatccagtacttaacacaggataaacagctgagaaatcgaagggagtaatttattgatagagtgagttggtccgtgctgtcagtgtgctgcgcagatcgtgtaacattacttcgtgagttcgaaaggcgtgtgacaattttgtttgcaaaagtgcgatgggcaggctaactgagccagtcttcttcccagttggttgatctgattgttgacagttgagttagctgaacgctttgtatgattgtatcgtcacttggaaaggtactcgaatgtttgacgtttctgtttccgtctgtttggcataactaaatggcttgtgtctgctgccgtgaacaactttacatattgcatgcttcttcacaacattttgtttcagttaacactctctttaggcatctgcatactcatcgcttttctctcagaattcaggtgagtgagagagagaaaaaaaaaccagctactactgttttggtcacagggttaccgtgactgatttataaagatcgatgatttccgatggatattagaaatagcagcttctgttggacagctgaaagggaagaaaat

SEQ ID NO: 33805 - DNA, 1278 bp, Zea Mays
gcttaatgcatcggcttatttgacaggacctttttgtggcgggggggcctactcatattggtgcagaaacagaccttcgctttgtatactgtgcagctgcaatctgctcaatgctagatgactggacaggaatggacaagttaaaggcaaaggagtacattcttaactgccagtcatatgatggaggctttggtatggttcctggttctgaatctcatggtggaggaactttttgtgctgttgctgctctccatctaatgggcttcatccaagttgattttggcatctgacttaagagattctacatcaatcgacacatgcatgctcctcgaatggtgtcttcagagacaagtcactgatggagggtttcaagggagaaggaacaagctcagtgatacatgctatgctttttgggttggaggcgtcttgaagatcttgggtgcataccacttgatcgacagctgtgctctgcggagtttcttgctcacctgccagtcgccttatggaggcttcacgaagttcccggatgatcggataccagacatctaccattcttactacggcctggcagccctctccttgttggaagaggaagggctggaacccctctgcgtcgaactggggatcctctccgctgctgcattatagaaacttgtgtttctaccgaatccagttactgtacaatgtttgtgggggggggggggggggggggtaatccagtacttaacacaggataaacagctgagaaatcgaagggagtaatttattgatagagtgagttggtccgtgctgtcagtgtgctgcgcagatcgtgtaacattacttcgtgagttcgaaaggcgtgtgacaattttgtttgcaaaagtgcgatgggcaggctaactgagccagtcttcttcccagttggttgatctgattgttgacagttgagttagctgaacgctttgtatgattgtatcgtcacttggaaaggtactcgaatgtttgacgtttctgtttccgtctgtttggcataactaaatggcttgtgtctgctgccgtgaacaactttacatattgcatgcttcttcacaacattttgtttcagttaacactctctttaggcatctgcatactcatcgcttttctctcagaattcaggtgagtgagagagagaaaaaaaaaccagctactactgttttggtcacagggttaccgtgactgatttataaagatcgatgatttccgatggatattagaaatagcagcttctgttggacagctgaaagggaagaaaat

SEQ ID NO: 33806 - DNA, 1286 bp, Zea Mays
gcttaatgcatcggcttatttgacaggacctttttgtggcgggggggcctactcatattggtgcagaaacagaccttcgctttgtatactgtgcagctgcaatctgctcaatgctagatgactggacaggaatggacaagttaaaggcaaaggagtacattcttaactgccagtcatatgatggaggctttggtatggttcctggttctgaatctcatgcgagtcaggtggaggaactttttgtgctgttgctgctctccatctaatgggcttcatccaagttgattttggcatctgacttaagagattctacatcaatcgacacatgcatgctcctcgaatggtgtcttcagagacaagtcactgatggagggtttcaagggagaaggaacaagctcagtgatacatgctatgctttttgggttggaggcgtcttgaagatcttgggtgcataccacttgatcgacagctgtgctctgcggagtttcttgctcacctgccagtcgccttatggaggcttcacgaagttcccggatgatcggataccagacatctaccattcttactacggcctggcagccctctccttgttggaagaggaagggctggaacccctctgcgtcgaactggggatcctctccgctgctgcattatagaaacttgtgtttctaccgaatccagttactgtacaatgtttgtgggggggggggggggggggggtaatccagtacttaacacaggataaacagctgagaaatcgaagggagtaatttattgatagagtgagttggtccgtgctgtcagtgtgctgcgcagatcgtgtaacattacttcgtgagttcgaaaggcgtgtgacaattttgtttgcaaaagtgcgatgggcaggctaactgagccagtcttcttcccagttggttgatctgattgttgacagttgagttagctgaacgctttgtatgattgtatcgtcacttggaaaggtactcgaatgtttgacgtttctgtttccgtctgtttggcataactaaatggcttgtgtctgctgccgtgaacaactttacatattgcatgcttcttcacaacattttgtttcagttaacactctctttaggcatctgcatactcatcgcttttctctcagaattcaggtgagtgagagagagaaaaaaaaaccagctactactgttttggtcacagggttaccgtgactgatttataaagatcgatgatttccgatggatattagaaatagcagcttctgttggacagctgaaagggaagaaaat

SEQ ID NO: 33807 - DNA, 533 bp, Zea Mays
ctcgagtttacgtggctcgacatcctgatgtggaccgtgtccatggcgagcagcacgcagcaaaagcttgtgtgaaggggtgggaaattcttcggccgagacaaatactcgtatcctgcattgacatgcaaaattcccaccgaattcagcagtcttagtttctccaaacctacatgttcaacgtctgaagtgctctctgcgaagtggggccaaaaaaaaaaacagtttagcgcatagctgggcgattggttgcgtccgcgtggctttctcagatcgtggcgcaccgcggcggcgctgacgccgccggcgaccaggggctctcggctgccgaccgccggagatggggaagcgcgatttcgagcgcctgcaccacgtggcgttcttcgaggccatggccacggagctccccgacgaatacgcctcccaggaggtcaaccacctcaccctctcctacttcgccgtcggcggcctctcccttcttcgggagctcgaccggattaacaaggatgaaatagccaaatgggtttgtcttt

SEQ ID NO: 33808 - DNA, 393 bp, Zea Mays
tcaggtgcttgatgtaattagtcgaaggccagaaatcaccaaaatttctttccttgcacactccgttggaggattagcagcaagatatgcaattgcaagactttatagacatccagacatcgcgtctgatggaaatactaaaggaaccatctgtggcttggtaggaataaactttattactatagcaacgcctcaccttggttcacgagggaacaagcaggttccactcctgtttggatctgttgcaatggaaaaggttgcttgccacatcgttcattggatatttaggagaactagtagacatctctttctaactgacgatgatgaagggcagcctccactgctgcagcagatggttgaagatcatgacaatctctactttatgtaagtttt

SEQ ID NO: 33809 - DNA, 2643 bp, Zea Mays
atgagcacatccactgattagatatatatcatctttcccaactgggcatagcaacatcaatgcagatgaaaatgtatcgcttgaggcaattgaggctgacatttacaattctattttaaatgatctatttggatccagaaatgcacatattcaggatagtgaccaaatgttgccatcaaacacttcaaacatcacaattgataccaagagaactagaagccccaagcgttcagtgctgggaacatatgttagttgtctttcatcaaaacaccgccattcttctctatatgatgtagcctcaaaatcttctgcctctgtaactacaagaaacagatttggtcccgtcgattgtgatggcatccatatatcttcttgcggacatgctgtgcatcaggaatgtcatgaccgatatttgttctccttgaaacaaagatatgtccggagacttggttttgaaggtggtcatatagttgatcctgatttgggagaattgctttgtccagtatgtcgcagatttgcaaattccattctcccagcatcacctgatttctcgggtaaaacatcaatgatgctgagaccatttgttcaaaccttgacacctcaagttgttacaaccacatcagatgtgaatagaaattgcttacagttcgctcgcgcactatctctttttgaaagtgctggaaaaatcgttggagaaaccaagtttttaaaagctatatctgggaagcttaatgaaactacaaatccagccctcgatccttgtcttcgaagattggctatgctttactatcctcgcagtcacagcagtttttcaccatctaagaggctcaacccatccttatttctctgggatacactaagatactctctggtatctacagaaattgcttctcgtggtaggatgtcaagccactctgctgaatcgaagtcctgcttggagtctttgcgtggcgaacttaattcatcaagtgggttcatattgtctctcctgttccatgctgcccactctgcacggaatttgaatcgtctcgaggttcttctgaggtttgaaggtatccaactattagcaggctctatttgctcttgtatttcgggttataaagacattctgaatgccactaagcgaaaaggctctttgccatcgatggttgatccagccagtgagggggccctctttcctgatgtacaattttggaaacaatgtgctgatccagttcttgctcaagatccattttcttctttgatgtcagcacttttctgtctgcccgttcagtttctgtcatctgctgaattcttcatcccttttgtccatctgttctatgttgtttgtgccattcaggccctggtaacatgctacggagaggaaacttttgatcgatcaaacttcaatgactgccttcttaatgatgtttgcaagacaatgtcaggatatgatatcgccagagactattttgtatccaaatatatcgatccctcttgtcatccaaaagacatggtccgcagattaacatatccatatcttcggagatgtgcattgctttgggagctgctaagatcttctgccacatcacccttgtatgacggttccaatatttgggaaggatcacatctttacttgagtaatagcacacaagacgacagttcttcactggcaatggaactggccgggttacgagaattggaagacctgtttcagattcagtcgctggatctgattctccaagatgaatctgtacatatgcttgccttaaaatggtctcaacatttctgtgaagagtacaatccccgtaaatatagaggcactctcttttctacccctgcagttccatttaggctgatgcaactaccagatgtgtaccaggttctcctagaaagatatatcaagatgcaatgccctgattgtggctcagtgcctgatgaaccggcactatgtttgctatgtggcaaactatgttcgcctagttggaaaccatgctgcaggactgggaaatgccagaatcatgcattgcaatgtggtgctggtattggcatatttcttctagtgaggaaaacaacaatcctgttgcagcgatctgctcgtctaacattttggccgtctctataccttgatgcttttggagaggaggataatgaaatgcacagaggaaaacctttatatctaagtcaagaaagatacacatccctgacgtatctggtggcatctcatagccttgaccgaacttctgaagttcttcggcaaacaacgattggcttttatggatctgattgagcccatttttcaaggaacaatgtgttcaaaggatcttgcggatgtgcatattttgggaactgtactgcaacttggtgtttgatcttctccggtggtaacgagagcgttacctcaaccaaggtggtgtagattctgcaggctcgccacccgtcgttgctctatggcgcactggccctctgctgccctcttgtgcctaatgtacagtctacattcttttctttctttattatggacggtgctcacaaaatggatgaccttggaagttgtaacgctgtacgatcgactgcatgatctgtatgcacagacatagcgtcggactggtgtagtttgtcagtatgaaatgcaggcatcaggtgccatttcgtcgtcaagaa

SEQ ID NO: 33810 - DNA, 2332 bp, Zea Mays
atgagcacatccactgattagatatatatcatctttcccaactgggcatagcaacatcaatgcagatgaaaatgtatcgcttgaggcaattgaggctgacatttacaattctattttaaatgatctatttggatccagaaatgcacatattcaggatagtgaccaaatgttgccatcaaacacttcaaacatcacaattgataccaagagaactagaagccccaagcgttcagtgctgggaacatatgttagttgtctttcatcaaaacaccgccattcttctctatatgatgtagcctcaaaatcttctgcctctgtaactacaagaaacagatttggtcccgtcgattgtgatggcatccatatatcttcttgcggacatgctgtgcatcaggaatgtcatgaccgatatttgttctccttgaaacaaagatatgtccggagacttggttttgaaggtggtcatatagttgatcctgatttgggagaattgctttgtccagtatgtcgcagatttgcaaattccattctcccagcatcacctgatttctcgggtaaaacatcaatgatgctgagaccatttgttcaaaccttgacacctcaagttgttacaaccacatcagatgtgaatagaaattgcttacagttcgctcgcgcactatctctttttgaaagtgctggaaaaatcgttggagaaaccaagtttttaaaagctatatctgggaagcttaatgaaactacaaatccagccctcgatccttgtcttcgaagattggctatgctttactatcctcgcagtcacagcagtttttcaccatctaagaggctcaacccatccttatttctctgggatacactaagatactctctggtatctacagaaattgcttctcgtggtaggatgtcaagccactctgctgaatcgaagtcctgcttggagtctttgcgtggcgaacttaattcatcaagtgggttcatattgtctctcctgttccatgctgcccactctgcacggaatttgaatcgtctcgaggttcttctgaggtttgaaggtatccaactattagcaggctctatttgctcttgtatttcgggttataaagacattctgaatgccactaagcgaaaaggctctttgccatcgatggttgatccagccagtgagggggccctctttcctgatgtacaattttggaaacaatgtgctgatccagttcttgctcaagatccattttcttctttgatgtcagcacttttctgtctgcccgttcagtttctgtcatctgctgaattcttcatcccttttgtccatctgttctatgttgtttgtgccattcaggccctggtaacatgctacggagaggaaacttttgatcgatcaaacttcaatgactgccttcttaatgatgtttgcaagacaatgtcaggatatgatatcgccagagactattttgtatccaaatatatcgatccctcttgtcatccaaaagacatggtccgcagattaacatatccatatcttcggagatgtgcattgctttgggagctgctaagatcttctgccacatcacccttgtatgacggttccaatatttgggaaggatcacatctttacttgagtaatagcacacaagacgacagttcttcactggcaatggaactggccgggttacgagaattggaagacctgtttcagattcagtcgctggatctgattctccaagatgaatctgtacatatgcttgccttaaaatggtctcaacatttctgtgaagagtacaatccccgtaaatatagaggcactctcttttctacccctgcagttccatttaggctgatgcaactaccagatgtgtaccaggttctcctagaaagatatatcaagatgcaatgccctgattgtggctcagtgcctgatgaaccggcactatgtttgctatgtggcaaactatgttcgcctagttggaaaccatgctgcaggactgggaaatgccagaatcatgcattgcaatgtggtgctggtattggcatatttcttctagtgaggaaaacaacaatcctgttgcagcgatctgctcgtctaacattttggccgtctctataccttgatgcttttggagaggaggataatgaaatgcacagaggaaaacctttatatctaagtcaagaaagatacacatccctgacgtatctggtggcatctcatagccttgaccgaacttctgaagttcttcggcaaacaacgattggcttttatggatctgattgagcccatttttcaaggaacaatgtgttcaaagacttcactaatgtgggagcatttggtaccgag

SEQ ID NO: 33811 - DNA, 2752 bp, Zea Mays
ggcactgggtagctgtgggagagagaaccggagaactatggggagggagagcaacgacgaagaaccagccatgcgtgagaactggcaggcagtggctgctgggagtcggctgggagaggataacctaaaagtgtgttgttgggctgggttgggctacatgaagctcattctttatggagtgcctgaagaacaactgcaagagcaccaacaaagcctagtccagtacactgaggagcacaaggagcagatacctgatattgtaagacatatcttgtcagcaggtactgatatttcagaggctcggaaggtctcaaagaaggatgcaaatagcagcagcaacggcgatgcatacagggagagtttgtcttggttgcagtggctgatgttcaaaaatgaaccagcagcaatgcttgatgacctggagcgttccaatgcaggggagcgtgctgtctgtgggtctgtctgggggcacaatgacgttgcttatcgctgccggacttgcgagagtgaccccacatgtgcaatttgtgttccgtgcttccagaatggcaatcacaaggatcatgattactctatcatatatacagggggtggatgttgtgattgtggtgatgcgactgcttggaagcgcgagggcttctgctcaaagcacaagggtgctgagcagatcaagcctcttccagtggagcttgcgtgttctgtaggacctgtcctggatgtcctcttgcagttctggaaggagcggatatgcctgctggaaccacaccatgcaaagggtagtgatggtagctcgtgcaagaggattgccgaagagttgacaacttctatctctagcatgctgcttgagttctgcacacgcagtgaaaaccttcttagttttctgtccctaagaatccgcgagtttcctgatatgttagatgcattaataaggtcagacaggttgcttgacaagaaggttgccagaaaattgcatgagtttttattgaagcttatcagtgaccctgcttttaagtatgagtttgccaaggttttcatacactactaccctatcacatttggggaagttattaaaggctgtaatgattcactactggaagactatccactgatgacaactttttctgtgcaaatattcactgtgcctacattgactccaaggcttgtgcgcgaggttgatttgttgggtgtcctccttggatgcttgacagatctgtttctctcttgcatcggtgaggatggtcgtttacagacaaacaaatgggggaatttatttgatgcttctattcgattactggatgatacacgctatgtgttgagtcatgaagaggtgtctaagcatgttgcttatgggaggcctgatctaactaggtcatggattaaactcttatcacttgtgcaaggaatggatcctcagaagagagtgacaagtattcacgctgaagatgagaacgagcatctatctgcgccgtttgtgctggggcactatcttggaattgtccagaatcttctgatgaggggatcattttctcctcctgatcaacatgaatcaactgatgtgacagtttgctccactgcgataaaaggtgtggaaagtgctgaaaatcagcggcatgcaaaagttgggagggtctcccaggagagttctgtatccgatctaagtagcagagacagctctttgtgctgtggattgccatcacctgctgcctggttagttcttcaatgcctgaaagccattgaaagttggctctggctggaaaacgatatagctctgaggagcaaactgtcatcccttgatgctagcagcaatgattctcacaaacttatggctttgcttgaagacccgttgacttctcttacgggaaacagttcaaatacaaatatgtgtgtgatggacgtcaagataaatgaaggatcacaaacagattgtactgcagattattatgaggcatctagttctcctgttcaaggtcaaggccaagaagcgatgcctctggttagtaacagtacaggcaaagggaagatgcatggcagcagcaacagtacagttgtacagttgcaccctgaggatgccattacttatactctgactgatggtagcattttgtatgctcatccagattcaagaatcgaggaactaggaatactcaatacaagaggatggcctcatgttgtctttgatgtcagttcacaagaaacatctttccatatccctttgcaccgtatgctttcattactactgcggaaggctatgaagaaatgttttggagaggatggacattcagatgtgcaatccaatgagttctttcctcagatacttagaggttgtgagccctatggatttgcttcaattgttatggagcatccactgagagtgagagtattttgtgcacaagtgcgtgctggaatgtggcgcaagaacggtgatgcagctatcctgagtgcggaatggtaccgctctgtgcaatggtttgaacaaggtttggagtcagatctgtttctgcttcaatgctgtgctgccctatcttctccagagttatttgtgcggacaattcaagagcgatttggtttgtccagttatacagatttgggacttgcagagcaaaatgagtaagcccaaatctgcttgtatgtttctgtttctgctttgtattttttgttcaatttatggcattaccatccatgtattgtatagtatttatagtttgttgtggtcacttatgtttccatcactaccttctaaggtctatttggc

SEQ ID NO: 33812 - DNA, 2627 bp, Zea Mays
gaagcttcctctgctcatagaggttctctccaagaagaatcttcaacaggaatttcttgaccatggagttctcactcttctaaaaaactggcttgagccattacctgatggaagcatgccaaacatgaatactcgatctgctgtactgaaattattagctgattttccaattgacttggaacaatatgaccgaagagagcagcttaagaaaagtggcctgggaaaggtcattatgtttttgtccaaatctgatgaggagaccactgcaaataggaaattggctaaggagcttgttgataaatggagtcgaccaatattcaacaagagcacgagatttgaagacatgaggagatatgatgatgaaaaagcaccttacaggcggccacaaatgaagaaaccatcaagtagctctggaatggaatccagagatgatgatgttgatgctgacttttcacaacgcaagtctgggcaaagtagttcaaggcagcatgcttctaggccagaagcctcgcctttggactttgtcattcgtccacagtccaaaattgaccctgagcagatacgagctcgtgctaagcaggctgtccaagaccagcgtcggctgaagatgaacaagaaattgcagcagctgaaagcgcccaagaagaaaaaccttcaggcgtcaaagctcagcgtggaaggccgtggcatgatcaagtacctgtagatcacccactgtggcatccgcagtcagcagtgtcctgcacatgatacagcgcctgcagggattgctgaattggtatgaagcatcctaccaccattccatggcaaacagctcggcatcagtaattgcttggatcttttatccaagtatttttcttgcctgcaacatccgtgcttcagaaaccagctgttggaaatgggggcactggaaaccagtaaagttaccaaagatcacgaagggtggcgcctcattacatgcatttggttgcatgctggagtcgtccacatactcgccaacatgttgagcctcttaatgatcggaatcaggctcgagaaggaatttggtttcataaggattggtacactgtatgtgatctctggtgttggtggcagcttgctgtcttctctatttatggtgtcaaatatatcagtcggtgcttcaggtgcattatttggactattgggctcaatgctgtcagagctcataacaaattggacgatatatgagaacaagtttgcagcactcttgactctagttatgatcattctcatcaacttagctgttgggatccttccacatgttgacaacttcgctcaccttggaggatttatgtcagggttctgtcttggttttgtgctgctaatgcgaccacagtttggatatattaaccaaaagaactctcctcttggatttcccatgggcgtaactaaacggaagttcaagacatatcaagtcatacttttggttatttctacaatgatactagtttctgggttcaccattggattggtgttgctatttcaagggttcaatgctagtgagcactgttcttggtgccattatatgagctgtgtgcctacttcaaagtggagttgcaacgcaccaaataactactgtatgtcttcacagctcggaaaccaactaaatctgacatgtgaaagcactggaaagaccgcatcatatgttctcagcgatccaaacaactcggaggcgattaaaaatctttgtgtcggtctttgcagttaatagtaatgtctgcattttctaacaggaaattaatgctagcatatctatggattatatgactagaagcctatgcttacattatgattctctgctctgccctgagcttctcgttctcagcaccgacgccacggttcagctccggcagttcattgccggctatggctttcacctctgtccattgacaaacacaggggcatcgcggcgctgctcctcggcggcaccggccaagctgggctccaagaggccgtgctcgagcgggtccggaggcggaccgctctcggtggctggaggcaaggaggtggccgccgacgagtcaaagatccaaggagcgggtgcgaccgtcggtgttcgtcgccgtcgaaccgccatcgccaagaagctgagaagatccacgacaccgacgaaggaaggtggggagaaacgcaagcgcatctcgacgccgccatcgtcatcgtcttccattcggtcgggtggtccagatccgaagacaaaaaggaaatttctttgtgctagaagctttgttcatataggaatcgagaccatggattcggagaacgcaaagctccgaagagcactcgctcatttaatcagagtagtggagcggcgttgtgccgacatcgtcgatgtcgtccacggtgccttccaaccagttagcggaccagtcctcaatgaaatgaatcgtgctttagttcagatcgaggacctcaccaaggaccttgatcaccttgcactggaaaaagactgggagatggagcacatggccccttctccaattgctgaatcatcagaaacagaggatgagcttctacttgattatgattcagagttgaatcctgacgatatcgtcggctacgacgacggacgcgactactccaccgacgacacctatccctactag

SEQ ID NO: 33813 - DNA, 1455 bp, Zea Mays
cgcattcgtcgcgccgccacccaggtcccagccggccgcgcgcccgcgcccccccgccgccggccgtgccatgccgcggcggggcgagacggcggtggtccccattgacgtggcgtccgccggcggcgggcgaggcgatgagcggcccaagagagagcgccaccggagtcacggccccggccgccacggtccgcaccggagtcgcccgccgcccccgcccccgccggcgttccggccgttccggcggtggttcccgttccttgtgccgctattcatcgtcgccaacatcgtcctcttcgtgctcaccatgtacgtcaacgactgccccgcgcacgcgcgggccaccggcgccgcgataggcggatcggtcggcgagagcgccaccgcgcagggctgctggctcgcgcccgagctcgggaggttcgcgttccagtcgttcaaggagaacccgctcatcggcccttcctccgccacgctgttggaaatgggggcactggaaaccagtaaagttaccaaagatcacgaagggtggcgcctcattacatgcatttggttgcatgctggagtcgtccacatactcgccaacatgttgagcctcttaatgatcggaatcaggctcgagaaggaatttggtttcataaggattggtacactgtatgtgatctctggtgttggtggcagcttgctgtcttctctatttatggtgtcaaatatatcagtcggtgcttcaggtgcattatttggactattgggctcaatgctgtcagagctcataacaaattggacgatatatgagaacaagtttgcagcactcttgactctagttatgatcattctcatcaacttagctgttgggatccttccacatgttgacaacttcgctcaccttggaggatttatgtcagggttctgtcttggttttgtgctgctaatgcgaccacagtttggatatattaaccaaaagaactctcctcttggatttcccatgggcgtaactaaacggaagttcaagacatatcaagtcatacttttggttatttctacaatgatactagtttctgggttcaccattggattggtgttgctatttcaagggttcaatgctagtgagcactgttcttggtgccattatatgagctgtgtgcctacttcaaagtggagttgcaacgcaccaaataactactgtatgtcttcacagctcggaaaccaactaaatctgacatgtgaaagcactggaaagaccgcatcatatgttctcagcgatccaaacaactcggaggcgattaaaaatctttgtgtcggtctttgcagttaatagtaatgtctgcattttctaacaggaaattaatgctagcatatctatggattatatgactagaagcctatgcttacattatgattctctgtcaagggatgtaaatgctacaggagctgacggaatgatgcaagtaaatc

SEQ ID NO: 33814 - DNA, 1457 bp, Zea Mays
gtctccgcccttccctcctccccaccatcttcagcacgaggcagcacgcgcggacgtccctcccgacacggagaaccccgctccgcgcgctcgcattcgtcgcgccgccacccaggtcccagccggccgcgcgcccgcgcccccccgccgccggccgtgccatgccgcggcggggcgagacggcggtggtccccattgacgtggcgtccgccggcggcgggcgaggcgatgagcggcccaagagagagcgccaccggagtcacggccccggccgccacggtccgcaccggagtcgcccgccgcccccgcccccgccggcgttccggccgttccggcggtggttcccgttccttgtgccgctattcatcgtcgccaacatcgtcctcttcgtgctcaccatgtacgtcaacgactgccccgcgcacgcgcgggccaccggcgccgcgataggcggatcggtcggcgagagcgccaccgcgcagggctgctggctcgcgcccgagctcgggaggttcgcgttccagtcgttcaaggagaacccgctcatcggcccttcctccgccacgctgttggaaatgggggcactggaaaccagtaaagttaccaaagatcacgaagggtggcgcctcattacatgcatttggttgcatgctggagtcgtccacatactcgccaacatgttgagcctcttaatgatcggaatcaggctcgagaaggaatttggtttcataaggattggtacactgtatgtgatctctggtgttggtggcagcttgctgtcttctctatttatggtgtcaaatatatcagtcggtgcttcaggtgcattatttggactattgggctcaatgctgtcagagctcataacaaattggacgatatatgagaacaagtttgcagcactcttgactctagttatgatcattctcatcaacttagctgttgggatccttccacatgttgacaacttcgctcaccttggaggatttatgtcagggttctgtcttggttttgtgctgctaatgcgaccacagtttggatatattaaccaaaagaactctcctcttggatttcccatgggcgtaactaaacggaagttcaagacatatcaagtcatacttttggttatttctacaatgatactagtttctgggttcaccattggattggtgttgctatttcaagggttcaatgctagtgagcactgttcttggtgccattatatgagctgtgtgcctacttcaaagtggagttgcaacgcaccaaataactactgtatgtcttcacagctcggaaaccaactaaatctgacatgtgaaagcactggaaagaccgcatcatatgttctcagcgatccaaacaactcggaggcgattaaaaatctttgtgtcggtctttgcagttaatatcaagggatgtaaatgctacaggagctgacggaatgatgcaagtaaatc

SEQ ID NO: 33815 - DNA, 2148 bp, Zea Mays
gacacggacacggacagtagtctggatttgagttaaaacaaagcgaccttcctcctctccctccagctccagttcgtctctctcctctcctcgcctaaggtttcgcctcctgtgatcccgtctcgccgtcgtcgccatgggggacaactacgacgacgaaggcgagccaatcgtggacctcgacgaacgggagccctctcctgagccacagccctacgaagatctcgatgacgacctcggcgacggcggcgattggacccgcagccgctccccgacccccgtccacggcgacgacggtgaggcggggtcctccgccaagccccggaagcgcctcctcaagaagggcggcggtggcggcatgcccggcgacgacgggctcgatgactttgggttggaggacgaggacgcggaccccgcggctgaggcgaggaagaggaaggggtcctcggcgctgagggacctcgcgaggggcggggcgggcaaagagaagaaggagaagaaaaggcggagggaggacgacgggaggggaagtgatagtgggatggtgagggacaggcggggagcaggagggaaggactcaggcggtagggaggaccaggatgatggggagagggagatccaggagctctgggataccattgcgggtggtgactcagaggatgaccaagaaggtgttagaaccatagatgatgataatttcattgatgacaccggggttgatccagctgatcgttatggcagtgataatgagcggcattcacctgggcattatgcacaggctgaggagggtgaggaggatgatgaaattgagagactcttcaagggtggtaagaagaagaagaatgatcgccctcgtgcagatattggtcttatagtggaacaattcattgctgagttcgaggtagcagctgaagaagatgcaaatttgaatcggcaatcaaagccagccattaacaaacttatgaagcttcctctgctcatagaggttctctccaagaagaatcttcaacaggaatttcttgaccatggagttctcactcttctaaaaaactggcttgagccattacctgatggaagcatgccaaacatgaatactcgatctgctgtactgaaattattagctgattttccaattgacttggaacaatatgaccgaagagagcagcttaagaaaagtggcctgggaaaggtcattatgtttttgtccaaatctgatgaggagaccactgcaaataggaaattggctaaggagcttgttgataaatggagtcgaccaatattcaacaagagcacgagatttgaagacatgaggagatatgatgatgaaaaagcaccttacaggcggccacaaatgaagaaaccatcaagtagctctggaatggaatccagagatgatgatgttgatgctgacttttcacaacgcaagtctgggcaaagtagttcaaggcagcatgcttctaggccagaagcctcgcctttggactttgtcattcgtccacagtccaaaattgaccctgagcagatacgagctcgtgctaagcaggctgtccaagaccagcgtcggctgaagatgaacaagaaattgcagcagctgaaagcgcccaagaagaaaaaccttcaggcgtcaaagctcagcgtggaaggccgtggcatgatcaagtacctgtagatcacccactgtggcatccgcagtcagcagtgtcctgcacatgatacagcgcctgcagggattgctgaattggtatgaagcatcctaccaccattccatggcaaacagctcggcatcagtaattgcttggatcttttatccaagtatttttcttgcctgcaacatccgtgcttcagaaaccagttgagttggctacactatcattgcagaggcatatactacgagcttgcataaacatggcgctttcctaccagagtggtgcctttatattgtataaatatttgtcatgtttatgagttacaattagctagggttgaagttcgattgtttgtacttgaaagaaagtcatcacttgtgaaaaatcgaaacatagtgcgacaaatgattggttgtgcttaccaaactgtaactcaattgtgataaattacaattcttcagcagtcctcatcttgctgctttattgtaagatagtgtgctca

SEQ ID NO: 33816 - DNA, 3392 bp, Zea Mays
agtatttgatttctttcccctgtttcaagttgcagcctcgcccctctcgctctcgcggctctcggcggatcggcgttcagtgaaagctaaaagcctaaaaccctagttcgaacctctactagccggcgacagcggcggtggagcgcgggatacccggagatgccagcgccgtctgcggttgcgtcggccgtagagaggctacaggcagcggcgcaggacgccgccaagtcctcgtcgcgctcggccggcgccttctccgagcaggcgcagcaggccctcgtgtccaggaccgccggacgggttgtttctctgtcaacatgtgcaaaggtcagtgccattagctttgcgattggtgttgtggcagggttcacactcaagaaaaggctgcgcagatgggctgctagactgctgaagagaattaaggacgacgactattgactaatgcgatcttttcctcattgtctttggagtttgttcagaaatcagaactatggctactacgtacctcagcatcttgtgtagccaactgtttttgtgcctccacatatttgctatgaatgctggtatatgataatatgaaccatcagaagttcatcacattacagcatcgtgaaatgtgcaaatggtgatacaatgtcgccaacgacagtatgatcgtgccatgctctctggtgtccttcgtcatcaaactttgtcgagagtatgatctttcccagtgttgacatgcttcttgactgagtttcactgccaggatgatgaaccagtgcagggcctgagaagccggaaagaagcccatctattatctataggagccgagcacctgaaatatctccctctcctcgccgcctgctttcttcagctgctgtccgagctcgcctgctttctttcagctgctgtccgagctccgaccaaacccaacccagcccacccgaaatatctccctctcccgcgccgcttcacggtgacgcccctcctcgccttccgccgcctccgccccatgtccacctctgcctccccgcacacctccatcctccacctcccccaccgcccgttcgtgttcaggcgaccgaggctgtcgcgcctcaggtgcttcgcgtcgctcgcgccggcgtcatcgggcgcttcgccggcgaacgacgaccacctcatacaaatgctctgcgcccacgggcgcctcgcccaggccacggcgctcttgcaggggcttcccgcgccaacgcagcgcacctacgagtcgctcctactcgcagccgcgcgggcgagggacaccgcgctcgccgcggccgtgcaccgcaggctcgaggcggacccggtgttccgctctgatcccttcctgtcgacccgcctcatcgaagcctatgctgcgctcagcgcgctccccgccgcgcgccaggtgttcgacgaggcgcctgtgaagaacatcttcgtgtggaacgcgatgctcaaggcgctcgcgctcgccgaccatggagaggaggctctcacgtgccttgctgacatgggccggctcggtgtccccgtcgacagctacagctacgcgcacggtcttaaggcctgcattgcagcgtcagcgtcgcacctgccggcctctgcccgtgtacgggagatgcatgctcatgccatccgccgcggctatggattacacacgcatgttgccacaactcttattgactgctacgcgaagcttgggattgtcagctatgctgagcgtgtgttcacttcaatgcctgataggaatcttgtgtcatggagtgctatgattgggtgctatgccaagaacgagcgtcctggtgatgcaattcagatctttcaggagatgatggcctctgatgcagacctggtaccaaactcgatcacaattgtcagcgtcttgcatgcctgtgctggggtaaatgcacttggtcagggcaaagtactgcatgcatatatccttcggaggggttttgacttacttgtttcagtgctgaatgcgttgatggcaatgtacatgaaatgtgggtgccttgagaccgggcgctacatcttcaactggataggacgcagaaggaatgtcgtgtcgtggaattcacttatatctggatatggaatgcatggctttggtcgtgagtcactccaggtgtttgaggagatgattgaggaaggcatttcaccaaatatcatcacatttgtcagcgtccttggggcttgtagtcatgttggacttgtggagcagggaaagaagctatttgaatcaatggtggagtacaatgtcacacctcgtgctgagcactatgcttgcatggttgaccttcttggtcgtgctgggcgcctggatgaagctgtggagctgatacagagcatgcgtattcaaccaagccctcaagtttggggctcgcttcttggcgcttgcagaattcatggccatgttgagtatgctgagatggcatgctctcatctctttgatcttgagccccgaaatgctggaaactatgtcctcttggcagatatttatgcccgagctaaattgcagaaccaagttgatgtactaaaggagttacttgaggagcatgcactggagaaggtgcctggctgtagctggatagaggtgaagaagaagctgtactcatttgtttcagttgacaacaagaacccacaggtggaggagctgcaagcattgattggtgaatttgtgacacagatgaaaaatgagggctatgttcctgacacgagatcagttctgtatgatattgaagaagaggagaaggagaggattttgcttggccacagtgagaagttggctgttgctttcgggcttatcaagactggcagtggagaggctatcaggatcacaaagaatctcaggctttgtgaggactgtcattcagtcaccaagttcatctccaaattcacagatcgggagattgttgtgagggacgtgaacagatttcaccacttcaggaatggagtttgctcgtgcagggattattggtgatgatgatgcaaactccttgttttagttaccttcactgattatactggatgataactgaaagtaggagctgttgtttcttcaaaccattgtgtacagcctaacatatttcattagcctaggcatggtgatagcttttcaggaggggcatcagattgatcaactagtctggagaaaagtggaactcatacctgacaaacagttttgacacgcttgtgaggatgcctcttgtttacatgtaaagagatcgaactcaagactgataggatgattatgatgcttagggtctatgcctcgtttgtatgactgtgactcggggcacaactatggagagggtttacgcctagggtgcgttgatcttgactcgatcacttggttgggtctgaggacacatctaacatttttccctttattcttgtctttc

SEQ ID NO: 33817 - DNA, 4560 bp, Zea Mays
cccaactgtgcgacccatgtttcaaattgcaatgttttccccagaactactagtatttgatttctttcccctgtttcaagttgcagcctcgcccctctcgctctcgcggctctcggcggatcggcgttcagtgaaagctaaaagcctaaaaccctagttcgaacctctactagccggcgacagcggcggtggagcgcgggatacccggagatgccagcgccgtctgcggttgcgtcggccgtagagaggctacaggcagcggcgcaggacgccgccaagtcctcgtcgcgctcggccggcgccttctccgagcaggcgcagcaggccctcgtgtccaggaccgccggctcacttccagccagtttgcccttacgtttacacgagcagtaccaggtagtatcgtgcgatatgagtaattcatggtttggtaggcaatgtactccatttataacatccacagatgaaaaccgtaaccgaaaatcccgtaatcagggcctcataaccgtatcgtttctgtaaacacaatatcatttccgaaaatcactatatttaaaatttaaatttcaaatatctgtcaacatttattgtaatcgacaataagttgattaattatgaaaccgagtaaatttacgaccgaccgacaatcattttcgtataaacgatatcgtttccgactgtttcaatccctattaacttcatgtttatagtcgcttaaattatatcaagggcatgtggtcaatggttaagatgttttccccagaacccttatgtaaccaaattcccaaaagagaagcataagaaatcccttttcagtgaacccttcagttgctgtcaagttaagctcaaagtggtagcttgatgtattgaattttataggtttaagaatttcaaaggactattttgcctgaataaatcaattcttacacttttcttaagtcaaaaaatttaaagcttgtctgaatttatagaaaggagtgtcaagatttatggcactacattagcattattggattggatgcaccatgaactatattttcactttttcagaatatgctcatttggtgtcacaaatatttgtagctttttttataaactcggtcaaaaatgaaaaagttcgactggcaactttaggtattattcatttatcgaggcaagattggaaatgaaggtagtagttacttgaggttaaacttttaagtggcagccaatcagtaaagccgttgtatcaaggtttttatgagttctaaatcctggaatatttgaccagtgttcaactttgtctccgatttcagttgaagcaaacagtgtttatccttgaactgcaaatgtgtaacaaaatatggagaccacgccaatgtcgctctatggctatcaatgttaggaaacctgagctcagcgtcagctatacattattcataatgtacatggactatgtgagcagaatcagccgcctgcaaaaatgtgacgggttgtttctctgtcaacatgtgcaaaggtcagtgccattagctttgcgattggtgttgtggcagggttcacactcaagaaaaggctgcgcagatgggctgctagactgctgaagagaattaaggacgacgactattgactaatgcgatcttttcctcattgtctttggagtttgttcagaaatcagaactatggctactacgtacctcagcatcttgtgtagccaactgtttttgtgcctccacatatttgctatgaatgctggtatatgataatatgaaccatcagaagttcatcacattacagcatcgtgaaatgtgcaaatggtgatacaatgtcgccaacgacagtatgatcgtgccatgctctctggtgtccttcgtcatcaaactttgtcgagagtatgatctttcccagtgttgacatgcttcttgactgagtttcactgccaggatgatgaaccagtgcagggcctgagaagccggaaagaagcccatctattatctataggagccgagcacctgaaatatctccctctcctcgccgcctgctttcttcagctgctgtccgagctcgcctgctttctttcagctgctgtccgagctccgaccaaacccaacccagcccacccgaaatatctccctctcccgcgccgcttcacggtgacgcccctcctcgccttccgccgcctccgccccatgtccacctctgcctccccgcacacctccatcctccacctcccccaccgcccgttcgtgttcaggcgaccgaggctgtcgcgcctcaggtgcttcgcgtcgctcgcgccggcgtcatcgggcgcttcgccggcgaacgacgaccacctcatacaaatgctctgcgcccacgggcgcctcgcccaggccacggcgctcttgcaggggcttcccgcgccaacgcagcgcacctacgagtcgctcctactcgcagccgcgcgggcgagggacaccgcgctcgccgcggccgtgcaccgcaggctcgaggcggacccggtgttccgctctgatcccttcctgtcgacccgcctcatcgaagcctatgctgcgctcagcgcgctccccgccgcgcgccaggtgttcgacgaggcgcctgtgaagaacatcttcgtgtggaacgcgatgctcaaggcgctcgcgctcgccgaccatggagaggaggctctcacgtgccttgctgacatgggccggctcggtgtccccgtcgacagctacagctacgcgcacggtcttaaggcctgcattgcagcgtcagcgtcgcacctgccggcctctgcccgtgtacgggagatgcatgctcatgccatccgccgcggctatggattacacacgcatgttgccacaactcttattgactgctacgcgaagcttgggattgtcagctatgctgagcgtgtgttcacttcaatgcctgataggaatcttgtgtcatggagtgctatgattgggtgctatgccaagaacgagcgtcctggtgatgcaattcagatctttcaggagatgatggcctctgatgcagacctggtaccaaactcgatcacaattgtcagcgtcttgcatgcctgtgctggggtaaatgcacttggtcagggcaaagtactgcatgcatatatccttcggaggggttttgacttacttgtttcagtgctgaatgcgttgatggcaatgtacatgaaatgtgggtgccttgagaccgggcgctacatcttcaactggataggacgcagaaggaatgtcgtgtcgtggaattcacttatatctggatatggaatgcatggctttggtcgtgagtcactccaggtgtttgaggagatgattgaggaaggcatttcaccaaatatcatcacatttgtcagcgtccttggggcttgtagtcatgttggacttgtggagcagggaaagaagctatttgaatcaatggtggagtacaatgtcacacctcgtgctgagcactatgcttgcatggttgaccttcttggtcgtgctgggcgcctggatgaagctgtggagctgatacagagcatgcgtattcaaccaagccctcaagtttggggctcgcttcttggcgcttgcagaattcatggccatgttgagtatgctgagatggcatgctctcatctctttgatcttgagccccgaaatgctggaaactatgtcctcttggcagatatttatgcccgagctaaattgcagaaccaagttgatgtactaaaggagttacttgaggagcatgcactggagaaggtgcctggctgtagctggatagaggtgaagaagaagctgtactcatttgtttcagttgacaacaagaacccacaggtggaggagctgcaagcattgattggtgaatttgtgacacagatgaaaaatgagggctatgttcctgacacgagatcagttctgtatgatattgaagaagaggagaaggagaggattttgcttggccacagtgagaagttggctgttgctttcgggcttatcaagactggcagtggagaggctatcaggatcacaaagaatctcaggctttgtgaggactgtcattcagtcaccaagttcatctccaaattcacagatcgggagattgttgtgagggacgtgaacagatttcaccacttcaggaatggagtttgctcgtgcagggattattggtgatgatgatgcaaactccttgttttagttaccttcactgattatactggatgataactgaaagtaggagctgttgtttcttcaaaccattgtgtacagcctaacatatttcattagcctaggcatggtgatagcttttcaggaggggcatcagattgatcaactagtctggagaaaagtggaactcatacctgacaaacagttttgacacgcttgtgaggatgcctcttgtttacatgtaaagagatcgaactcaagactgataggatgattatgatgcttagggtctatgcctcgtttgtatgactgtgactcggggcacaactatggagagggtttacgcctagggtgcgttgatcttgactcgatcacttggttgggtctgaggacacatctaacatttttccctttattcttgtctttc

SEQ ID NO: 33818 - DNA, 1007 bp, Zea Mays
gaaattacgtatttggccccgcgccgcacgccctcttctcgtgctccagcggattcgctaggccgcgagcctccaaaaccctaaccctaaatttgggggcgcttgggtcaaagagacggggggaggaatcgagccggcggcttgcggcggcatcagcgatggcggcgaagcgggagatctcgagcaccctcaggaacctcaagtttatgcagcgcggcgcggctgcgcagaaggccgaggagaaggccgaggtggaggtacaggaggaggaggtggtgatggcgccgagtggaggcttcgcctcgtccgcgcaggtcgttaggaagtgcatagttatcatggagggtaatcctcatccaggagctataaagggtcggatgtctttccaaaatttcaatccatctatcgataggcaagaggtgaccagcaaacagaatcagcttcccccagtaactgtgaccaagacaatgcaaactccagcagagggaatgaagttccagcatcaagatgtagagattttggcattcccagttcagaaagcatatctctaaatgaactgaagaggaaggagcccgaccttgatatggaaacaccggcatcttacaaggaaccaaaaaccaatgttggcggtaggtcatcttcacaaagcaatggtcgcggatcacacaagtccaacaagcgtgaaaagctcgacttcaatcatctaagaccgaagaaatgaaaaatggtgttcgagttagctcttgtactctgtttgtagctgtacccaattggccatctgctgtgttttgtcgattatatctagagagctggtaaccatgtccatgtgaccatgtggcatgcattcttagtgagattatgtggtgttaatcatttttctttctattgatgtgttctactcaactactctgctgtaagatgtgaggctctactgtacagcagtgatgaatgcagttctgcttatgttttatgtcgcctactaagcatgtggtcaaaattgagctacg

SEQ ID NO: 33819 - DNA, 1006 bp, Zea Mays
gaaattacgtatttggccccgcgccgcacgccctcttctcgtgctccagcggattcgctaggccgcgagcctccaaaaccctaaccctaaatttgggggcgcttgggtcaaagagacggggggaggaatcgagccggcggcttgcggcggcatcagcgatggcggcgaagcgggagatctcgagcaccctcaggaacctcaagtttatgcagcgcggcgcggctgcgcagaaggccgaggagaaggccgaggtggaggtacaggaggaggaggtggtgatggcgccgagtggaggcttcgcctcgtccgcgcagcatagttatcatggagggtaatcctcatccaggagctataaagggtcggatgtctttccaaaatttcaatccatctatcgataaactaaatgaagaggcaagaggtgaccagcaaacagaatcagcttcccccagtaactgtgaccaagacaatgcaaactccagcagagggaatgaagttccagcatcaagatgtagagattttggcattcccagttcagaaagcatatctctaaatgaactgaagaggaaggagcccgaccttgatatggaaacaccggcatcttacaaggaaccaaaaaccaatgttggcggtaggtcatcttcacaaagcaatggtcgcggatcacacaagtccaacaagcgtgaaaagctcgacttcaatcatctaagaccgaagaaatgaaaaatggtgttcgagttagctcttgtactctgtttgtagctgtacccaattggccatctgctgtgttttgtcgattatatctagagagctggtaaccatgtccatgtgaccatgtggcatgcattcttagtgagattatgtggtgttaatcatttttctttctattgatgtgttctactcaactactctgctgtaagatgtgaggctctactgtacagcagtgatgaatgcagttctgcttatgttttatgtcgcctactaagcatgtggtcaaaattgagctacg

SEQ ID NO: 33820 - DNA, 1028 bp, Zea Mays
gaaattacgtatttggccccgcgccgcacgccctcttctcgtgctccagcggattcgctaggccgcgagcctccaaaaccctaaccctaaatttgggggcgcttgggtcaaagagacggggggaggaatcgagccggcggcttgcggcggcatcagcgatggcggcgaagcgggagatctcgagcaccctcaggaacctcaagtttatgcagcgcggcgcggctgcgcagaaggccgaggagaaggccgaggtggaggtacaggaggaggaggtggtgatggcgccgagtggaggcttcgcctcgtccgcgcaggtcgttaggaagtgcatagttatcatggagggtaatcctcatccaggagctataaagggtcggatgtctttccaaaatttcaatccatctatcgatatgtgtagaaactaaatgaagaggcaagaggtgaccagcaaacagaatcagcttcccccagtaactgtgaccaagacaatgcaaactccagcagagggaatgaagttccagcatcaagatgtagagattttggcattcccagttcagaaagcatatctctaaatgaactgaagaggaaggagcccgaccttgatatggaaacaccggcatcttacaaggaaccaaaaaccaatgttggcggtaggtcatcttcacaaagcaatggtcgcggatcacacaagtccaacaagcgtgaaaagctcgacttcaatcatctaagaccgaagaaatgaaaaatggtgttcgagttagctcttgtactctgtttgtagctgtacccaattggccatctgctgtgttttgtcgattatatctagagagctggtaaccatgtccatgtgaccatgtggcatgcattcttagtgagattatgtggtgttaatcatttttctttctattgatgtgttctactcaactactctgctgtaagatgtgaggctctactgtacagcagtgatgaatgcagttctgcttatgttttatgtcgcctactaagcatgtggtcaaaattgagctacg

SEQ ID NO: 33821 - DNA, 878 bp, Zea Mays
tataaattcatacatttctacggtttttatttatatttaaacataaaatataaatcataaaaacatacgcattatgttgactagatggtagatgtatgtttgaagccgataactatagtttaaatttctatttgtaataacttttagtttttttaccgtttaagcgacgacatgcgttcagaaagccatcgtccttacagacgagacacgagaggcaggagccagcgaccggcaacagttttctcggaaggcagcctcttcctcgtcgccgccgacgtcacccgccgcggctgtcggggatgccggtcagggtggtcgataccgccacgccttcctcgcagccctccccagggcaagaagcaaatactggacacccatctcctcctagatgttcactcttaagtgctggaagatcttttgctggaactcagaatgtttcaagtctgcagaaggatgaagcatggaaagtgaatgtccgcatccatggttgcgatcttgaacagggttatctatgtggaacgatggaagcgcttaatgttccattagcagatacacctaccagaggatgatataagacattggtccaagttcccatcatttatgcctcttctgagtcagattgagacagacggtggcaagtctctggactttagcaactatccttacatatttatgagatggaaagaacagtattttgtcaatgttggagttgactgtgggttaaccatcgctggtttctactacgtctgcttttcttgtagcgatggctccatcagtggattttattatgatccaaatagcagtccatttcagaagctcgaattgaagtgtaccaacgagaaaagttctggattcaccttttcatcctatgagcttcg

SEQ ID NO: 33822 - DNA, 1148 bp, Zea Mays
ctcgcatccgctgtctccaataaatacgctatgcgcgcatcagggcaagaagcaaatactggacacccatctcctcctagatgttcactcttaagtgctggaagatcttttgctggaactcagaatgtttcaagtctgcagaaggatgaagcatggaaagtgaatgtccgcatccatggttgcgatcttgaacagggttatctatgtggaacgatggaagcgcttaatgttccattagcagatacacctgtagtgacattctgggagggggagatagtggatgctaaaaattacacctttttcactggcaagtgggaggcatcaccagaggatgatataagacattggtccaagttcccatcatttatgcctcttctgagtcagattgagacagacggtggcaagtctctggactttagcaactatccttacatatttatgagatggaaagaacagtattttgtcaatgttggagttgactgtgggttaaccatcgctggtttctactacgtctgcttttcttgtagcgatggctccatcagtggattttattatgatccaaatagcagtccatttcagaagctcgaattgaagtgtaccaacgagaaaagttctggattcaccttttcatcctatgagctgcagtgacagggccagatgcatatagtgtgtactgaactcatactcgcctaatgctgctgtattgaaagaaacgagtggtggtttatgcaacacttcgttttctcgcaagagcaagaccaagcaaactgtcactttgtaatctgcagaagcatcttatcttttctaaaatgtacctttcgtattatggttgtgttcatggtatggtgcgtccaaattcagttggatagggaatgtgagggctagatgttgatccagagaaatgctatataccttttccacaattgttctctgccattggggatttctatttcaacatgtctatgatatacacattgaacgggtctgacgtagtggtgagagccgcctctccatatttacgggagaaaatgcttttgcctcggtttatccaccccacagccttcagcactaggtacaaagccgtggagacctttgccttcagcttcctgacatcgttaggattagctctggccggcacatggtcttac

SEQ ID NO: 33823 - DNA, 1456 bp, Zea Mays
tataaattcatacatttctacggtttttatttatatttaaacataaaatataaatcataaaaacatacgcattatgttgactagatggtagatgtatgtttgaagccgataactatagtttaaatttctatttgtaataacttttagtttttttaccgtttaagcgacgacatgcgttcagaaagccatcgtccttacagacgagacacgagaggcaggagccagcgaccggcaacagttttctcggaaggcagcctcttcctcgtcgccgccgacgtcacccgccgcggctgtcggggatgccggtcagggtggtcgataccgccacgccttcctcgcagccctccccagggcaagaagcaaatactggacacccatctcctcctagatgttcactcttaagtgctggaagatcttttgctggaactcagaatgtttcaagtctgcagaaggatgaagcatggaaagtgaatgtccgcatccatggttgcgatcttgaacagggttatctatgtggaacgatggaagcgcttaatgttccattagcagatacacctgtagtgacattctgggagggggagatagtggatgctaaaaattacacctttttcactggcaagtgggaggcatcaccagaggatgatataagacattggtccaagttcccatcatttatgcctcttctgagtcagattgagacagacggtggcaagtctctggactttagcaactatccttacatatttatgagatggaaagaacagtattttgtcaatgttggagttgactgtgggttaaccatcgctggtttctactacgtctgcttttcttgtagcgatggctccatcagtggattttattatgatccaaatagcagtccatttcagaagctcgaattgaagtgtaccaacgagaaaagttctggattcaccttttcatcctatgagctgcagtgacagggccagatgcatatagtgtgtactgaactcatactcgcctaatgctgctgtattgaaagaaacgagtggtggtttatgcaacacttcgttttctcgcaagagcaagaccaagcaaactgtcactttgtaatctgcagaagcatcttatcttttctaaaatgtacctttcgtattatggttgtgttcatggtatggtgcgtccaaattcagttggatagggaatgtgagggctagatgttgatccagagaaatgctatataccttttccacaattgttctctgccattggggatttctatttcaacatgtctatgatatacacattgaacgggtctgacgtagtggtgagagccgcctctccatatttacgggagaaaatgcttttgcctcggtttatccaccccacagccttcagcactaggtacaaagccgtggagacctttgccttcagcttcctgacatcgttaggattagctctggccggcacatggtcttac

SEQ ID NO: 33824 - DNA, 1518 bp, Zea Mays
ggtttttttagtgcactcgggtgatcgactgatcgggtcttggactcttggcttgggcggacgaccagacgctagggctgggcaaggcgccgccgcagctctggcactggagaccggtcgactgcaccgccgcgccgccgccggcgtgtgccacttcgaccccgccaccgcgccacaactgcttccgtgcaagtctacagccagccagctagccaggcgctgttcacccgtgctcgcacgatgcagccgccccatgccagcaggtccggtcccaactcgtcgccacccgttgtcgtcgccggctcgtcgtcatcggctccagcgtctcggcaacaacaatcggaggcgcctcgcggtcgaactctcacgtcgtggccccgcaccatggatgtggataatatttgtgatattgacaacaatgtgtctaatgaagatgagatacatggtattggggggatgttaatggcaatgacagtgaccacatggaggaggaggatcatgttcttacacctactggtagtgaggtgaatgtcattagccaaaaagttgtttgtggaaaaaacaaatccatagatggagacaatcgtgtggtgaaacaactactagcaaccaagtcaactagtacccctacaagcaagtttatggcatctgcatttaaagcaacaagttgcacaagatgcaagtgcgagtgcaagtgaaaatgcaagcatagctgcaagtgtccaaataagcactgaagatgattgtgatgaagaattagatgtcaagaaaaagaagctcacttcatgggtttgggagcattttacaaggtatgatgtagaagtggagcaaaatgatggttccattgttaagcaaaagtgggcaaaatgcaaaaaatgtccacataaagctaaggccgatagttcaaatggcacaaaggcttttagtaaccatttaaagctgaggcataagattttgaagggtcaacaacacttaactcagaatggggatactatacaaacatataaatatgatgagaattttagtgtgagactgctatattaagccatcatcatgcatgagtatccttttagtattgcccaacacaagtactttggtgaaatttatcaaatcactgcgaccatcattttctttgaagtctcgtgttactgttcgtaaagagatcatggatctttatattgaggaaaagaatatgttgtatgcacaattcaaaaagttgtcctgtcgtgttagttttactatggatacatggacatctattcaaaacaagtcatacttgtgcgtcactgctcattggattgatgataattggaacatgcaaaaaaggattatcaattttatgcatgtagaaggcaaccatagtggaaaaaaatgagtgatactttttttgctaatgtgctgaattggaaccttgataagaaaatgtttgctctttctttggataatgcttcttcaaataaggttgtcattgatatagtgattgatagtgctaaagacttgctcgtttgtggtggaaag

SEQ ID NO: 33825 - DNA, 1557 bp, Zea Mays
tttgaaagggaaattttctggaatctcctcaacctgttttgaaacgaactgatgagagctcaaccacaaaacaaatctacaaaaatgaacaggcaaaaaaggcaatgttctctagacaagataagaacaggctggctgattcccccaacatctttgccaacatgtggcatccacatagggtggctcacacatcaatctccaatttcaacctagattactagaaatcatatgtggctgaactaagccactaaggcattgcattccaaaggctgactcctcttctatcctaccatgttagctattagaattcacaagtatcaaacaaaaataaaaatatcctaagcattctaaagtactccctcttctaaattataaatcattttggttttctggatacagaattttttttctatatctagacgtggcttgtatagataggtgcgtagcaaaagctgtgtacctagaaaagacaaatgactcacaatttgaagagggagttattataattagataaagtggaagctattttatatattttctgctctcttgcaaccagagaggaatactaatacagcagcatggatgctcagattggaaacacaagaccaaccaaactgctcataatgatacacgaccactccaagaagtggcaaacatgcaccagttttcctaaacaaaaacccagtataacaagaaattatagtaatagaggacaagtgccagatgaatcagatatttcactaagatgaggtctaactgtccaagtgtataaaacattacaggatgggtatatgttatagtcactgaataaagaaaggcatcaaaatcaaaagggcacttaaagaacagattatgtgtgtcaatagtatcacaattcgaagatgaataaagaaaaacatcccaaattctgcagaagaactacgatcactgaatggagtggaaacaggagtacaggattatcctatcaatcgctgaatgagcatatagatttgaccaaaaatagaacacaacgatacttcctaaggaaaatagaaacacaacaacagtacctaaggtccggcaccgttttggaggatccaattcacagcagtggaacagaataaataaaagatcatcaaatagtctacctaacaggccaaatacgctctgtagcgtgtctaaattcacacaagaaaccaggatatgttttttactctactatcgcgaaatagatatgctacacattatggataggggaatctgctcgtttaccctgtcgtggtcatcgcagtcctcggcgtacttgatctcggagtcgatgacgctgagtagctcggcgtcggagctgggtctcgtcgcgggcgccgaggagaacggcatcgcgcggggcttcggcggcgccacggcggcagcgaggggccggagcaggacggcgctgcggtgggaccccgaggaggcggaggcacggaggagaacgggcacggaggaggccgcggcgcggcgtgcggcagcaaagagggccatggcgagggaggaagcggcgcggtggcggcgtatgaagcccgactagggttttag

SEQ ID NO: 33826 - DNA, 774 bp, Zea Mays
ttaatgatcgtttttcacatataaaaaataatgctcagcatgagtacagctaacatatcaaattaacttcatgaaagcttttatatagccacactttctcaccctaaattgtcatcagttaaataaatcttggaaatttatagaaaaaaatactaaatcctttattttgtctagtgtttccattcgaaacccaaaaaactctatttcgggtctgacaaactaccaacttaacaagaatttcgactagggcttgtttgtttcaccaataatccatgtggattgagtggtattaagttgatttaaatccataacaagtcaaaatccattttaatacacttcaatccacatggaattggaataaccgagaaggccctagcaggaacaaaagagagataaagctgatcttcaggtcttcacacctactgcttgaagaaatccttcagctttctcagccagagcaggtactcacggctgtccttgttgatcatgtacaggtgcaagaaatttgtggtcctgggtgaaatgccacgcagatccaggtacctgtggaattccctctgcaggttctcatcaaggtcactgcacatacaagagaatatagattgtcagcgccagaaaaagattcgttgaagcatttgaacactcaaaaaaccaaaaaaaagttagtatagttattccttcatacttgaaatcaggaccctcatatgcaatcatgtcacgttcatcatcccctgattgttgtgtcacagacatggagtcgatgatgacctcgtc

SEQ ID NO: 33827 - DNA, 744 bp, Zea Mays
ctctgtgtcttgtccattccatggctccggccagcaaagagccggattcttcctatcccctaccaaaccccaccaccacgagcggctgccgcgcgggagaccaggacgcatggtgactgcctcctccttcactgccatcttcttcagaagtgccttcgtcgcctgcttcgcggaggtgaaggctttcttcgtcagaggtgctgttgtgggtgatgtcagtttactaagcaagattcttgctgcgcttgccacaggtgtgatagctattgttgtggcaaatccaactgatctcgttaatgttaggttgcaagttgatggaaaggctaacactgtcaagaggagttattctagagcccttaatgtatatgctataataatcagacatgttactttaaccatcatgggcagtcactgcattgctgatagtgaggagcagaaagttcatgttattgctgatgagagaccccttgaattgcttgctaaagcatatgctatcaactcttttgacatagatcctcagaacccctctgatgttgttttcacgttagaatgggaatcagtcggtgtcctaccttgtggcgagaagaaagataatttttactaccgagggacttcagaattttaggctcattcatacattcactacaatgccttcgaactcatgaacatttatctctggctctattgtgctcaaactcgacgtcgtcttcctccgcgggtggtaggctgtcggtacgctcgatt

SEQ ID NO: 33828 - DNA, 832 bp, Zea Mays
cgttctttagtttcttttttacaacctctcgcaagcatcgcatggcatccatccttctgagaggcagaggaggagccactgaaaagccactgaaattgggactactccctcgctccctacctcaagcataccaaagtgcagatccagctgcaaaggaaggcaccattaacgccaccacctgtggctgcaacagccacaactgctgctggtggagggacactagccacaataacgtgcatcgccagagaggaaggggttgccacgctctagaagggcatcatccttggcccccactgtcagttcctctatgatggcctccacatcggcctgtgaaggctttcttcgtcagaggtgctgttgtgggtgatgtcagtttactaagcaagattcttgctgcgcttgccacaggtgtgatagctattgttgtggcaaatccaactgatctcgttaatgttaggttgcaagttgatggaaaggctaacactgtcaagaggagttattctagagcccttaatgtatatgctataataatcagacatgttactttaaccatcatgggcagtcactgcattgctgatagtgaggagcagaaagttcatgttattgctgatgagagaccccttgaattgcttgctaaagcatatgctatcaactcttttgacatagatcctcagaacccctctgatgttgttttcacgttagaatgggaatcagtcggtgtcctaccttgtggcgagaagaaagataatttttactaccgagggacttcagaattttaggctcattcatacattcactacaatgccttcgaactcatgaacatttatctctg

SEQ ID NO: 33829 - DNA, 921 bp, Zea Mays
ctgtgtcttgtccattccatggctccggccagcaaagagccggattcttcctatcccctaccaaaccccaccaccacgagcggctgccgcgcgggagaccaggacgcatggtgactgcctcctccttcactgccatcttcttcagaagtgccttcgtcgcctgcttcgcggagccaaagtgcagatccagctgcaaaggaaggcaccattaacgccaccacctgtggctgcaacagccacaactgctgctggtggagggacactagccacaataacgtgcatcgccagagaggaaggggttgccacgctctagaagggcatcatccttggcccccactgtcagttcctctatgatggcctccacatcggcctgtatgatcctgtgaaggctttcttcgtcagaggtgctgttgtgggtgatgtcagtttactaagcaagattcttgctgcgcttgccacaggtgtgatagctattgttgtggcaaatccaactgatctcgttaatgttaggttgcaagttgatggaaaggctaacactgtcaagaggagttattctagagcccttaatgtatatgctataataatcagacatgttactttaaccatcatgggcagctcatctcttctatgtctacaagaatattttgccagtgatgacatgtgtttagaggatgggatccttgcaattgtcaaacaagatgagagaccccttgaattgcttgctaaagcatatgctatcaactcttttgacatagatcctcagaacccctctgatgttgttttcacgttagaatgggaatcagtcggtgtcctaccttgtggcgagaagaaagataatttttactaccgagggacttcagaattttaggctcattcatacattcactacaatgccttcgaactcatgaacatttatctctg

SEQ ID NO: 33830 - DNA, 874 bp, Zea Mays
ctgtgtcttgtccattccatggctccggccagcaaagagccggattcttcctatcccctaccaaaccccaccaccacgagcggctgccgcgcgggagaccaggacgcatggtgactgcctcctccttcactgccatcttcttcagaagtgccttcgtcgcctgcttcgcggagatccagctgcaaaggaaggcaccattaacgccaccacctgtggctgcaacagccacaactgctgctggtggagggacactagccacaataacgtgcatcgccagagaggaaggggttgccacgctctagaagggcatcatccttggcccccactgtcagttcctctatgatggcctccacatcggcctgtatgatcctgtgaaggctttcttcgtcagaggtgctgttgtgggtgatgtcagtttactaagcaagattcttgctgcgcttgccacaggtgtgatagctattgttgtggcaaatccaactgatctcgttaatgttaggttgcaagttgatggaaaggctaacactgtcaagaggagttattctagagcccttaatgtatatgctataataatcagacatgttactttaaccatcatgggcagtcactgcattgctgatagtgaggagcagaaagttcatgttattgctgatgagagaccccttgaattgcttgctaaagcatatgctatcaactcttttgacatagatcctcagaacccctctgatgttgttttcacgttagaatgggaatcagtcggtgtcctaccttgtggcgagaagaaagataatttttactaccgagggacttcagaattttaggctcattcatacattcactacaatgccttcgaactcatgaacatttatctctg

SEQ ID NO: 33831 - DNA, 1089 bp, Zea Mays
ctgtgtcttgtccattccatggctccggccagcaaagagccggattcttcctatcccctaccaaaccccaccaccacgagcggctgccgcgcgggagaccaggacgcatggtgactgcctcctccttcactgccatcttcttcagaagtgccttcgtcgcctgcttcgcggagccaaagtgcagatccagctgcaaaggaaggcaccattaacgccaccacctgtggctgcaacagccacaactgctgctggtggagggacactagccacaataacgtgcatcgccagagaggaaggggttgccacgctctagaagggcatcatccttggcccccactgtcagttcctctatgatggcctccacatcggcctgtgaaggctttcttcgtcagaggtgctgttgtgggtgatgtcagtttactaagcaagattcttgctgcgcttgccacaggtgtgatagctattgttgtggcaaatccaactgatctcgttaatgttaggttgcaagttgatggaaaggctaacactgtcaagaggagttattctagagcccttaatgtatatgctataataatcagacatgttactttaaccatcatgggcagtcactgcattgctgatagtgaggagcagaaagttcatgttattgctggtgtgatgacccttaccactccaattttagtccacccctattgaccacatagttcaaatgagtattatgggtgtgattacatgagtcatatctgcaacatggctcattttttaatgtttgctggtgggaggctcatctcttctatgtctacaagaatattttgccagtgatgacatgtgtttagaggatgggatccttgcaattgtcaaacaagatgagagaccccttgaattgcttgctaaagcatatgctatcaactcttttgacatagatcctcagaacccctctgatgttgttttcacgttagaatgggaatcagtcggtgtcctaccttgtggcgagaagaaagataatttttactaccgagggacttcagaattttaggctcattcatacattcactacaatgccttcgaactcatgaacatttatctctg

SEQ ID NO: 33832 - DNA, 875 bp, Zea Mays
ctgtgtcttgtccattccatggctccggccagcaaagagccggattcttcctatcccctaccaaaccccaccaccacgagcggctgccgcgcgggagaccaggacgcatggtgactgcctcctccttcactgccatcttcttcagaagtgccttcgtcgcctgcttcgcggagccaaagtgcagatccagctgcaaaggaaggcaccattaacgccaccacctgtggctgcaacagccacaactgctgctggtggagggacactagccacaataacgtgcatcgccagagaggaaggggttgccacgctctagaagggcatcatccttggcccccactgtcagttcctctatgatggcctccacatcggcctgtgaaggctttcttcgtcagaggtgctgttgtgggtgatgtcagtttactaagcaagattcttgctgcgcttgccacaggtgtgatagctattgttgtggcaaatccaactgatctcgttaatgttaggttgcaagttgatggaaaggctaacactgtcaagaggagttattctagagcccttaatgtatatgctataataatcagacatgttactttaaccatcatgggcagtcactgcattgctgatagtgaggagcagaaagttcatgttattgctgatgagagaccccttgaattgcttgctaaagcatatgctatcaactcttttgacatagatcctcagaacccctctgatgttgttttcacgttagaatgggaatcagtcggtgtcctaccttgtggcgagaagaaagataatttttactaccgagggacttcagaattttaggctcattcatacattcactacaatgccttcgaactcatgaacatttatctctg

SEQ ID NO: 33833 - DNA, 891 bp, Zea Mays
ctgcctctgtgtcttgtccattccatggctccggccagcaaagagccggattcttcctatcccctaccaaaccccaccaccacgagcggctgccgcgcgggagaccaggacgcatggtgactgcctcctccttcactgccatcttcttcagaagtgccttcgtcgcctgcttcgcggagccaaagtgcagatccagctgcaaaggaaggcaccattaacgccaccacctgtggctgcaacagccacaactgctgctggtggagggacactagccacaataacgtgcatcgccagagaggaaggggttgccacgctctagaagggcatcatccttggcccccactgtcagttcctctatgatggcctccacatcggcctgtatgatcctgtgaaggctttcttcgtcagaggtgctgttgtgggtgatgtcagtttactaagcaagattcttgctgcgcttgccacaggtgtgatagctattgttgtggcaaatccaactgatctcgttaatgttaggttgcaagttgatggaaaggctaacactgtcaagaggagttattctagagcccttaatgtatatgctataataatcagacatgttactttaaccatcatgggcagtcactgcattgctgatagtgaggagcagaaagttcatgttattgctgatgagagaccccttgaattgcttgctaaagcatatgctatcaactcttttgacatagatcctcagaacccctctgatgttgttttcacgttagaatgggaatcagtcggtgtcctaccttgtggcgagaagaaagataatttttactaccgagggacttcagaattttaggctcattcatacattcactacaatgccttcgaactcatgaacatttatctctg

SEQ ID NO: 33834 - DNA, 558 bp, Zea Mays
atgtcggcattctgttatcatcatctcggggtgcctttgacggagatgtggaggtcctacctactgttaaagtcaaaaggggaagaagagattgtacaattaagaaagcgtcttgctgattactctatgaaggaatcacaaatactcgatgataaatacaagttaaggattatttttgggctccaagctgcagctaccctctccatccccattctgattccaagaaaagcactggtggccacgaggaggaagggcattgccaactggcacgctaagaagctagctaagcagcacagggtggaccttgccaaggtgaaggctttcttcgtcagaggtgctgttgtgggtgatgtcagtttactaagcaagattcttgctgcgcttgccacaggtgtgatagctattgttgtggcaaatccaactgatctcgttaatgttaggttgcaagttgatggaaaggctaacactgtcaagaggagttattctagagcccttaatgtatatgctataataatcagacatgttactttaaccatcatgggcaaatattttgccagt

SEQ ID NO: 33835 - DNA, 3929 bp, Zea Mays
cttctgtccgcaccagtgttcacctctcccctgcccaagtttgcccagtcccagggtctagtatgccatccctctgtcagtggtgaccacgcccactgactgcctacctcgccgtggccaagacgtctcaaggagtgaccagcccgcatgaccctcgttccacgttcttctaagaacacctagacgaggtggtatttgaagaagtctactccaacgcctgctcctcaagtggatgaagccatctaactgggtattgaatagagggatctagaaccacttcactgcaacaaaggcaagccccggtgcatgcaaccccttccttgtatttttaaataatgtttgcacactttaagtctagtgaaatgtgcattaggtttataggagttgcttggaaaccctttgatgcattgcttaccttgatatccatacctttatagatacttctgatgagtatcaaaatatgatttacaaaaatgcttatccctgcttagatcttgtggatagaggttgtcttttacattaaggcctagctcaggggttatcctgaggaaagatggcttctacctgcaagaatatttttcattgggagcgtggtgggatcttactgcaaagttccctataatgctcttttcattctaaggaatacaaacaatcctaaggatggaagtacttaaatcgggacttgggttaggaacaggtgatgctccgcccaggttaattaaggattggatgcgtatgtaggcctgttgatcaaggactatcttaactagccacatgccctggaaatgggagatggtgggagtagcgtgtaccctcctggctagaggctggatggaggagtactgtgctcccgggtagcgcggaccggttcacgttgtggaggatctgtgggaacggttgacatatgcaagggttaagtgctacatatgtcgtgtggttagagatcctcagctgagtaaatcgattcggatcgccgttatatccccggagagtggagacttgatctccgacctacaacctaagtcaggatgtaaacattatgagtaaaaatgatgttgtattgatgagatggtgaaattagactaggtgcaaacagagtctattaatatttaatctggcattaaaatattgaaagtaaggactcactttagtaagctttttctgcaaaagtatctaagttgattcttgctaaaagcctctccttgattcctaaatccagcatatccttgagagtctttttccttagtcgggtaagacttgcgaaagtacacttcgtactcagggctttgtcccatgttgttttagatgaagagcctgcgaagctttgccacttttgtgcaaaggtgtttccccagaagaaggaagaaccaaaattagaagtgtgttgctgtggatggtgctaagtgccggtgggctcggccttcttataagtctaagtaacttcttctatacttcttattgaggatggtcacttaagctagcatctattttaaacttacaagtaatttataacatttcaaagtttatttctttgaatcactttgtaatcactccgataaacataatgtaaatttgatgtaacttgtaaccttttgtaataaagaagttccgctgcaaaaatattggtgtgtgtgatttgtgttacttaatcccgcggttctggttgtaagtgggttttccggtgcccttggggcaatcggacggatcctgttaagttatctggtgcacatgcatagcagtctgaggtctttgagacaaggacaggtgcatgtgggcccaataacttgggaggttctgccacagctggtatcggagctggattaagtatatacggtcacatacgtattttcaaaacaaaagttttggttttagaaaacctattttcaactaaacacattgtttggctttgaaaaacagttttgaaaaactataatgctagcgacatcctctgttaagccctaagttaaggactataaggtggcttagtttaggatattaaccactaacccacaactataatgtaattttctgcaggtacactaactaaaccttaggaaagtccgactagtgttcaatgacggagtgagtaggattgccaccgccatagaacgtgatagccactatatgttggcaagagttgcaaggacgtataggacgagcatgcatcatgtcatacaactttaagttaaaccccctgcgtagctatttagtatatgtttcatctaccttgttcatacatctttagtgaatagagtgtatacgttgctcttctctatagatgaatcaacaagaagctcctacaggagttggagagtttctacgagattttggtattccaatggtcctgtggcgactacttcaagaagttggatatatcgaagcacctaagtaccagtggtcacgcactgttcttagaggacaaccatggtatgaggtagtagtgcgtattccagaacgtgctagaaaaccatcttggccacattggatgttccatgctgaaggaatgactccttgggaaggtgctcaggtaactgccttagaggtgttgacaacaatatgttaccagaagtgggaagaaatacaggccacgtctatgaggttgttccctgcagttgccttaagcgacccagtggtgtatcatcaccaggctcgagtaatggaaaacattcccattgggcaggattcggttgaatcagcatctgctcgagttttgatggtcgtgctagagttgcagcttactcgagggcacagtcggcaaatgtggcagcagttgtacactgggagttatgcagcatttaagatgatggaaatggccaagaatagggcttgtacccaggcacaagaacaactggaggaaacaaagattcaagctgagcgaattattggattagagcatcaggtgacagaacttcagatgcaacaccaagttgatcatcatcgcattaaggatcttgagcatcagctaactaatgctcattctaaatcaaaagttttgagtcagcaacaagaagaaattcgctcgtatgttgttactgttagggaagaacttaaagaaaccatgggcttcctaagtcatcaggatcaggtgcttgaggagttgcatcgtacctatccaatggaatttcaaacagcgcaacgactggtcaaccatctgcaacaaacggtgcatatgctcaatggcgccttttattctgccccaacaccaacagactaaaaggtacctatggagcatggaaacaaacatctggcagatgtgataactggagaagatatagcaggcaacttaatcctcgtgaggcaatataactatgtaaattagttttgaagggtggatgtaaggtaaacccatatggcaatgttagctagtaaaaaaaacaggttaaactttgttgtaaagagtttatcctgtttcacctggatcatgtaacctgtgagcttttctatgactatggtgtaagaaacaactgcctgtttcagaagcaacttttaatatctatagccgtttgtcgaatcccaagagttaaaatggctattcctttggatattccctgtggatgcacgtgtgtggataaatgacttggtacacgctggtaccatagtttctggttgtgtttcgtgatgaaatggtaccaccgtgattttccatgtgagtctgttgaacgagaaatggacaaatggatagactttatccaaaacaaattagatgcaacatcttgggtaaaacacagagaaagagattcatcgctgagtcatcattggaaatccgtagcatcagagacgagtgcgaatgttgaacgacatcgtgattaactcgtggttaagcgagacagaacacctcccctgcctggtaggagaaattgggaaataagtttgtgacacatttccttttccgttacggagcctgaacttttaaatctcgggacgagatt

SEQ ID NO: 33836 - DNA, 292 bp, Zea Mays
caccctacggagcaaaaggagaatcttatacatggccaggagaagtgccgggcaaacaggttggaaagggaggcaagtttaaattcccgattgaatctccggcagctctcctaccatactccatatcccatatcatatttcaaactttactccacaaaaaataccatttacagtgcaaagccgtgttttagatcctctctctcccccatctcaacatttaaccagcttataataccttattatacttgctctaggtgcactatattgccggtttataattactccttgtgac

SEQ ID NO: 33837 - DNA, 895 bp, Zea Mays
catttttgaaattggtcgtgagccgctgccgcacacggcgagaggaatagggttgctccccccgttgccgactcgccgccgcatcgccgcgagcgtcatgaagaccttcccgctgtccaggggaagcaccatctccctagccctcttctccgacgtctccaacagccgggagctcctggacttgatgcagtcagggaagctggagccggcggtcgctctcctcaacgcgtcactgataacagagtccctgaagcgctgtgggatctctgataatacaacttacatccttgctgcttgttttgatgcttccgacgaggagatgaaggcagtggagaagctcatcagtggcaccgagattgatctcacagaactggaaagaagagcaaaccagccacagatcttgaagcattacaagatacctccccaagaactatcgatatctacgttgccggacgcaattgtatgcaggattgctgctcgagatgctctctgaagtctcaataatcaccgtaagctatgtggtttcaggatgtaggtctctctctaccacatgtatggtgtgacattgacagcacaagtgcacaactagaattaggtatccgaaataccattgatgttcgcattccctgcaagcaacccagaagcacattgcgtggttaatttttcttgctaaactgtgctgcaaagcaacagttatgttaatttctcccttgaattcgatgaagcttatatgatacaatctagcaaaggaatgtatgatgtatctgatgtggcgtgtaagtttctggtgcatagtgctttgtctataggcgagatagttccctgtttttgtatggaaattggagttagattgtgattgctgtggtaattccatcgattgcatgtgtgtgttgtg

SEQ ID NO: 33838 - DNA, 1072 bp, Zea Mays
aaagatgacacagcagaatacagagccgacaggttaaatacatctcatccggggcatttttgaaattggtcgtgagccgctgccgcacacggcgagaggaatagggttgctccccccgttgccgactcgccgccgcatcgccgcgagcgtcatgaagaccttcccgctgtccaggggaagcaccatctccctagccctcttctccgacgtctccaacagccgggagctcctggacttgatgcagtcagggaagctggagccggcggtcgctctcctcaacgcgtcactggtgccggatgtgttccctatcctcgcggcagcgcttaaggcgctgttgtccaagactagggagtcactgaccacaaggactctgcactctgagctcgtctacaactactcggggtccaaacatataacagagtccctgaagcgctgtgggatctctgataatacaacttacatccttgctgcttgttttgatgcttccgacgaggagatgaaggcagtggagaagctcatcagtggcaccgagattgatctcacagaactggaaagaagagcaaaccagccacagatcttgaagcattacaagatacctccccaagaactatcgatatctacgttgccggacgcaattgtatgcaggattgctgctcgagatgctctctgaagtctcaataatcaccgtaagctatgtggtttcaggatgtaggtctctctctaccacatgtatggtgtgacattgacagcacaagtgcacaactagaattaggtatccgaaataccattgatgttcgcattccctgcaagcaacccagaagcacattgcgtggttaatttttcttgctaaactgtgctgcaaagcaacagttatgttaatttctcccttgaattcgatgaagcttatatgatacaatctagcaaaggaatgtatgatgtatctgatgtggcgtgtaagtttctggtgcatagtgctttgtctataggcgagatagttccctgtttttgtatggaaattggagttagattgtgattgctgtggtaattccatcgattgcatgtgtgtgttgtg

SEQ ID NO: 33839 - DNA, 1964 bp, Zea Mays
aaaagccttactagtctttatcgtggaaggtcaggtgataaatccttattgcattgataatttatgattcctcattggaaatcctttctgtaagttgtccaaccatccagatcctccatcaagaaccaacctcccattgaggacaacatcatcgaacagcctgaactcaggtgctacaacccgccgaccatcatcgtctggaggtcttacttctaattcatcaaggccttcaacaccaactggacgccctacattgacagctagttccaaaggttcaaggccttcgacccccacttcccggacaactgttcctgccaaaactggagcttctgtgtcaaggtcgtcaacaccgactttgagatcaacacttccatcagccaggtcaacgaccccttcaagcagggcagttggtcctgctagcaggacttcagctcctataggcagagcatctgcccctgctagtaggtcatccacacctacttcaaggtcatcaatacctgctaccaggtcaacaacaccatcatccagaccctccataccagcacaaagcaagcctacatcaagggcatcaactccaacaaggcgaccttctgccccttcggcccagcatggtaacttagctgcaccagttagatcgtcctcaatctccaaaccaggttcgacaatgcccaaaggttcttcaccagcaaaaactgcagcgccaacaccttcaagaggcagctcccctactgtcaaatcaagaccatggaaaccatctgaaatgcctggtttctctcttgatgcacctccaaacctaaggacatcgctaccagaaagaccaacctctgccactaggggcagacctggggcacctagttctagatcttgctctgttgagagtgggccagctggtcgaccaagacggcagtcttgctctccctccagaggaaggactttaagtggcagcgtgccttcagggagctccatgccagcagtgagaaggtcacatctcaatggaggtgacagtgtgaatccagttcaaatgggtaataagatggttgaaagggttgtgaacatgagaaggctagttcctccaaagcatgatgatcaaagatctagcctgaacagtgtatctggtaaaacttcaaattccccagatagctcgggctttggtaggactttgtcgaagaaatcactggacatggcacttcgacatatggacataaggcgcagcattccaaacaatttacggcctcttatgacaagtatccctccatcatctgttcatagcgcacgttcaggatccacaaggagcagaccaatgagtgtctcagactcaccgctcgcaacaagcagcaacgctagctctgagccgagcgtcaacaacaacctgatgtgcctggacggtatttatatggatgatgagttgtgcagcgatagagcaggaccctatggacggtgatttcacttccaaaaggtttaaaaggcatgattctgatggaaccatttggctacagaatgttcagagcagcagggtggaagatatcgagtacctgacgagcattattattttgttatattttaggttcttcgaatgttcaatatctatccagttccttcgtgtcgtgtcatgctctgcagctccatgtgcaattttaaccatggaccttaatacactattgaaaagtgtcctttatgtgataaatctctagagcagtttatagcatctttgacatgcgatttggtagtggaacatgttccgatggctgaacgtttgtgctccacaacgttcagtgtcgctaatgtaacgtctcctagaatgtgtagttaaacaaattaagcaggagtatttttttttatataaggtagtagcagtatcagtttgaatggctctggcacaacaatcgcacaatgtcctaggtctgcttattctgcttatatttagggtatgttttattaagccgtggctttgaaaaaagttgtaa

SEQ ID NO: 33840 - DNA, 2010 bp, Zea Mays
gtcatggacatggtggttgttggaggcttctgacaccaccaggaactccactattcccatctctagaagttgagtcgaaaaggtccccggtgagccaagctggaacaccaaagactcgtccaactgccttaaaatcaaggttgtccaaccatccagatcctccatcaagaaccaacctcccattgaggacaacatcatcgaacagcctgaactcaggtgctacaacccgccgaccatcatcgtctggaggtcttacttctaattcatcaaggccttcaacaccaactggacgccctacattgacagctagttccaaaggttcaaggccttcgacccccacttcccggacaactgttcctgccaaaactggagcttctgtgtcaaggtcgtcaacaccgactttgagatcaacacttccatcagccaggtcaacgaccccttcaagcagggcagttggtcctgctagcaggacttcagctcctataggcagagcatctgcccctgctagtaggtcatccacacctacttcaaggtcatcaatacctgctaccaggtcaacaacaccatcatccagaccctccataccagcacaaagcaagcctacatcaagggcatcaactccaacaaggcgaccttctgccccttcggcccagcatggtaacttagctgcaccagttagatcgtcctcaatctccaaaccaggttcgacaatgcccaaaggttcttcaccagcaaaaactgcagcgccaacaccttcaagaggcagctcccctactgtcaaatcaagaccatggaaaccatctgaaatgcctggtttctctcttgatgcacctccaaacctaaggacatcgctaccagaaagaccaacctctgccactaggggcagacctggggcacctagttctagatcttgctctgttgagagtgggccagctggtcgaccaagacggcagtcttgctctccctccagaggaaggactttaagtggcagcgtgccttcagggagctccatgccagcagtgagaaggtcacatctcaatggaggtgacagtgtgaatccagttcaaatgggtaataagatggttgaaagggttgtgaacatgagaaggctagttcctccaaagcatgatgatcaaagatctagcctgaacagtgtatctggtaaaacttcaaattccccagatagctcgggctttggtaggactttgtcgaagaaatcactggacatggcacttcgacatatggacataaggcgcagcattccaaacaatttacggcctcttatgacaagtatccctccatcatctgttcatagcgcacgttcaggatccacaaggagcagaccaatgagtgtctcagactcaccgctcgcaacaagcagcaacgctagctctgagccgagcgtcaacaacaacctgatgtgcctggacggtatttatatggatgatgagttgtgcagcgatagagcaggaccctatggacggtgatttcacttccaaaaggtttaaaaggcatgattctgatggaaccatttggctacagaatgttcagagcagcagggtggaagatatcgagtacctgacgagcattattattttgttatattttaggttcttcgaatgttcaatatctatccagttccttcgtgtcgtgtcatgctctgcagctccatgtgcaattttaaccatggaccttaatacactattgaaaagtgtcctttatgtgataaatctctagagcagtttatagcatctttgacatgcgatttggtagtggaacatgttccgatggctgaacgtttgtgctccacaacgttcagtgtcgctaatgtaacgtctcctagaatgtgtagttaaacaaattaagcaggagtatttttttttatataaggtagtagcagtatcagtttgaatggctctggcacaacaatcgcacaatgtcctaggtctgcttattctgcttatatttagggtatgttttattaagccgtggctttgaaaaaagttgtaa

SEQ ID NO: 33841 - DNA, 1207 bp, Zea Mays
gtcatggacatggtggttgttggaggcttctgacaccaccaggaactccactattcccatctctagaagttgagtcgaaaaggtccccggtgagccaagctggaacaccaaagactcgtccaactgccttaaaatcaaggttgtccaaccatccagatcctccatcaagaaccaacctcccattgaggacaacatcatcgaacagcctgaactcaggtgctacaacccgccgaccatcatcgtctggaggtcttacttctaattcatcaaggccttcaacaccaactggacgccctacattgacagctagttcctccaaagcatgatgatcaaagatctagcctgaacagtgtatctggtaaaacttcaaattccccagatagctcgggctttggtaggactttgtcgaagaaatcactggacatggcacttcgacatatggacataaggcgcagcattccaaacaatttacggcctcttatgacaagtatccctccatcatctgttcatagcgcacgttcaggatccacaaggagcagaccaatgagtgtctcagactcaccgctcgcaacaagcagcaacgctagctctgagccgagcgtcaacaacaacctgatgtgcctggacggtatttatatggatgatgagttgtgcagcgatagagcaggaccctatggacggtgatttcacttccaaaaggtttaaaaggcatgattctgatggaaccatttggctacagaatgttcagagcagcagggtggaagatatcgagtacctgacgagcattattattttgttatattttaggttcttcgaatgttcaatatctatccagttccttcgtgtcgtgtcatgctctgcagctccatgtgcaattttaaccatggaccttaatacactattgaaaagtgtcctttatgtgataaatctctagagcagtttatagcatctttgacatgcgatttggtagtggaacatgttccgatggctgaacgtttgtgctccacaacgttcagtgtcgctaatgtaacgtctcctagaatgtgtagttaaacaaattaagcaggagtatttttttttatataaggtagtagcagtatcagtttgaatggctctggcacaacaatcgcacaatgtcctaggtctgcttattctgcttatatttagggtatgttttattaagccgtggctttgaaaaaagttgtaa

SEQ ID NO: 33842 - DNA, 2718 bp, Zea Mays
gaaattccacacttaacttgtcttttcatcatagttttacatttccttcatagttttcgttcaaaaatgaactagcggacgacaaatattcgaggacggaagtaatatatgtcaagattataaaagcacagtttaaaaccacatcatccaaataagccctaaacgactttcatactagaaaactcgcaggctgtgtacactaccgctgtgtcagtagcatttacgtaagtatatatgccaaaccatttattaataactctcctcatcacacataaaaaaaatcaagcacggacacagagacagacagcagtcgctcgccctccccaaaatccccatccgcactccgcagctcaaaactctacccaattcaatttcaaaccgcaatctcccctgccttgccttccttccccttcacagcttcatccaccgctcctccaatctccgtcgccatcgccaaccctgagctgaaagcaaggccaacaagcatcatagcagtctcgctctcgcaccacgcgagtgagacaccaggcaaccaccacgagacagggacgggcgccatcctcatccaccaccaccctcccagcttccgttggcttcactcccactgcaggccccacctcactcgctcgcgccacagatctcgcctgccggaaccctaatgccgcaggagggcgcctggcggagcggacgatttcctccatgcagacgctggcgacaagaacgattacgactggcttctgacaccaccaggaactccactattcccatctctagaagttgagtcgaaaaggtccccggtgagccaagctggaacaccaaagactcgtccaactgccttaaaatcaaggttgtccaaccatccagatcctccatcaagaaccaacctcccattgaggacaacatcatcgaacagcctgaactcaggtgctacaacccgccgaccatcatcgtctggaggtcttacttctaattcatcaaggccttcaacaccaactggacgccctacattgacagctagttccaaaggttcaaggccttcgacccccacttcccggacaactgttcctgccaaaactggagcttctgtgtcaaggtcgtcaacaccgactttgagatcaacacttccatcagccaggtcaacgaccccttcaagcagggcagttggtcctgctagcaggacttcagctcctataggcagagcatctgcccctgctagtaggtcatccacacctacttcaaggtcatcaatacctgctaccaggtcaacaacaccatcatccagaccctccataccagcacaaagcaagcctacatcaagggcatcaactccaacaaggcgaccttctgccccttcggcccagcatggtaacttagctgcaccagttagatcgtcctcaatctccaaaccaggttcgacaatgcccaaaggttcttcaccagcaaaaactgcagcgccaacaccttcaagaggcagctcccctactgtcaaatcaagaccatggaaaccatctgaaatgcctggtttctctcttgatgcacctccaaacctaaggacatcgctaccagaaagaccaacctctgccactaggggcagacctggggcacctagttctagatcttgctctgttgagagtgggccagctggtcgaccaagacggcagtcttgctctccctccagaggaaggactttaagtggcagcgtgccttcagggagctccatgccagcagtgagaaggtcacatctcaatggaggtgacagtgtgaatccagttcaaatgggtaataagatggttgaaagggttgtgaacatgagaaggctagttcctccaaagcatgatgatcaaagatctagcctgaacagtgtatctggtaaaacttcaaattccccagatagctcgggctttggtaggactttgtcgaagaaatcactggacatggcacttcgacatatggacataaggcgcagcattccaaacaatttacggcctcttatgacaagtatccctccatcatctgttcatagcgcacgttcaggatccacaaggagcagaccaatgagtgtctcagactcaccgctcgcaacaagcagcaacgctagctctgagccgagcgtcaacaacaacctgatgtgcctggacggtatttatatggatgatgagttgtgcagcgatagagcaggaccctatggacggtgatttcacttccaaaaggtttaaaaggcatgattctgatggaaccatttggctacagaatgttcagagcagcagggtggaagatatcgagtacctgacgagcattattattttgttatattttaggttcttcgaatgttcaatatctatccagttccttcgtgtcgtgtcatgctctgcagctccatgtgcaattttaaccatggaccttaatacactattgaaaagtgtcctttatgtgataaatctctagagcagtttatagcatctttgacatgcgatttggtagtggaacatgttccgatggctgaacgtttgtgctccacaacgttcagtgtcgctaatgtaacgtctcctagaatgtgtagttaaacaaattaagcaggagtatttttttttatataaggtagtagcagtatcagtttgaatggctctggcacaacaatcgcacaatgtcctaggtctgcttattctgcttatatttagggtatgttttattaagccgtggctttgaaaaaagttgtaa

SEQ ID NO: 33843 - DNA, 2087 bp, Zea Mays
ccccattctacacccgaactcacaaagaaactgtcgagtttgcatttggaatgggacaggcatgaatctccagtgaacggtgtggaagatgagaatgcagattctttgatcccacaggctattttggactttgtgcttccagctgggtttccagggtctgtttcagcggactacctggactacatgttgttgcagttcccaacaaatgtgacaggttggatctgtcatgtattggttacatcaagtcttttgaagattggtacaggctgtaggtgttgggtcctttacaggaacttctgcagctgcatctgctgctgctatcagatgggtatcaaaggatggcattggggcctttggacgtcttctcattgaagtggaggatgtatgcagatttcattggaagtgctggaagcatatttgagcttagcactacattatatccaggttactttctcccacttgcatcattagggaaccttgcaaaggccatagcaagaggatttaaagatccttcatttcgcgttatccaaaatcactttgcagaatctggaaatcttggagaggttgctgcaaaggaggaagtatgggaagtaggagctcagcttttaggcctttcaatcggtgtactcattatggtatatatgtacagttcattatgttttatatgttgtttatatctaaccgcctttttgtatggcaaccttattgatcagttataatatcgcactgatggagacagatgccatcatttttatatccatttacagttgctgtttttattctaggataagacaggtgtaaagtcatcatacttaactcttgttttaacttggctgagtgttcgtcttctacatctttggttgcgctatcagtccatatcagttctcaagttccgcacagtaagataaacctaaaacgtggccggattcttgtgaaatcacatgttgcacaacatactgttcctggttatgttgcttgcaatgaggaagaaaacattttaacatgggaaagatacttgcgtccacaagtttctttcggtgtgcccatggaaagaatgcttggtggtgacaaatccagtgacatggtgaatagattactgaagttatacaagaacgagaagtacatcctcttcttcgagcagtttggatcaagggagccgacatttctagttactttcaaggaatcagcaacaagtatgtcagtcctaaggagcctgtggcaagcacattggcttcacaagaatcagctaaggcaggacgaggttttcccatggttagaagaaagcatagtcgcattggagaatggattcactgacttcctcgagcaattggggagtgctggctgggaccaggacctgatcattttgaaagtcccaaaagagcccgtcttggtgttggaacatctagaagaccaagaggtgtaagatgccacggctggtctgttgctaacctagaggacaatgtagagtcttcttttctattgcgtgatcatgacctgctgaatcaattgcaactgagcatcgcgaaggagccgagttcccatgtggcagatgcttagtgatctaacaagaatagaaactgtctggcatgtgacatgatgtttatgctttaaggagtgtttggtttatagggattaatttttagtcccttcattttatatgattttagtctctaaattatcaaatacgtagtttctgtatttcataatttagaaactaaaatagaataaaatagaatgactaaaaatagaaaccaaacactcacttagtctttacactcaatattatgattataatgcatcacctgctgtcaattgagttgatgcccaaagggcaaaggcactcgctcgtctccgtgacttttttatgtgcaatgcatcaattttctatcattggcatgaaactctcctgcctccagtcacaaatacttggcatggacagtccccgaaacatcatttcatattttttgtacaaaatattatgaatggtagtacatttttatgaaactgctttccatgtttttttaatcattttcaactctccaaatttaacaaaaaatggaatatgcaactaacaacgtctctaaaag

SEQ ID NO: 33844 - DNA, 2313 bp, Zea Mays
ccacgaaccaaacatggagaaaaacgccgaactttacagtcaagtagcgcactttggcttgtgggcagctgtgcccctatcacggtatccatacactcccggcatcccttccatccgcgacccgccgcgtccgtacaccggaccatgctctccacacccgccgcaggctggcgcttccgccggggaggtctgccctggaggcttcatacgtgctcctgcctggcgtcgccgctgtcttccagcggcggcgagcctgaaaaggcgaggcctttgctcgcggagaggtaccgggacggtgtcgtcaagagatatatttcggatggcagttctaagctgcaacttcgtttggagaagcatgaatctccagtgaacggtgtggaagatgagaatgcagattctttgatcccacaggctattttggactttgtgcttccagctgggtttccagattggtacaggctgtaggtgttgggtcctttacaggaacttctgcagctgcatctgctgctgctatcagatgggtatcaaaggatggcattggggcctttggacgtcttctcattggtggacgctttggagcacttttcgatgatgacccaaagaagtggaggatgtatgcagatttcattggaagtgctggaagcatatttgagcttagcactacattatatccaggttactttctcccacttgcatcattagggaaccttgcaaaggccatagcaagaggatttaaagatccttcatttcgcgttatccaaaatcactttgcagaatctggaaatcttggagaggttgctgcaaaggaggaagtatgggaagtaggagctcagcttttaggcctttcaatcggtgtactcattatggtatatatgtacagttcattatgttttatatgttgtttatatctaaccgcctttttgtatggcaaccttattgatcagttataatatcgcactgatggagacagatgccatcatttttatatccatttacagttgctgtttttattctaggataagacaggtgtaaagtcatcatacttaactcttgttttaacttggctgagtgttcgtcttctacatctttggttgcgctatcagtccatatcagttctcaagttccgcacaataaacctaaaacgtggccggattcttgtgaaatcacatgttgcacaacatactgttcctggttatgttgcttgcaatgaggaagaaaacattttaacatgggaaagatacttgcgtccacaagtttctttcggtgtgcccatggaaagaatgcttggtggtgacaaatccagtgacatggtgaatagattactgaagttatacaagaacgagaagtacatcctcttcttcgagcagtttggatcaagggagccgacatttctagttactttcaaggaatcagcaacaagtatgtcagtcctaaggagcctgtggcaagcacattggcttcacaagaatcagctaaggcaggacgaggttttcccatggttagaagaaagcatagtcgcattggagaatggattcactgacttcctcgagcaattggggagtgctggctgggaccaggacctgatcattttgaaagtcccaaaagagcccgtcttggtgttggaacatctagaagaccaagaggtgtaagatgccacggctggtctgttgctaacctagaggacaatgtagagtcttcttttctattgcgtgatcatgacctgctgaatcaattgcaactgagcatcgcgaaggagccgagttcccatgtggcagatgcttagtgatctaacaagaatagaaactgtctggcatgtgacatgatgtttatgctttaaggagtgtttggtttatagggattaatttttagtcccttcattttatatgattttagtctctaaattatcaaatacgtagtttctgtatttcataatttagaaactaaaatagaataaaatagaatgactaaaaatagaaaccaaacactcacttagtctttacactcaatattatgattataatgcatcacctgctgtcaattgagttgatgcccaaagggcaaaggcactcgctcgtctccgtgacttttttatgtgcaatgcatcaattttctatcattggcatgaaactctcctgcctccagtcacaaatacttggcatggacagtccccgaaacatcatttcatattttttgtacaaaatattatgaatggtagtacatttttatgaaactgctttccatgtttttttaatcattttcaactctccaaatttaacaaaaaatggaatatgcaactaacaacgtctctaaaag

SEQ ID NO: 33845 - DNA, 2374 bp, Zea Mays
ccacgaaccaaacatggagaaaaacgccgaactttacagtcaagtagcgcactttggcttgtgggcagctgtgcccctatcacggtatccatacactcccggcatcccttccatccgcgacccgccgcgtccgtacaccggaccatgctctccacacccgccgcaggctggcgcttccgccggggaggtctgccctggaggcttcatacgtgctcctgcctggcgtcgccgctgtcttccagcggcggcgagcctgaaaaggcgaggcctttgctcgcggagaggtaccgggacggtgtcgtcaagaggtttttcacttctgaaccgtgaattcttgatttcggctacgccatctgatttccccattctacacccgaactcacaaagaaactgtcgagtttgcatttggaatgggacaggcatgaatctccagtgaacggtgtggaagatgagaatgcagattctttgatcccacaggctattttggactttgtgcttccagctgggtttccaggctgtaggtgttgggtcctttacaggaacttctgcagctgcatctgctgctgctatcagatgggtatcaaaggatggcattggggcctttggacgtcttctcattggtggacgctttggagcacttttcgatgatgacccaaagaagtggaggatgtatgcagatttcattggaagtgctggaagcatatttgagcttagcactacattatatccaggttactttctcccacttgcatcattagggaaccttgcaaaggccatagcaagaggatttaaagatccttcatttcgcgttatccaaaatcactttgcagaatctggaaatcttggagaggttgctgcaaaggaggaagtatgggaagtaggagctcagcttttaggcctttcaatcggtgtactcattatggtatatatgtacagttcattatgttttatatgttgtttatatctaaccgcctttttgtatggcaaccttattgatcagttataatatcgcactgatggagacagatgccatcatttttatatccatttacagttgctgtttttattctaggataagacaggtgtaaagtcatcatacttaactcttgttttaacttggctgagtgttcgtcttctacatctttggttgcgctatcagtccatatcagttctcaagttccgcacagtaagataaacctaaaacgtggccggattcttgtgaaatcacatgttgcacaacatactgttcctggttatgttgcttgcaatgaggaagaaaacattttaacatgggaaagatacttgcgtccacaagtttctttcggtgtgcccatggaaagaatgcttggtggtgacaaatccagtgacatggtgaatagattactgaagttatacaagaacgagaagtacatcctcttcttcgagcagtttggatcaagggagccgacatttctagttactttcaaggaatcagcaacaagtatgtcagtcctaaggagcctgtggcaagcacattggcttcacaagaatcagctaaggcaggacgaggttttcccatggttagaagaaagcatagtcgcattggagaatggattcactgacttcctcgagcaattggggagtgctggctgggaccaggacctgatcattttgaaagtcccaaaagagcccgtcttggtgttggaacatctagaagaccaagaggtgtaagatgccacggctggtctgttgctaacctagaggacaatgtagagtcttcttttctattgcgtgatcatgacctgctgaatcaattgcaactgagcatcgcgaaggagccgagttcccatgtggcagatgcttagtgatctaacaagaatagaaactgtctggcatgtgacatgatgtttatgctttaaggagtgtttggtttatagggattaatttttagtcccttcattttatatgattttagtctctaaattatcaaatacgtagtttctgtatttcataatttagaaactaaaatagaataaaatagaatgactaaaaatagaaaccaaacactcacttagtctttacactcaatattatgattataatgcatcacctgctgtcaattgagttgatgcccaaagggcaaaggcactcgctcgtctccgtgacttttttatgtgcaatgcatcaattttctatcattggcatgaaactctcctgcctccagtcacaaatacttggcatggacagtccccgaaacatcatttcatattttttgtacaaaatattatgaatggtagtacatttttatgaaactgctttccatgtttttttaatcattttcaactctccaaatttaacaaaaaatggaatatgcaactaacaacgtctctaaaag

SEQ ID NO: 33846 - DNA, 1300 bp, Zea Mays
ccacgaaccaaacatggagaaaaacgccgaactttacagtcaagtagcgcactttggcttgtgggcagctgtgcccctatcacggtatccatacactcccggcatcccttccatccgcgacccgccgcgtccgtacaccggaccatgctctccacacccgccgcaggctggcgcttccgccggggaggtctgccctggaggcttcatacgtgctcctgcctggcgtcgccgctgtcttccagcggcggcgagcctgaaaaggcgaggcctttgctcgcggagaggtaccgggacggtgtcgtcaagagatatatttcggatggcagttctaagctgcaacttcgtttggagaagcatgaatctccagtgaacggtgtggaagatgagaatgcagattctttgatcccacaggctattttggactttgtgcttccagctgggtttccagggtctgtttcagcggactacctggactacatgttgttgcagttcccaacaaatgtgacaggttggatctgtcatgtattggttacatcaagtcttttgaagattggtacaggctgtaggtgttgggtcctttacaggaacttctgcagctgcatctgctgctgctatcagatgggtatcaaaggatggcattggggcctttggacgtcttctcattggtggacgctttggagcacttttcgatgatgacccaaagaagtggaggatgtatgcagatttcattggaagtgctggaagcatatttgagcttagcactacattatatccaggttactttctcccacttgcatcattagggaaccttgcaaaggccatagcaagaggatttaaagatccttcatttcgcgttatccaaaatcactttgcagaatctggaaatcttggagaggttgctgcaaaggaggaagtatgggaagtaggagctcagcttttaggcctttcaatcggtgtactcattatggataagacaggtgtaaagtcatcatacttaactcttgttttaacttggctgagtgttcgtcttctacatctttggttgcgctatcagtccatatcagttctcaagttccgcacagtaagataaacctaaaacgtggccggattcttgtgaaatcacatgttgcacaacatactgttcctggttatgttgcttgcaatgaggaagaaaacattttaacatgggaaagatacttgcgtccacaagtttctttcggtgtgcccatggaaagaatgcttggtggtgacaaatccagtgacatgaatttggtgagaacacatgtacgcgaagaaatca

SEQ ID NO: 33847 - DNA, 1665 bp, Zea Mays
ccacgaaccaaacatggagaaaaacgccgaactttacagtcaagtagcgcactttggcttgtgggcagctgtgcccctatcacggtatccatacactcccggcatcccttccatccgcgacccgccgcgtccgtacaccggaccatgctctccacacccgccgcaggctggcgcttccgccggggaggtctgccctggaggcttcatacgtgctcctgcctggcgtcgccgctgtcttccagcggcggcgagcctgaaaaggcgaggcctttgctcgcggagaggtaccgggacggtgtcgtcaagagatatatttcggatggcagttctaagctgcaacttcgtttggagaagcatgaatctccagtgaacggtgtggaagatgagaatgcagattctttgatcccacaggctattttggactttgtgcttccagctgggtttccaggctgtaggtgttgggtcctttacaggaacttctgcagctgcatctgctgctgctatcagatgggtatcaaaggatggcattggggcctttggacgtcttctcattggtggacgctttggagcacttttcgatgatgacccaaagaagtggaggatgtatgcagatttcattggaagtgctggaagcatatttgagcttagcactacattatatccaggttactttctcccacttgcatcattagggaaccttgcaaaggccatagcaagaggatttaaagatccttcatttcgcgttatccaaaatcactttgcagaatctggaaatcttggagaggttgctgcaaaggaggaagtatgggaagtaggagctcagcttttaggcctttcaatcggtgtactcattatggtatatatgtacagttcattatgttttatatgttgtttatatctaaccgcctttttgtatggcaaccttattgatcagttataatatcgcactgatggagacagatgccatcatttttatatccatttacagttgctgtttttattctaggataagacaggtgtaaagtcatcatacttaactcttgttttaacttggctgagtgttcgtcttctacatctttggttgcgctatcagtccatatcagttctcaagttccgcacaataaacctaaaacgtggccggattcttgtgaaatcacatgttgcacaacatactgttcctggttatgttgcttgcaatgaggaagaaaacattttaacatgggaaagatacttgcgtccacaagtttctttcggtgtgcccatggaaagaatgcttggtggtgacaaatccagtgacatggaagcgaaagcctaggaaaaattcaactaaaggctggttccccaaagatgtacctgagtcatcacagccagttgaccacgagaatgaagacgtggttgcaatgataccagctattgaagatgttgttgaaagaccttcttcgccaccagaagaacgtgtagttcgagtcctagttaaaaagatcacacctaggaagaagaatgtttgagtactatggtgaacttgtttgttcttatggtagtatggtgtgtgtatggaactatggcatttgtgtgacatttgtatgtaactttggcatctgtatgacatttgtatgcacctatggcatttgtatggtacttgtatgacactatggcatttgtatg

SEQ ID NO: 33848 - DNA, 1724 bp, Zea Mays
ccacgaaccaaacatggagaaaaacgccgaactttacagtcaagtagcgcactttggcttgtgggcagctgtgcccctatcacggtatccatacactcccggcatcccttccatccgcgacccgccgcgtccgtacaccggaccatgctctccacacccgccgcaggctggcgcttccgccggggaggtctgccctggaggcttcatacgtgctcctgcctggcgtcgccgctgtcttccagcggcggcgagcctgaaaaggcgaggcctttgctcgcggagaggtaccgggacggtgtcgtcaagagatatatttcggatggcagttctaagctgcaacttcgtttggagaagcatgaatctccagtgaacggtgtggaagatgagaatgcagattctttgatcccacaggctattttggactttgtgcttccagctgggtttccagggtctgtttcagcggactacctggactacatgttgttgcagttcccaacaaatgtgacaggttggatctgtcatgtattggttacatcaagtcttttgaaggctgtaggtgttgggtcctttacaggaacttctgcagctgcatctgctgctgctatcaggtggacgctttggagcacttttcgatgatgacccaaagaagtggaggatgtatgcagatttcattggaagtgctggaagcatatttgagcttagcactacattatatccaggttactttctcccacttgcatcattagggaaccttgcaaaggccatagcaagaggatttaaagatccttcatttcgcgttatccaaaatcactttgcagaatctggaaatcttggagaggttgctgcaaaggaggaagtatgggaagtaggagctcagcttttaggcctttcaatcggtgtactcattatggtatatatgtacagttcattatgttttatatgttgtttatatctaaccgcctttttgtatggcaaccttattgatcagttataatatcgcactgatggagacagatgccatcatttttatatccatttacagttgctgtttttattctaggataagacaggtgtaaagtcatcatacttaactcttgttttaacttggctgagtgttcgtcttctacatctttggttgcgctatcagtccatatcagttctcaagttccgcacagtaagataaacctaaaacgtggccggattcttgtgaaatcacatgttgcacaacatactgttcctggttatgttgcttgcaatgaggaagaaaacattttaacatgggaaagatacttgcgtccacaagtttctttcggtgtgcccatggaaagaatgcttggtggtgacaaatccagtgacatggaagcgaaagcctaggaaaaattcaactaaaggctggttccccaaagatgtacctgagtcatcacagccagttgaccacgagaatgaagacgtggttgcaatgataccagctattgaagatgttgttgaaagaccttcttcgccaccagaagaacgtgtagttcgagtcctagttaaaaagatcacacctaggaagaagaatgtttgagtactatggtgaacttgtttgttcttatggtagtatggtgtgtgtatggaactatggcatttgtgtgacatttgtatgtaactttggcatctgtatgacatttgtatgcacctatggcatttgtatggtacttgtatgacactatggcatttgtatg

SEQ ID NO: 33849 - DNA, 1417 bp, Zea Mays
ccacgaaccaaacatggagaaaaacgccgaactttacagtcaagtagcgcactttggcttgtgggcagctgtgcccctatcacggtatccatacactcccggcatcccttccatccgcgacccgccgcgtccgtacaccggaccatgctctccacacccgccgcaggctggcgcttccgccggggaggtctgccctggaggcttcatacgtgctcctgcctggcgtcgccgctgtcttccagcggcggcgagcctgaaaaggcgaggcctttgctcgcggagaggtaccgggacggtgtcgtcaagaggtttttcacttctgaaccgtgaattcttgatttcggctacgccatctgatttccccattctacacccgaactcacaaagaaactgtcgagtttgcatttggaatgggacaggcatgaatctccagtgaacggtgtggaagatgagaatgcagattctttgatcccacaggctattttggactttgtgcttccagctgggtttccagattggtacaggctgtaggtgttgggtcctttacaggaacttctgcagctgcatctgctgctgctatcagatgggtatcaaaggatggcattggggcctttggacgtcttctcattggtggacgctttggagcacttttcgatgatgacccaaagaagtggaggatgtatgcagatttcattggaagtgctggaagcatatttgagcttagcactacattatatccaggttactttctcccacttgcatcattagggaaccttgcaaaggccatagcaagaggatttaaagatccttcatttcgcgttatccaaaatcactttgcagaatctggaaatcttggagaggttgctgcaaagataaacctaaaacgtggccggattcttgtgaaatcacatgttgcacaacatactgttcctggttatgttgcttgcaatgaggaagaaaacattttaacatgggaaagatacttgcgtccacaagtttctttcggtgtgcccatggaaagaatgcttggtggtgacaaatccagtgacatggaagcgaaagcctaggaaaaattcaactaaaggctggttccccaaagatgtacctgagtcatcacagccagttgaccacgagaatgaagacgtggttgcaatgataccagctattgaagatgttgttgaaagaccttcttcgccaccagaagaacgtgtagttcgagtcctagttaaaaagatcacacctaggaagaagaatgtttgagtactatggtgaacttgtttgttcttatggtagtatggtgtgtgtatggaactatggcatttgtgtgacatttgtatgtaactttggcatctgtatgacatttgtatgcacctatggcatttgtatggtacttgtatgacactatggcatttgtatg

SEQ ID NO: 33850 - DNA, 1616 bp, Zea Mays
ccacgaaccaaacatggagaaaaacgccgaactttacagtcaagtagcgcactttggcttgtgggcagctgtgcccctatcacggtatccatacactcccggcatcccttccatccgcgacccgccgcgtccgtacaccggaccatgctctccacacccgccgcaggctggcgcttccgccggggaggtctgccctggaggcttcatacgtgctcctgcctggcgtcgccgctgtcttccagcggcggcgagcctgaaaaggcgaggcctttgctcgcggagaggtaccgggacggtgtcgtcaagagatatatttcggatggcagttctaagctgcaacttcgtttggagaagcatgaatctccagtgaacggtgtggaagatgagaatgcagattctttgatcccacaggctattttggactttgtgcttccagctgggtttccagggtctgtttcagcggactacctggactacatgttgttgcagttcccaacaaatgtgacaggttggatctgtcatgtattggttacatcaagtcttttgaaggctgtaggtgttgggtcctttacaggaacttctgcagctgcatctgctgctgctatcagatgggtatcaaaggatggcattggggcctttggacgtcttctcattggtggacgctttggagcacttttcgatgatgacccaaagaagtggaggatgtatgcagatttcattggaagtgctggaagcatatttgagcttagcactacattatatccaggttactttctcccacttgcatcattagggaaccttgcaaaggccatagcaagaggatttaaagatccttcatttcgcgttatccaaaatcactttgcagaatctggaaatcttggagaggttgctgcaaaggaggaagtatgggaagtaggagctcagcttttaggcctttcaatcggtgtactcattatggataagacaggtgtaaagtcatcatacttaactcttgttttaacttggctgagtgttcgtcttctacatctttggttgcgctatcagtccatatcagttctcaagttccgcacaataaacctaaaacgtggccggattcttgtgaaatcacatgttgcacaacatactgttcctggttatgttgcttgcaatgaggaagaaaacattttaacatgggaaagatacttgcgtccacaagtttctttcggtgtgcccatggaaagaatgcttggtggtgacaaatccagtgacatggaagcgaaagcctaggaaaaattcaactaaaggctggttccccaaagatgtacctgagtcatcacagccagttgaccacgagaatgaagacgtggttgcaatgataccagctattgaagatgttgttgaaagaccttcttcgccaccagaagaacgtgtagttcgagtcctagttaaaaagatcacacctaggaagaagaatgtttgagtactatggtgaacttgtttgttcttatggtagtatggtgtgtgtatggaactatggcatttgtgtgacatttgtatgtaactttggcatctgtatgacatttgtatgcacctatggcatttgtatggtacttgtatgacactatggcatttgtatg

SEQ ID NO: 33851 - DNA, 1631 bp, Zea Mays
ccacgaaccaaacatggagaaaaacgccgaactttacagtcaagtagcgcactttggcttgtgggcagctgtgcccctatcacggtatccatacactcccggcatcccttccatccgcgacccgccgcgtccgtacaccggaccatgctctccacacccgccgcaggctggcgcttccgccggggaggtctgccctggaggcttcatacgtgctcctgcctggcgtcgccgctgtcttccagcggcggcgagcctgaaaaggcgaggcctttgctcgcggagaggtaccgggacggtgtcgtcaagagatatatttcggatggcagttctaagctgcaacttcgtttggagaagcatgaatctccagtgaacggtgtggaagatgagaatgcagattctttgatcccacaggctattttggactttgtgcttccagctgggtttccagggtctgtttcagcggactacctggactacatgttgttgcagttcccaacaaatgtgacaggttggatctgtcatgtattggttacatcaagtcttttgaagattggtacaggctgtaggtgttgggtcctttacaggaacttctgcagctgcatctgctgctgctatcagatgggtatcaaaggatggcattggggcctttggacgtcttctcattggtggacgctttggagcacttttcgatgatgacccaaagaagtggaggatgtatgcagatttcattggaagtgctggaagcatatttgagcttagcactacattatatccaggttactttctcccacttgcatcattagggaaccttgcaaaggccatagcaagaggatttaaagatccttcatttcgcgttatccaaaatcactttgcagaatctggaaatcttggagaggttgctgcaaaggaggaagtatgggaagtaggagctcagcttttaggcctttcaatcggtgtactcattatggataagacaggtgtaaagtcatcatacttaactcttgttttaacttggctgagtgttcgtcttctacatctttggttgcgctatcagtccatatcagttctcaagttccgcacagtaagataaacctaaaacgtggccggattcttgtgaaatcacatgttgcacaacatactgttcctggttatgttgcttgcaatgaggaagaaaacattttaacatgggaaagatacttgcgtccacaagtttctttcggtgtgcccatggaaagaatgcttggtggtgacaaatccagtgacatggaagcgaaagcctaggaaaaattcaactaaaggctggttccccaaagatgtacctgagtcatcacagccagttgaccacgagaatgaagacgtggttgcaatgataccagctattgaagatgttgttgaaagaccttcttcgccaccagaagaacgtgtagttcgagtcctagttaaaaagatcacacctaggaagaagaatgtttgagtactatggtgaacttgtttgttcttatggtagtatggtgtgtgtatggaactatggcatttgtgtgacatttgtatgtaactttggcatctgtatgacatttgtatgcacctatggcatttgtatggtacttgtatgacactatggcatttgtatg

SEQ ID NO: 33852 - DNA, 1621 bp, Zea Mays
ccacgaaccaaacatggagaaaaacgccgaactttacagtcaagtagcgcactttggcttgtgggcagctgtgcccctatcacggtatccatacactcccggcatcccttccatccgcgacccgccgcgtccgtacaccggaccatgctctccacacccgccgcaggctggcgcttccgccggggaggtctgccctggaggcttcatacgtgctcctgcctggcgtcgccgctgtcttccagcggcggcgagcctgaaaaggcgaggcctttgctcgcggagaggtaccgggacggtgtcgtcaagagatatatttcggatggcagttctaagctgcaacttcgtttggagaagcatgaatctccagtgaacggtgtggaagatgagaatgcagattctttgatcccacaggctattttggactttgtgcttccagctgggtttccagggtctgtttcagcggactacctggactacatgttgttgcagttcccaacaaatgtgacaggttggatctgtcatgtattggttacatcaagtcttttgaaggctgtaggtgttgggtcctttacaggaacttctgcagctgcatctgctgctgctatcagatgggtatcaaaggatggcattggggcctttggacgtcttctcattggtggacgctttggagcacttttcgatgatgacccaaagaagtggaggatgtatgcagatttcattggaagtgctggaagcatatttgagcttagcactacattatatccaggttactttctcccacttgcatcattagggaaccttgcaaaggccatagcaagaggatttaaagatccttcatttcgcgttatccaaaatcactttgcagaatctggaaatcttggagaggttgctgcaaaggaggaagtatgggaagtaggagctcagcttttaggcctttcaatcggtgtactcattatggataagacaggtgtaaagtcatcatacttaactcttgttttaacttggctgagtgttcgtcttctacatctttggttgcgctatcagtccatatcagttctcaagttccgcacagtaagataaacctaaaacgtggccggattcttgtgaaatcacatgttgcacaacatactgttcctggttatgttgcttgcaatgaggaagaaaacattttaacatgggaaagatacttgcgtccacaagtttctttcggtgtgcccatggaaagaatgcttggtggtgacaaatccagtgacatggaagcgaaagcctaggaaaaattcaactaaaggctggttccccaaagatgtacctgagtcatcacagccagttgaccacgagaatgaagacgtggttgcaatgataccagctattgaagatgttgttgaaagaccttcttcgccaccagaagaacgtgtagttcgagtcctagttaaaaagatcacacctaggaagaagaatgtttgagtactatggtgaacttgtttgttcttatggtagtatggtgtgtgtatggaactatggcatttgtgtgacatttgtatgtaactttggcatctgtatgacatttgtatgcacctatggcatttgtatggtacttgtatgacactatggcatttgtatg

SEQ ID NO: 33853 - DNA, 1280 bp, Zea Mays
ccacgaaccaaacatggagaaaaacgccgaactttacagtcaagtagcgcactttggcttgtgggcagctgtgcccctatcacggtatccatacactcccggcatcccttccatccgcgacccgccgcgtccgtacaccggaccatgctctccacacccgccgcaggctggcgcttccgccggggaggtctgccctggaggcttcatacgtgctcctgcctggcgtcgccgctgtcttccagcggcggcgagcctgaaaaggcgaggcctttgctcgcggagaggtaccgggacggtgtcgtcaagagatatatttcggatggcagttctaagctgcaacttcgtttggagaagcatgaatctccagtgaacggtgtggaagatgagaatgcagattctttgatcccacaggctattttggactttgtgcttccagctgggtttccaggctgtaggtgttgggtcctttacaggaacttctgcagctgcatctgctgctgctatcagatgggtatcaaaggatggcattggggcctttggacgtcttctcattggtggacgctttggagcacttttcgatgatgacccaaagaagtggaggatgtatgcagatttcattggaagtgctggaagcatatttgagcttagcactacattatatccaggttactttctcccacttgcatcattagggaaccttgcaaaggccatagcaagaggatttaaagatccttcatttcgcgttatccaaaatcactttgcagaatctggaaatcttggagaggttgctgcaaaggttatgttgcttgcaatgaggaagaaaacattttaacatgggaaagatacttgcgtccacaagtttctttcggtgtgcccatggaaagaatgcttggtggtgacaaatccagtgacatggaagcgaaagcctaggaaaaattcaactaaaggctggttccccaaagatgtacctgagtcatcacagccagttgaccacgagaatgaagacgtggttgcaatgataccagctattgaagatgttgttgaaagaccttcttcgccaccagaagaacgtgtagttcgagtcctagttaaaaagatcacacctaggaagaagaatgtttgagtactatggtgaacttgtttgttcttatggtagtatggtgtgtgtatggaactatggcatttgtgtgacatttgtatgtaactttggcatctgtatgacatttgtatgcacctatggcatttgtatggtacttgtatgacactatggcatttgtatg

SEQ ID NO: 33854 - DNA, 1520 bp, Zea Mays
ccacgaaccaaacatggagaaaaacgccgaactttacagtcaagtagcgcactttggcttgtgggcagctgtgcccctatcacggtatccatacactcccggcatcccttccatccgcgacccgccgcgtccgtacaccggaccatgctctccacacccgccgcaggctggcgcttccgccggggaggtctgccctggaggcttcatacgtgctcctgcctggcgtcgccgctgtcttccagcggcggcgagcctgaaaaggcgaggcctttgctcgcggagaggtaccgggacggtgtcgtcaagagatatatttcggatggcagttctaagctgcaacttcgtttggagaagcatgaatctccagtgaacggtgtggaagatgagaatgcagattctttgatcccacaggctattttggactttgtgcttccagctgggtttccaggctgtaggtgttgggtcctttacaggaacttctgcagctgcatctgctgctgctatcagatgggtatcaaaggatggcattggggcctttggacgtcttctcattggtggacgctttggagcacttttcgatgatgacccaaagaagtggaggatgtatgcagatttcattggaagtgctggaagcatatttgagcttagcactacattatatccaggttactttctcccacttgcatcattagggaaccttgcaaaggccatagcaagaggatttaaagatccttcatttcgcgttatccaaaatcactttgcagaatctggaaatcttggagaggttgctgcaaaggaggaagtatgggaagtaggagctcagcttttaggcctttcaatcggtgtactcattatggataagacaggtgtaaagtcatcatacttaactcttgttttaacttggctgagtgttcgtcttctacatctttggttgcgctatcagtccatatcagttctcaagttccgcacagtaagataaacctaaaacgtggccggattcttgtgaaatcacatgttgcacaacatactgttcctggttatgttgcttgcaatgaggaagaaaacattttaacatgggaaagatacttgcgtccacaagtttctttcggtgtgcccatggaaagaatgcttggtggtgacaaatccagtgacatggaagcgaaagcctaggaaaaattcaactaaaggctggttccccaaagatgtacctgagtcatcacagccagttgaccacgagaatgaagacgtggttgcaatgataccagctattgaagatgttgttgaaagaccttcttcgccaccagaagaacgtgtagttcgagtcctagttaaaaagatcacacctaggaagaagaatgtttgagtactatggtgaacttgtttgttcttatggtagtatggtgtgtgtatggaactatggcatttgtgtgacatttgtatgtaactttggcatctgtatgacatttgtatgcacctatggcatttgtatggtacttgtatgacactatggcatttgtatg

SEQ ID NO: 33855 - DNA, 2275 bp, Zea Mays
gggagggaaaagcatgcatgtgtgatcttttccgctggatggaaacttccattttcttgacatagcaaataaaataaaaataaatactcttaacttgggagcccccacgatctaattcgtcatgacaaggctccacgcacgcatactcgagagaaagagagaaacactgctggagctggacccatcgcgccggacacaggctggcatggcaatggcatcatctgtcctcgcctttgcctttcgctcctccccagacccggcagggcccaccgcttaattaccccatctaatcattctcccgctaattaaacaccggcttgtcattactactgacaaccgtggctaacagggcacggttagccagaaggcaggcttaggctaggctaggctagcacttgttgggggtgaagccgacggcgcccctggcggtgtcgaagctgacgcgggtgccctgctgctgcacgttcccgatgatggacacggccgcgttcgtcggcgcgaacgccaggcagtaggcacgtgtcgaacagcgacaccccggaggtccggggcagcgacggcgcgccctggacgaaggcgtcgcggagcgccgcgtaggcggcggactggagccgcgtcacggcggtgccggagtccacgatgacgccgcccgagcccgacgtggcgtccatggcgaaggcggaggccgggatggacagcggctgcccgcccaccgagatgcccgacagcgccacgtagtagaaggtgctcgtgcgcgggctgcgcacgagaggcgccgtcacggtgcccgcctcggcggcgccgtcgccgaactggagcgtggacgcggccggggagtcgcggtccacgaggcagtaggagaaggtggacgcggagatctgggacgggaaggagagcggcccgccgcccagcgccagcagccccgcggcgccgacgaagaggccctcgttgtcgtggccgcacccgatggcgacgttgccgaccggggtggagtcccccagcgtgagcgtctcggtggcgaagtcgcccacggtgtaggagccgtcgccgtaggccacctcgtagaggcaggcgcccgtggcgttgcggcacgccgcggtgtccaggtcccggcagcgctgggagtcgcaggagacggcggcgtaggaggcggagagcgacgggtcgaacaccgggtcggactgctggtagcagtcggcgcagggctggcactgcacccaggtgacgtcgctgccggtgtccagcaccatgtacagctgccgcgcggggctgccgatgcccacgcgggagaagtactcgccgctgccctgcccgacgccggacaccacggggccctggatcgccgcggacgccgcgaacaccgccgacccgttcgcggggcgcaggtccagccgggtcacgccgtccgccgccagcgtcgcgcgggccgacaccgccgcggcgcgcgccgagtcgcggcggaggcgggagagcacgagcgagcggtacgtctcgtgccgcccctgctcctcgggcaggaagtcccgggagtggagccgcagcgtgaggccgccctcccgcgctcgcggggagcgcttcgccccggcggcggcggccgcggactggtgcagcgagacggcgtcggtggagagcgcggcgcgggcgcgggagagcgaggcggctacatcgagcgtctccgtgtccgcggcggacgagtggcggtggcgggagacggcggggctcggggcggtggcgagcaggaggatggcgaccacgacggcgcctagcgggagaagggtaggcggctgcattgtgccgcgcctggcggtgagaggactggtggcagtgggagtgtcgggggcaggaatgagtggaggcctggagggcgaggaaggtggtgggatttttcaagggcggcacagccggcaggtgcagtgacgaacgacgagggtgaatggaatggggatcacgtcatttcggtgctggattaatccgcttcgccccgcggcggcgagcggggcgggggagcttttatggtgtgtaactgcaggaagggggatggtttggtgacggtggcgccggtggggtgggggacagacagagcagcagggacgggggcacatcggcagaggagcaggagggcacggcacgctcttggccgggaccgggagaggcggagggtgtgagtaatcatttcggtcgtagggggtttaggacgctacagaatcatcatcattttagtagtacaaatctttgtacaggattactgtcgcgtggtgcggccatggtcgtaaat

SEQ ID NO: 33856 - DNA, 2040 bp, Zea Mays
ctctctatcagttccggcgatgtttgtggaggaaagcacgagtgaagttgcgtggcgtaaagccgtgctagtaggaaggaggttaaaagcaacagccagcctgacgcaatcccggccggtgcctagcaaagtttaccagggtcccatgagaagaggcgccgccgacgacaccgcttcgctctaccaattgctgtcctgtgccaacccagtggtgtacatgcacggcccagagggagggaaaagcatgcatgtgtgatcttttccgctggatggaaacttccattttcttgacatagcaaataaaataaaaataaatactcttaacttgggagcccccacgatctaattcgtcatgacaaggctccacgcacgcatactcgagagaaagagagaaacactgctggagctggacccatcgcgccggacacaggctggcatggcaatggcatcatctgtcctcgcctttgcctttcgctcctccccagacccggcagggcccaccgcttaattaccccatctaatcattctcccgctaattaaacaccggcttgtcattactactgacaaccgtggctaacagggcacggttagccagaaggcaggcttaggctaggctaggctagcacttgttgggggtgaagccgacggcgcccctggcggtgtcgaagctgacgcgggtgccctgctgctgcacgttcccgatgatggacacggccgcgttcgtcggcgcgaacgccaggcagtaggtgccggctccgtccacggggatcaggtagttcttcgccggcagccgcagcgcgccgccgccctcgaaccgcagcgacaccgcgggcacctccacgctcgtccggtccgacaggtcgtagcacgtgtcgaacagcgacaccccggaggtccggggcagcgacggcgcgccctggacgaaggcgtcgcggagcgccgcgtaggcggcggactggagccgcgtcacggcggtgccggagtccacgatgacgccgcccgagcccgacgtggcgtccatggcgaaggcggaggccgggatggacagcggctgcccgcccaccgagatgcccgacagcgccacgtagtagaaggtgctcgtgcgcgggctgcgcacgagaggcgccgtcacggtgcccgcctcggcggcgccgtcgccgaactggagcgtggacgcggccggggagtcgcggtccacgaggcagtaggagaaggtggacgcggagatctgggacgggaaggagagcggcccgccgcccagcgccagcagccccgcggcgccgacgaagaggccctcgttgtcgtggccgcacccgatggcgacgttgccgaccggggtggagtcccccagcgtgagcgtctcggtggcgaagtcgcccacggtgtaggagccgtcgccgtaggccacctcgtagaggcaggcggctacatcgagcgtctccgtgtccgcggcggacgagtggcggtggcgggagacggcggggctcggggcggtggcgagcaggaggatggcgaccacgacggcgcctagcgggagaagggtaggcggctgcattgtgccgcgcctggcggtgagaggactggtggcagtgggagtgtcgggggcaggaatgagtggaggcctggagggcgaggaaggtggtgggatttttcaagggcggcacagccggcaggtgcagtgacgaacgacgagggtgaatggaatggggatcacgtcatttcggtgctggattaatccgcttcgccccgcggcggcgagcggggcgggggagcttttatggtgtgtaactgcaggaagggggatggtttggtgacggtggcgccggtggggtgggggacagacagagcagcagggacgggggcacatcggcagaggagcaggagggcacggcacgctcttggccgggaccgggagaggcggagggtgtgagtaatcatttcggtcgtagggggtttaggacgctacagaatcatcatcattttagtagtacaaatctttgtacaggattactgtcgcgtggtgcggccatggtcgtaaat

SEQ ID NO: 33857 - DNA, 1926 bp, Zea Mays
gtgtcccttcgtggggtgcgcccgccacctgccgatgcgacgtgagaggagccaagcgcgcagtgggccctggacacgagagcggtgcggtgtcgtgctggcggcggcggcggcggcggcgaaggataaatagggccgtagggccatcgttttgcattgccgtcgcgtggccgtgggttttcatcgacgaacgacgacgactctgccgcgcgcgtttaggcgcgtcgccgccggccacccggccggccacttcgacgcggctgtggtggtttaaaattctccggctcgccgcccacggcctcgctgcacgtagttgcagaaaaccagacatgttcaggcaagaccagtgggtatgcaaaaacaacagcaaagtggctcggcatgtcgacagccagctgctacttctacttctacatataaaccacgcgctggcatgaactccactccagcatggatagacgacatcatcgcacaaatcacataccaggtcaaggcaccacgtttcacaaacctagtgaacacccaagaactattatgcaataccatcattttgctcgatagattttcctagcccagttgtttcatctgagcaagtgtctgtaggaactaaaacacagtagtatgctgtatatactgtcaagcatgaaacgcaaccagatcagctgcaggatttgcagcaccaagctctggccattaggtaggctgcatatcacaacacacaaagggaacatcaaactacatacactagctccgtcccctccagggacactgcaggttggcaggcccaaagctagcacagggtctcgcaacccacaaggtcataatcagtacaagcatccatcggcaaggggaagcaagagcaatcccaggtaggtggacgctggacagatccgtgctcacgccgttccttgctccggacttttctggccgcttgtactagctccgctgttttgtttcgccaacatctgaatctgatcgccataccatagtaggaattagcatagcactcaactgcatttggcgccccgtttcaatctcacgggataaactttagcttcctgctaaactttaactatatgaattaaagtgctaaagtttagtttcaattaccaccattagctctcctgtttagattacaaatggctaaaagtagctaaaaaaagctgctaaagtttatctcgcgagattgaaacagggcctaaatagcaatctagccgactggtcagtgatcactgaaagcttattcagaaaataaacaggtaagatatatatggcatcctgctatggttcctaactttttacaccacttgtgcctaacagatcaagctctctcacgagggtttaattttcatgcaaggcctgacatttctgcgctgaggttacattgctcacagttgttcagtagcagcttgtccaacagtacttgcccgttccagcagtacttccaggcaaagtagcaaatttacgcagagcgcaaaggtagaagctagcaacatccaaaggaaataacaaaacactagcagcatccaaagaaatttggtattctgcactccctattgtatttggttgtcattaaccaaacaacacagtttggagtttggactgaactgaacttgaataaggcgcaaccaatcaaggtcctgcttgtgggctttaccgttcagatttcaagaaaaaaaaatataccgtaccttcctggatctcgtatccttcaaagcatttctcagaagattttccagcttctccagctcatctacatctgattcgtcagcattgctctggggagacctgccggtttgaagaaattgtgattatttatcaaaaatgggaaaccagagtgggtggaaatcctgagttctgggtgtgtaccaggtcgcaatcttgctcagcatcaactgcaaatctgaagaagcttcatccttgttc

SEQ ID NO: 33858 - DNA, 10166 bp, Zea Mays
gtgtcccttcgtggggtgcgcccgccacctgccgatgcgacgtgagaggagccaagcgcgcagtgggccctggacacgagagcggtgcggtgtcgtgctggcggcggcggcggcggcggcgaaggataaatagggccgtagggccatcgttttgcattgccgtcgcgtggccgtgggttttcatcgacgaacgacgacgactctgccgcgcgcgtttaggcgcgtcgccgccggccacccggccggccacttcgacgcggctgtggtggtttaaaattctccggctcgccgcccacggcctcgctgcacgtagttgcaggtgagtgaggttcttcgattccccccaaacccggcccatctccgacgatccattatttgttcgtccatatgaaaatgcatctctttttgtacccagttgttacctacatgcagcttttactgcttcattcagttatggtcgtgtacatcttcagaaaaccagacatgttcaggcaagaccagtgggtatgcaaaaacaacagcaaagtggctcggcatgtcgacagccagctgctacttctacttctacatataaaccacgcgctggcatgaactccactccagcatggatagacgacatcatcgcacaaatcacataccaggtcaaggcaccacgtttcacaaacctagtgaacacccaagaactattatgcaataccatcattttgctcgatagattttcctagcccagttgtttcatctgagcaagtgtctgtaggaactaaaacacagtagtatgctgtatatactgtcaagcatgaaacgcaaccagatcagctgcaggatttgcagcaccaagctctggccattaggtaggctgcatatcacaacacacaaagggaacatcaaactacatacactagctccgtcccctccagggacactgcaggttggcaggcccaaagctagcacagggtctcgcaacccacaaggtcataatcagtacaagcatccatcggcaaggggaagcaagagcaatcccaggtaggtggacgctggacagatccgtgctcacgccgttccttgctccggacttttctggccgcttgtactagctccgctgttttgtttcgccaacatctgaatctgatcgccataccatagtaggaattagcatagcactcaactgcatttggcgccccgtttcaatctcacgggataaactttagcttcctgctaaactttaactatatgaattaaagtgctaaagtttagtttcaattaccaccattagctctcctgtttagattacaaatggctaaaagtagctaaaaaaagctgctaaagtttatctcgcgagattgaaacagggcctaaatagcaatctagccgactggtcagtgatcactgaaagcttattcagaaaataaacaggtaagatatatatggcatcctgctatggttcctaactttttacaccacttgtgcctaacagatcaagctctctcacgagggtttaattttcatgcaaggcctgacatttctgcgctgaggttacattgctcacagttgttcagtagcagcttgtccaacagtacttgcccgttccagcagtacttccaggcaaagtagcaaatttacgcagagcgcaaaggtagaagctagcaacatccaaaggaaataacaaaacactagcagcatccaaagaaatttggtattctgcactccctattgtatttggttgtcattaaccaaacaacacagtttggagtttggactgaactgaacttgaataaggcgcaaccaatcaaggtcctgcttgtgggctttaccgttcagatttcaagaaaaaaaaatataccgtaccttcctggatctcgtatccttcaaagcatttctcagaagattttccagcttctccagctcatctacatctgattcgtcagcattgctctggggagacctgccggtttgaagaaattgtgattatttatcaaaaatgggaaaccagagtgggtggaaatcctgagttctgggtgtgtaccaggtcgcaatcttgctcagcatcaactgcaaatctgaagaagcttcatccttgttctgtaccaaaaacaccctaaaaattgctgatagcggttatatgtatcctctatgctgaaaaaggagaaaaaaaatgaatatgatattagctccttgcataatgtactcttggacaatcaacatctatatattcacctcacgtggaacaaaaatgcaggcagttttattggaggtcatagaatgtggaggttatagaggatggcggggcgccatgcaaatagaatgtctatgactgttttcaaaccaatatatcagacaaaaagtacatatcaatcacaattaaattagacatataatcacatatatattaaattcatataattatgaatcacaaatacataacaattaacaattgttggttagtagcaaaaaatatagcaggcgttaactttagttatattaaaaaaagattaaattacagaaaatatacgtatcttcaaccataacaaatggcctagccaaactaaaatataaacttttaaactattaatttcaaattaaaataagagttagataaaaatggtttaaaaatatgtcactctaaggacttgtcaagttataattttcgaatgctaccttatagttatggaatttagacccactactactattgcggcggcacgagtgaaggggaggggtgacgagaatgtgaggggagaggctgggggcggcagggtcgcagggtatgatggatgattcaaataatattgtccattggatttgggtaaaaaagacgggtttatatagtgatctaaaccatgatatgttaagtctaggtgcaactgtttggtggatttagcgaaacttacgggtgtgggggtgatttggttggattggttttgcaaagtttaaactagtcaattatatagtggtatagacatagataccaaacatgagagataagaataatatttaaaggctcttgctaactttgtggcggtggtcccctcctctggtgacaaatttggagggtatgtggcaaggttttatgacatggtggccggaccgagtgtccctatggttggatcttgagtaaaatgtatcagcgattttcaaatttgacacaatgtgtcacttgggtatcagaacctagaaaactagaaaaataggtcgaaaagttggtcgactcatgcaaatttatctaaaatcgattttgctcaaactagatgccaacgtggcatgctactttagagctcactaatgaaagtttggggacacaagttcagagacttaagtgacataacatgccaaatttggggacttgtgtatcagcaggcacatgatgcgtgtgggaaggatttgatgtagcacgtcacatcgccatatggtttgagcaaatccagatctgaatgattttgcactagggtctatttttctagtttcctgagttcagggacctaaataacacatcgtatcaagttcgagaaccgatgatacactttgcttctggatctttgcaagcttggtgttgatgcatcccttcccaatggacaacaatggttagtcattgttgtacgaggtgacggggagggccatcaaccccacttcactctaggtcgcggaaaggctatttgacaacaaaatctagcatctcttctgggatacatcgacaccatgttgcagggcggcaccatcacctcactacttagcacctataggcttagggtgtatttgttttcgcagctcacatatgcgtgattgacatgagcagcgatcgagaaaatcatgattttacttgtgatacgggattttctgttctcagtacaaatcccgtggttgagtcgaagccgcggcgacgagaatcatctgcgctgcaggctgtttagcgagatttttctggtttctcgcgtcactccatcaaaacacggcttttaaccgaaaccacctagtctacttagcaatatctttccactaatggtggcaattttgtgaagtgtgaacataattcgatgggtccggcaaatttagttttataaaaaatagcttagaagaacatctttccaagctctaaacaataatctcctcaactttgaatgtttcttctaaaaattccacatgccacgcattttacttgtttaaacttaaattttctatggttacttgttttgtgcttctaaggcaagaaaaacataaagaaatggaagtcaaaattcctataaacaacaatatcctaaaaatagagaaagacaaagtagagaagaggaacaatatctagaagaatatatatagaaggtcaaagtgagctatgttagcgtgttgtcttatgccttaattatgttgctcttgctattcatcaattttacttctccaaagaagttgtagagattcatgatgtgtgctatgcgctgatatacaaagatgtgctatttttcacttatgatataggtagcacttaaccaccttctatcattaaccttttgtagaaataaatgttcttcacttagataactctaggacttccactcattcaagggactaagcaccaaattaacttctcgagcgagcttgatttgccaatcctgatgagactaaagagattcaacaccaagtccaagatattttagaccacaaatatgtatataacagtcttagttcttgtgttgttttagttacttaggttcaaaaatagggtgttttagttattttggtccaaaaaatatggcataactaatggggtgtttggtttgaggaatgagctagtccatcatcttctcactcctcactatttttgtttggtttgtggaatagaatgagttaatccatcaccatctcttttctcatagttacatagttagttagtactaatatgaggaatgaagtcatcccaccaaatctgaggaatgaacccatgatggaccaccttaatttagatggtttgattcctcaaaccaaacactctataagtgcttccatatgagtgattagtaatatcttttgggttaactagtgcacaaatcacttctatgagattaatggatgaggttttatgttttttatttgtaaatttgtggtagtctattttgtgatatattgatatacactaaatctttaacaaaacattttactcatctatgtttttaatgttttatatgctacacatctatttggtaaccttgtgaagtacatttttatatcgaataagtatctttttttggctatgttgtgacctcacacggaagtaaagtagatgaagataacatgtgtgctataaagagtcggtcaacgcccacaaccgtgataaaagtgtgaagcttctatggacttatatgattttattattactttgtgaaggattaaagcactattatagccttgctaaatgaattgacaaaaaggacatcatgtttcactgagcaaaagaacaagaagtgtcctttgctctttgaaagaacatgcttaccaacacattattacaacaacttcctaattttgtaggacttttgagcatcaatgtgatgctaatggagtttgcattagtggtgtattgatgcaaggtaagctcgttgcttactttagtgagaaattaaatagacattcttaattattctatgtatggcgaagaactgtatgcagaatttcctaattactctaataactaagtcaaaataaactgaaacgtacacatgcctatgtgggttgaatttattgaatcattttcttatgtgatcaaacataagaaagaaaaagataatattattgttgatgctttgtccagataatatactatgttgttccaatttgattgttctataattaggcttaaaatattaaagtacaatatgttaataataatgaacttaaggatgtgacaaaaaatatatataaagagatgtatatagaacaaatttgtgatgcatggtgagtttttgtttagagctaaccgataatgcattctacttgtttatgttcgtcttttgttgttgcaagaggcacatggaggtggattgatggaacattttaatgtcaagaagataaagtgttggtcacatacttcttctatccaaggatgaggcaagatgtagagaggttcgtagcttgatacacgacatgtcaaatagctaaatcgcggttgaacccatatggtttgtatatgttggttcatttcttctatttcttgggtggatatatatatatgaactttgttttggaattgcaaagaactaataggggggatagtatttttgtggtggttgatcatttatctgaagtgataacttttattccctatcataaaagcgacgatgacattcacattgctaacaaagtctttcaagaaatcattcacttgtagaggtagggacttttaaatatatgctcctagcttagcgtcatagatcagttttgcacctctctagtattaaaaacgcctcatccattactactagaggggtagaactgagcagtggtgctaaagtaggggaataggattaaaagtacctctaaagaagaatctatgtctagggttagtccatctttaacgttgcagatttaaagccatatttagatgaagaattgagtcaagaatgactccatttcaattgaggaaggatgataaggacatcacaccttcagatgcgcctactaatcatccgatcgttatataaggtccaatgacttgagcacaaatgtgatgattaaattttcaaaggtaagtgatcctttcgataattttgggaatagattatctaattatgttatcgtgcttgataacattagagagggtcatgaagtaattgaaggtgtggaggtgaagatcaaaaagaacgcccaagaccaattaaaggcattagtccaactcgagtttgagtctgagtggacctttaggaccatcctgtagtaaaacagatgtgcgagacatacacgacatacataatccattttttatgatcaatatatgaatagaaatatattttcataagctaactaataattttgatctaaggtctaatttccaccggaattaatgaaattatcgaaataagtcagcattcaaaatatgttagtgttgtgtcacaattttttggttggctaggcatgtgttgtcttagagcccattaggggacacgttcaaggggtgtgatagccttaggatatataattagtagccactactcatgttaggactcaagttttgcttttaaaaattatctttgaataattgtcattatagggttataaaaccccacttttgtgatcttagtcatacatatattgttagcatttttgttgagctgtgtactttcaagttctttcttgtgttttcgattcactgacatggattagccttcttaacgagatcaaccggattagtgacacggttgatcaccataagagtcgtagtaccacgttccaccaaaacagaagttatcatgaacccgatggaacattaaggactccattatcataacaaatagcgtattaggtaaccttgtgaataattctgattccttgtttggggactaggtagaaaattagtaaaaacatgatgatttggtgatgtttggatgtggggttgtactggttgtactttgggccacttggaaaactaggaatgatatgtgctttagtagtaaaatgattatcgatccttctaatgtgatatttttgtgctatttctagatggattcaagtttattgtgtgctaaaatacccgctgttgggggtcttcttctctgccgaacattttttattacttcttttggatgctgaacaatatagaattatgttttgagttgaataaattagaattttgatctaaaattttgtgataattggtctaattttcttagttgaaagatgaagccgaatatttattcctttatctaaaaaatctaataataacttaaaatgtttaataataggtagacatggatatcggaattctaataactctcgtcgtccaagtatatgagatgcaaccacttttttattctagtctcataatataaggtgttgccttggagcctgaaagcatctaggcccctggttggttttagtgattaatgacaacgtaatattatatgtgactagcgtgtgttttgcagagcaaatggtaagttaggtcgcattacagaaagttgtactacaatggtgaaaacaatccctgagatgagaacttgaagcgacaactgaaacgacgaatcaaaagatgaaagtcttcatattccgagtgttgaaggagttgtagacactcggtatagaattaggtcttctattttgttttagccgtactataaagagaggttgtggatgagtagtttgaccaagagaattctagtgtagtgttggtgcatattcacacttacatctagtgttaggtgtcactctataacacactcacgagttagaacaaaaacggttttgaaaaacaaaaggaaaaacgaagttagggtttctgtcttaggggcaccagactgtccgatgtgcaccagactgtccggtgcaccccctgacagtggtgccagtcagccccgggggcagtgattctgtccccgagaaaatccgagagcaacgagtggagaaaaagaattttagccgccacaccggactgtccggtgtgcaccggacaggtactgttcactgtccgttgtgccatcagcccaactgctagctgtcagaactagccgttggagacgaccgttggcgcaccggtggcacacggactgtccggtgcgcccatacgcagaacagccaggtaacgactagtttggtgagtggggctatttataccccgtccacctaccttattgagtgtcttgctgcccacattgatgaccacatattgctacaacattgcaagcacaacaaagactagtgaggtgactagaaaatcttaattccacgtcaggacctcattagtgcaagtgagagccacctagagcacacaccacatgcattaagcttctcttggtaaagtgaaagtctattgcttgttactcttggtgatcggtatcacctagatggcttggtagcgtttggagcacggtgatcacctcggatgatttgttggtgacccgactcaaagattgtaagcggtcgtgagggatccaccgcgccggagtggcaaaggatcacctcatagtgagtacttagttcttgaccaagggggagcgatacccttgcgcgggtgctccaacgatgactaggaaagagtgccgactcttcgatacctcgacaaaatattggaggagtcttctcaaccttgttttactttccgcatttaattcaagcattttactttattcaattgtttagcaagtagttgaagtgatgtcttaggattgttatctttctagtagtattctcttattgctagtagttaggtgaagttgggctctagcttagggtttaaatatttgctcagggtttaattgttgttgaatttttagaaaaaagcccaattcaccccctcttgggcatcatgattctttcagagccatactaagagcatctctaaccgctctccaacaaataactattaaaaacagattttaagggccatactaagagcatctctaaccgctctccaacaaataactattaaaaactagtttttaggagtatctcaaaaattattagggtagattttaaccatttctccaaccattctcataactaggccaagccactcttggacccacattgatatgtttcacttgtgtattttcttcttccacgactttgacatctgtccaacgaccaaacatataccaccatcaaaggttgttggttgtacgtgggcggacgtggccggtgagagactaccaacggcgagaccgagcgatagcagagatctgatcgacaacggaggttcaatagcgggttgtgagatggtagaagcaggatagtgtgggcgcgttgccagcaacggacgacgaggttgcgcagatggggaggatgcgctcacggaggtagacgacgaggttgcgtgggtggtagcggattgtgaggttgtgtgggcgtggcacgtttgtgttttctaggaagcccaaaaagcccccgtttgtagctacaaatgagagttttaatgactataaagaagttggagcactttagagaaaccgtcgaagacaagttttttgtgtttt

SEQ ID NO: 33859 - DNA, 14185 bp, Zea Mays
gtgtcccttcgtggggtgcgcccgccacctgccgatgcgacgtgagaggagccaagcgcgcagtgggccctggacacgagagcggtgcggtgtcgtgctggcggcggcggcggcggcggcgaaggataaatagggccgtagggccatcgttttgcattgccgtcgcgtggccgtgggttttcatcgacgaacgacgacgactctgccgcgcgcgtttaggcgcgtcgccgccggccacccggccggccacttcgacgcggctgtggtggtttaaaattctccggctcgccgcccacggcctcgctgcacgtagttgcagatcaagctctctcacgagggtttaattttcatgcaaggcctgacatttctgcgctgaggttacattgctcacagttgttcagtagcagcttgtccaacagtacttgcccgttccagcagtacttccaggcaaagtagcaaatttacgcagagcgcaaaggtagaagctagcaacatccaaaggaaataacaaaacactagcagcatccaaagaaatttggtattctgcactccctattgtatttggttgtcattaaccaaacaacacagtttggagtttggactgaactgaacttgaataaggcgcaaccaatcaaggtcctgcttgtgggctttaccgttcagatttcaagaaaaaaaaatataccgtaccttcctggatctcgtatccttcaaagcatttctcagaagattttccagcttctccagctcatctacatctgattcgtcagcattgctctggggagacctgccggtttgaagaaattgtgattatttatcaaaaatgggaaaccagagtgggtggaaatcctgagttctgggtgtgtaccaggtcgcaatcttgctcagcatcaactgcaaatctgaagaagcttcatccttgttctgtaccaaaaacaccctagtaagctatatttatcgtaaatttcaatattatatatttgctctggtattctacatactgtacaaacaggacattctgttctgcatagtgtgaaaaacatagcattttggttggtgccggcaactggcacagtatgtaaaaacattctttctaaaactatgataaaaaaagcagcgaagctgtaggctgcatcatatgcgttgtaaaagctacatcaagatctttacatcgtttctatttcgatcgtcatttatattccttccttctccagaaaattgctgatagcggttatatgtatcctctatgctgaaaaaggagaaaaaaaatgaatatgatattagctccttgcataatgtactcttggacaatcaacatctatatattcacctcacgtggaacaaaaatgcaggcagttttattggaggtgagtatattattatgaattacatcctgaatcttacagtcaaatacagtttattagtatgatgtcctttttcctcatgatattgagttcatgccctggtccatcacattccatactactattctactctacttagttctcataaaggtttcggaccactgtttctctagatgttttaagagttttcgttgctatattcttgatcatataaaaacatcagaactgagccatgatacaacctatctgtcacatctaactttacatggtctttgatgcatatcttggaccaccaatatcatctagaatatattttcaagattttataactattttattatacaaatatgcaaatatatcatgtatccaaacctaaagatttaaaagttattgatcttcgtagttttcaaggtttgaccaaattttgtcctaaaatgacatgttgtatcaaagaggagctactagtcatatacgcaagtggataaccaatgaaatgcttgtatcaagcaattacacaagtaaatgtaaatacctaggacattttttgtttacgaactccttatttatattcttttaccttttcttcccttgaatcataatgcggataaatctggtatgtgggtttgttatcataatttcaaaaataaagggtgtgtatttagaagtagatcactgggaaaaaaggttcggatatttatatgaaggtctaggatcaaaccaaaaaggcaataaaaatagactttctatggacaaggattttaaaggaaaaacatggacttccgatgggtgatacagattagaaaaaatatgcattcatgggcttcaaatctattcagttgaagaatgaatgaaagataatgtatacctttgagagttctcgatatgatgtcatctagattccagatgtccaagttaactgtttgaataatagacttttctctaccatatatgccctatcatatttattaatgtaatgtgatgttccttgtatctgactgtagagtttggaccactacataccgagacaaccatctaggctgtctaggttctgaagttatgattaggtactagagaagtcaaagtgactagctctatatgctccatgtggaaaagccaagaagtttcagggcgtgtagggtgggttctaagaaggcgcagtcgttagctaaatgtttggttgggctttttgcactctttctaaatatttgtaattaatttccccatgtttcccgagttggatttagctttctaagttttcttccacacactcccaacaagaagtttccatcttcaaatgttctgaatctactagacacagtatgggcacgcctttttttcatgacaggttttgtgttgggggtgctagagtctagttgatgcacatggccctgcccaatagaagttggttttcttccattgatatataagtgaagttgatagccaagtttttcttgtctcctctttttctttcccttccttgaaggctaaatatgctcagttgagaatgaaagctgagaggacatcgaacaaatgaaataagtggagtatacattcaaaacttgagagcgacccccaagtgataggtttttaccttttagggcaacaaaagatatgctctaggaaaaaatgataagagaagagagtctagtaagcttttaggcatcatgcccatgcactatagaaattgaattgtttaaaccataatattttggacaatagaaacttgtaataaattgtgacaaagaatgtgaatttatgatttatctccaaccaagttatgagcacggttgatcaactaacataatattatcgaaagcactttcgatattatatatatcattgtataaatactcaactacatgtcaatttcataattagttgttatttttgtttgtgacttattagcgtgtcataattttcccattgttatatgtttatgttatttttcttatattagttgcacagttataggttctctctcatatgttaacttctcaacaaatattttagatattttatatttagttgttagaagttgttaaaagtatatttggtagtctagatattgtgtctcgtctactgtcatatatatccatgatttgccttgtctcttactcatgtgctctatataaactgcctaagggcttaatgcaatacatcaatccttgatggcaaacccccctaacatggtataacgagtttaggctatgacttaggcttccccttctgctgtcgtcgtcgcgctgcctcgaggaaattgatctccatcaagagttgcgctctcgtagttaggatgcatgactaatccttctgatttgtcgcgttcatcgtcgttattgtattgtcaagcttcaacaaatcagaggctcgctggtttctctacatgtcatggtggttgttgggctctcctaccggttggatcatgcctttgtcctttgtgcatgcaatcatggtgatggttgtggggcagacgacatccacgtgttgtcgtggtgacgattctggagaggccgtgtgagcccatgggctttgtcacccttgacccctagggtgctaagagacgaattcaagagcatattgcctaccatgtatttcctatgaaagttggctaggagatacctaagccaaaagatgaggacaacacgaaggagattgaagctcgagagatgattcagttaccttataaattcaatcccttcagcatcttcataaagccgagcaatgagtggctcattatggtggagacagttgctaacaaagttttatgcaactatattgtgaaagagatcatctacttagtgcgatagtgagtggcaataaagagaatacataatcgtgtgatcaaagcatatgacttagaatatctagactaccccaacctcattgtcgatcatgatgctagattgcagaggaaatgcaaagtaagaattatagataggggttgagtgattagtgaaaaggaggctagagggggccctccgacaaagtccttgaagccaaaggcaaaatacaagggtagtgagattgtggcaaaggaaaagttgctagcacccaagcgctttgaaaggaaacaccatgaaggtgagaagtagaaggtctaggtcgaggcctctaaggttgcctcagagaagcctgctggcattgcaaagacccctaccactgaagaacatgtacgagctgttgttgaagagtcttgttctgaacgctcagaaaattgaggtcgagaaaaagcccgcctaggaggatacatcaggcgacaagctcaaagaggcattgcctagcctcccctgcatagtgaatccaatggatgcgatctttggagatttatttgaggagaaaagcaacaaagccattaagacccctgccaaagaaaaagaggatgttggttgtgctaggctatgtgcctctccctgttagccaagtcgagcctttgtgatcgtggtttatctctttctccctctttcagtcttctgatcgaggataaggagggtgagttgagttaggagaatggactatttgtgggtacttggtgatgtaacaaaatttgttgttgttgtgggtccctttttcttcctaattggtcgggttttgcgccatcgtcgcctattttcatccttgtattgcccctacatcaccgtcgactacgtcgttgtgcgcctctctcacatggtatacctggaccgttcatgctcttcgtcatcttctttaagcaccactgttgcaacactctagcaccaccatgactccttgcgcaatgcagatctcaccactgccactctgggtccctagatgtgtcaaccatctacttctttgacttcgtccatcacaatctcgttgccagtgtcgtcctctgtcctcgtctacttcatccacaccgacaaccattggtgcattgacacatgcttcctcgttgttcttctacacattgcaactatcgcggaggccttctctgctagtcactttagacactgacgtatggttggggtcctctacctagtatgtcttttgctagcaacactggtgcgtaccttcatccccggtgtgtttttgggcttagctagtaaacctcacacatgcctcagccacgttgattcgacaatgtcgacttcgccatcgaccttctccattgactgccttgactgcatcaccatctttgtctatggtgcttccttctattcgccaccatcaccacaacacatcaagcacacgacttgtgtggctcctacttcttagtgacctcgatagctttcatcgaccacaactatcctttgcaagattatcgaccacaactgttcatccttgtactaggctacctcaacatcgacacagagaactatcgtctacatcagcttctcgtcggtttcttctccaagtcgttgcatctgcactccgacaacgtcacgactatgggggattttagtccatatagacttctatagtctaaacgtctaccatgctccctctatgattgtggagtgttagagtatatttgatagtctagatattgtgtctcgaattgccacatgtatctatgggttgccttgtctcttatgtcatgtactctatataaatcgtataagggctcaatgtaatacataaatctttaatagcaatctcccttcttcataagcatctttagtcaccaaaaaggtcgttactcttttaatgagagtgtgcagtgactaaatataataataaaatctcaaatataaactacaagataaagaaattaaaaaataatatatttgagatacaatacttcaataaacgagacattttagcatgacttatgtagcatcagcatcatcacatcttgtagttttcttctacaatcccgtgattgcaacaaattcctgtgtttgaatggataagtgacgcaccacgccttttgcctagtttcatgtaggtcatagaatgtggaggttatagaggatggcggggcgccatgcaaatagaatgtctatgactgttttcaaaccaatatatcagacaaaaagtacatatcaatcacaattaaattagacatataatcacatatatattaaattcatataattatgaatcacaaatacataacaattaacaattgttggttagtagcaaaaaatatagcaggcgttaactttagttatattaaaaaaagattaaattacagaaaatatacgtatcttcaaccataacaaatggcctagccaaactaaaatataaacttttaaactattaatttcaaattaaaataagagttagataaaaatggtttaaaaatatgtcactctaaggacttgtcaagttataattttcgaatgctaccttatagttatggaatttagacccactactactattgcggcggcacgagtgaaggggaggggtgacgagaatgtgaggggagaggctgggggcggcagggtcgcagggtatgatggatgattcaaataatattgtccattggatttgggtaaaaaagacgggtttatatagtgatctaaaccatgatatgttaagtctaggtgcaactgtttggtggatttagcgaaacttacgggtgtgggggtgatttggttggattggttttgcaaagtttaaactagtcaattatatagtggtatagacatagataccaaacatgagagataagaataatatttaaaggctcttgctaactttgtggcggtggtcccctcctctggtgacaaatttggagggtatgtggcaaggttttatgacatggtggccggaccgagtgtccctatggttggatcttgagtaaaatgtatcagcgattttcaaatttgacacaatgtgtcacttgggtatcagaacctagaaaactagaaaaataggtcgaaaagttggtcgactcatgcaaatttatctaaaatcgattttgctcaaactagatgccaacgtggcatgctactttagagctcactaatgaaagtttggggacacaagttcagagacttaagtgacataacatgccaaatttggggacttgtgtatcagcaggcacatgatgcgtgtgggaaggatttgatgtagcacgtcacatcgccatatggtttgagcaaatccagatctgaatgattttgcactagggtctatttttctagtttcctgagttcagggacctaaataacacatcgtatcaagttcgagaaccgatgatacactttgcttctggatctttgcaagcttggtgttgatgcatcccttcccaatggacaacaatggttagtcattgttgtacgaggtgacggggagggccatcaaccccacttcactctaggtcgcggaaaggctatttgacaacaaaatctagcatctcttctgggatacatcgacaccatgttgcagggcggcaccatcacctcactacttagcacctataggcttagggtgtatttgttttcgcagctcacatatgcgtgattgacatgagcagcgatcgagaaaatcatgattttacttgtgatacgggattttctgttctcagtacaaatcccgtggttgagtcgaagccgcggcgacgagaatcatctgcgctgcaggctgtttagcgagatttttctggtttctcgcgtcactccatcaaaacacggcttttaaccgaaaccacctagtctacttagcaatatctttccactaatggtggcaattttgtgaagtgtgaacataattcgatgggtccggcaaatttagttttataaaaaatagcttagaagaacatctttccaagctctaaacaataatctcctcaactttgaatgtttcttctaaaaattccacatgccacgcattttacttgtttaaacttaaattttctatggttacttgttttgtgcttctaaggcaagaaaaacataaagaaatggaagtcaaaattcctataaacaacaatatcctaaaaatagagaaagacaaagtagagaagaggaacaatatctagaagaatatatatagaaggtcaaagtgagctatgttagcgtgttgtcttatgccttaattatgttgctcttgctattcatcaattttacttctccaaagaagttgtagagattcatgatgtgtgctatgcgctgatatacaaagatgtgctatttttcacttatgatataggtagcacttaaccaccttctatcattaaccttttgtagaaataaatgttcttcacttagataactctaggacttccactcattcaagggactaagcaccaaattaacttctcgagcgagcttgatttgccaatcctgatgagactaaagagattcaacaccaagtccaagatattttagaccacaaatatgtatataacagtcttagttcttgtgttgttttagttacttaggttcaaaaatagggtgttttagttattttggtccaaaaaatatggcataactaatggggtgtttggtttgaggaatgagctagtccatcatcttctcactcctcactatttttgtttggtttgtggaatagaatgagttaatccatcaccatctcttttctcatagttacatagttagttagtactaatatgaggaatgaagtcatcccaccaaatctgaggaatgaacccatgatggaccaccttaatttagatggtttgattcctcaaaccaaacactctataagtgcttccatatgagtgattagtaatatcttttgggttaactagtgcacaaatcacttctatgagattaatggatgaggttttatgttttttatttgtaaatttgtggtagtctattttgtgatatattgatatacactaaatctttaacaaaacattttactcatctatgtttttaatgttttatatgctacacatctatttggtaaccttgtgaagtacatttttatatcgaataagtatctttttttggctatgttgtgacctcacacggaagtaaagtagatgaagataacatgtgtgctataaagagtcggtcaacgcccacaaccgtgataaaagtgtgaagcttctatggacttatatgattttattattactttgtgaaggattaaagcactattatagccttgctaaatgaattgacaaaaaggacatcatgtttcactgagcaaaagaacaagaagtgtcctttgctctttgaaagaacatgcttaccaacacattattacaacaacttcctaattttgtaggacttttgagcatcaatgtgatgctaatggagtttgcattagtggtgtattgatgcaaggtaagctcgttgcttactttagtgagaaattaaatagacattcttaattattctatgtatggcgaagaactgtatgcagaatttcctaattactctaataactaagtcaaaataaactgaaacgtacacatgcctatgtgggttgaatttattgaatcattttcttatgtgatcaaacataagaaagaaaaagataatattattgttgatgctttgtccagataatatactatgttgttccaatttgattgttctataattaggcttaaaatattaaagtacaatatgttaataataatgaacttaaggatgtgacaaaaaatatatataaagagatgtatatagaacaaatttgtgatgcatggtgagtttttgtttagagctaaccgataatgcattctacttgtttatgttcgtcttttgttgttgcaagaggcacatggaggtggattgatggaacattttaatgtcaagaagataaagtgttggtcacatacttcttctatccaaggatgaggcaagatgtagagaggttcgtagcttgatacacgacatgtcaaatagctaaatcgcggttgaacccatatggtttgtatatgttggttcatttcttctatttcttgggtggatatatatatatgaactttgttttggaattgcaaagaactaataggggggatagtatttttgtggtggttgatcatttatctgaagtgataacttttattccctatcataaaagcgacgatgacattcacattgctaacaaagtctttcaagaaatcattcacttgtagaggtagggacttttaaatatatgctcctagcttagcgtcatagatcagttttgcacctctctagtattaaaaacgcctcatccattactactagaggggtagaactgagcagtggtgctaaagtaggggaataggattaaaagtacctctaaagaagaatctatgtctagggttagtccatctttaacgttgcagatttaaagccatatttagatgaagaattgagtcaagaatgactccatttcaattgaggaaggatgataaggacatcacaccttcagatgcgcctactaatcatccgatcgttatataaggtccaatgacttgagcacaaatgtgatgattaaattttcaaaggtaagtgatcctttcgataattttgggaatagattatctaattatgttatcgtgcttgataacattagagagggtcatgaagtaattgaaggtgtggaggtgaagatcaaaaagaacgcccaagaccaattaaaggcattagtccaactcgagtttgagtctgagtggacctttaggaccatcctgtagtaaaacagatgtgcgagacatacacgacatacataatccattttttatgatcaatatatgaatagaaatatattttcataagctaactaataattttgatctaaggtctaatttccaccggaattaatgaaattatcgaaataagtcagcattcaaaatatgttagtgttgtgtcacaattttttggttggctaggcatgtgttgtcttagagcccattaggggacacgttcaaggggtgtgatagccttaggatatataattagtagccactactcatgttaggactcaagttttgcttttaaaaattatctttgaataattgtcattatagggttataaaaccccacttttgtgatcttagtcatacatatattgttagcatttttgttgagctgtgtactttcaagttctttcttgtgttttcgattcactgacatggattagccttcttaacgagatcaaccggattagtgacacggttgatcaccataagagtcgtagtaccacgttccaccaaaacagaagttatcatgaacccgatggaacattaaggactccattatcataacaaatagcgtattaggtaaccttgtgaataattctgattccttgtttggggactaggtagaaaattagtaaaaacatgatgatttggtgatgtttggatgtggggttgtactggttgtactttgggccacttggaaaactaggaatgatatgtgctttagtagtaaaatgattatcgatccttctaatgtgatatttttgtgctatttctagatggattcaagtttattgtgtgctaaaatacccgctgttgggggtcttcttctctgccgaacattttttattacttcttttggatgctgaacaatatagaattatgttttgagttgaataaattagaattttgatctaaaattttgtgataattggtctaattttcttagttgaaagatgaagccgaatatttattcctttatctaaaaaatctaataataacttaaaatgtttaataataggtagacatggatatcggaattctaataactctcgtcgtccaagtatatgagatgcaaccacttttttattctagtctcataatataaggtgttgccttggagcctgaaagcatctaggcccctggttggttttagtgattaatgacaacgtaatattatatgtgactagcgtgtgttttgcagagcaaatggtaagttaggtcgcattacagaaagttgtactacaatggtgaaaacaatccctgagatgagaacttgaagcgacaactgaaacgacgaatcaaaagatgaaagtcttcatattccgagtgttgaaggagttgtagacactcggtatagaattaggtcttctattttgttttagccgtactataaagagaggttgtggatgagtagtttgaccaagagaattctagtgtagtgttggtgcatattcacacttacatctagtgttaggtgtcactctataacacactcacgagttagaacaaaaacggttttgaaaaacaaaaggaaaaacgaagttagggtttctgtcttaggggcaccagactgtccgatgtgcaccagactgtccggtgcaccccctgacagtggtgccagtcagccccgggggcagtgattctgtccccgagaaaatccgagagcaacgagtggagaaaaagaattttagccgccacaccggactgtccggtgtgcaccggacaggtactgttcactgtccgttgtgccatcagcccaactgctagctgtcagaactagccgttggagacgaccgttggcgcaccggtggcacacggactgtccggtgcgcccatacgcagaacagccaggtaacgactagtttggtgagtggggctatttataccccgtccacctaccttattgagtgtcttgctgcccacattgatgaccacatattgctacaacattgcaagcacaacaaagactagtgaggtgactagaaaatcttaattccacgtcaggacctcattagtgcaagtgagagccacctagagcacacaccacatgcattaagcttctcttggtaaagtgaaagtctattgcttgttactcttggtgatcggtatcacctagatggcttggtagcgtttggagcacggtgatcacctcggatgatttgttggtgacccgactcaaagattgtaagcggtcgtgagggatccaccgcgccggagtggcaaaggatcacctcatagtgagtacttagttcttgaccaagggggagcgatacccttgcgcgggtgctccaacgatgactaggaaagagtgccgactcttcgatacctcgacaaaatattggaggagtcttctcaaccttgttttactttccgcatttaattcaagcattttactttattcaattgtttagcaagtagttgaagtgatgtcttaggattgttatctttctagtagtattctcttattgctagtagttaggtgaagttgggctctagcttagggtttaaatatttgctcagggtttaattgttgttgaatttttagaaaaaagcccaattcaccccctcttgggcatcatgattctttcagagccatactaagagcatctctaaccgctctccaacaaataactattaaaaacagattttaagggccatactaagagcatctctaaccgctctccaacaaataactattaaaaactagtttttaggagtatctcaaaaattattagggtagattttaaccatttctccaaccattctcataactaggccaagccactcttggacccacattgatatgtttcacttgtgtattttcttcttccacgactttgacatctgtccaacgaccaaacatataccaccatcaaaggttgttggttgtacgtgggcggacgtggccggtgagagactaccaacggcgagaccgagcgatagcagagatctgatcgacaacggaggttcaatagcgggttgtgagatggtagaagcaggatagtgtgggcgcgttgccagcaacggacgacgaggttgcgcagatggggaggatgcgctcacggaggtagacgacgaggttgcgtgggtggtagcggattgtgaggttgtgtgggcgtggcacgtttgtgttttctaggaagcccaaaaagcccccgtttgtagctacaaatgagagttttaatgactataaagaagttggagcactttagagaaaccgtcgaagacaagttttttgtgtttt

SEQ ID NO: 33860 - DNA, 14817 bp, Zea Mays
gtgtcccttcgtggggtgcgcccgccacctgccgatgcgacgtgagaggagccaagcgcgcagtgggccctggacacgagagcggtgcggtgtcgtgctggcggcggcggcggcggcggcgaaggataaatagggccgtagggccatcgttttgcattgccgtcgcgtggccgtgggttttcatcgacgaacgacgacgactctgccgcgcgcgtttaggcgcgtcgccgccggccacccggccggccacttcgacgcggctgtggtggtttaaaattctccggctcgccgcccacggcctcgctgcacgtagttgcagaaaaccagacatgttcaggcaagaccagtgggtatgcaaaaacaacagcaaagtggctcggcatgtcgacagccagctgctacttctacttctacatataaaccacgcgctggcatgaactccactccagcatggatagacgacatcatcgcacaaatcacataccaggtcaaggcaccacgtttcacaaacctagtgaacacccaagaactattatgcaataccatcattttgctcgatagattttcctagcccagttgtttcatctgagcaagtgtctgtaggaactaaaacacagtagtatgctgtatatactgtcaagcatgaaacgcaaccagatcagctgcaggatttgcagcaccaagctctggccattaggtaggctgcatatcacaacacacaaagggaacatcaaactacatacactagctccgtcccctccagggacactgcaggttggcaggcccaaagctagcacagggtctcgcaacccacaaggtcataatcagtacaagcatccatcggcaaggggaagcaagagcaatcccaggtaggtggacgctggacagatccgtgctcacgccgttccttgctccggacttttctggccgcttgtactagctccgctgttttgtttcgccaacatctgaatctgatcgccataccatagtaggaattagcatagcactcaactgcatttggcgccccgtttcaatctcacgggataaactttagcttcctgctaaactttaactatatgaattaaagtgctaaagtttagtttcaattaccaccattagctctcctgtttagattacaaatggctaaaagtagctaaaaaaagctgctaaagtttatctcgcgagattgaaacagggcctaaatagcaatctagccgactggtcagtgatcactgaaagcttattcagaaaataaacaggcctgacatttctgcgctgaggttacattgctcacagttgttcagtagcagcttgtccaacagtacttgcccgttccagcagtacttccaggcaaagtagcaaatttacgcagagcgcaaaggtagaagctagcaacatccaaaggaaataacaaaacactagcagcatccaaagaaatttggtattctgcactccctattgtatttggttgtcattaaccaaacaacacagtttggagtttggactgaactgaacttgaataaggcgcaaccaatcaaggtcctgcttgtgggctttaccgttcagatttcaagaaaaaaaaatataccgtaccttcctggatctcgtatccttcaaagcatttctcagaagattttccagcttctccagctcatctacatctgattcgtcagcattgctctggggagacctgccggtttgaagaaattgtgattatttatcaaaaatgggaaaccagagtgggtggaaatcctgagttctgggtgtgtaccaggtcgcaatcttgctcagcatcaactgcaaatctgaagaagcttcatccttgttctgtaccaaaaacaccctaaaaattgctgatagcggttatatgtatcctctatgctgaaaaaggagaaaaaaaatgaatatgatattagctccttgcataatgtactcttggacaatcaacatctatatattcacctcacgtggaacaaaaatgcaggcagttttattggaggtgagtatattattatgaattacatcctgaatcttacagtcaaatacagtttattagtatgatgtcctttttcctcatgatattgagttcatgccctggtccatcacattccatactactattctactctacttagttctcataaaggtttcggaccactgtttctctagatgttttaagagttttcgttgctatattcttgatcatataaaaacatcagaactgagccatgatacaacctatctgtcacatctaactttacatggtctttgatgcatatcttggaccaccaatatcatctagaatatattttcaagattttataactattttattatacaaatatgcaaatatatcatgtatccaaacctaaagatttaaaagttattgatcttcgtagttttcaaggtttgaccaaattttgtcctaaaatgacatgttgtatcaaagaggagctactagtcatatacgcaagtggataaccaatgaaatgcttgtatcaagcaattacacaagtaaatgtaaatacctaggacattttttgtttacgaactccttatttatattcttttaccttttcttcccttgaatcataatgcggataaatctggtatgtgggtttgttatcataatttcaaaaataaagggtgtgtatttagaagtagatcactgggaaaaaaggttcggatatttatatgaaggtctaggatcaaaccaaaaaggcaataaaaatagactttctatggacaaggattttaaaggaaaaacatggacttccgatgggtgatacagattagaaaaaatatgcattcatgggcttcaaatctattcagttgaagaatgaatgaaagataatgtatacctttgagagttctcgatatgatgtcatctagattccagatgtccaagttaactgtttgaataatagacttttctctaccatatatgccctatcatatttattaatgtaatgtgatgttccttgtatctgactgtagagtttggaccactacataccgagacaaccatctaggctgtctaggttctgaagttatgattaggtactagagaagtcaaagtgactagctctatatgctccatgtggaaaagccaagaagtttcagggcgtgtagggtgggttctaagaaggcgcagtcgttagctaaatgtttggttgggctttttgcactctttctaaatatttgtaattaatttccccatgtttcccgagttggatttagctttctaagttttcttccacacactcccaacaagaagtttccatcttcaaatgttctgaatctactagacacagtatgggcacgcctttttttcatgacaggttttgtgttgggggtgctagagtctagttgatgcacatggccctgcccaatagaagttggttttcttccattgatatataagtgaagttgatagccaagtttttcttgtctcctctttttctttcccttccttgaaggctaaatatgctcagttgagaatgaaagctgagaggacatcgaacaaatgaaataagtggagtatacattcaaaacttgagagcgacccccaagtgataggtttttaccttttagggcaacaaaagatatgctctaggaaaaaatgataagagaagagagtctagtaagcttttaggcatcatgcccatgcactatagaaattgaattgtttaaaccataatattttggacaatagaaacttgtaataaattgtgacaaagaatgtgaatttatgatttatctccaaccaagttatgagcacggttgatcaactaacataatattatcgaaagcactttcgatattatatatatcattgtataaatactcaactacatgtcaatttcataattagttgttatttttgtttgtgacttattagcgtgtcataattttcccattgttatatgtttatgttatttttcttatattagttgcacagttataggttctctctcatatgttaacttctcaacaaatattttagatattttatatttagttgttagaagttgttaaaagtatatttggtagtctagatattgtgtctcgtctactgtcatatatatccatgatttgccttgtctcttactcatgtgctctatataaactgcctaagggcttaatgcaatacatcaatccttgatggcaaacccccctaacatggtataacgagtttaggctatgacttaggcttccccttctgctgtcgtcgtcgcgctgcctcgaggaaattgatctccatcaagagttgcgctctcgtagttaggatgcatgactaatccttctgatttgtcgcgttcatcgtcgttattgtattgtcaagcttcaacaaatcagaggctcgctggtttctctacatgtcatggtggttgttgggctctcctaccggttggatcatgcctttgtcctttgtgcatgcaatcatggtgatggttgtggggcagacgacatccacgtgttgtcgtggtgacgattctggagaggccgtgtgagcccatgggctttgtcacccttgacccctagggtgctaagagacgaattcaagagcatattgcctaccatgtatttcctatgaaagttggctaggagatacctaagccaaaagatgaggacaacacgaaggagattgaagctcgagagatgattcagttaccttataaattcaatcccttcagcatcttcataaagccgagcaatgagtggctcattatggtggagacagttgctaacaaagttttatgcaactatattgtgaaagagatcatctacttagtgcgatagtgagtggcaataaagagaatacataatcgtgtgatcaaagcatatgacttagaatatctagactaccccaacctcattgtcgatcatgatgctagattgcagaggaaatgcaaagtaagaattatagataggggttgagtgattagtgaaaaggaggctagagggggccctccgacaaagtccttgaagccaaaggcaaaatacaagggtagtgagattgtggcaaaggaaaagttgctagcacccaagcgctttgaaaggaaacaccatgaaggtgagaagtagaaggtctaggtcgaggcctctaaggttgcctcagagaagcctgctggcattgcaaagacccctaccactgaagaacatgtacgagctgttgttgaagagtcttgttctgaacgctcagaaaattgaggtcgagaaaaagcccgcctaggaggatacatcaggcgacaagctcaaagaggcattgcctagcctcccctgcatagtgaatccaatggatgcgatctttggagatttatttgaggagaaaagcaacaaagccattaagacccctgccaaagaaaaagaggatgttggttgtgctaggctatgtgcctctccctgttagccaagtcgagcctttgtgatcgtggtttatctctttctccctctttcagtcttctgatcgaggataaggagggtgagttgagttaggagaatggactatttgtgggtacttggtgatgtaacaaaatttgttgttgttgtgggtccctttttcttcctaattggtcgggttttgcgccatcgtcgcctattttcatccttgtattgcccctacatcaccgtcgactacgtcgttgtgcgcctctctcacatggtatacctggaccgttcatgctcttcgtcatcttctttaagcaccactgttgcaacactctagcaccaccatgactccttgcgcaatgcagatctcaccactgccactctgggtccctagatgtgtcaaccatctacttctttgacttcgtccatcacaatctcgttgccagtgtcgtcctctgtcctcgtctacttcatccacaccgacaaccattggtgcattgacacatgcttcctcgttgttcttctacacattgcaactatcgcggaggccttctctgctagtcactttagacactgacgtatggttggggtcctctacctagtatgtcttttgctagcaacactggtgcgtaccttcatccccggtgtgtttttgggcttagctagtaaacctcacacatgcctcagccacgttgattcgacaatgtcgacttcgccatcgaccttctccattgactgccttgactgcatcaccatctttgtctatggtgcttccttctattcgccaccatcaccacaacacatcaagcacacgacttgtgtggctcctacttcttagtgacctcgatagctttcatcgaccacaactatcctttgcaagattatcgaccacaactgttcatccttgtactaggctacctcaacatcgacacagagaactatcgtctacatcagcttctcgtcggtttcttctccaagtcgttgcatctgcactccgacaacgtcacgactatgggggattttagtccatatagacttctatagtctaaacgtctaccatgctccctctatgattgtggagtgttagagtatatttgatagtctagatattgtgtctcgaattgccacatgtatctatgggttgccttgtctcttatgtcatgtactctatataaatcgtataagggctcaatgtaatacataaatctttaatagcaatctcccttcttcataagcatctttagtcaccaaaaaggtcgttactcttttaatgagagtgtgcagtgactaaatataataataaaatctcaaatataaactacaagataaagaaattaaaaaataatatatttgagatacaatacttcaataaacgagacattttagcatgacttatgtagcatcagcatcatcacatcttgtagttttcttctacaatcccgtgattgcaacaaattcctgtgtttgaatggataagtgacgcaccacgccttttgcctagtttcatgtaggtcatagaatgtggaggttatagaggatggcggggcgccatgcaaatagaatgtctatgactgttttcaaaccaatatatcagacaaaaagtacatatcaatcacaattaaattagacatataatcacatatatattaaattcatataattatgaatcacaaatacataacaattaacaattgttggttagtagcaaaaaatatagcaggcgttaactttagttatattaaaaaaagattaaattacagaaaatatacgtatcttcaaccataacaaatggcctagccaaactaaaatataaacttttaaactattaatttcaaattaaaataagagttagataaaaatggtttaaaaatatgtcactctaaggacttgtcaagttataattttcgaatgctaccttatagttatggaatttagacccactactactattgcggcggcacgagtgaaggggaggggtgacgagaatgtgaggggagaggctgggggcggcagggtcgcagggtatgatggatgattcaaataatattgtccattggatttgggtaaaaaagacgggtttatatagtgatctaaaccatgatatgttaagtctaggtgcaactgtttggtggatttagcgaaacttacgggtgtgggggtgatttggttggattggttttgcaaagtttaaactagtcaattatatagtggtatagacatagataccaaacatgagagataagaataatatttaaaggctcttgctaactttgtggcggtggtcccctcctctggtgacaaatttggagggtatgtggcaaggttttatgacatggtggccggaccgagtgtccctatggttggatcttgagtaaaatgtatcagcgattttcaaatttgacacaatgtgtcacttgggtatcagaacctagaaaactagaaaaataggtcgaaaagttggtcgactcatgcaaatttatctaaaatcgattttgctcaaactagatgccaacgtggcatgctactttagagctcactaatgaaagtttggggacacaagttcagagacttaagtgacataacatgccaaatttggggacttgtgtatcagcaggcacatgatgcgtgtgggaaggatttgatgtagcacgtcacatcgccatatggtttgagcaaatccagatctgaatgattttgcactagggtctatttttctagtttcctgagttcagggacctaaataacacatcgtatcaagttcgagaaccgatgatacactttgcttctggatctttgcaagcttggtgttgatgcatcccttcccaatggacaacaatggttagtcattgttgtacgaggtgacggggagggccatcaaccccacttcactctaggtcgcggaaaggctatttgacaacaaaatctagcatctcttctgggatacatcgacaccatgttgcagggcggcaccatcacctcactacttagcacctataggcttagggtgtatttgttttcgcagctcacatatgcgtgattgacatgagcagcgatcgagaaaatcatgattttacttgtgatacgggattttctgttctcagtacaaatcccgtggttgagtcgaagccgcggcgacgagaatcatctgcgctgcaggctgtttagcgagatttttctggtttctcgcgtcactccatcaaaacacggcttttaaccgaaaccacctagtctacttagcaatatctttccactaatggtggcaattttgtgaagtgtgaacataattcgatgggtccggcaaatttagttttataaaaaatagcttagaagaacatctttccaagctctaaacaataatctcctcaactttgaatgtttcttctaaaaattccacatgccacgcattttacttgtttaaacttaaattttctatggttacttgttttgtgcttctaaggcaagaaaaacataaagaaatggaagtcaaaattcctataaacaacaatatcctaaaaatagagaaagacaaagtagagaagaggaacaatatctagaagaatatatatagaaggtcaaagtgagctatgttagcgtgttgtcttatgccttaattatgttgctcttgctattcatcaattttacttctccaaagaagttgtagagattcatgatgtgtgctatgcgctgatatacaaagatgtgctatttttcacttatgatataggtagcacttaaccaccttctatcattaaccttttgtagaaataaatgttcttcacttagataactctaggacttccactcattcaagggactaagcaccaaattaacttctcgagcgagcttgatttgccaatcctgatgagactaaagagattcaacaccaagtccaagatattttagaccacaaatatgtatataacagtcttagttcttgtgttgttttagttacttaggttcaaaaatagggtgttttagttattttggtccaaaaaatatggcataactaatggggtgtttggtttgaggaatgagctagtccatcatcttctcactcctcactatttttgtttggtttgtggaatagaatgagttaatccatcaccatctcttttctcatagttacatagttagttagtactaatatgaggaatgaagtcatcccaccaaatctgaggaatgaacccatgatggaccaccttaatttagatggtttgattcctcaaaccaaacactctataagtgcttccatatgagtgattagtaatatcttttgggttaactagtgcacaaatcacttctatgagattaatggatgaggttttatgttttttatttgtaaatttgtggtagtctattttgtgatatattgatatacactaaatctttaacaaaacattttactcatctatgtttttaatgttttatatgctacacatctatttggtaaccttgtgaagtacatttttatatcgaataagtatctttttttggctatgttgtgacctcacacggaagtaaagtagatgaagataacatgtgtgctataaagagtcggtcaacgcccacaaccgtgataaaagtgtgaagcttctatggacttatatgattttattattactttgtgaaggattaaagcactattatagccttgctaaatgaattgacaaaaaggacatcatgtttcactgagcaaaagaacaagaagtgtcctttgctctttgaaagaacatgcttaccaacacattattacaacaacttcctaattttgtaggacttttgagcatcaatgtgatgctaatggagtttgcattagtggtgtattgatgcaaggtaagctcgttgcttactttagtgagaaattaaatagacattcttaattattctatgtatggcgaagaactgtatgcagaatttcctaattactctaataactaagtcaaaataaactgaaacgtacacatgcctatgtgggttgaatttattgaatcattttcttatgtgatcaaacataagaaagaaaaagataatattattgttgatgctttgtccagataatatactatgttgttccaatttgattgttctataattaggcttaaaatattaaagtacaatatgttaataataatgaacttaaggatgtgacaaaaaatatatataaagagatgtatatagaacaaatttgtgatgcatggtgagtttttgtttagagctaaccgataatgcattctacttgtttatgttcgtcttttgttgttgcaagaggcacatggaggtggattgatggaacattttaatgtcaagaagataaagtgttggtcacatacttcttctatccaaggatgaggcaagatgtagagaggttcgtagcttgatacacgacatgtcaaatagctaaatcgcggttgaacccatatggtttgtatatgttggttcatttcttctatttcttgggtggatatatatatatgaactttgttttggaattgcaaagaactaataggggggatagtatttttgtggtggttgatcatttatctgaagtgataacttttattccctatcataaaagcgacgatgacattcacattgctaacaaagtctttcaagaaatcattcacttgtagaggtagggacttttaaatatatgctcctagcttagcgtcatagatcagttttgcacctctctagtattaaaaacgcctcatccattactactagaggggtagaactgagcagtggtgctaaagtaggggaataggattaaaagtacctctaaagaagaatctatgtctagggttagtccatctttaacgttgcagatttaaagccatatttagatgaagaattgagtcaagaatgactccatttcaattgaggaaggatgataaggacatcacaccttcagatgcgcctactaatcatccgatcgttatataaggtccaatgacttgagcacaaatgtgatgattaaattttcaaaggtaagtgatcctttcgataattttgggaatagattatctaattatgttatcgtgcttgataacattagagagggtcatgaagtaattgaaggtgtggaggtgaagatcaaaaagaacgcccaagaccaattaaaggcattagtccaactcgagtttgagtctgagtggacctttaggaccatcctgtagtaaaacagatgtgcgagacatacacgacatacataatccattttttatgatcaatatatgaatagaaatatattttcataagctaactaataattttgatctaaggtctaatttccaccggaattaatgaaattatcgaaataagtcagcattcaaaatatgttagtgttgtgtcacaattttttggttggctaggcatgtgttgtcttagagcccattaggggacacgttcaaggggtgtgatagccttaggatatataattagtagccactactcatgttaggactcaagttttgcttttaaaaattatctttgaataattgtcattatagggttataaaaccccacttttgtgatcttagtcatacatatattgttagcatttttgttgagctgtgtactttcaagttctttcttgtgttttcgattcactgacatggattagccttcttaacgagatcaaccggattagtgacacggttgatcaccataagagtcgtagtaccacgttccaccaaaacagaagttatcatgaacccgatggaacattaaggactccattatcataacaaatagcgtattaggtaaccttgtgaataattctgattccttgtttggggactaggtagaaaattagtaaaaacatgatgatttggtgatgtttggatgtggggttgtactggttgtactttgggccacttggaaaactaggaatgatatgtgctttagtagtaaaatgattatcgatccttctaatgtgatatttttgtgctatttctagatggattcaagtttattgtgtgctaaaatacccgctgttgggggtcttcttctctgccgaacattttttattacttcttttggatgctgaacaatatagaattatgttttgagttgaataaattagaattttgatctaaaattttgtgataattggtctaattttcttagttgaaagatgaagccgaatatttattcctttatctaaaaaatctaataataacttaaaatgtttaataataggtagacatggatatcggaattctaataactctcgtcgtccaagtatatgagatgcaaccacttttttattctagtctcataatataaggtgttgccttggagcctgaaagcatctaggcccctggttggttttagtgattaatgacaacgtaatattatatgtgactagcgtgtgttttgcagagcaaatggtaagttaggtcgcattacagaaagttgtactacaatggtgaaaacaatccctgagatgagaacttgaagcgacaactgaaacgacgaatcaaaagatgaaagtcttcatattccgagtgttgaaggagttgtagacactcggtatagaattaggtcttctattttgttttagccgtactataaagagaggttgtggatgagtagtttgaccaagagaattctagtgtagtgttggtgcatattcacacttacatctagtgttaggtgtcactctataacacactcacgagttagaacaaaaacggttttgaaaaacaaaaggaaaaacgaagttagggtttctgtcttaggggcaccagactgtccgatgtgcaccagactgtccggtgcaccccctgacagtggtgccagtcagccccgggggcagtgattctgtccccgagaaaatccgagagcaacgagtggagaaaaagaattttagccgccacaccggactgtccggtgtgcaccggacaggtactgttcactgtccgttgtgccatcagcccaactgctagctgtcagaactagccgttggagacgaccgttggcgcaccggtggcacacggactgtccggtgcgcccatacgcagaacagccaggtaacgactagtttggtgagtggggctatttataccccgtccacctaccttattgagtgtcttgctgcccacattgatgaccacatattgctacaacattgcaagcacaacaaagactagtgaggtgactagaaaatcttaattccacgtcaggacctcattagtgcaagtgagagccacctagagcacacaccacatgcattaagcttctcttggtaaagtgaaagtctattgcttgttactcttggtgatcggtatcacctagatggcttggtagcgtttggagcacggtgatcacctcggatgatttgttggtgacccgactcaaagattgtaagcggtcgtgagggatccaccgcgccggagtggcaaaggatcacctcatagtgagtacttagttcttgaccaagggggagcgatacccttgcgcgggtgctccaacgatgactaggaaagagtgccgactcttcgatacctcgacaaaatattggaggagtcttctcaaccttgttttactttccgcatttaattcaagcattttactttattcaattgtttagcaagtagttgaagtgatgtcttaggattgttatctttctagtagtattctcttattgctagtagttaggtgaagttgggctctagcttagggtttaaatatttgctcagggtttaattgttgttgaatttttagaaaaaagcccaattcaccccctcttgggcatcatgattctttcagagccatactaagagcatctctaaccgctctccaacaaataactattaaaaacagattttaagggccatactaagagcatctctaaccgctctccaacaaataactattaaaaactagtttttaggagtatctcaaaaattattagggtagattttaaccatttctccaaccattctcataactaggccaagccactcttggacccacattgatatgtttcacttgtgtattttcttcttccacgactttgacatctgtccaacgaccaaacatataccaccatcaaaggttgttggttgtacgtgggcggacgtggccggtgagagactaccaacggcgagaccgagcgatagcagagatctgatcgacaacggaggttcaatagcgggttgtgagatggtagaagcaggatagtgtgggcgcgttgccagcaacggacgacgaggttgcgcagatggggaggatgcgctcacggaggtagacgacgaggttgcgtgggtggtagcggattgtgaggttgtgtgggcgtggcacgtttgtgttttctaggaagcccaaaaagcccccgtttgtagctacaaatgagagttttaatgactataaagaagttggagcactttagagaaaccgtcgaagacaagttttttgtgtttt

SEQ ID NO: 33861 - DNA, 6198 bp, Zea Mays
gtgtcccttcgtggggtgcgcccgccacctgccgatgcgacgtgagaggagccaagcgcgcagtgggccctggacacgagagcggtgcggtgtcgtgctggcggcggcggcggcggcggcgaaggataaatagggccgtagggccatcgttttgcattgccgtcgcgtggccgtgggttttcatcgacgaacgacgacgactctgccgcgcgcgtttaggcgcgtcgccgccggccacccggccggccacttcgacgcggctgtggtggtttaaaattctccggctcgccgcccacggcctcgctgcacgtagttgcagcttttactgcttcattcagttatggtcgtgtacatcttcagaaaaccagacatgttcaggcaagaccagtgggtatgcaaaaacaacagcaaagtggctcggcatgtcgacagccagctgctacttctacttctacatataaaccacgcgctggcatgaactccactccagcatggatagacgacatcatcgcacaaatcacataccaggtcaaggcaccacgtttcacaaacctagtgaacacccaagaactattatgcaataccatcattttgctcgatagattttcctagcccagttgtttcatctgagcaagtgtctgtaggaactaaaacacagtagtatgctgtatatactgtcaagcatgaaacgcaaccagatcagctgcaggatttgcagcaccaagctctggccattaggtaggctgcatatcacaacacacaaagggaacatcaaactacatacactagctccgtcccctccagggacactgcaggttggcaggcccaaagctagcacagggtctcgcaacccacaaggtcataatcagtacaagcatccatcggcaaggggaagcaagagcaatcccaggtaggtggacgctggacagatccgtgctcacgccgttccttgctccggacttttctggccgcttgtactagctccgctgttttgtttcgccaacatctgaatctgatcgccataccatagtaggaattagcatagcactcaactgcatttggcgccccgtttcaatctcacgggataaactttagcttcctgctaaactttaactatatgaattaaagtgctaaagtttagtttcaattaccaccattagctctcctgtttagattacaaatggctaaaagtagctaaaaaaagctgctaaagtttatctcgcgagattgaaacagggcctaaatagcaatctagccgactggtcagtgatcactgaaagcttattcagaaaataaacaggcctgacatttctgcgctgaggttacattgctcacagttgttcagtagcagcttgtccaacagtacttgcccgttccagcagtacttccaggcaaagtagcaaatttacgcagagcgcaaaggtagaagctagcaacatccaaaggaaataacaaaacactagcagcatccaaagaaatttggtattctgcactccctattgtatttggttgtcattaaccaaacaacacagtttggagtttggactgaactgaacttgaataaggcgcaaccaatcaaggtcctgcttgtgggctttaccgttcagatttcaagaaaaaaaaatataccgtaccttcctggatctcgtatccttcaaagcatttctcagaagattttccagcttctccagctcatctacatctgattcgtcagcattgctctggggagacctgccggtttgaagaaattgtgattatttatcaaaaatgggaaaccagagtgggtggaaatcctgagttctgggtgtgtaccaggtcgcaatcttgctcagcatcaactgcaaatctgaagaagcttcatccttgttctgtaccaaaaacaccctaaaaattgctgatagcggttatatgtatcctctatgctgaaaaaggagaaaaaaaatgaatatgatattagctccttgcataatgtactcttggacaatcaacatctatatattcacctcacgtggaacaaaaatgcaggcagttttattggaggcacatggaggtggattgatggaacattttaatgtcaagaagataaagtgttggtcacatacttcttctatccaaggatgaggcaagatgtagagaggttcgtagcttgatacacgacatgtcaaatagctaaatcgcggttgaacccatatggtttgtatatgttggttcatttcttctatttcttgggtggatatatatatatgaactttgttttggaattgcaaagaactaataggggggatagtatttttgtggtggttgatcatttatctgaagtgataacttttattccctatcataaaagcgacgatgacattcacattgctaacaaagtctttcaagaaatcattcacttgtagaggtagggacttttaaatatatgctcctagcttagcgtcatagatcagttttgcacctctctagtattaaaaacgcctcatccattactactagaggggtagaactgagcagtggtgctaaagtaggggaataggattaaaagtacctctaaagaagaatctatgtctagggttagtccatctttaacgttgcagatttaaagccatatttagatgaagaattgagtcaagaatgactccatttcaattgaggaaggatgataaggacatcacaccttcagatgcgcctactaatcatccgatcgttatataaggtccaatgacttgagcacaaatgtgatgattaaattttcaaaggtaagtgatcctttcgataattttgggaatagattatctaattatgttatcgtgcttgataacattagagagggtcatgaagtaattgaaggtgtggaggtgaagatcaaaaagaacgcccaagaccaattaaaggcattagtccaactcgagtttgagtctgagtggacctttaggaccatcctgtagtaaaacagatgtgcgagacatacacgacatacataatccattttttatgatcaatatatgaatagaaatatattttcataagctaactaataattttgatctaaggtctaatttccaccggaattaatgaaattatcgaaataagtcagcattcaaaatatgttagtgttgtgtcacaattttttggttggctaggcatgtgttgtcttagagcccattaggggacacgttcaaggggtgtgatagccttaggatatataattagtagccactactcatgttaggactcaagttttgcttttaaaaattatctttgaataattgtcattatagggttataaaaccccacttttgtgatcttagtcatacatatattgttagcatttttgttgagctgtgtactttcaagttctttcttgtgttttcgattcactgacatggattagccttcttaacgagatcaaccggattagtgacacggttgatcaccataagagtcgtagtaccacgttccaccaaaacagaagttatcatgaacccgatggaacattaaggactccattatcataacaaatagcgtattaggtaaccttgtgaataattctgattccttgtttggggactaggtagaaaattagtaaaaacatgatgatttggtgatgtttggatgtggggttgtactggttgtactttgggccacttggaaaactaggaatgatatgtgctttagtagtaaaatgattatcgatccttctaatgtgatatttttgtgctatttctagatggattcaagtttattgtgtgctaaaatacccgctgttgggggtcttcttctctgccgaacattttttattacttcttttggatgctgaacaatatagaattatgttttgagttgaataaattagaattttgatctaaaattttgtgataattggtctaattttcttagttgaaagatgaagccgaatatttattcctttatctaaaaaatctaataataacttaaaatgtttaataataggtagacatggatatcggaattctaataactctcgtcgtccaagtatatgagatgcaaccacttttttattctagtctcataatataaggtgttgccttggagcctgaaagcatctaggcccctggttggttttagtgattaatgacaacgtaatattatatgtgactagcgtgtgttttgcagagcaaatggtaagttaggtcgcattacagaaagttgtactacaatggtgaaaacaatccctgagatgagaacttgaagcgacaactgaaacgacgaatcaaaagatgaaagtcttcatattccgagtgttgaaggagttgtagacactcggtatagaattaggtcttctattttgttttagccgtactataaagagaggttgtggatgagtagtttgaccaagagaattctagtgtagtgttggtgcatattcacacttacatctagtgttaggtgtcactctataacacactcacgagttagaacaaaaacggttttgaaaaacaaaaggaaaaacgaagttagggtttctgtcttaggggcaccagactgtccgatgtgcaccagactgtccggtgcaccccctgacagtggtgccagtcagccccgggggcagtgattctgtccccgagaaaatccgagagcaacgagtggagaaaaagaattttagccgccacaccggactgtccggtgtgcaccggacaggtactgttcactgtccgttgtgccatcagcccaactgctagctgtcagaactagccgttggagacgaccgttggcgcaccggtggcacacggactgtccggtgcgcccatacgcagaacagccaggtaacgactagtttggtgagtggggctatttataccccgtccacctaccttattgagtgtcttgctgcccacattgatgaccacatattgctacaacattgcaagcacaacaaagactagtgaggtgactagaaaatcttaattccacgtcaggacctcattagtgcaagtgagagccacctagagcacacaccacatgcattaagcttctcttggtaaagtgaaagtctattgcttgttactcttggtgatcggtatcacctagatggcttggtagcgtttggagcacggtgatcacctcggatgatttgttggtgacccgactcaaagattgtaagcggtcgtgagggatccaccgcgccggagtggcaaaggatcacctcatagtgagtacttagttcttgaccaagggggagcgatacccttgcgcgggtgctccaacgatgactaggaaagagtgccgactcttcgatacctcgacaaaatattggaggagtcttctcaaccttgttttactttccgcatttaattcaagcattttactttattcaattgtttagcaagtagttgaagtgatgtcttaggattgttatctttctagtagtattctcttattgctagtagttaggtgaagttgggctctagcttagggtttaaatatttgctcagggtttaattgttgttgaatttttagaaaaaagcccaattcaccccctcttgggcatcatgattctttcagagccatactaagagcatctctaaccgctctccaacaaataactattaaaaacagattttaagggccatactaagagcatctctaaccgctctccaacaaataactattaaaaactagtttttaggagtatctcaaaaattattagggtagattttaaccatttctccaaccattctcataactaggccaagccactcttggacccacattgatatgtttcacttgtgtattttcttcttccacgactttgacatctgtccaacgaccaaacatataccaccatcaaaggttgttggttgtacgtgggcggacgtggccggtgagagactaccaacggcgagaccgagcgatagcagagatctgatcgacaacggaggttcaatagcgggttgtgagatggtagaagcaggatagtgtgggcgcgttgccagcaacggacgacgaggttgcgcagatggggaggatgcgctcacggaggtagacgacgaggttgcgtgggtggtagcggattgtgaggttgtgtgggcgtggcacgtttgtgttttctaggaagcccaaaaagcccccgtttgtagctacaaatgagagttttaatgactataaagaagttggagcactttagagaaaccgtcgaagacaagttttttgtgtttt

SEQ ID NO: 33862 - DNA, 12879 bp, Zea Mays
gtgtcccttcgtggggtgcgcccgccacctgccgatgcgacgtgagaggagccaagcgcgcagtgggccctggacacgagagcggtgcggtgtcgtgctggcggcggcggcggcggcggcgaaggataaatagggccgtagggccatcgttttgcattgccgtcgcgtggccgtgggttttcatcgacgaacgacgacgactctgccgcgcgcgtttaggcgcgtcgccgccggccacccggccggccacttcgacgcggctgtggtggtttaaaattctccggctcgccgcccacggcctcgctgcacgtagttgcaggcctgacatttctgcgctgaggttacattgctcacagttgttcagtagcagcttgtccaacagtacttgcccgttccagcagtacttccaggcaaagtagcaaatttacgcagagcgcaaaggtagaagctagcaacatccaaaggaaataacaaaacactagcagcatccaaagaaatttggtattctgcactccctattgtatttggttgtcattaaccaaacaacacagtttggagtttggactgaactgaacttgaataaggcgcaaccaatcaaggtcctgcttgtgggctttaccgttcagatttcaagaaaaaaaaatataccgtaccttcctggatctcgtatccttcaaagcatttctcagaagattttccagcttctccagctcatctacatctgattcgtcagcattgctctggggagacctgccggtttgaagaaattgtgattatttatcaaaaatgggaaaccagagtgggtggaaatcctgagttctgggtgtgtaccaggtcgcaatcttgctcagcatcaactgcaaatctgaagaagcttcatccttgttctgtaccaaaaacaccctaaaaattgctgatagcggttatatgtatcctctatgctgaaaaaggagaaaaaaaatgaatatgatattagctccttgcataatgtactcttggacaatcaacatctatatattcacctcacgtggaacaaaaatgcaggcagttttattggagagtttggaccactacataccgagacaaccatctaggctgtctaggttctgaagttatgattaggtactagagaagtcaaagtgactagctctatatgctccatgtggaaaagccaagaagtttcagggcgtgtagggtgggttctaagaaggcgcagtcgttagctaaatgtttggttgggctttttgcactctttctaaatatttgtaattaatttccccatgtttcccgagttggatttagctttctaagttttcttccacacactcccaacaagaagtttccatcttcaaatgttctgaatctactagacacagtatgggcacgcctttttttcatgacaggttttgtgttgggggtgctagagtctagttgatgcacatggccctgcccaatagaagttggttttcttccattgatatataagtgaagttgatagccaagtttttcttgtctcctctttttctttcccttccttgaaggctaaatatgctcagttgagaatgaaagctgagaggacatcgaacaaatgaaataagtggagtatacattcaaaacttgagagcgacccccaagtgataggtttttaccttttagggcaacaaaagatatgctctaggaaaaaatgataagagaagagagtctagtaagcttttaggcatcatgcccatgcactatagaaattgaattgtttaaaccataatattttggacaatagaaacttgtaataaattgtgacaaagaatgtgaatttatgatttatctccaaccaagttatgagcacggttgatcaactaacataatattatcgaaagcactttcgatattatatatatcattgtataaatactcaactacatgtcaatttcataattagttgttatttttgtttgtgacttattagcgtgtcataattttcccattgttatatgtttatgttatttttcttatattagttgcacagttataggttctctctcatatgttaacttctcaacaaatattttagatattttatatttagttgttagaagttgttaaaagtatatttggtagtctagatattgtgtctcgtctactgtcatatatatccatgatttgccttgtctcttactcatgtgctctatataaactgcctaagggcttaatgcaatacatcaatccttgatggcaaacccccctaacatggtataacgagtttaggctatgacttaggcttccccttctgctgtcgtcgtcgcgctgcctcgaggaaattgatctccatcaagagttgcgctctcgtagttaggatgcatgactaatccttctgatttgtcgcgttcatcgtcgttattgtattgtcaagcttcaacaaatcagaggctcgctggtttctctacatgtcatggtggttgttgggctctcctaccggttggatcatgcctttgtcctttgtgcatgcaatcatggtgatggttgtggggcagacgacatccacgtgttgtcgtggtgacgattctggagaggccgtgtgagcccatgggctttgtcacccttgacccctagggtgctaagagacgaattcaagagcatattgcctaccatgtatttcctatgaaagttggctaggagatacctaagccaaaagatgaggacaacacgaaggagattgaagctcgagagatgattcagttaccttataaattcaatcccttcagcatcttcataaagccgagcaatgagtggctcattatggtggagacagttgctaacaaagttttatgcaactatattgtgaaagagatcatctacttagtgcgatagtgagtggcaataaagagaatacataatcgtgtgatcaaagcatatgacttagaatatctagactaccccaacctcattgtcgatcatgatgctagattgcagaggaaatgcaaagtaagaattatagataggggttgagtgattagtgaaaaggaggctagagggggccctccgacaaagtccttgaagccaaaggcaaaatacaagggtagtgagattgtggcaaaggaaaagttgctagcacccaagcgctttgaaaggaaacaccatgaaggtgagaagtagaaggtctaggtcgaggcctctaaggttgcctcagagaagcctgctggcattgcaaagacccctaccactgaagaacatgtacgagctgttgttgaagagtcttgttctgaacgctcagaaaattgaggtcgagaaaaagcccgcctaggaggatacatcaggcgacaagctcaaagaggcattgcctagcctcccctgcatagtgaatccaatggatgcgatctttggagatttatttgaggagaaaagcaacaaagccattaagacccctgccaaagaaaaagaggatgttggttgtgctaggctatgtgcctctccctgttagccaagtcgagcctttgtgatcgtggtttatctctttctccctctttcagtcttctgatcgaggataaggagggtgagttgagttaggagaatggactatttgtgggtacttggtgatgtaacaaaatttgttgttgttgtgggtccctttttcttcctaattggtcgggttttgcgccatcgtcgcctattttcatccttgtattgcccctacatcaccgtcgactacgtcgttgtgcgcctctctcacatggtatacctggaccgttcatgctcttcgtcatcttctttaagcaccactgttgcaacactctagcaccaccatgactccttgcgcaatgcagatctcaccactgccactctgggtccctagatgtgtcaaccatctacttctttgacttcgtccatcacaatctcgttgccagtgtcgtcctctgtcctcgtctacttcatccacaccgacaaccattggtgcattgacacatgcttcctcgttgttcttctacacattgcaactatcgcggaggccttctctgctagtcactttagacactgacgtatggttggggtcctctacctagtatgtcttttgctagcaacactggtgcgtaccttcatccccggtgtgtttttgggcttagctagtaaacctcacacatgcctcagccacgttgattcgacaatgtcgacttcgccatcgaccttctccattgactgccttgactgcatcaccatctttgtctatggtgcttccttctattcgccaccatcaccacaacacatcaagcacacgacttgtgtggctcctacttcttagtgacctcgatagctttcatcgaccacaactatcctttgcaagattatcgaccacaactgttcatccttgtactaggctacctcaacatcgacacagagaactatcgtctacatcagcttctcgtcggtttcttctccaagtcgttgcatctgcactccgacaacgtcacgactatgggggattttagtccatatagacttctatagtctaaacgtctaccatgctccctctatgattgtggagtgttagagtatatttgatagtctagatattgtgtctcgaattgccacatgtatctatgggttgccttgtctcttatgtcatgtactctatataaatcgtataagggctcaatgtaatacataaatctttaatagcaatctcccttcttcataagcatctttagtcaccaaaaaggtcgttactcttttaatgagagtgtgcagtgactaaatataataataaaatctcaaatataaactacaagataaagaaattaaaaaataatatatttgagatacaatacttcaataaacgagacattttagcatgacttatgtagcatcagcatcatcacatcttgtagttttcttctacaatcccgtgattgcaacaaattcctgtgtttgaatggataagtgacgcaccacgccttttgcctagtttcatgtaggtcatagaatgtggaggttatagaggatggcggggcgccatgcaaatagaatgtctatgactgttttcaaaccaatatatcagacaaaaagtacatatcaatcacaattaaattagacatataatcacatatatattaaattcatataattatgaatcacaaatacataacaattaacaattgttggttagtagcaaaaaatatagcaggcgttaactttagttatattaaaaaaagattaaattacagaaaatatacgtatcttcaaccataacaaatggcctagccaaactaaaatataaacttttaaactattaatttcaaattaaaataagagttagataaaaatggtttaaaaatatgtcactctaaggacttgtcaagttataattttcgaatgctaccttatagttatggaatttagacccactactactattgcggcggcacgagtgaaggggaggggtgacgagaatgtgaggggagaggctgggggcggcagggtcgcagggtatgatggatgattcaaataatattgtccattggatttgggtaaaaaagacgggtttatatagtgatctaaaccatgatatgttaagtctaggtgcaactgtttggtggatttagcgaaacttacgggtgtgggggtgatttggttggattggttttgcaaagtttaaactagtcaattatatagtggtatagacatagataccaaacatgagagataagaataatatttaaaggctcttgctaactttgtggcggtggtcccctcctctggtgacaaatttggagggtatgtggcaaggttttatgacatggtggccggaccgagtgtccctatggttggatcttgagtaaaatgtatcagcgattttcaaatttgacacaatgtgtcacttgggtatcagaacctagaaaactagaaaaataggtcgaaaagttggtcgactcatgcaaatttatctaaaatcgattttgctcaaactagatgccaacgtggcatgctactttagagctcactaatgaaagtttggggacacaagttcagagacttaagtgacataacatgccaaatttggggacttgtgtatcagcaggcacatgatgcgtgtgggaaggatttgatgtagcacgtcacatcgccatatggtttgagcaaatccagatctgaatgattttgcactagggtctatttttctagtttcctgagttcagggacctaaataacacatcgtatcaagttcgagaaccgatgatacactttgcttctggatctttgcaagcttggtgttgatgcatcccttcccaatggacaacaatggttagtcattgttgtacgaggtgacggggagggccatcaaccccacttcactctaggtcgcggaaaggctatttgacaacaaaatctagcatctcttctgggatacatcgacaccatgttgcagggcggcaccatcacctcactacttagcacctataggcttagggtgtatttgttttcgcagctcacatatgcgtgattgacatgagcagcgatcgagaaaatcatgattttacttgtgatacgggattttctgttctcagtacaaatcccgtggttgagtcgaagccgcggcgacgagaatcatctgcgctgcaggctgtttagcgagatttttctggtttctcgcgtcactccatcaaaacacggcttttaaccgaaaccacctagtctacttagcaatatctttccactaatggtggcaattttgtgaagtgtgaacataattcgatgggtccggcaaatttagttttataaaaaatagcttagaagaacatctttccaagctctaaacaataatctcctcaactttgaatgtttcttctaaaaattccacatgccacgcattttacttgtttaaacttaaattttctatggttacttgttttgtgcttctaaggcaagaaaaacataaagaaatggaagtcaaaattcctataaacaacaatatcctaaaaatagagaaagacaaagtagagaagaggaacaatatctagaagaatatatatagaaggtcaaagtgagctatgttagcgtgttgtcttatgccttaattatgttgctcttgctattcatcaattttacttctccaaagaagttgtagagattcatgatgtgtgctatgcgctgatatacaaagatgtgctatttttcacttatgatataggtagcacttaaccaccttctatcattaaccttttgtagaaataaatgttcttcacttagataactctaggacttccactcattcaagggactaagcaccaaattaacttctcgagcgagcttgatttgccaatcctgatgagactaaagagattcaacaccaagtccaagatattttagaccacaaatatgtatataacagtcttagttcttgtgttgttttagttacttaggttcaaaaatagggtgttttagttattttggtccaaaaaatatggcataactaatggggtgtttggtttgaggaatgagctagtccatcatcttctcactcctcactatttttgtttggtttgtggaatagaatgagttaatccatcaccatctcttttctcatagttacatagttagttagtactaatatgaggaatgaagtcatcccaccaaatctgaggaatgaacccatgatggaccaccttaatttagatggtttgattcctcaaaccaaacactctataagtgcttccatatgagtgattagtaatatcttttgggttaactagtgcacaaatcacttctatgagattaatggatgaggttttatgttttttatttgtaaatttgtggtagtctattttgtgatatattgatatacactaaatctttaacaaaacattttactcatctatgtttttaatgttttatatgctacacatctatttggtaaccttgtgaagtacatttttatatcgaataagtatctttttttggctatgttgtgacctcacacggaagtaaagtagatgaagataacatgtgtgctataaagagtcggtcaacgcccacaaccgtgataaaagtgtgaagcttctatggacttatatgattttattattactttgtgaaggattaaagcactattatagccttgctaaatgaattgacaaaaaggacatcatgtttcactgagcaaaagaacaagaagtgtcctttgctctttgaaagaacatgcttaccaacacattattacaacaacttcctaattttgtaggacttttgagcatcaatgtgatgctaatggagtttgcattagtggtgtattgatgcaaggtaagctcgttgcttactttagtgagaaattaaatagacattcttaattattctatgtatggcgaagaactgtatgcagaatttcctaattactctaataactaagtcaaaataaactgaaacgtacacatgcctatgtgggttgaatttattgaatcattttcttatgtgatcaaacataagaaagaaaaagataatattattgttgatgctttgtccagataatatactatgttgttccaatttgattgttctataattaggcttaaaatattaaagtacaatatgttaataataatgaacttaaggatgtgacaaaaaatatatataaagagatgtatatagaacaaatttgtgatgcatggtgagtttttgtttagagctaaccgataatgcattctacttgtttatgttcgtcttttgttgttgcaagaggcacatggaggtggattgatggaacattttaatgtcaagaagataaagtgttggtcacatacttcttctatccaaggatgaggcaagatgtagagaggttcgtagcttgatacacgacatgtcaaatagctaaatcgcggttgaacccatatggtttgtatatgttggttcatttcttctatttcttgggtggatatatatatatgaactttgttttggaattgcaaagaactaataggggggatagtatttttgtggtggttgatcatttatctgaagtgataacttttattccctatcataaaagcgacgatgacattcacattgctaacaaagtctttcaagaaatcattcacttgtagaggtagggacttttaaatatatgctcctagcttagcgtcatagatcagttttgcacctctctagtattaaaaacgcctcatccattactactagaggggtagaactgagcagtggtgctaaagtaggggaataggattaaaagtacctctaaagaagaatctatgtctagggttagtccatctttaacgttgcagatttaaagccatatttagatgaagaattgagtcaagaatgactccatttcaattgaggaaggatgataaggacatcacaccttcagatgcgcctactaatcatccgatcgttatataaggtccaatgacttgagcacaaatgtgatgattaaattttcaaaggtaagtgatcctttcgataattttgggaatagattatctaattatgttatcgtgcttgataacattagagagggtcatgaagtaattgaaggtgtggaggtgaagatcaaaaagaacgcccaagaccaattaaaggcattagtccaactcgagtttgagtctgagtggacctttaggaccatcctgtagtaaaacagatgtgcgagacatacacgacatacataatccattttttatgatcaatatatgaatagaaatatattttcataagctaactaataattttgatctaaggtctaatttccaccggaattaatgaaattatcgaaataagtcagcattcaaaatatgttagtgttgtgtcacaattttttggttggctaggcatgtgttgtcttagagcccattaggggacacgttcaaggggtgtgatagccttaggatatataattagtagccactactcatgttaggactcaagttttgcttttaaaaattatctttgaataattgtcattatagggttataaaaccccacttttgtgatcttagtcatacatatattgttagcatttttgttgagctgtgtactttcaagttctttcttgtgttttcgattcactgacatggattagccttcttaacgagatcaaccggattagtgacacggttgatcaccataagagtcgtagtaccacgttccaccaaaacagaagttatcatgaacccgatggaacattaaggactccattatcataacaaatagcgtattaggtaaccttgtgaataattctgattccttgtttggggactaggtagaaaattagtaaaaacatgatgatttggtgatgtttggatgtggggttgtactggttgtactttgggccacttggaaaactaggaatgatatgtgctttagtagtaaaatgattatcgatccttctaatgtgatatttttgtgctatttctagatggattcaagtttattgtgtgctaaaatacccgctgttgggggtcttcttctctgccgaacattttttattacttcttttggatgctgaacaatatagaattatgttttgagttgaataaattagaattttgatctaaaattttgtgataattggtctaattttcttagttgaaagatgaagccgaatatttattcctttatctaaaaaatctaataataacttaaaatgtttaataataggtagacatggatatcggaattctaataactctcgtcgtccaagtatatgagatgcaaccacttttttattctagtctcataatataaggtgttgccttggagcctgaaagcatctaggcccctggttggttttagtgattaatgacaacgtaatattatatgtgactagcgtgtgttttgcagagcaaatggtaagttaggtcgcattacagaaagttgtactacaatggtgaaaacaatccctgagatgagaacttgaagcgacaactgaaacgacgaatcaaaagatgaaagtcttcatattccgagtgttgaaggagttgtagacactcggtatagaattaggtcttctattttgttttagccgtactataaagagaggttgtggatgagtagtttgaccaagagaattctagtgtagtgttggtgcatattcacacttacatctagtgttaggtgtcactctataacacactcacgagttagaacaaaaacggttttgaaaaacaaaaggaaaaacgaagttagggtttctgtcttaggggcaccagactgtccgatgtgcaccagactgtccggtgcaccccctgacagtggtgccagtcagccccgggggcagtgattctgtccccgagaaaatccgagagcaacgagtggagaaaaagaattttagccgccacaccggactgtccggtgtgcaccggacaggtactgttcactgtccgttgtgccatcagcccaactgctagctgtcagaactagccgttggagacgaccgttggcgcaccggtggcacacggactgtccggtgcgcccatacgcagaacagccaggtaacgactagtttggtgagtggggctatttataccccgtccacctaccttattgagtgtcttgctgcccacattgatgaccacatattgctacaacattgcaagcacaacaaagactagtgaggtgactagaaaatcttaattccacgtcaggacctcattagtgcaagtgagagccacctagagcacacaccacatgcattaagcttctcttggtaaagtgaaagtctattgcttgttactcttggtgatcggtatcacctagatggcttggtagcgtttggagcacggtgatcacctcggatgatttgttggtgacccgactcaaagattgtaagcggtcgtgagggatccaccgcgccggagtggcaaaggatcacctcatagtgagtacttagttcttgaccaagggggagcgatacccttgcgcgggtgctccaacgatgactaggaaagagtgccgactcttcgatacctcgacaaaatattggaggagtcttctcaaccttgttttactttccgcatttaattcaagcattttactttattcaattgtttagcaagtagttgaagtgatgtcttaggattgttatctttctagtagtattctcttattgctagtagttaggtgaagttgggctctagcttagggtttaaatatttgctcagggtttaattgttgttgaatttttagaaaaaagcccaattcaccccctcttgggcatcatgattctttcagagccatactaagagcatctctaaccgctctccaacaaataactattaaaaacagattttaagggccatactaagagcatctctaaccgctctccaacaaataactattaaaaactagtttttaggagtatctcaaaaattattagggtagattttaaccatttctccaaccattctcataactaggccaagccactcttggacccacattgatatgtttcacttgtgtattttcttcttccacgactttgacatctgtccaacgaccaaacatataccaccatcaaaggttgttggttgtacgtgggcggacgtggccggtgagagactaccaacggcgagaccgagcgatagcagagatctgatcgacaacggaggttcaatagcgggttgtgagatggtagaagcaggatagtgtgggcgcgttgccagcaacggacgacgaggttgcgcagatggggaggatgcgctcacggaggtagacgacgaggttgcgtgggtggtagcggattgtgaggttgtgtgggcgtggcacgtttgtgttttctaggaagcccaaaaagcccccgtttgtagctacaaatgagagttttaatgactataaagaagttggagcactttagagaaaccgtcgaagacaagttttttgtgtttt

SEQ ID NO: 33863 - DNA, 14698 bp, Zea Mays
gtgtcccttcgtggggtgcgcccgccacctgccgatgcgacgtgagaggagccaagcgcgcagtgggccctggacacgagagcggtgcggtgtcgtgctggcggcggcggcggcggcggcgaaggataaatagggccgtagggccatcgttttgcattgccgtcgcgtggccgtgggttttcatcgacgaacgacgacgactctgccgcgcgcgtttaggcgcgtcgccgccggccacccggccggccacttcgacgcggctgtggtggtttaaaattctccggctcgccgcccacggcctcgctgcacgtagttgcaggtgagtgaggttcttcgattccccccaaacccggcccatctccgacgatccattatttgttcgtccatatgaaaatgcatctctttttgtacccagttgttacctacatgcagcttttactgcttcattcagttatggtcgtgtacatcttcagaaaaccagacatgttcaggcaagaccagtgggtatgcaaaaacaacagcaaagtggctcggcatgtcgacagccagctgctacttctacttctacatataaaccacgcgctggcatgaactccactccagcatggatagacgacatcatcgcacaaatcacataccaggtcaaggcaccacgtttcacaaacctagtgaacacccaagaactattatgcaataccatcattttgctcgatagattttcctagcccagttgtttcatctgagcaagtgtctgtaggaactaaaacacagtagtatgctgtatatactgtcaagcatgaaacgcaaccagatcagctgcaggatttgcagcaccaagctctggccattaggtaggctgcatatcacaacacacaaagggaacatcaaactacatacactagctccgtcccctccagggacactgcaggttggcaggcccaaagctagcacagggtctcgcaacccacaaggtcataatcagtacaagcatccatcggcaaggggaagcaagagcaatcccagatcaagctctctcacgagggtttaattttcatgcaaggcctgacatttctgcgctgaggttacattgctcacagttgttcagtagcagcttgtccaacagtacttgcccgttccagcagtacttccaggcaaagtagcaaatttacgcagagcgcaaaggtagaagctagcaacatccaaaggaaataacaaaacactagcagcatccaaagaaatttggtattctgcactccctattgtatttggttgtcattaaccaaacaacacagtttggagtttggactgaactgaacttgaataaggcgcaaccaatcaaggtcctgcttgtgggctttaccgttcagatttcaagaaaaaaaaatataccgtaccttcctggatctcgtatccttcaaagcatttctcagaagattttccagcttctccagctcatctacatctgattcgtcagcattgctctggggagacctgccggtttgaagaaattgtgattatttatcaaaaatgggaaaccagagtgggtggaaatcctgagttctgggtgtgtaccaggtcgcaatcttgctcagcatcaactgcaaatctgaagaagcttcatccttgttctgtaccaaaaacaccctaaaaattgctgatagcggttatatgtatcctctatgctgaaaaaggagaaaaaaaatgaatatgatattagctccttgcataatgtactcttggacaatcaacatctatatattcacctcacgtggaacaaaaatgcaggcagttttattggaggtgagtatattattatgaattacatcctgaatcttacagtcaaatacagtttattagtatgatgtcctttttcctcatgatattgagttcatgccctggtccatcacattccatactactattctactctacttagttctcataaaggtttcggaccactgtttctctagatgttttaagagttttcgttgctatattcttgatcatataaaaacatcagaactgagccatgatacaacctatctgtcacatctaactttacatggtctttgatgcatatcttggaccaccaatatcatctagaatatattttcaagattttataactattttattatacaaatatgcaaatatatcatgtatccaaacctaaagatttaaaagttattgatcttcgtagttttcaaggtttgaccaaattttgtcctaaaatgacatgttgtatcaaagaggagctactagtcatatacgcaagtggataaccaatgaaatgcttgtatcaagcaattacacaagtaaatgtaaatacctaggacattttttgtttacgaactccttatttatattcttttaccttttcttcccttgaatcataatgcggataaatctggtatgtgggtttgttatcataatttcaaaaataaagggtgtgtatttagaagtagatcactgggaaaaaaggttcggatatttatatgaaggtctaggatcaaaccaaaaaggcaataaaaatagactttctatggacaaggattttaaaggaaaaacatggacttccgatgggtgatacagattagaaaaaatatgcattcatgggcttcaaatctattcagttgaagaatgaatgaaagataatgtatacctttgagagttctcgatatgatgtcatctagattccagatgtccaagttaactgtttgaataatagacttttctctaccatatatgccctatcatatttattaatgtaatgtgatgttccttgtatctgactgtagagtttggaccactacataccgagacaaccatctaggctgtctaggttctgaagttatgattaggtactagagaagtcaaagtgactagctctatatgctccatgtggaaaagccaagaagtttcagggcgtgtagggtgggttctaagaaggcgcagtcgttagctaaatgtttggttgggctttttgcactctttctaaatatttgtaattaatttccccatgtttcccgagttggatttagctttctaagttttcttccacacactcccaacaagaagtttccatcttcaaatgttctgaatctactagacacagtatgggcacgcctttttttcatgacaggttttgtgttgggggtgctagagtctagttgatgcacatggccctgcccaatagaagttggttttcttccattgatatataagtgaagttgatagccaagtttttcttgtctcctctttttctttcccttccttgaaggctaaatatgctcagttgagaatgaaagctgagaggacatcgaacaaatgaaataagtggagtatacattcaaaacttgagagcgacccccaagtgataggtttttaccttttagggcaacaaaagatatgctctaggaaaaaatgataagagaagagagtctagtaagcttttaggcatcatgcccatgcactatagaaattgaattgtttaaaccataatattttggacaatagaaacttgtaataaattgtgacaaagaatgtgaatttatgatttatctccaaccaagttatgagcacggttgatcaactaacataatattatcgaaagcactttcgatattatatatatcattgtataaatactcaactacatgtcaatttcataattagttgttatttttgtttgtgacttattagcgtgtcataattttcccattgttatatgtttatgttatttttcttatattagttgcacagttataggttctctctcatatgttaacttctcaacaaatattttagatattttatatttagttgttagaagttgttaaaagtatatttggtagtctagatattgtgtctcgtctactgtcatatatatccatgatttgccttgtctcttactcatgtgctctatataaactgcctaagggcttaatgcaatacatcaatccttgatggcaaacccccctaacatggtataacgagtttaggctatgacttaggcttccccttctgctgtcgtcgtcgcgctgcctcgaggaaattgatctccatcaagagttgcgctctcgtagttaggatgcatgactaatccttctgatttgtcgcgttcatcgtcgttattgtattgtcaagcttcaacaaatcagaggctcgctggtttctctacatgtcatggtggttgttgggctctcctaccggttggatcatgcctttgtcctttgtgcatgcaatcatggtgatggttgtggggcagacgacatccacgtgttgtcgtggtgacgattctggagaggccgtgtgagcccatgggctttgtcacccttgacccctagggtgctaagagacgaattcaagagcatattgcctaccatgtatttcctatgaaagttggctaggagatacctaagccaaaagatgaggacaacacgaaggagattgaagctcgagagatgattcagttaccttataaattcaatcccttcagcatcttcataaagccgagcaatgagtggctcattatggtggagacagttgctaacaaagttttatgcaactatattgtgaaagagatcatctacttagtgcgatagtgagtggcaataaagagaatacataatcgtgtgatcaaagcatatgacttagaatatctagactaccccaacctcattgtcgatcatgatgctagattgcagaggaaatgcaaagtaagaattatagataggggttgagtgattagtgaaaaggaggctagagggggccctccgacaaagtccttgaagccaaaggcaaaatacaagggtagtgagattgtggcaaaggaaaagttgctagcacccaagcgctttgaaaggaaacaccatgaaggtgagaagtagaaggtctaggtcgaggcctctaaggttgcctcagagaagcctgctggcattgcaaagacccctaccactgaagaacatgtacgagctgttgttgaagagtcttgttctgaacgctcagaaaattgaggtaatgacaaaacaaacatcatggtatttttaagtcctttcggggtcgaccttgttaactttgattctatgtcgaagtaggtcgagaaaaagcccgcctaggaggatacatcaggcgacaagctcaaagaggcattgcctagcctcccctgcatagtgaatccaatggatgcgatctttggagatttatttgaggagaaaagcaacaaagccattaagacccctgccaaagaaaaagaggatgttggttgtgctaggctatgtgcctctccctgttagccaagtcgagcctttgtgatcgtggtttatctctttctccctctttcagtcttctgatcgaggataaggagggtgagttgagttaggagaatggactatttgtgggtacttggtgatgtaacaaaatttgttgttgttgtgggtccctttttcttcctaattggtcgggttttgcgccatcgtcgcctattttcatccttgtattgcccctacatcaccgtcgactacgtcgttgtgcgcctctctcacatggtatacctggaccgttcatgctcttcgtcatcttctttaagcaccactgttgcaacactctagcaccaccatgactccttgcgcaatgcagatctcaccactgccactctgggtccctagatgtgtcaaccatctacttctttgacttcgtccatcacaatctcgttgccagtgtcgtcctctgtcctcgtctacttcatccacaccgacaaccattggtgcattgacacatgcttcctcgttgttcttctacacattgcaactatcgcggaggccttctctgctagtcactttagacactgacgtatggttggggtcctctacctagtatgtcttttgctagcaacactggtgcgtaccttcatccccggtgtgtttttgggcttagctagtaaacctcacacatgcctcagccacgttgattcgacaatgtcgacttcgccatcgaccttctccattgactgccttgactgcatcaccatctttgtctatggtgcttccttctattcgccaccatcaccacaacacatcaagcacacgacttgtgtggctcctacttcttagtgacctcgatagctttcatcgaccacaactatcctttgcaagattatcgaccacaactgttcatccttgtactaggctacctcaacatcgacacagagaactatcgtctacatcagcttctcgtcggtttcttctccaagtcgttgcatctgcactccgacaacgtcacgactatgggggattttagtccatatagacttctatagtctaaacgtctaccatgctccctctatgattgtggagtgttagagtatatttgatagtctagatattgtgtctcgaattgccacatgtatctatgggttgccttgtctcttatgtcatgtactctatataaatcgtataagggctcaatgtaatacataaatctttaatagcaatctcccttcttcataagcatctttagtcaccaaaaaggtcgttactcttttaatgagagtgtgcagtgactaaatataataataaaatctcaaatataaactacaagataaagaaattaaaaaataatatatttgagatacaatacttcaataaacgagacattttagcatgacttatgtagcatcagcatcatcacatcttgtagttttcttctacaatcccgtgattgcaacaaattcctgtgtttgaatggataagtgacgcaccacgccttttgcctagtttcatgtaggtcatagaatgtggaggttatagaggatggcggggcgccatgcaaatagaatgtctatgactgttttcaaaccaatatatcagacaaaaagtacatatcaatcacaattaaattagacatataatcacatatatattaaattcatataattatgaatcacaaatacataacaattaacaattgttggttagtagcaaaaaatatagcaggcgttaactttagttatattaaaaaaagattaaattacagaaaatatacgtatcttcaaccataacaaatggcctagccaaactaaaatataaacttttaaactattaatttcaaattaaaataagagttagataaaaatggtttaaaaatatgtcactctaaggacttgtcaagttataattttcgaatgctaccttatagttatggaatttagacccactactactattgcggcggcacgagtgaaggggaggggtgacgagaatgtgaggggagaggctgggggcggcagggtcgcagggtatgatggatgattcaaataatattgtccattggatttgggtaaaaaagacgggtttatatagtgatctaaaccatgatatgttaagtctaggtgcaactgtttggtggatttagcgaaacttacgggtgtgggggtgatttggttggattggttttgcaaagtttaaactagtcaattatatagtggtatagacatagataccaaacatgagagataagaataatatttaaaggctcttgctaactttgtggcggtggtcccctcctctggtgacaaatttggagggtatgtggcaaggttttatgacatggtggccggaccgagtgtccctatggttggatcttgagtaaaatgtatcagcgattttcaaatttgacacaatgtgtcacttgggtatcagaacctagaaaactagaaaaataggtcgaaaagttggtcgactcatgcaaatttatctaaaatcgattttgctcaaactagatgccaacgtggcatgctactttagagctcactaatgaaagtttggggacacaagttcagagacttaagtgacataacatgccaaatttggggacttgtgtatcagcaggcacatgatgcgtgtgggaaggatttgatgtagcacgtcacatcgccatatggtttgagcaaatccagatctgaatgattttgcactagggtctatttttctagtttcctgagttcagggacctaaataacacatcgtatcaagttcgagaaccgatgatacactttgcttctggatctttgcaagcttggtgttgatgcatcccttcccaatggacaacaatggttagtcattgttgtacgaggtgacggggagggccatcaaccccacttcactctaggtcgcggaaaggctatttgacaacaaaatctagcatctcttctgggatacatcgacaccatgttgcagggcggcaccatcacctcactacttagcacctataggcttagggtgtatttgttttcgcagctcacatatgcgtgattgacatgagcagcgatcgagaaaatcatgattttacttgtgatacgggattttctgttctcagtacaaatcccgtggttgagtcgaagccgcggcgacgagaatcatctgcgctgcaggctgtttagcgagatttttctggtttctcgcgtcactccatcaaaacacggcttttaaccgaaaccacctagtctacttagcaatatctttccactaatggtggcaattttgtgaagtgtgaacataattcgatgggtccggcaaatttagttttataaaaaatagcttagaagaacatctttccaagctctaaacaataatctcctcaactttgaatgtttcttctaaaaattccacatgccacgcattttacttgtttaaacttaaattttctatggttacttgttttgtgcttctaaggcaagaaaaacataaagaaatggaagtcaaaattcctataaacaacaatatcctaaaaatagagaaagacaaagtagagaagaggaacaatatctagaagaatatatatagaaggtcaaagtgagctatgttagcgtgttgtcttatgccttaattatgttgctcttgctattcatcaattttacttctccaaagaagttgtagagattcatgatgtgtgctatgcgctgatatacaaagatgtgctatttttcacttatgatataggtagcacttaaccaccttctatcattaaccttttgtagaaataaatgttcttcacttagataactctaggacttccactcattcaagggactaagcaccaaattaacttctcgagcgagcttgatttgccaatcctgatgagactaaagagattcaacaccaagtccaagatattttagaccacaaatatgtatataacagtcttagttcttgtgttgttttagttacttaggttcaaaaatagggtgttttagttattttggtccaaaaaatatggcataactaatggggtgtttggtttgaggaatgagctagtccatcatcttctcactcctcactatttttgtttggtttgtggaatagaatgagttaatccatcaccatctcttttctcatagttacatagttagttagtactaatatgaggaatgaagtcatcccaccaaatctgaggaatgaacccatgatggaccaccttaatttagatggtttgattcctcaaaccaaacactctataagtgcttccatatgagtgattagtaatatcttttgggttaactagtgcacaaatcacttctatgagattaatggatgaggttttatgttttttatttgtaaatttgtggtagtctattttgtgatatattgatatacactaaatctttaacaaaacattttactcatctatgtttttaatgttttatatgctacacatctatttggtaaccttgtgaagtacatttttatatcgaataagtatctttttttggctatgttgtgacctcacacggaagtaaagtagatgaagataacatgtgtgctataaagagtcggtcaacgcccacaaccgtgataaaagtgtgaagcttctatggacttatatgattttattattactttgtgaaggattaaagcactattatagccttgctaaatgaattgacaaaaaggacatcatgtttcactgagcaaaagaacaagaagtgtcctttgctctttgaaagaacatgcttaccaacacattattacaacaacttcctaattttgtaggacttttgagcatcaatgtgatgctaatggagtttgcattagtggtgtattgatgcaaggtaagctcgttgcttactttagtgagaaattaaatagacattcttaattattctatgtatggcgaagaactgtatgcagaatttcctaattactctaataactaagtcaaaataaactgaaacgtacacatgcctatgtgggttgaatttattgaatcattttcttatgtgatcaaacataagaaagaaaaagataatattattgttgatgctttgtccagataatatactatgttgttccaatttgattgttctataattaggcttaaaatattaaagtacaatatgttaataataatgaacttaaggatgtgacaaaaaatatatataaagagatgtatatagaacaaatttgtgatgcatggtgagtttttgtttagagctaaccgataatgcattctacttgtttatgttcgtcttttgttgttgcaagaggcacatggaggtggattgatggaacattttaatgtcaagaagataaagtgttggtcacatacttcttctatccaaggatgaggcaagatgtagagaggttcgtagcttgatacacgacatgtcaaatagctaaatcgcggttgaacccatatggtttgtatatgttggttcatttcttctatttcttgggtggatatatatatatgaactttgttttggaattgcaaagaactaataggggggatagtatttttgtggtggttgatcatttatctgaagtgataacttttattccctatcataaaagcgacgatgacattcacattgctaacaaagtctttcaagaaatcattcacttgtagaggtagggacttttaaatatatgctcctagcttagcgtcatagatcagttttgcacctctctagtattaaaaacgcctcatccattactactagaggggtagaactgagcagtggtgctaaagtaggggaataggattaaaagtacctctaaagaagaatctatgtctagggttagtccatctttaacgttgcagatttaaagccatatttagatgaagaattgagtcaagaatgactccatttcaattgaggaaggatgataaggacatcacaccttcagatgcgcctactaatcatccgatcgttatataaggtccaatgacttgagcacaaatgtgatgattaaattttcaaaggtaagtgatcctttcgataattttgggaatagattatctaattatgttatcgtgcttgataacattagagagggtcatgaagtaattgaaggtgtggaggtgaagatcaaaaagaacgcccaagaccaattaaaggcattagtccaactcgagtttgagtctgagtggacctttaggaccatcctgtagtaaaacagatgtgcgagacatacacgacatacataatccattttttatgatcaatatatgaatagaaatatattttcataagctaactaataattttgatctaaggtctaatttccaccggaattaatgaaattatcgaaataagtcagcattcaaaatatgttagtgttgtgtcacaattttttggttggctaggcatgtgttgtcttagagcccattaggggacacgttcaaggggtgtgatagccttaggatatataattagtagccactactcatgttaggactcaagttttgcttttaaaaattatctttgaataattgtcattatagggttataaaaccccacttttgtgatcttagtcatacatatattgttagcatttttgttgagctgtgtactttcaagttctttcttgtgttttcgattcactgacatggattagccttcttaacgagatcaaccggattagtgacacggttgatcaccataagagtcgtagtaccacgttccaccaaaacagaagttatcatgaacccgatggaacattaaggactccattatcataacaaatagcgtattaggtaaccttgtgaataattctgattccttgtttggggactaggtagaaaattagtaaaaacatgatgatttggtgatgtttggatgtggggttgtactggttgtactttgggccacttggaaaactaggaatgatatgtgctttagtagtaaaatgattatcgatccttctaatgtgatatttttgtgctatttctagatggattcaagtttattgtgtgctaaaatacccgctgttgggggtcttcttctctgccgaacattttttattacttcttttggatgctgaacaatatagaattatgttttgagttgaataaattagaattttgatctaaaattttgtgataattggtctaattttcttagttgaaagatgaagccgaatatttattcctttatctaaaaaatctaataataacttaaaatgtttaataataggtagacatggatatcggaattctaataactctcgtcgtccaagtatatgagatgcaaccacttttttattctagtctcataatataaggtgttgccttggagcctgaaagcatctaggcccctggttggttttagtgattaatgacaacgtaatattatatgtgactagcgtgtgttttgcagagcaaatggtaagttaggtcgcattacagaaagttgtactacaatggtgaaaacaatccctgagatgagaacttgaagcgacaactgaaacgacgaatcaaaagatgaaagtcttcatattccgagtgttgaaggagttgtagacactcggtatagaattaggtcttctattttgttttagccgtactataaagagaggttgtggatgagtagtttgaccaagagaattctagtgtagtgttggtgcatattcacacttacatctagtgttaggtgtcactctataacacactcacgagttagaacaaaaacggttttgaaaaacaaaaggaaaaacgaagttagggtttctgtcttaggggcaccagactgtccgatgtgcaccagactgtccggtgcaccccctgacagtggtgccagtcagccccgggggcagtgattctgtccccgagaaaatccgagagcaacgagtggagaaaaagaattttagccgccacaccggactgtccggtgtgcaccggacaggtactgttcactgtccgttgtgccatcagcccaactgctagctgtcagaactagccgttggagacgaccgttggcgcaccggtggcacacggactgtccggtgcgcccatacgcagaacagccaggtaacgactagtttggtgagtggggctatttataccccgtccacctaccttattgagtgtcttgctgcccacattgatgaccacatattgctacaacattgcaagcacaacaaagactagtgaggtgactagaaaatcttaattccacgtcaggacctcattagtgcaagtgagagccacctagagcacacaccacatgcattaagcttctcttggtaaagtgaaagtctattgcttgttactcttggtgatcggtatcacctagatggcttggtagcgtttggagcacggtgatcacctcggatgatttgttggtgacccgactcaaagattgtaagcggtcgtgagggatccaccgcgccggagtggcaaaggatcacctcatagtgagtacttagttcttgaccaagggggagcgatacccttgcgcgggtgctccaacgatgactaggaaagagtgccgactcttcgatacctcgacaaaatattggaggagtcttctcaaccttgttttactttccgcatttaattcaagcattttactttattcaattgtttagcaagtagttgaagtgatgtcttaggattgttatctttctagtagtattctcttattgctagtagttaggtgaagttgggctctagcttagggtttaaatatttgctcagggtttaattgttgttgaatttttagaaaaaagcccaattcaccccctcttgggcatcatgattctttcagagccatactaagagcatctctaaccgctctccaacaaataactattaaaaacagattttaagggccatactaagagcatctctaaccgctctccaacaaataactattaaaaactagtttttaggagtatctcaaaaattattagggtagattttaaccatttctccaaccattctcataactaggccaagccactcttggacccacattgatatgtttcacttgtgtattttcttcttccacgactttgacatctgtccaacgaccaaacatataccaccatcaaaggttgttggttgtacgtgggcggacgtggccggtgagagactaccaacggcgagaccgagcgatagcagagatctgatcgacaacggaggttcaatagcgggttgtgagatggtagaagcaggatagtgtgggcgcgttgccagcaacggacgacgaggttgcgcagatggggaggatgcgctcacggaggtagacgacgaggttgcgtgggtggtagcggattgtgaggttgtgtgggcgtggcacgtttgtgttttctaggaagcccaaaaagcccccgtttgtagctacaaatgagagttttaatgactataaagaagttggagcactttagagaaaccgtcgaagacaagttttttgtgtttt

SEQ ID NO: 33864 - DNA, 14316 bp, Zea Mays
gtgtcccttcgtggggtgcgcccgccacctgccgatgcgacgtgagaggagccaagcgcgcagtgggccctggacacgagagcggtgcggtgtcgtgctggcggcggcggcggcggcggcgaaggataaatagggccgtagggccatcgttttgcattgccgtcgcgtggccgtgggttttcatcgacgaacgacgacgactctgccgcgcgcgtttaggcgcgtcgccgccggccacccggccggccacttcgacgcggctgtggtggtttaaaattctccggctcgccgcccacggcctcgctgcacgtagttgcaggtgagtgaggttcttcgattccccccaaacccggcccatctccgacgatccattatttgttcgtccatatgaaaatgcatctctttttgtacccagttgttacctacatgcagcttttactgcttcattcagttatggtcgtgtacatcttcagaaaaccagacatgttcaggcaagaccagtgggtatgcaaaaacaacagcaaagtggctcggcatgtcgacagccagctgctacttctacttctacatataaaccacgcgctggcatgaactccactccagcatggatagacgacatcatcgcacaaatcacataccagatcaagctctctcacgagggtttaattttcatgcaaggcctgacatttctgcgctgaggttacattgctcacagttgttcagtagcagcttgtccaacagtacttgcccgttccagcagtacttccaggcaaagtagcaaatttacgcagagcgcaaaggtagaagctagcaacatccaaaggaaataacaaaacactagcagcatccaaagaaatttggtattctgcactccctattgtatttggttgtcattaaccaaacaacacagtttggagtttggactgaactgaacttgaataaggcgcaaccaatcaaggtcctgcttgtgggctttaccgttcagatttcaagaaaaaaaaatataccgtaccttcctggatctcgtatccttcaaagcatttctcagaagattttccagcttctccagctcatctacatctgattcgtcagcattgctctggggagacctgccggtttgaagaaattgtgattatttatcaaaaatgggaaaccagagtgggtggaaatcctgagttctgggtgtgtaccaggtcgcaatcttgctcagcatcaactgcaaatctgaagaagcttcatccttgttctgtaccaaaaacaccctaaaaattgctgatagcggttatatgtatcctctatgctgaaaaaggagaaaaaaaatgaatatgatattagctccttgcataatgtactcttggacaatcaacatctatatattcacctcacgtggaacaaaaatgcaggcagttttattggaggtgagtatattattatgaattacatcctgaatcttacagtcaaatacagtttattagtatgatgtcctttttcctcatgatattgagttcatgccctggtccatcacattccatactactattctactctacttagttctcataaaggtttcggaccactgtttctctagatgttttaagagttttcgttgctatattcttgatcatataaaaacatcagaactgagccatgatacaacctatctgtcacatctaactttacatggtctttgatgcatatcttggaccaccaatatcatctagaatatattttcaagattttataactattttattatacaaatatgcaaatatatcatgtatccaaacctaaagatttaaaagttattgatcttcgtagttttcaaggtttgaccaaattttgtcctaaaatgacatgttgtatcaaagaggagctactagtcatatacgcaagtggataaccaatgaaatgcttgtatcaagcaattacacaagtaaatgtaaatacctaggacattttttgtttacgaactccttatttatattcttttaccttttcttcccttgaatcataatgcggataaatctggtatgtgggtttgttatcataatttcaaaaataaagggtgtgtatttagaagtagatcactgggaaaaaaggttcggatatttatatgaaggtctaggatcaaaccaaaaaggcaataaaaatagactttctatggacaaggattttaaaggaaaaacatggacttccgatgggtgatacagattagaaaaaatatgcattcatgggcttcaaatctattcagttgaagaatgaatgaaagataatgtatacctttgagagttctcgatatgatgtcatctagattccagatgtccaagttaactgtttgaataatagacttttctctaccatatatgccctatcatatttattaatgtaatgtgatgttccttgtatctgactgtagagtttggaccactacataccgagacaaccatctaggctgtctaggttctgaagttatgattaggtactagagaagtcaaagtgactagctctatatgctccatgtggaaaagccaagaagtttcagggcgtgtagggtgggttctaagaaggcgcagtcgttagctaaatgtttggttgggctttttgcactctttctaaatatttgtaattaatttccccatgtttcccgagttggatttagctttctaagttttcttccacacactcccaacaagaagtttccatcttcaaatgttctgaatctactagacacagtatgggcacgcctttttttcatgacaggttttgtgttgggggtgctagagtctagttgatgcacatggccctgcccaatagaagttggttttcttccattgatatataagtgaagttgatagccaagtttttcttgtctcctctttttctttcccttccttgaaggctaaatatgctcagttgagaatgaaagctgagaggacatcgaacaaatgaaataagtggagtatacattcaaaacttgagagcgacccccaagtgataggtttttaccttttagggcaacaaaagatatgctctaggaaaaaatgataagagaagagagtctagtaagcttttaggcatcatgcccatgcactatagaaattgaattgtttaaaccataatattttggacaatagaaacttgtaataaattgtgacaaagaatgtgaatttatgatttatctccaaccaagttatgagcacggttgatcaactaacataatattatcgaaagcactttcgatattatatatatcattgtataaatactcaactacatgtcaatttcataattagttgttatttttgtttgtgacttattagcgtgtcataattttcccattgttatatgtttatgttatttttcttatattagttgcacagttataggttctctctcatatgttaacttctcaacaaatattttagatattttatatttagttgttagaagttgttaaaagtatatttggtagtctagatattgtgtctcgtctactgtcatatatatccatgatttgccttgtctcttactcatgtgctctatataaactgcctaagggcttaatgcaatacatcaatccttgatggcaaacccccctaacatggtataacgagtttaggctatgacttaggcttccccttctgctgtcgtcgtcgcgctgcctcgaggaaattgatctccatcaagagttgcgctctcgtagttaggatgcatgactaatccttctgatttgtcgcgttcatcgtcgttattgtattgtcaagcttcaacaaatcagaggctcgctggtttctctacatgtcatggtggttgttgggctctcctaccggttggatcatgcctttgtcctttgtgcatgcaatcatggtgatggttgtggggcagacgacatccacgtgttgtcgtggtgacgattctggagaggccgtgtgagcccatgggctttgtcacccttgacccctagggtgctaagagacgaattcaagagcatattgcctaccatgtatttcctatgaaagttggctaggagatacctaagccaaaagatgaggacaacacgaaggagattgaagctcgagagatgattcagttaccttataaattcaatcccttcagcatcttcataaagccgagcaatgagtggctcattatggtggagacagttgctaacaaagttttatgcaactatattgtgaaagagatcatctacttagtgcgatagtgagtggcaataaagagaatacataatcgtgtgatcaaagcatatgacttagaatatctagactaccccaacctcattgtcgatcatgatgctagattgcagaggaaatgcaaagtaagaattatagataggggttgagtgattagtgaaaaggaggctagagggggccctccgacaaagtccttgaagccaaaggcaaaatacaagggtagtgagattgtggcaaaggaaaagttgctagcacccaagcgctttgaaaggaaacaccatgaaggtgagaagtagaaggtctaggtcgaggcctctaaggttgcctcagagaagcctgctggcattgcaaagacccctaccactgaagaacatgtacgagctgttgttgaagagtcttgttctgaacgctcagaaaattgaggtaatgacaaaacaaacatcatggtatttttaagtcctttcggggtcgaccttgttaactttgattctatgtcgaagtaggtcgagaaaaagcccgcctaggaggatacatcaggcgacaagctcaaagaggcattgcctagcctcccctgcatagtgaatccaatggatgcgatctttggagatttatttgaggagaaaagcaacaaagccattaagacccctgccaaagaaaaagaggatgttggttgtgctaggctatgtgcctctccctgttagccaagtcgagcctttgtgatcgtggtttatctctttctccctctttcagtcttctgatcgaggataaggagggtgagttgagttaggagaatggactatttgtgggtacttggtgatgtaacaaaatttgttgttgttgtgggtccctttttcttcctaattggtcgggttttgcgccatcgtcgcctattttcatccttgtattgcccctacatcaccgtcgactacgtcgttgtgcgcctctctcacatggtatacctggaccgttcatgctcttcgtcatcttctttaagcaccactgttgcaacactctagcaccaccatgactccttgcgcaatgcagatctcaccactgccactctgggtccctagatgtgtcaaccatctacttctttgacttcgtccatcacaatctcgttgccagtgtcgtcctctgtcctcgtctacttcatccacaccgacaaccattggtgcattgacacatgcttcctcgttgttcttctacacattgcaactatcgcggaggccttctctgctagtcactttagacactgacgtatggttggggtcctctacctagtatgtcttttgctagcaacactggtgcgtaccttcatccccggtgtgtttttgggcttagctagtaaacctcacacatgcctcagccacgttgattcgacaatgtcgacttcgccatcgaccttctccattgactgccttgactgcatcaccatctttgtctatggtgcttccttctattcgccaccatcaccacaacacatcaagcacacgacttgtgtggctcctacttcttagtgacctcgatagctttcatcgaccacaactatcctttgcaagattatcgaccacaactgttcatccttgtactaggctacctcaacatcgacacagagaactatcgtctacatcagcttctcgtcggtttcttctccaagtcgttgcatctgcactccgacaacgtcacgactatgggggattttagtccatatagacttctatagtctaaacgtctaccatgctccctctatgattgtggagtgttagagtatatttgatagtctagatattgtgtctcgaattgccacatgtatctatgggttgccttgtctcttatgtcatgtactctatataaatcgtataagggctcaatgtaatacataaatctttaatagcaatctcccttcttcataagcatctttagtcaccaaaaaggtcgttactcttttaatgagagtgtgcagtgactaaatataataataaaatctcaaatataaactacaagataaagaaattaaaaaataatatatttgagatacaatacttcaataaacgagacattttagcatgacttatgtagcatcagcatcatcacatcttgtagttttcttctacaatcccgtgattgcaacaaattcctgtgtttgaatggataagtgacgcaccacgccttttgcctagtttcatgtaggtcatagaatgtggaggttatagaggatggcggggcgccatgcaaatagaatgtctatgactgttttcaaaccaatatatcagacaaaaagtacatatcaatcacaattaaattagacatataatcacatatatattaaattcatataattatgaatcacaaatacataacaattaacaattgttggttagtagcaaaaaatatagcaggcgttaactttagttatattaaaaaaagattaaattacagaaaatatacgtatcttcaaccataacaaatggcctagccaaactaaaatataaacttttaaactattaatttcaaattaaaataagagttagataaaaatggtttaaaaatatgtcactctaaggacttgtcaagttataattttcgaatgctaccttatagttatggaatttagacccactactactattgcggcggcacgagtgaaggggaggggtgacgagaatgtgaggggagaggctgggggcggcagggtcgcagggtatgatggatgattcaaataatattgtccattggatttgggtaaaaaagacgggtttatatagtgatctaaaccatgatatgttaagtctaggtgcaactgtttggtggatttagcgaaacttacgggtgtgggggtgatttggttggattggttttgcaaagtttaaactagtcaattatatagtggtatagacatagataccaaacatgagagataagaataatatttaaaggctcttgctaactttgtggcggtggtcccctcctctggtgacaaatttggagggtatgtggcaaggttttatgacatggtggccggaccgagtgtccctatggttggatcttgagtaaaatgtatcagcgattttcaaatttgacacaatgtgtcacttgggtatcagaacctagaaaactagaaaaataggtcgaaaagttggtcgactcatgcaaatttatctaaaatcgattttgctcaaactagatgccaacgtggcatgctactttagagctcactaatgaaagtttggggacacaagttcagagacttaagtgacataacatgccaaatttggggacttgtgtatcagcaggcacatgatgcgtgtgggaaggatttgatgtagcacgtcacatcgccatatggtttgagcaaatccagatctgaatgattttgcactagggtctatttttctagtttcctgagttcagggacctaaataacacatcgtatcaagttcgagaaccgatgatacactttgcttctggatctttgcaagcttggtgttgatgcatcccttcccaatggacaacaatggttagtcattgttgtacgaggtgacggggagggccatcaaccccacttcactctaggtcgcggaaaggctatttgacaacaaaatctagcatctcttctgggatacatcgacaccatgttgcagggcggcaccatcacctcactacttagcacctataggcttagggtgtatttgttttcgcagctcacatatgcgtgattgacatgagcagcgatcgagaaaatcatgattttacttgtgatacgggattttctgttctcagtacaaatcccgtggttgagtcgaagccgcggcgacgagaatcatctgcgctgcaggctgtttagcgagatttttctggtttctcgcgtcactccatcaaaacacggcttttaaccgaaaccacctagtctacttagcaatatctttccactaatggtggcaattttgtgaagtgtgaacataattcgatgggtccggcaaatttagttttataaaaaatagcttagaagaacatctttccaagctctaaacaataatctcctcaactttgaatgtttcttctaaaaattccacatgccacgcattttacttgtttaaacttaaattttctatggttacttgttttgtgcttctaaggcaagaaaaacataaagaaatggaagtcaaaattcctataaacaacaatatcctaaaaatagagaaagacaaagtagagaagaggaacaatatctagaagaatatatatagaaggtcaaagtgagctatgttagcgtgttgtcttatgccttaattatgttgctcttgctattcatcaattttacttctccaaagaagttgtagagattcatgatgtgtgctatgcgctgatatacaaagatgtgctatttttcacttatgatataggtagcacttaaccaccttctatcattaaccttttgtagaaataaatgttcttcacttagataactctaggacttccactcattcaagggactaagcaccaaattaacttctcgagcgagcttgatttgccaatcctgatgagactaaagagattcaacaccaagtccaagatattttagaccacaaatatgtatataacagtcttagttcttgtgttgttttagttacttaggttcaaaaatagggtgttttagttattttggtccaaaaaatatggcataactaatggggtgtttggtttgaggaatgagctagtccatcatcttctcactcctcactatttttgtttggtttgtggaatagaatgagttaatccatcaccatctcttttctcatagttacatagttagttagtactaatatgaggaatgaagtcatcccaccaaatctgaggaatgaacccatgatggaccaccttaatttagatggtttgattcctcaaaccaaacactctataagtgcttccatatgagtgattagtaatatcttttgggttaactagtgcacaaatcacttctatgagattaatggatgaggttttatgttttttatttgtaaatttgtggtagtctattttgtgatatattgatatacactaaatctttaacaaaacattttactcatctatgtttttaatgttttatatgctacacatctatttggtaaccttgtgaagtacatttttatatcgaataagtatctttttttggctatgttgtgacctcacacggaagtaaagtagatgaagataacatgtgtgctataaagagtcggtcaacgcccacaaccgtgataaaagtgtgaagcttctatggacttatatgattttattattactttgtgaaggattaaagcactattatagccttgctaaatgaattgacaaaaaggacatcatgtttcactgagcaaaagaacaagaagtgtcctttgctctttgaaagaacatgcttaccaacacattattacaacaacttcctaattttgtaggacttttgagcatcaatgtgatgctaatggagtttgcattagtggtgtattgatgcaaggtaagctcgttgcttactttagtgagaaattaaatagacattcttaattattctatgtatggcgaagaactgtatgcagaatttcctaattactctaataactaagtcaaaataaactgaaacgtacacatgcctatgtgggttgaatttattgaatcattttcttatgtgatcaaacataagaaagaaaaagataatattattgttgatgctttgtccagataatatactatgttgttccaatttgattgttctataattaggcttaaaatattaaagtacaatatgttaataataatgaacttaaggatgtgacaaaaaatatatataaagagatgtatatagaacaaatttgtgatgcatggtgagtttttgtttagagctaaccgataatgcattctacttgtttatgttcgtcttttgttgttgcaagaggcacatggaggtggattgatggaacattttaatgtcaagaagataaagtgttggtcacatacttcttctatccaaggatgaggcaagatgtagagaggttcgtagcttgatacacgacatgtcaaatagctaaatcgcggttgaacccatatggtttgtatatgttggttcatttcttctatttcttgggtggatatatatatatgaactttgttttggaattgcaaagaactaataggggggatagtatttttgtggtggttgatcatttatctgaagtgataacttttattccctatcataaaagcgacgatgacattcacattgctaacaaagtctttcaagaaatcattcacttgtagaggtagggacttttaaatatatgctcctagcttagcgtcatagatcagttttgcacctctctagtattaaaaacgcctcatccattactactagaggggtagaactgagcagtggtgctaaagtaggggaataggattaaaagtacctctaaagaagaatctatgtctagggttagtccatctttaacgttgcagatttaaagccatatttagatgaagaattgagtcaagaatgactccatttcaattgaggaaggatgataaggacatcacaccttcagatgcgcctactaatcatccgatcgttatataaggtccaatgacttgagcacaaatgtgatgattaaattttcaaaggtaagtgatcctttcgataattttgggaatagattatctaattatgttatcgtgcttgataacattagagagggtcatgaagtaattgaaggtgtggaggtgaagatcaaaaagaacgcccaagaccaattaaaggcattagtccaactcgagtttgagtctgagtggacctttaggaccatcctgtagtaaaacagatgtgcgagacatacacgacatacataatccattttttatgatcaatatatgaatagaaatatattttcataagctaactaataattttgatctaaggtctaatttccaccggaattaatgaaattatcgaaataagtcagcattcaaaatatgttagtgttgtgtcacaattttttggttggctaggcatgtgttgtcttagagcccattaggggacacgttcaaggggtgtgatagccttaggatatataattagtagccactactcatgttaggactcaagttttgcttttaaaaattatctttgaataattgtcattatagggttataaaaccccacttttgtgatcttagtcatacatatattgttagcatttttgttgagctgtgtactttcaagttctttcttgtgttttcgattcactgacatggattagccttcttaacgagatcaaccggattagtgacacggttgatcaccataagagtcgtagtaccacgttccaccaaaacagaagttatcatgaacccgatggaacattaaggactccattatcataacaaatagcgtattaggtaaccttgtgaataattctgattccttgtttggggactaggtagaaaattagtaaaaacatgatgatttggtgatgtttggatgtggggttgtactggttgtactttgggccacttggaaaactaggaatgatatgtgctttagtagtaaaatgattatcgatccttctaatgtgatatttttgtgctatttctagatggattcaagtttattgtgtgctaaaatacccgctgttgggggtcttcttctctgccgaacattttttattacttcttttggatgctgaacaatatagaattatgttttgagttgaataaattagaattttgatctaaaattttgtgataattggtctaattttcttagttgaaagatgaagccgaatatttattcctttatctaaaaaatctaataataacttaaaatgtttaataataggtagacatggatatcggaattctaataactctcgtcgtccaagtatatgagatgcaaccacttttttattctagtctcataatataaggtgttgccttggagcctgaaagcatctaggcccctggttggttttagtgattaatgacaacgtaatattatatgtgactagcgtgtgttttgcagagcaaatggtaagttaggtcgcattacagaaagttgtactacaatggtgaaaacaatccctgagatgagaacttgaagcgacaactgaaacgacgaatcaaaagatgaaagtcttcatattccgagtgttgaaggagttgtagacactcggtatagaattaggtcttctattttgttttagccgtactataaagagaggttgtggatgagtagtttgaccaagagaattctagtgtagtgttggtgcatattcacacttacatctagtgttaggtgtcactctataacacactcacgagttagaacaaaaacggttttgaaaaacaaaaggaaaaacgaagttagggtttctgtcttaggggcaccagactgtccgatgtgcaccagactgtccggtgcaccccctgacagtggtgccagtcagccccgggggcagtgattctgtccccgagaaaatccgagagcaacgagtggagaaaaagaattttagccgccacaccggactgtccggtgtgcaccggacaggtactgttcactgtccgttgtgccatcagcccaactgctagctgtcagaactagccgttggagacgaccgttggcgcaccggtggcacacggactgtccggtgcgcccatacgcagaacagccaggtaacgactagtttggtgagtggggctatttataccccgtccacctaccttattgagtgtcttgctgcccacattgatgaccacatattgctacaacattgcaagcacaacaaagactagtgaggtgactagaaaatcttaattccacgtcaggacctcattagtgcaagtgagagccacctagagcacacaccacatgcattaagcttctcttggtaaagtgaaagtctattgcttgttactcttggtgatcggtatcacctagatggcttggtagcgtttggagcacggtgatcacctcggatgatttgttggtgacccgactcaaagattgtaagcggtcgtgagggatccaccgcgccggagtggcaaaggatcacctcatagtgagtacttagttcttgaccaagggggagcgatacccttgcgcgggtgctccaacgatgactaggaaagagtgccgactcttcgatacctcgacaaaatattggaggagtcttctcaaccttgttttactttccgcatttaattcaagcattttactttattcaattgtttagcaagtagttgaagtgatgtcttaggattgttatctttctagtagtattctcttattgctagtagttaggtgaagttgggctctagcttagggtttaaatatttgctcagggtttaattgttgttgaatttttagaaaaaagcccaattcaccccctcttgggcatcatgattctttcagagccatactaagagcatctctaaccgctctccaacaaataactattaaaaacagattttaagggccatactaagagcatctctaaccgctctccaacaaataactattaaaaactagtttttaggagtatctcaaaaattattagggtagattttaaccatttctccaaccattctcataactaggccaagccactcttggacccacattgatatgtttcacttgtgtattttcttcttccacgactttgacatctgtccaacgaccaaacatataccaccatcaaaggttgttggttgtacgtgggcggacgtggccggtgagagactaccaacggcgagaccgagcgatagcagagatctgatcgacaacggaggttcaatagcgggttgtgagatggtagaagcaggatagtgtgggcgcgttgccagcaacggacgacgaggttgcgcagatggggaggatgcgctcacggaggtagacgacgaggttgcgtgggtggtagcggattgtgaggttgtgtgggcgtggcacgtttgtgttttctaggaagcccaaaaagcccccgtttgtagctacaaatgagagttttaatgactataaagaagttggagcactttagagaaaccgtcgaagacaagttttttgtgtttt

SEQ ID NO: 33865 - DNA, 13994 bp, Zea Mays
gtgtcccttcgtggggtgcgcccgccacctgccgatgcgacgtgagaggagccaagcgcgcagtgggccctggacacgagagcggtgcggtgtcgtgctggcggcggcggcggcggcggcgaaggataaatagggccgtagggccatcgttttgcattgccgtcgcgtggccgtgggttttcatcgacgaacgacgacgactctgccgcgcgcgtttaggcgcgtcgccgccggccacccggccggccacttcgacgcggctgtggtggtttaaaattctccggctcgccgcccacggcctcgctgcacgtagttgcagatcaagctctctcacgagggtttaattttcatgcaaggcctgacatttctgcgctgaggttacattgctcacagttgttcagtagcagcttgtccaacagtacttgcccgttccagcagtacttccaggcaaagtagcaaatttacgcagagcgcaaaggtagaagctagcaacatccaaaggaaataacaaaacactagcagcatccaaagaaatttggtattctgcactccctattgtatttggttgtcattaaccaaacaacacagtttggagtttggactgaactgaacttgaataaggcgcaaccaatcaaggtcctgcttgtgggctttaccgttcagatttcaagaaaaaaaaatataccgtaccttcctggatctcgtatccttcaaagcatttctcagaagattttccagcttctccagctcatctacatctgattcgtcagcattgctctggggagacctgccggtttgaagaaattgtgattatttatcaaaaatgggaaaccagagtgggtggaaatcctgagttctgggtgtgtaccaggtcgcaatcttgctcagcatcaactgcaaatctgaagaagcttcatccttgttctgtaccaaaaacaccctaaaaattgctgatagcggttatatgtatcctctatgctgaaaaaggagaaaaaaaatgaatatgatattagctccttgcataatgtactcttggacaatcaacatctatatattcacctcacgtggaacaaaaatgcaggcagttttattggaggtgagtatattattatgaattacatcctgaatcttacagtcaaatacagtttattagtatgatgtcctttttcctcatgatattgagttcatgccctggtccatcacattccatactactattctactctacttagttctcataaaggtttcggaccactgtttctctagatgttttaagagttttcgttgctatattcttgatcatataaaaacatcagaactgagccatgatacaacctatctgtcacatctaactttacatggtctttgatgcatatcttggaccaccaatatcatctagaatatattttcaagattttataactattttattatacaaatatgcaaatatatcatgtatccaaacctaaagatttaaaagttattgatcttcgtagttttcaaggtttgaccaaattttgtcctaaaatgacatgttgtatcaaagaggagctactagtcatatacgcaagtggataaccaatgaaatgcttgtatcaagcaattacacaagtaaatgtaaatacctaggacattttttgtttacgaactccttatttatattcttttaccttttcttcccttgaatcataatgcggataaatctggtatgtgggtttgttatcataatttcaaaaataaagggtgtgtatttagaagtagatcactgggaaaaaaggttcggatatttatatgaaggtctaggatcaaaccaaaaaggcaataaaaatagactttctatggacaaggattttaaaggaaaaacatggacttccgatgggtgatacagattagaaaaaatatgcattcatgggcttcaaatctattcagttgaagaatgaatgaaagataatgtatacctttgagagttctcgatatgatgtcatctagattccagatgtccaagttaactgtttgaataatagacttttctctaccatatatgccctatcatatttattaatgtaatgtgatgttccttgtatctgactgtagagtttggaccactacataccgagacaaccatctaggctgtctaggttctgaagttatgattaggtactagagaagtcaaagtgactagctctatatgctccatgtggaaaagccaagaagtttcagggcgtgtagggtgggttctaagaaggcgcagtcgttagctaaatgtttggttgggctttttgcactctttctaaatatttgtaattaatttccccatgtttcccgagttggatttagctttctaagttttcttccacacactcccaacaagaagtttccatcttcaaatgttctgaatctactagacacagtatgggcacgcctttttttcatgacaggttttgtgttgggggtgctagagtctagttgatgcacatggccctgcccaatagaagttggttttcttccattgatatataagtgaagttgatagccaagtttttcttgtctcctctttttctttcccttccttgaaggctaaatatgctcagttgagaatgaaagctgagaggacatcgaacaaatgaaataagtggagtatacattcaaaacttgagagcgacccccaagtgataggtttttaccttttagggcaacaaaagatatgctctaggaaaaaatgataagagaagagagtctagtaagcttttaggcatcatgcccatgcactatagaaattgaattgtttaaaccataatattttggacaatagaaacttgtaataaattgtgacaaagaatgtgaatttatgatttatctccaaccaagttatgagcacggttgatcaactaacataatattatcgaaagcactttcgatattatatatatcattgtataaatactcaactacatgtcaatttcataattagttgttatttttgtttgtgacttattagcgtgtcataattttcccattgttatatgtttatgttatttttcttatattagttgcacagttataggttctctctcatatgttaacttctcaacaaatattttagatattttatatttagttgttagaagttgttaaaagtatatttggtagtctagatattgtgtctcgtctactgtcatatatatccatgatttgccttgtctcttactcatgtgctctatataaactgcctaagggcttaatgcaatacatcaatccttgatggcaaacccccctaacatggtataacgagtttaggctatgacttaggcttccccttctgctgtcgtcgtcgcgctgcctcgaggaaattgatctccatcaagagttgcgctctcgtagttaggatgcatgactaatccttctgatttgtcgcgttcatcgtcgttattgtattgtcaagcttcaacaaatcagaggctcgctggtttctctacatgtcatggtggttgttgggctctcctaccggttggatcatgcctttgtcctttgtgcatgcaatcatggtgatggttgtggggcagacgacatccacgtgttgtcgtggtgacgattctggagaggccgtgtgagcccatgggctttgtcacccttgacccctagggtgctaagagacgaattcaagagcatattgcctaccatgtatttcctatgaaagttggctaggagatacctaagccaaaagatgaggacaacacgaaggagattgaagctcgagagatgattcagttaccttataaattcaatcccttcagcatcttcataaagccgagcaatgagtggctcattatggtggagacagttgctaacaaagttttatgcaactatattgtgaaagagatcatctacttagtgcgatagtgagtggcaataaagagaatacataatcgtgtgatcaaagcatatgacttagaatatctagactaccccaacctcattgtcgatcatgatgctagattgcagaggaaatgcaaagtaagaattatagataggggttgagtgattagtgaaaaggaggctagagggggccctccgacaaagtccttgaagccaaaggcaaaatacaagggtagtgagattgtggcaaaggaaaagttgctagcacccaagcgctttgaaaggaaacaccatgaaggtgagaagtagaaggtctaggtcgaggcctctaaggttgcctcagagaagcctgctggcattgcaaagacccctaccactgaagaacatgtacgagctgttgttgaagagtcttgttctgaacgctcagaaaattgaggtaatgacaaaacaaacatcatggtatttttaagtcctttcggggtcgaccttgttaactttgattctatgtcgaagtaggtcgagaaaaagcccgcctaggaggatacatcaggcgacaagctcaaagaggcattgcctagcctcccctgcatagtgaatccaatggatgcgatctttggagatttatttgaggagaaaagcaacaaagccattaagacccctgccaaagaaaaagaggatgttggttgtgctaggctatgtgcctctccctgttagccaagtcgagcctttgtgatcgtggtttatctctttctccctctttcagtcttctgatcgaggataaggagggtgagttgagttaggagaatggactatttgtgggtacttggtgatgtaacaaaatttgttgttgttgtgggtccctttttcttcctaattggtcgggttttgcgccatcgtcgcctattttcatccttgtattgcccctacatcaccgtcgactacgtcgttgtgcgcctctctcacatggtatacctggaccgttcatgctcttcgtcatcttctttaagcaccactgttgcaacactctagcaccaccatgactccttgcgcaatgcagatctcaccactgccactctgggtccctagatgtgtcaaccatctacttctttgacttcgtccatcacaatctcgttgccagtgtcgtcctctgtcctcgtctacttcatccacaccgacaaccattggtgcattgacacatgcttcctcgttgttcttctacacattgcaactatcgcggaggccttctctgctagtcactttagacactgacgtatggttggggtcctctacctagtatgtcttttgctagcaacactggtgcgtaccttcatccccggtgtgtttttgggcttagctagtaaacctcacacatgcctcagccacgttgattcgacaatgtcgacttcgccatcgaccttctccattgactgccttgactgcatcaccatctttgtctatggtgcttccttctattcgccaccatcaccacaacacatcaagcacacgacttgtgtggctcctacttcttagtgacctcgatagctttcatcgaccacaactatcctttgcaagattatcgaccacaactgttcatccttgtactaggctacctcaacatcgacacagagaactatcgtctacatcagcttctcgtcggtttcttctccaagtcgttgcatctgcactccgacaacgtcacgactatgggggattttagtccatatagacttctatagtctaaacgtctaccatgctccctctatgattgtggagtgttagagtatatttgatagtctagatattgtgtctcgaattgccacatgtatctatgggttgccttgtctcttatgtcatgtactctatataaatcgtataagggctcaatgtaatacataaatctttaatagcaatctcccttcttcataagcatctttagtcaccaaaaaggtcgttactcttttaatgagagtgtgcagtgactaaatataataataaaatctcaaatataaactacaagataaagaaattaaaaaataatatatttgagatacaatacttcaataaacgagacattttagcatgacttatgtagcatcagcatcatcacatcttgtagttttcttctacaatcccgtgattgcaacaaattcctgtgtttgaatggataagtgacgcaccacgccttttgcctagtttcatgtaggtcatagaatgtggaggttatagaggatggcggggcgccatgcaaatagaatgtctatgactgttttcaaaccaatatatcagacaaaaagtacatatcaatcacaattaaattagacatataatcacatatatattaaattcatataattatgaatcacaaatacataacaattaacaattgttggttagtagcaaaaaatatagcaggcgttaactttagttatattaaaaaaagattaaattacagaaaatatacgtatcttcaaccataacaaatggcctagccaaactaaaatataaacttttaaactattaatttcaaattaaaataagagttagataaaaatggtttaaaaatatgtcactctaaggacttgtcaagttataattttcgaatgctaccttatagttatggaatttagacccactactactattgcggcggcacgagtgaaggggaggggtgacgagaatgtgaggggagaggctgggggcggcagggtcgcagggtatgatggatgattcaaataatattgtccattggatttgggtaaaaaagacgggtttatatagtgatctaaaccatgatatgttaagtctaggtgcaactgtttggtggatttagcgaaacttacgggtgtgggggtgatttggttggattggttttgcaaagtttaaactagtcaattatatagtggtatagacatagataccaaacatgagagataagaataatatttaaaggctcttgctaactttgtggcggtggtcccctcctctggtgacaaatttggagggtatgtggcaaggttttatgacatggtggccggaccgagtgtccctatggttggatcttgagtaaaatgtatcagcgattttcaaatttgacacaatgtgtcacttgggtatcagaacctagaaaactagaaaaataggtcgaaaagttggtcgactcatgcaaatttatctaaaatcgattttgctcaaactagatgccaacgtggcatgctactttagagctcactaatgaaagtttggggacacaagttcagagacttaagtgacataacatgccaaatttggggacttgtgtatcagcaggcacatgatgcgtgtgggaaggatttgatgtagcacgtcacatcgccatatggtttgagcaaatccagatctgaatgattttgcactagggtctatttttctagtttcctgagttcagggacctaaataacacatcgtatcaagttcgagaaccgatgatacactttgcttctggatctttgcaagcttggtgttgatgcatcccttcccaatggacaacaatggttagtcattgttgtacgaggtgacggggagggccatcaaccccacttcactctaggtcgcggaaaggctatttgacaacaaaatctagcatctcttctgggatacatcgacaccatgttgcagggcggcaccatcacctcactacttagcacctataggcttagggtgtatttgttttcgcagctcacatatgcgtgattgacatgagcagcgatcgagaaaatcatgattttacttgtgatacgggattttctgttctcagtacaaatcccgtggttgagtcgaagccgcggcgacgagaatcatctgcgctgcaggctgtttagcgagatttttctggtttctcgcgtcactccatcaaaacacggcttttaaccgaaaccacctagtctacttagcaatatctttccactaatggtggcaattttgtgaagtgtgaacataattcgatgggtccggcaaatttagttttataaaaaatagcttagaagaacatctttccaagctctaaacaataatctcctcaactttgaatgtttcttctaaaaattccacatgccacgcattttacttgtttaaacttaaattttctatggttacttgttttgtgcttctaaggcaagaaaaacataaagaaatggaagtcaaaattcctataaacaacaatatcctaaaaatagagaaagacaaagtagagaagaggaacaatatctagaagaatatatatagaaggtcaaagtgagctatgttagcgtgttgtcttatgccttaattatgttgctcttgctattcatcaattttacttctccaaagaagttgtagagattcatgatgtgtgctatgcgctgatatacaaagatgtgctatttttcacttatgatataggtagcacttaaccaccttctatcattaaccttttgtagaaataaatgttcttcacttagataactctaggacttccactcattcaagggactaagcaccaaattaacttctcgagcgagcttgatttgccaatcctgatgagactaaagagattcaacaccaagtccaagatattttagaccacaaatatgtatataacagtcttagttcttgtgttgttttagttacttaggttcaaaaatagggtgttttagttattttggtccaaaaaatatggcataactaatggggtgtttggtttgaggaatgagctagtccatcatcttctcactcctcactatttttgtttggtttgtggaatagaatgagttaatccatcaccatctcttttctcatagttacatagttagttagtactaatatgaggaatgaagtcatcccaccaaatctgaggaatgaacccatgatggaccaccttaatttagatggtttgattcctcaaaccaaacactctataagtgcttccatatgagtgattagtaatatcttttgggttaactagtgcacaaatcacttctatgagattaatggatgaggttttatgttttttatttgtaaatttgtggtagtctattttgtgatatattgatatacactaaatctttaacaaaacattttactcatctatgtttttaatgttttatatgctacacatctatttggtaaccttgtgaagtacatttttatatcgaataagtatctttttttggctatgttgtgacctcacacggaagtaaagtagatgaagataacatgtgtgctataaagagtcggtcaacgcccacaaccgtgataaaagtgtgaagcttctatggacttatatgattttattattactttgtgaaggattaaagcactattatagccttgctaaatgaattgacaaaaaggacatcatgtttcactgagcaaaagaacaagaagtgtcctttgctctttgaaagaacatgcttaccaacacattattacaacaacttcctaattttgtaggacttttgagcatcaatgtgatgctaatggagtttgcattagtggtgtattgatgcaaggtaagctcgttgcttactttagtgagaaattaaatagacattcttaattattctatgtatggcgaagaactgtatgcagaatttcctaattactctaataactaagtcaaaataaactgaaacgtacacatgcctatgtgggttgaatttattgaatcattttcttatgtgatcaaacataagaaagaaaaagataatattattgttgatgctttgtccagataatatactatgttgttccaatttgattgttctataattaggcttaaaatattaaagtacaatatgttaataataatgaacttaaggatgtgacaaaaaatatatataaagagatgtatatagaacaaatttgtgatgcatggtgagtttttgtttagagctaaccgataatgcattctacttgtttatgttcgtcttttgttgttgcaagaggcacatggaggtggattgatggaacattttaatgtcaagaagataaagtgttggtcacatacttcttctatccaaggatgaggcaagatgtagagaggttcgtagcttgatacacgacatgtcaaatagctaaatcgcggttgaacccatatggtttgtatatgttggttcatttcttctatttcttgggtggatatatatatatgaactttgttttggaattgcaaagaactaataggggggatagtatttttgtggtggttgatcatttatctgaagtgataacttttattccctatcataaaagcgacgatgacattcacattgctaacaaagtctttcaagaaatcattcacttgtagaggtagggacttttaaatatatgctcctagcttagcgtcatagatcagttttgcacctctctagtattaaaaacgcctcatccattactactagaggggtagaactgagcagtggtgctaaagtaggggaataggattaaaagtacctctaaagaagaatctatgtctagggttagtccatctttaacgttgcagatttaaagccatatttagatgaagaattgagtcaagaatgactccatttcaattgaggaaggatgataaggacatcacaccttcagatgcgcctactaatcatccgatcgttatataaggtccaatgacttgagcacaaatgtgatgattaaattttcaaaggtaagtgatcctttcgataattttgggaatagattatctaattatgttatcgtgcttgataacattagagagggtcatgaagtaattgaaggtgtggaggtgaagatcaaaaagaacgcccaagaccaattaaaggcattagtccaactcgagtttgagtctgagtggacctttaggaccatcctgtagtaaaacagatgtgcgagacatacacgacatacataatccattttttatgatcaatatatgaatagaaatatattttcataagctaactaataattttgatctaaggtctaatttccaccggaattaatgaaattatcgaaataagtcagcattcaaaatatgttagtgttgtgtcacaattttttggttggctaggcatgtgttgtcttagagcccattaggggacacgttcaaggggtgtgatagccttaggatatataattagtagccactactcatgttaggactcaagttttgcttttaaaaattatctttgaataattgtcattatagggttataaaaccccacttttgtgatcttagtcatacatatattgttagcatttttgttgagctgtgtactttcaagttctttcttgtgttttcgattcactgacatggattagccttcttaacgagatcaaccggattagtgacacggttgatcaccataagagtcgtagtaccacgttccaccaaaacagaagttatcatgaacccgatggaacattaaggactccattatcataacaaatagcgtattaggtaaccttgtgaataattctgattccttgtttggggactaggtagaaaattagtaaaaacatgatgatttggtgatgtttggatgtggggttgtactggttgtactttgggccacttggaaaactaggaatgatatgtgctttagtagtaaaatgattatcgatccttctaatgtgatatttttgtgctatttctagatggattcaagtttattgtgtgctaaaatacccgctgttgggggtcttcttctctgccgaacattttttattacttcttttggatgctgaacaatatagaattatgttttgagttgaataaattagaattttgatctaaaattttgtgataattggtctaattttcttagttgaaagatgaagccgaatatttattcctttatctaaaaaatctaataataacttaaaatgtttaataataggtagacatggatatcggaattctaataactctcgtcgtccaagtatatgagatgcaaccacttttttattctagtctcataatataaggtgttgccttggagcctgaaagcatctaggcccctggttggttttagtgattaatgacaacgtaatattatatgtgactagcgtgtgttttgcagagcaaatggtaagttaggtcgcattacagaaagttgtactacaatggtgaaaacaatccctgagatgagaacttgaagcgacaactgaaacgacgaatcaaaagatgaaagtcttcatattccgagtgttgaaggagttgtagacactcggtatagaattaggtcttctattttgttttagccgtactataaagagaggttgtggatgagtagtttgaccaagagaattctagtgtagtgttggtgcatattcacacttacatctagtgttaggtgtcactctataacacactcacgagttagaacaaaaacggttttgaaaaacaaaaggaaaaacgaagttagggtttctgtcttaggggcaccagactgtccgatgtgcaccagactgtccggtgcaccccctgacagtggtgccagtcagccccgggggcagtgattctgtccccgagaaaatccgagagcaacgagtggagaaaaagaattttagccgccacaccggactgtccggtgtgcaccggacaggtactgttcactgtccgttgtgccatcagcccaactgctagctgtcagaactagccgttggagacgaccgttggcgcaccggtggcacacggactgtccggtgcgcccatacgcagaacagccaggtaacgactagtttggtgagtggggctatttataccccgtccacctaccttattgagtgtcttgctgcccacattgatgaccacatattgctacaacattgcaagcacaacaaagactagtgaggtgactagaaaatcttaattccacgtcaggacctcattagtgcaagtgagagccacctagagcacacaccacatgcattaagcttctcttggtaaagtgaaagtctattgcttgttactcttggtgatcggtatcacctagatggcttggtagcgtttggagcacggtgatcacctcggatgatttgttggtgacccgactcaaagattgtaagcggtcgtgagggatccaccgcgccggagtggcaaaggatcacctcatagtgagtacttagttcttgaccaagggggagcgatacccttgcgcgggtgctccaacgatgactaggaaagagtgccgactcttcgatacctcgacaaaatattggaggagtcttctcaaccttgttttactttccgcatttaattcaagcattttactttattcaattgtttagcaagtagttgaagtgatgtcttaggattgttatctttctagtagtattctcttattgctagtagttaggtgaagttgggctctagcttagggtttaaatatttgctcagggtttaattgttgttgaatttttagaaaaaagcccaattcaccccctcttgggcatcatgattctttcagagccatactaagagcatctctaaccgctctccaacaaataactattaaaaacagattttaagggccatactaagagcatctctaaccgctctccaacaaataactattaaaaactagtttttaggagtatctcaaaaattattagggtagattttaaccatttctccaaccattctcataactaggccaagccactcttggacccacattgatatgtttcacttgtgtattttcttcttccacgactttgacatctgtccaacgaccaaacatataccaccatcaaaggttgttggttgtacgtgggcggacgtggccggtgagagactaccaacggcgagaccgagcgatagcagagatctgatcgacaacggaggttcaatagcgggttgtgagatggtagaagcaggatagtgtgggcgcgttgccagcaacggacgacgaggttgcgcagatggggaggatgcgctcacggaggtagacgacgaggttgcgtgggtggtagcggattgtgaggttgtgtgggcgtggcacgtttgtgttttctaggaagcccaaaaagcccccgtttgtagctacaaatgagagttttaatgactataaagaagttggagcactttagagaaaccgtcgaagacaagttttttgtgtttt

SEQ ID NO: 33866 - DNA, 6741 bp, Zea Mays
gtgtcccttcgtggggtgcgcccgccacctgccgatgcgacgtgagaggagccaagcgcgcagtgggccctggacacgagagcggtgcggtgtcgtgctggcggcggcggcggcggcggcgaaggataaatagggccgtagggccatcgttttgcattgccgtcgcgtggccgtgggttttcatcgacgaacgacgacgactctgccgcgcgcgtttaggcgcgtcgccgccggccacccggccggccacttcgacgcggctgtggtggtttaaaattctccggctcgccgcccacggcctcgctgcacgtagttgcaggtgagtgaggttcttcgattccccccaaacccggcccatctccgacgatccattatttgttcgtccatatgaaaatgcatctctttttgtacccagttgttacctacatgcagcttttactgcttcattcagttatggtcgtgtacatcttcagaaaaccagacatgttcaggcaagaccagtgggtatgcaaaaacaacagcaaagtggctcggcatgtcgacagccagctgctacttctacttctacatataaaccacgcgctggcatgaactccactccagcatggatagacgacatcatcgcacaaatcacataccaggtcaaggcaccacgtttcacaaacctagtgaacacccaagaactattatgcaataccatcattttgctcgatagattttcctagcccagttgtttcatctgagcaagtgtctgtaggaactaaaacacagtagtatgctgtatatactgtcaagcatgaaacgcaaccagatcagctgcaggatttgcagcaccaagctctggccattaggtaggctgcatatcacaacacacaaagggaacatcaaactacatacactagctccgtcccctccagggacactgcaggttggcaggcccaaagctagcacagggtctcgcaacccacaaggtcataatcagtacaagcatccatcggcaaggggaagcaagagcaatcccaggtaggtggacgctggacagatccgtgctcacgccgttccttgctccggacttttctggccgcttgtactagctccgctgttttgtttcgccaacatctgaatctgatcgccataccatagtaggaattagcatagcactcaactgcatttggcgccccgtttcaatctcacgggataaactttagcttcctgctaaactttaactatatgaattaaagtgctaaagtttagtttcaattaccaccattagctctcctgtttagattacaaatggctaaaagtagctaaaaaaagctgctaaagtttatctcgcgagattgaaacagggcctaaatagcaatctagccgactggtcagtgatcactgaaagcttattcagaaaataaacaggtaagatatatatggcatcctgctatggttcctaactttttacaccacttgtgcctaacagatcaagctctctcacgagggtttaattttcatgcaaggcctgacatttctgcgctgaggttacattgctcacagttgttcagtagcagcttgtccaacagtacttgcccgttccagcagtacttccaggcaaagtagcaaatttacgcagagcgcaaaggtagaagctagcaacatccaaaggaaataacaaaacactagcagcatccaaagaaatttggtattctgcactccctattgtatttggttgtcattaaccaaacaacacagtttggagtttggactgaactgaacttgaataaggcgcaaccaatcaaggtcctgcttgtgggctttaccgttcagatttcaagaaaaaaaaatataccgtaccttcctggatctcgtatccttcaaagcatttctcagaagattttccagcttctccagctcatctacatctgattcgtcagcattgctctggggagacctgccggtttgaagaaattgtgattatttatcaaaaatgggaaaccagagtgggtggaaatcctgagttctgggtgtgtaccaggtcgcaatcttgctcagcatcaactgcaaatctgaagaagcttcatccttgttctgtaccaaaaacaccctagtaagctatatttatcgtaaatttcaatattatatatttgctctggtattctacatactgtacaaacaggacattctgttctgcatagtgtgaaaaacatagcattttggttggtgccggcaactggcacagtatgtaaaaacattctttctaaaactatgataaaaaaagcagcgaagctgtaggctgcatcatatgcgttgtaaaagctacatcaagatctttacatcgtttctatttcgatcgtcatttatattccttccttctccagaaaattgctgatagcggttatatgtatcctctatgctgaaaaaggagaaaaaaaatgaatatgatattagctccttgcataatgtactcttggacaatcaacatctatatattcacctcacgtggaacaaaaatgcaggcagttttattggaggacttttgagcatcaatgtgatgctaatggagtttgcattagtggtgtattgatgcaagaggcacatggaggtggattgatggaacattttaatgtcaagaagataaagtgttggtcacatacttcttctatccaaggatgaggcaagatgtagagaggttcgtagcttgatacacgacatgtcaaatagctaaatcgcggttgaacccatatggtttgtatatgttggttcatttcttctatttcttgggtggatatatatatatgaactttgttttggaattgcaaagaactaataggggggatagtatttttgtggtggttgatcatttatctgaagtgataacttttattccctatcataaaagcgacgatgacattcacattgctaacaaagtctttcaagaaatcattcacttgtagaggtagggacttttaaatatatgctcctagcttagcgtcatagatcagttttgcacctctctagtattaaaaacgcctcatccattactactagaggggtagaactgagcagtggtgctaaagtaggggaataggattaaaagtacctctaaagaagaatctatgtctagggttagtccatctttaacgttgcagatttaaagccatatttagatgaagaattgagtcaagaatgactccatttcaattgaggaaggatgataaggacatcacaccttcagatgcgcctactaatcatccgatcgttatataaggtccaatgacttgagcacaaatgtgatgattaaattttcaaaggtaagtgatcctttcgataattttgggaatagattatctaattatgttatcgtgcttgataacattagagagggtcatgaagtaattgaaggtgtggaggtgaagatcaaaaagaacgcccaagaccaattaaaggcattagtccaactcgagtttgagtctgagtggacctttaggaccatcctgtagtaaaacagatgtgcgagacatacacgacatacataatccattttttatgatcaatatatgaatagaaatatattttcataagctaactaataattttgatctaaggtctaatttccaccggaattaatgaaattatcgaaataagtcagcattcaaaatatgttagtgttgtgtcacaattttttggttggctaggcatgtgttgtcttagagcccattaggggacacgttcaaggggtgtgatagccttaggatatataattagtagccactactcatgttaggactcaagttttgcttttaaaaattatctttgaataattgtcattatagggttataaaaccccacttttgtgatcttagtcatacatatattgttagcatttttgttgagctgtgtactttcaagttctttcttgtgttttcgattcactgacatggattagccttcttaacgagatcaaccggattagtgacacggttgatcaccataagagtcgtagtaccacgttccaccaaaacagaagttatcatgaacccgatggaacattaaggactccattatcataacaaatagcgtattaggtaaccttgtgaataattctgattccttgtttggggactaggtagaaaattagtaaaaacatgatgatttggtgatgtttggatgtggggttgtactggttgtactttgggccacttggaaaactaggaatgatatgtgctttagtagtaaaatgattatcgatccttctaatgtgatatttttgtgctatttctagatggattcaagtttattgtgtgctaaaatacccgctgttgggggtcttcttctctgccgaacattttttattacttcttttggatgctgaacaatatagaattatgttttgagttgaataaattagaattttgatctaaaattttgtgataattggtctaattttcttagttgaaagatgaagccgaatatttattcctttatctaaaaaatctaataataacttaaaatgtttaataataggtagacatggatatcggaattctaataactctcgtcgtccaagtatatgagatgcaaccacttttttattctagtctcataatataaggtgttgccttggagcctgaaagcatctaggcccctggttggttttagtgattaatgacaacgtaatattatatgtgactagcgtgtgttttgcagagcaaatggtaagttaggtcgcattacagaaagttgtactacaatggtgaaaacaatccctgagatgagaacttgaagcgacaactgaaacgacgaatcaaaagatgaaagtcttcatattccgagtgttgaaggagttgtagacactcggtatagaattaggtcttctattttgttttagccgtactataaagagaggttgtggatgagtagtttgaccaagagaattctagtgtagtgttggtgcatattcacacttacatctagtgttaggtgtcactctataacacactcacgagttagaacaaaaacggttttgaaaaacaaaaggaaaaacgaagttagggtttctgtcttaggggcaccagactgtccgatgtgcaccagactgtccggtgcaccccctgacagtggtgccagtcagccccgggggcagtgattctgtccccgagaaaatccgagagcaacgagtggagaaaaagaattttagccgccacaccggactgtccggtgtgcaccggacaggtactgttcactgtccgttgtgccatcagcccaactgctagctgtcagaactagccgttggagacgaccgttggcgcaccggtggcacacggactgtccggtgcgcccatacgcagaacagccaggtaacgactagtttggtgagtggggctatttataccccgtccacctaccttattgagtgtcttgctgcccacattgatgaccacatattgctacaacattgcaagcacaacaaagactagtgaggtgactagaaaatcttaattccacgtcaggacctcattagtgcaagtgagagccacctagagcacacaccacatgcattaagcttctcttggtaaagtgaaagtctattgcttgttactcttggtgatcggtatcacctagatggcttggtagcgtttggagcacggtgatcacctcggatgatttgttggtgacccgactcaaagattgtaagcggtcgtgagggatccaccgcgccggagtggcaaaggatcacctcatagtgagtacttagttcttgaccaagggggagcgatacccttgcgcgggtgctccaacgatgactaggaaagagtgccgactcttcgatacctcgacaaaatattggaggagtcttctcaaccttgttttactttccgcatttaattcaagcattttactttattcaattgtttagcaagtagttgaagtgatgtcttaggattgttatctttctagtagtattctcttattgctagtagttaggtgaagttgggctctagcttagggtttaaatatttgctcagggtttaattgttgttgaatttttagaaaaaagcccaattcaccccctcttgggcatcatgattctttcagagccatactaagagcatctctaaccgctctccaacaaataactattaaaaacagattttaagggccatactaagagcatctctaaccgctctccaacaaataactattaaaaactagtttttaggagtatctcaaaaattattagggtagattttaaccatttctccaaccattctcataactaggccaagccactcttggacccacattgatatgtttcacttgtgtattttcttcttccacgactttgacatctgtccaacgaccaaacatataccaccatcaaaggttgttggttgtacgtgggcggacgtggccggtgagagactaccaacggcgagaccgagcgatagcagagatctgatcgacaacggaggttcaatagcgggttgtgagatggtagaagcaggatagtgtgggcgcgttgccagcaacggacgacgaggttgcgcagatggggaggatgcgctcacggaggtagacgacgaggttgcgtgggtggtagcggattgtgaggttgtgtgggcgtggcacgtttgtgttttctaggaagcccaaaaagcccccgtttgtagctacaaatgagagttttaatgactataaagaagttggagcactttagagaaaccgtcgaagacaagttttttgtgtttt

SEQ ID NO: 33867 - DNA, 7174 bp, Zea Mays
gtgtcccttcgtggggtgcgcccgccacctgccgatgcgacgtgagaggagccaagcgcgcagtgggccctggacacgagagcggtgcggtgtcgtgctggcggcggcggcggcggcggcgaaggataaatagggccgtagggccatcgttttgcattgccgtcgcgtggccgtgggttttcatcgacgaacgacgacgactctgccgcgcgcgtttaggcgcgtcgccgccggccacccggccggccacttcgacgcggctgtggtggtttaaaattctccggctcgccgcccacggcctcgctgcacgtagttgcaggtgagtgaggttcttcgattccccccaaacccggcccatctccgacgatccattatttgttcgtccatatgaaaatgcatctctttttgtacccagttgttacctacatgcagcttttactgcttcattcagttatggtcgtgtacatcttcagaaaaccagacatgttcaggcaagaccagtgggtatgcaaaaacaacagcaaagtggctcggcatgtcgacagccagctgctacttctacttctacatataaaccacgcgctggcatgaactccactccagcatggatagacgacatcatcgcacaaatcacataccaggtcaaggcaccacgtttcacaaacctagtgaacacccaagaactattatgcaataccatcattttgctcgatagattttcctagcccagttgtttcatctgagcaagtgtctgtaggaactaaaacacagtagtatgctgtatatactgtcaagcatgaaacgcaaccagatcagctgcaggatttgcagcaccaagctctggccattaggtaggctgcatatcacaacacacaaagggaacatcaaactacatacactagctccgtcccctccagggacactgcaggttggcaggcccaaagctagcacagggtctcgcaacccacaaggtcataatcagtacaagcatccatcggcaaggggaagcaagagcaatcccaggtaggtggacgctggacagatccgtgctcacgccgttccttgctccggacttttctggccgcttgtactagctccgctgttttgtttcgccaacatctgaatctgatcgccataccatagtaggaattagcatagcactcaactgcatttggcgccccgtttcaatctcacgggataaactttagcttcctgctaaactttaactatatgaattaaagtgctaaagtttagtttcaattaccaccattagctctcctgtttagattacaaatggctaaaagtagctaaaaaaagctgctaaagtttatctcgcgagattgaaacagggcctaaatagcaatctagccgactggtcagtgatcactgaaagcttattcagaaaataaacaggtaagatatatatggcatcctgctatggttcctaactttttacaccacttgtgcctaacagatcaagctctctcacgagggtttaattttcatgcaaggcctgacatttctgcgctgaggttacattgctcacagttgttcagtagcagcttgtccaacagtacttgcccgttccagcagtacttccaggcaaagtagcaaatttacgcagagcgcaaaggtagaagctagcaacatccaaaggaaataacaaaacactagcagcatccaaagaaatttggtattctgcactccctattgtatttggttgtcattaaccaaacaacacagtttggagtttggactgaactgaacttgaataaggcgcaaccaatcaaggtcctgcttgtgggctttaccgttcagatttcaagaaaaaaaaatataccgtaccttcctggatctcgtatccttcaaagcatttctcagaagattttccagcttctccagctcatctacatctgattcgtcagcattgctctggggagacctgccggtttgaagaaattgtgattatttatcaaaaatgggaaaccagagtgggtggaaatcctgagttctgggtgtgtaccaggtcgcaatcttgctcagcatcaactgcaaatctgaagaagcttcatccttgttctgtaccaaaaacaccctagtaagctatatttatcgtaaatttcaatattatatatttgctctggtattctacatactgtacaaacaggacattctgttctgcatagtgtgaaaaacatagcattttggttggtgccggcaactggcacagtatgtaaaaacattctttctaaaactatgataaaaaaagcagcgaagctgtaggctgcatcatatgcgttgtaaaagctacatcaagatctttacatcgtttctatttcgatcgtcatttatattccttccttctccagaaaattgctgatagcggttatatgtatcctctatgctgaaaaaggagaaaaaaaatgaatatgatattagctccttgcataatgtactcttggacaatcaacatctatatattcacctcacgtggaacaaaaatgcaggcagttttattggaggacttttgagcatcaatgtgatgctaatggagtttgcattagtggtgtattgatgcaaggtaagctcgttgcttactttagtgagaaattaaatagacattcttaattattctatgtatggcgaagaactgtatgcagaatttcctaattactctaataactaagtcaaaataaactgaaacgtacacatgcctatgtgggttgaatttattgaatcattttcttatgtgatcaaacataagaaagaaaaagataatattattgttgatgctttgtccagataatatactatgttgttccaatttgattgttctataattaggcttaaaatattaaagtacaatatgttaataataatgaacttaaggatgtgacaaaaaatatatataaagagatgtatatagaacaaatttgtgatgcatggtgagtttttgtttagagctaaccgataatgcattctacttgtttatgttcgtcttttgttgttgcaagaggcacatggaggtggattgatggaacattttaatgtcaagaagataaagtgttggtcacatacttcttctatccaaggatgaggcaagatgtagagaggttcgtagcttgatacacgacatgtcaaatagctaaatcgcggttgaacccatatggtttgtatatgttggttcatttcttctatttcttgggtggatatatatatatgaactttgttttggaattgcaaagaactaataggggggatagtatttttgtggtggttgatcatttatctgaagtgataacttttattccctatcataaaagcgacgatgacattcacattgctaacaaagtctttcaagaaatcattcacttgtagaggtagggacttttaaatatatgctcctagcttagcgtcatagatcagttttgcacctctctagtattaaaaacgcctcatccattactactagaggggtagaactgagcagtggtgctaaagtaggggaataggattaaaagtacctctaaagaagaatctatgtctagggttagtccatctttaacgttgcagatttaaagccatatttagatgaagaattgagtcaagaatgactccatttcaattgaggaaggatgataaggacatcacaccttcagatgcgcctactaatcatccgatcgttatataaggtccaatgacttgagcacaaatgtgatgattaaattttcaaaggtaagtgatcctttcgataattttgggaatagattatctaattatgttatcgtgcttgataacattagagagggtcatgaagtaattgaaggtgtggaggtgaagatcaaaaagaacgcccaagaccaattaaaggcattagtccaactcgagtttgagtctgagtggacctttaggaccatcctgtagtaaaacagatgtgcgagacatacacgacatacataatccattttttatgatcaatatatgaatagaaatatattttcataagctaactaataattttgatctaaggtctaatttccaccggaattaatgaaattatcgaaataagtcagcattcaaaatatgttagtgttgtgtcacaattttttggttggctaggcatgtgttgtcttagagcccattaggggacacgttcaaggggtgtgatagccttaggatatataattagtagccactactcatgttaggactcaagttttgcttttaaaaattatctttgaataattgtcattatagggttataaaaccccacttttgtgatcttagtcatacatatattgttagcatttttgttgagctgtgtactttcaagttctttcttgtgttttcgattcactgacatggattagccttcttaacgagatcaaccggattagtgacacggttgatcaccataagagtcgtagtaccacgttccaccaaaacagaagttatcatgaacccgatggaacattaaggactccattatcataacaaatagcgtattaggtaaccttgtgaataattctgattccttgtttggggactaggtagaaaattagtaaaaacatgatgatttggtgatgtttggatgtggggttgtactggttgtactttgggccacttggaaaactaggaatgatatgtgctttagtagtaaaatgattatcgatccttctaatgtgatatttttgtgctatttctagatggattcaagtttattgtgtgctaaaatacccgctgttgggggtcttcttctctgccgaacattttttattacttcttttggatgctgaacaatatagaattatgttttgagttgaataaattagaattttgatctaaaattttgtgataattggtctaattttcttagttgaaagatgaagccgaatatttattcctttatctaaaaaatctaataataacttaaaatgtttaataataggtagacatggatatcggaattctaataactctcgtcgtccaagtatatgagatgcaaccacttttttattctagtctcataatataaggtgttgccttggagcctgaaagcatctaggcccctggttggttttagtgattaatgacaacgtaatattatatgtgactagcgtgtgttttgcagagcaaatggtaagttaggtcgcattacagaaagttgtactacaatggtgaaaacaatccctgagatgagaacttgaagcgacaactgaaacgacgaatcaaaagatgaaagtcttcatattccgagtgttgaaggagttgtagacactcggtatagaattaggtcttctattttgttttagccgtactataaagagaggttgtggatgagtagtttgaccaagagaattctagtgtagtgttggtgcatattcacacttacatctagtgttaggtgtcactctataacacactcacgagttagaacaaaaacggttttgaaaaacaaaaggaaaaacgaagttagggtttctgtcttaggggcaccagactgtccgatgtgcaccagactgtccggtgcaccccctgacagtggtgccagtcagccccgggggcagtgattctgtccccgagaaaatccgagagcaacgagtggagaaaaagaattttagccgccacaccggactgtccggtgtgcaccggacaggtactgttcactgtccgttgtgccatcagcccaactgctagctgtcagaactagccgttggagacgaccgttggcgcaccggtggcacacggactgtccggtgcgcccatacgcagaacagccaggtaacgactagtttggtgagtggggctatttataccccgtccacctaccttattgagtgtcttgctgcccacattgatgaccacatattgctacaacattgcaagcacaacaaagactagtgaggtgactagaaaatcttaattccacgtcaggacctcattagtgcaagtgagagccacctagagcacacaccacatgcattaagcttctcttggtaaagtgaaagtctattgcttgttactcttggtgatcggtatcacctagatggcttggtagcgtttggagcacggtgatcacctcggatgatttgttggtgacccgactcaaagattgtaagcggtcgtgagggatccaccgcgccggagtggcaaaggatcacctcatagtgagtacttagttcttgaccaagggggagcgatacccttgcgcgggtgctccaacgatgactaggaaagagtgccgactcttcgatacctcgacaaaatattggaggagtcttctcaaccttgttttactttccgcatttaattcaagcattttactttattcaattgtttagcaagtagttgaagtgatgtcttaggattgttatctttctagtagtattctcttattgctagtagttaggtgaagttgggctctagcttagggtttaaatatttgctcagggtttaattgttgttgaatttttagaaaaaagcccaattcaccccctcttgggcatcatgattctttcagagccatactaagagcatctctaaccgctctccaacaaataactattaaaaacagattttaagggccatactaagagcatctctaaccgctctccaacaaataactattaaaaactagtttttaggagtatctcaaaaattattagggtagattttaaccatttctccaaccattctcataactaggccaagccactcttggacccacattgatatgtttcacttgtgtattttcttcttccacgactttgacatctgtccaacgaccaaacatataccaccatcaaaggttgttggttgtacgtgggcggacgtggccggtgagagactaccaacggcgagaccgagcgatagcagagatctgatcgacaacggaggttcaatagcgggttgtgagatggtagaagcaggatagtgtgggcgcgttgccagcaacggacgacgaggttgcgcagatggggaggatgcgctcacggaggtagacgacgaggttgcgtgggtggtagcggattgtgaggttgtgtgggcgtggcacgtttgtgttttctaggaagcccaaaaagcccccgtttgtagctacaaatgagagttttaatgactataaagaagttggagcactttagagaaaccgtcgaagacaagttttttgtgtttt

SEQ ID NO: 33868 - DNA, 6468 bp, Zea Mays
gtgtcccttcgtggggtgcgcccgccacctgccgatgcgacgtgagaggagccaagcgcgcagtgggccctggacacgagagcggtgcggtgtcgtgctggcggcggcggcggcggcggcgaaggataaatagggccgtagggccatcgttttgcattgccgtcgcgtggccgtgggttttcatcgacgaacgacgacgactctgccgcgcgcgtttaggcgcgtcgccgccggccacccggccggccacttcgacgcggctgtggtggtttaaaattctccggctcgccgcccacggcctcgctgcacgtagttgcaggtgagtgaggttcttcgattccccccaaacccggcccatctccgacgatccattatttgttcgtccatatgaaaatgcatctctttttgtacccagttgttacctacatgcagcttttactgcttcattcagttatggtcgtgtacatcttcagaaaaccagacatgttcaggcaagaccagtgggtatgcaaaaacaacagcaaagtggctcggcatgtcgacagccagctgctacttctacttctacatataaaccacgcgctggcatgaactccactccagcatggatagacgacatcatcgcacaaatcacataccaggtcaaggcaccacgtttcacaaacctagtgaacacccaagaactattatgcaataccatcattttgctcgatagattttcctagcccagttgtttcatctgagcaagtgtctgtaggaactaaaacacagtagtatgctgtatatactgtcaagcatgaaacgcaaccagatcagctgcaggatttgcagcaccaagctctggccattaggtaggctgcatatcacaacacacaaagggaacatcaaactacatacactagctccgtcccctccagggacactgcaggttggcaggcccaaagctagcacagggtctcgcaacccacaaggtcataatcagtacaagcatccatcggcaaggggaagcaagagcaatcccaggtaggtggacgctggacagatccgtgctcacgccgttccttgctccggacttttctggccgcttgtactagctccgctgttttgtttcgccaacatctgaatctgatcgccataccatagtaggaattagcatagcactcaactgcatttggcgccccgtttcaatctcacgggataaactttagcttcctgctaaactttaactatatgaattaaagtgctaaagtttagtttcaattaccaccattagctctcctgtttagattacaaatggctaaaagtagctaaaaaaagctgctaaagtttatctcgcgagattgaaacagggcctaaatagcaatctagccgactggtcagtgatcactgaaagcttattcagaaaataaacaggtaagatatatatggcatcctgctatggttcctaactttttacaccacttgtgcctaacagatcaagctctctcacgagggtttaattttcatgcaaggcctgacatttctgcgctgaggttacattgctcacagttgttcagtagcagcttgtccaacagtacttgcccgttccagcagtacttccaggcaaagtagcaaatttacgcagagcgcaaaggtagaagctagcaacatccaaaggaaataacaaaacactagcagcatccaaagaaatttggtattctgcactccctattgtatttggttgtcattaaccaaacaacacagtttggagtttggactgaactgaacttgaataaggcgcaaccaatcaaggtcctgcttgtgggctttaccgttcagatttcaagaaaaaaaaatataccgtaccttcctggatctcgtatccttcaaagcatttctcagaagattttccagcttctccagctcatctacatctgattcgtcagcattgctctggggagacctgccggtttgaagaaattgtgattatttatcaaaaatgggaaaccagagtgggtggaaatcctgagttctgggtgtgtaccaggtcgcaatcttgctcagcatcaactgcaaatctgaagaagcttcatccttgttctgtaccaaaaacaccctaaaaattgctgatagcggttatatgtatcctctatgctgaaaaaggagaaaaaaaatgaatatgatattagctccttgcataatgtactcttggacaatcaacatctatatattcacctcacgtggaacaaaaatgcaggcagttttattggaggacttttgagcatcaatgtgatgctaatggagtttgcattagtggtgtattgatgcaaggcacatggaggtggattgatggaacattttaatgtcaagaagataaagtgttggtcacatacttcttctatccaaggatgaggcaagatgtagagaggttcgtagcttgatacacgacatgtcaaatagctaaatcgcggttgaacccatatggtttgtatatgttggttcatttcttctatttcttgggtggatatatatatatgaactttgttttggaattgcaaagaactaataggggggatagtatttttgtggtggttgatcatttatctgaagtgataacttttattccctatcataaaagcgacgatgacattcacattgctaacaaagtctttcaagaaatcattcacttgtagaggtagggacttttaaatatatgctcctagcttagcgtcatagatcagttttgcacctctctagtattaaaaacgcctcatccattactactagaggggtagaactgagcagtggtgctaaagtaggggaataggattaaaagtacctctaaagaagaatctatgtctagggttagtccatctttaacgttgcagatttaaagccatatttagatgaagaattgagtcaagaatgactccatttcaattgaggaaggatgataaggacatcacaccttcagatgcgcctactaatcatccgatcgttatataaggtccaatgacttgagcacaaatgtgatgattaaattttcaaaggtaagtgatcctttcgataattttgggaatagattatctaattatgttatcgtgcttgataacattagagagggtcatgaagtaattgaaggtgtggaggtgaagatcaaaaagaacgcccaagaccaattaaaggcattagtccaactcgagtttgagtctgagtggacctttaggaccatcctgtagtaaaacagatgtgcgagacatacacgacatacataatccattttttatgatcaatatatgaatagaaatatattttcataagctaactaataattttgatctaaggtctaatttccaccggaattaatgaaattatcgaaataagtcagcattcaaaatatgttagtgttgtgtcacaattttttggttggctaggcatgtgttgtcttagagcccattaggggacacgttcaaggggtgtgatagccttaggatatataattagtagccactactcatgttaggactcaagttttgcttttaaaaattatctttgaataattgtcattatagggttataaaaccccacttttgtgatcttagtcatacatatattgttagcatttttgttgagctgtgtactttcaagttctttcttgtgttttcgattcactgacatggattagccttcttaacgagatcaaccggattagtgacacggttgatcaccataagagtcgtagtaccacgttccaccaaaacagaagttatcatgaacccgatggaacattaaggactccattatcataacaaatagcgtattaggtaaccttgtgaataattctgattccttgtttggggactaggtagaaaattagtaaaaacatgatgatttggtgatgtttggatgtggggttgtactggttgtactttgggccacttggaaaactaggaatgatatgtgctttagtagtaaaatgattatcgatccttctaatgtgatatttttgtgctatttctagatggattcaagtttattgtgtgctaaaatacccgctgttgggggtcttcttctctgccgaacattttttattacttcttttggatgctgaacaatatagaattatgttttgagttgaataaattagaattttgatctaaaattttgtgataattggtctaattttcttagttgaaagatgaagccgaatatttattcctttatctaaaaaatctaataataacttaaaatgtttaataataggtagacatggatatcggaattctaataactctcgtcgtccaagtatatgagatgcaaccacttttttattctagtctcataatataaggtgttgccttggagcctgaaagcatctaggcccctggttggttttagtgattaatgacaacgtaatattatatgtgactagcgtgtgttttgcagagcaaatggtaagttaggtcgcattacagaaagttgtactacaatggtgaaaacaatccctgagatgagaacttgaagcgacaactgaaacgacgaatcaaaagatgaaagtcttcatattccgagtgttgaaggagttgtagacactcggtatagaattaggtcttctattttgttttagccgtactataaagagaggttgtggatgagtagtttgaccaagagaattctagtgtagtgttggtgcatattcacacttacatctagtgttaggtgtcactctataacacactcacgagttagaacaaaaacggttttgaaaaacaaaaggaaaaacgaagttagggtttctgtcttaggggcaccagactgtccgatgtgcaccagactgtccggtgcaccccctgacagtggtgccagtcagccccgggggcagtgattctgtccccgagaaaatccgagagcaacgagtggagaaaaagaattttagccgccacaccggactgtccggtgtgcaccggacaggtactgttcactgtccgttgtgccatcagcccaactgctagctgtcagaactagccgttggagacgaccgttggcgcaccggtggcacacggactgtccggtgcgcccatacgcagaacagccaggtaacgactagtttggtgagtggggctatttataccccgtccacctaccttattgagtgtcttgctgcccacattgatgaccacatattgctacaacattgcaagcacaacaaagactagtgaggtgactagaaaatcttaattccacgtcaggacctcattagtgcaagtgagagccacctagagcacacaccacatgcattaagcttctcttggtaaagtgaaagtctattgcttgttactcttggtgatcggtatcacctagatggcttggtagcgtttggagcacggtgatcacctcggatgatttgttggtgacccgactcaaagattgtaagcggtcgtgagggatccaccgcgccggagtggcaaaggatcacctcatagtgagtacttagttcttgaccaagggggagcgatacccttgcgcgggtgctccaacgatgactaggaaagagtgccgactcttcgatacctcgacaaaatattggaggagtcttctcaaccttgttttactttccgcatttaattcaagcattttactttattcaattgtttagcaagtagttgaagtgatgtcttaggattgttatctttctagtagtattctcttattgctagtagttaggtgaagttgggctctagcttagggtttaaatatttgctcagggtttaattgttgttgaatttttagaaaaaagcccaattcaccccctcttgggcatcatgattctttcagagccatactaagagcatctctaaccgctctccaacaaataactattaaaaacagattttaagggccatactaagagcatctctaaccgctctccaacaaataactattaaaaactagtttttaggagtatctcaaaaattattagggtagattttaaccatttctccaaccattctcataactaggccaagccactcttggacccacattgatatgtttcacttgtgtattttcttcttccacgactttgacatctgtccaacgaccaaacatataccaccatcaaaggttgttggttgtacgtgggcggacgtggccggtgagagactaccaacggcgagaccgagcgatagcagagatctgatcgacaacggaggttcaatagcgggttgtgagatggtagaagcaggatagtgtgggcgcgttgccagcaacggacgacgaggttgcgcagatggggaggatgcgctcacggaggtagacgacgaggttgcgtgggtggtagcggattgtgaggttgtgtgggcgtggcacgtttgtgttttctaggaagcccaaaaagcccccgtttgtagctacaaatgagagttttaatgactataaagaagttggagcactttagagaaaccgtcgaagacaagttttttgtgtttt

SEQ ID NO: 33869 - DNA, 5637 bp, Zea Mays
gtgtcccttcgtggggtgcgcccgccacctgccgatgcgacgtgagaggagccaagcgcgcagtgggccctggacacgagagcggtgcggtgtcgtgctggcggcggcggcggcggcggcgaaggataaatagggccgtagggccatcgttttgcattgccgtcgcgtggccgtgggttttcatcgacgaacgacgacgactctgccgcgcgcgtttaggcgcgtcgccgccggccacccggccggccacttcgacgcggctgtggtggtttaaaattctccggctcgccgcccacggcctcgctgcacgtagttgcaggtgagtgaggttcttcgattccccccaaacccggcccatctccgacgatccattatttgttcgtccatatgaaaatgcatctctttttgtacccagttgttacctacatgcagcttttactgcttcattcagttatggtcgtgtacatcttcagaaaaccagacatgttcaggcaagaccagtgggtatgcaaaaacaacagcaaagtggctcggcatgtcgacagccagctgctacttctacttctacatataaaccacgcgctggcatgaactccactccagcatggatagacgacatcatcgcacaaatcacataccagatcaagctctctcacgagggtttaattttcatgcaaggcctgacatttctgcgctgaggttacattgctcacagttgttcagtagcagcttgtccaacagtacttgcccgttccagcagtacttccaggcaaagtagcaaatttacgcagagcgcaaaggtagaagctagcaacatccaaaggaaataacaaaacactagcagcatccaaagaaatttggtattctgcactccctattgtatttggttgtcattaaccaaacaacacagtttggagtttggactgaactgaacttgaataaggcgcaaccaatcaaggtcctgcttgtgggctttaccgttcagatttcaagaaaaaaaaatataccgtaccttcctggatctcgtatccttcaaagcatttctcagaagattttccagcttctccagctcatctacatctgattcgtcagcattgctctggggagacctgccggtttgaagaaattgtgattatttatcaaaaatgggaaaccagagtgggtggaaatcctgagttctgggtgtgtaccaggtcgcaatcttgctcagcatcaactgcaaatctgaagaagcttcatccttgttctgtaccaaaaacaccctaaaaattgctgatagcggttatatgtatcctctatgctgaaaaaggagaaaaaaaatgaatatgatattagctccttgcataatgtactcttggacaatcaacatctatatattcacctcacgtggaacaaaaatgcaggcagttttattggaggacttttgagcatcaatgtgatgctaatggagtttgcattagtggtgtattgatgcaagaggcacatggaggtggattgatggaacattttaatgtcaagaagataaagtgttggtcacatacttcttctatccaaggatgaggcaagatgtagagaggttcgtagcttgatacacgacatgtcaaatagctaaatcgcggttgaacccatatggtttgtatatgttggttcatttcttctatttcttgggtggatatatatatatgaactttgttttggaattgcaaagaactaataggggggatagtatttttgtggtggttgatcatttatctgaagtgataacttttattccctatcataaaagcgacgatgacattcacattgctaacaaagtctttcaagaaatcattcacttgtagaggtagggacttttaaatatatgctcctagcttagcgtcatagatcagttttgcacctctctagtattaaaaacgcctcatccattactactagaggggtagaactgagcagtggtgctaaagtaggggaataggattaaaagtacctctaaagaagaatctatgtctagggttagtccatctttaacgttgcagatttaaagccatatttagatgaagaattgagtcaagaatgactccatttcaattgaggaaggatgataaggacatcacaccttcagatgcgcctactaatcatccgatcgttatataaggtccaatgacttgagcacaaatgtgatgattaaattttcaaaggtaagtgatcctttcgataattttgggaatagattatctaattatgttatcgtgcttgataacattagagagggtcatgaagtaattgaaggtgtggaggtgaagatcaaaaagaacgcccaagaccaattaaaggcattagtccaactcgagtttgagtctgagtggacctttaggaccatcctgtagtaaaacagatgtgcgagacatacacgacatacataatccattttttatgatcaatatatgaatagaaatatattttcataagctaactaataattttgatctaaggtctaatttccaccggaattaatgaaattatcgaaataagtcagcattcaaaatatgttagtgttgtgtcacaattttttggttggctaggcatgtgttgtcttagagcccattaggggacacgttcaaggggtgtgatagccttaggatatataattagtagccactactcatgttaggactcaagttttgcttttaaaaattatctttgaataattgtcattatagggttataaaaccccacttttgtgatcttagtcatacatatattgttagcatttttgttgagctgtgtactttcaagttctttcttgtgttttcgattcactgacatggattagccttcttaacgagatcaaccggattagtgacacggttgatcaccataagagtcgtagtaccacgttccaccaaaacagaagttatcatgaacccgatggaacattaaggactccattatcataacaaatagcgtattaggtaaccttgtgaataattctgattccttgtttggggactaggtagaaaattagtaaaaacatgatgatttggtgatgtttggatgtggggttgtactggttgtactttgggccacttggaaaactaggaatgatatgtgctttagtagtaaaatgattatcgatccttctaatgtgatatttttgtgctatttctagatggattcaagtttattgtgtgctaaaatacccgctgttgggggtcttcttctctgccgaacattttttattacttcttttggatgctgaacaatatagaattatgttttgagttgaataaattagaattttgatctaaaattttgtgataattggtctaattttcttagttgaaagatgaagccgaatatttattcctttatctaaaaaatctaataataacttaaaatgtttaataataggtagacatggatatcggaattctaataactctcgtcgtccaagtatatgagatgcaaccacttttttattctagtctcataatataaggtgttgccttggagcctgaaagcatctaggcccctggttggttttagtgattaatgacaacgtaatattatatgtgactagcgtgtgttttgcagagcaaatggtaagttaggtcgcattacagaaagttgtactacaatggtgaaaacaatccctgagatgagaacttgaagcgacaactgaaacgacgaatcaaaagatgaaagtcttcatattccgagtgttgaaggagttgtagacactcggtatagaattaggtcttctattttgttttagccgtactataaagagaggttgtggatgagtagtttgaccaagagaattctagtgtagtgttggtgcatattcacacttacatctagtgttaggtgtcactctataacacactcacgagttagaacaaaaacggttttgaaaaacaaaaggaaaaacgaagttagggtttctgtcttaggggcaccagactgtccgatgtgcaccagactgtccggtgcaccccctgacagtggtgccagtcagccccgggggcagtgattctgtccccgagaaaatccgagagcaacgagtggagaaaaagaattttagccgccacaccggactgtccggtgtgcaccggacaggtactgttcactgtccgttgtgccatcagcccaactgctagctgtcagaactagccgttggagacgaccgttggcgcaccggtggcacacggactgtccggtgcgcccatacgcagaacagccaggtaacgactagtttggtgagtggggctatttataccccgtccacctaccttattgagtgtcttgctgcccacattgatgaccacatattgctacaacattgcaagcacaacaaagactagtgaggtgactagaaaatcttaattccacgtcaggacctcattagtgcaagtgagagccacctagagcacacaccacatgcattaagcttctcttggtaaagtgaaagtctattgcttgttactcttggtgatcggtatcacctagatggcttggtagcgtttggagcacggtgatcacctcggatgatttgttggtgacccgactcaaagattgtaagcggtcgtgagggatccaccgcgccggagtggcaaaggatcacctcatagtgagtacttagttcttgaccaagggggagcgatacccttgcgcgggtgctccaacgatgactaggaaagagtgccgactcttcgatacctcgacaaaatattggaggagtcttctcaaccttgttttactttccgcatttaattcaagcattttactttattcaattgtttagcaagtagttgaagtgatgtcttaggattgttatctttctagtagtattctcttattgctagtagttaggtgaagttgggctctagcttagggtttaaatatttgctcagggtttaattgttgttgaatttttagaaaaaagcccaattcaccccctcttgggcatcatgattctttcagagccatactaagagcatctctaaccgctctccaacaaataactattaaaaacagattttaagggccatactaagagcatctctaaccgctctccaacaaataactattaaaaactagtttttaggagtatctcaaaaattattagggtagattttaaccatttctccaaccattctcataactaggccaagccactcttggacccacattgatatgtttcacttgtgtattttcttcttccacgactttgacatctgtccaacgaccaaacatataccaccatcaaaggttgttggttgtacgtgggcggacgtggccggtgagagactaccaacggcgagaccgagcgatagcagagatctgatcgacaacggaggttcaatagcgggttgtgagatggtagaagcaggatagtgtgggcgcgttgccagcaacggacgacgaggttgcgcagatggggaggatgcgctcacggaggtagacgacgaggttgcgtgggtggtagcggattgtgaggttgtgtgggcgtggcacgtttgtgttttctaggaagcccaaaaagcccccgtttgtagctacaaatgagagttttaatgactataaagaagttggagcactttagagaaaccgtcgaagacaagttttttgtgtttt

SEQ ID NO: 33870 - DNA, 6315 bp, Zea Mays
gtgtcccttcgtggggtgcgcccgccacctgccgatgcgacgtgagaggagccaagcgcgcagtgggccctggacacgagagcggtgcggtgtcgtgctggcggcggcggcggcggcggcgaaggataaatagggccgtagggccatcgttttgcattgccgtcgcgtggccgtgggttttcatcgacgaacgacgacgactctgccgcgcgcgtttaggcgcgtcgccgccggccacccggccggccacttcgacgcggctgtggtggtttaaaattctccggctcgccgcccacggcctcgctgcacgtagttgcagttgttacctacatgcagcttttactgcttcattcagttatggtcgtgtacatcttcagaaaaccagacatgttcaggcaagaccagtgggtatgcaaaaacaacagcaaagtggctcggcatgtcgacagccagctgctacttctacttctacatataaaccacgcgctggcatgaactccactccagcatggatagacgacatcatcgcacaaatcacataccaggtcaaggcaccacgtttcacaaacctagtgaacacccaagaactattatgcaataccatcattttgctcgatagattttcctagcccagttgtttcatctgagcaagtgtctgtaggaactaaaacacagtagtatgctgtatatactgtcaagcatgaaacgcaaccagatcagctgcaggatttgcagcaccaagctctggccattaggtaggctgcatatcacaacacacaaagggaacatcaaactacatacactagctccgtcccctccagggacactgcaggttggcaggcccaaagctagcacagggtctcgcaacccacaaggtcataatcagtacaagcatccatcggcaaggggaagcaagagcaatcccaggtaggtggacgctggacagatccgtgctcacgccgttccttgctccggacttttctggccgcttgtactagctccgctgttttgtttcgccaacatctgaatctgatcgccataccatagtaggaattagcatagcactcaactgcatttggcgccccgtttcaatctcacgggataaactttagcttcctgctaaactttaactatatgaattaaagtgctaaagtttagtttcaattaccaccattagctctcctgtttagattacaaatggctaaaagtagctaaaaaaagctgctaaagtttatctcgcgagattgaaacagggcctaaatagcaatctagccgactggtcagtgatcactgaaagcttattcagaaaataaacaggtaagatatatatggcatcctgctatggttcctaactttttacaccacttgtgcctaacagatcaagctctctcacgagggtttaattttcatgcaaggcctgacatttctgcgctgaggttacattgctcacagttgttcagtagcagcttgtccaacagtacttgcccgttccagcagtacttccaggcaaagtagcaaatttacgcagagcgcaaaggtagaagctagcaacatccaaaggaaataacaaaacactagcagcatccaaagaaatttggtattctgcactccctattgtatttggttgtcattaaccaaacaacacagtttggagtttggactgaactgaacttgaataaggcgcaaccaatcaaggtcctgcttgtgggctttaccgttcagatttcaagaaaaaaaaatataccgtaccttcctggatctcgtatccttcaaagcatttctcagaagattttccagcttctccagctcatctacatctgattcgtcagcattgctctggggagacctgccggtttgaagaaattgtgattatttatcaaaaatgggaaaccagagtgggtggaaatcctgagttctgggtgtgtaccaggtcgcaatcttgctcagcatcaactgcaaatctgaagaagcttcatccttgttctgtaccaaaaacaccctaaaaattgctgatagcggttatatgtatcctctatgctgaaaaaggagaaaaaaaatgaatatgatattagctccttgcataatgtactcttggacaatcaacatctatatattcacctcacgtggaacaaaaatgcaggcagttttattggagaggcacatggaggtggattgatggaacattttaatgtcaagaagataaagtgttggtcacatacttcttctatccaaggatgaggcaagatgtagagaggttcgtagcttgatacacgacatgtcaaatagctaaatcgcggttgaacccatatggtttgtatatgttggttcatttcttctatttcttgggtggatatatatatatgaactttgttttggaattgcaaagaactaataggggggatagtatttttgtggtggttgatcatttatctgaagtgataacttttattccctatcataaaagcgacgatgacattcacattgctaacaaagtctttcaagaaatcattcacttgtagaggtagggacttttaaatatatgctcctagcttagcgtcatagatcagttttgcacctctctagtattaaaaacgcctcatccattactactagaggggtagaactgagcagtggtgctaaagtaggggaataggattaaaagtacctctaaagaagaatctatgtctagggttagtccatctttaacgttgcagatttaaagccatatttagatgaagaattgagtcaagaatgactccatttcaattgaggaaggatgataaggacatcacaccttcagatgcgcctactaatcatccgatcgttatataaggtccaatgacttgagcacaaatgtgatgattaaattttcaaaggtaagtgatcctttcgataattttgggaatagattatctaattatgttatcgtgcttgataacattagagagggtcatgaagtaattgaaggtgtggaggtgaagatcaaaaagaacgcccaagaccaattaaaggcattagtccaactcgagtttgagtctgagtggacctttaggaccatcctgtagtaaaacagatgtgcgagacatacacgacatacataatccattttttatgatcaatatatgaatagaaatatattttcataagctaactaataattttgatctaaggtctaatttccaccggaattaatgaaattatcgaaataagtcagcattcaaaatatgttagtgttgtgtcacaattttttggttggctaggcatgtgttgtcttagagcccattaggggacacgttcaaggggtgtgatagccttaggatatataattagtagccactactcatgttaggactcaagttttgcttttaaaaattatctttgaataattgtcattatagggttataaaaccccacttttgtgatcttagtcatacatatattgttagcatttttgttgagctgtgtactttcaagttctttcttgtgttttcgattcactgacatggattagccttcttaacgagatcaaccggattagtgacacggttgatcaccataagagtcgtagtaccacgttccaccaaaacagaagttatcatgaacccgatggaacattaaggactccattatcataacaaatagcgtattaggtaaccttgtgaataattctgattccttgtttggggactaggtagaaaattagtaaaaacatgatgatttggtgatgtttggatgtggggttgtactggttgtactttgggccacttggaaaactaggaatgatatgtgctttagtagtaaaatgattatcgatccttctaatgtgatatttttgtgctatttctagatggattcaagtttattgtgtgctaaaatacccgctgttgggggtcttcttctctgccgaacattttttattacttcttttggatgctgaacaatatagaattatgttttgagttgaataaattagaattttgatctaaaattttgtgataattggtctaattttcttagttgaaagatgaagccgaatatttattcctttatctaaaaaatctaataataacttaaaatgtttaataataggtagacatggatatcggaattctaataactctcgtcgtccaagtatatgagatgcaaccacttttttattctagtctcataatataaggtgttgccttggagcctgaaagcatctaggcccctggttggttttagtgattaatgacaacgtaatattatatgtgactagcgtgtgttttgcagagcaaatggtaagttaggtcgcattacagaaagttgtactacaatggtgaaaacaatccctgagatgagaacttgaagcgacaactgaaacgacgaatcaaaagatgaaagtcttcatattccgagtgttgaaggagttgtagacactcggtatagaattaggtcttctattttgttttagccgtactataaagagaggttgtggatgagtagtttgaccaagagaattctagtgtagtgttggtgcatattcacacttacatctagtgttaggtgtcactctataacacactcacgagttagaacaaaaacggttttgaaaaacaaaaggaaaaacgaagttagggtttctgtcttaggggcaccagactgtccgatgtgcaccagactgtccggtgcaccccctgacagtggtgccagtcagccccgggggcagtgattctgtccccgagaaaatccgagagcaacgagtggagaaaaagaattttagccgccacaccggactgtccggtgtgcaccggacaggtactgttcactgtccgttgtgccatcagcccaactgctagctgtcagaactagccgttggagacgaccgttggcgcaccggtggcacacggactgtccggtgcgcccatacgcagaacagccaggtaacgactagtttggtgagtggggctatttataccccgtccacctaccttattgagtgtcttgctgcccacattgatgaccacatattgctacaacattgcaagcacaacaaagactagtgaggtgactagaaaatcttaattccacgtcaggacctcattagtgcaagtgagagccacctagagcacacaccacatgcattaagcttctcttggtaaagtgaaagtctattgcttgttactcttggtgatcggtatcacctagatggcttggtagcgtttggagcacggtgatcacctcggatgatttgttggtgacccgactcaaagattgtaagcggtcgtgagggatccaccgcgccggagtggcaaaggatcacctcatagtgagtacttagttcttgaccaagggggagcgatacccttgcgcgggtgctccaacgatgactaggaaagagtgccgactcttcgatacctcgacaaaatattggaggagtcttctcaaccttgttttactttccgcatttaattcaagcattttactttattcaattgtttagcaagtagttgaagtgatgtcttaggattgttatctttctagtagtattctcttattgctagtagttaggtgaagttgggctctagcttagggtttaaatatttgctcagggtttaattgttgttgaatttttagaaaaaagcccaattcaccccctcttgggcatcatgattctttcagagccatactaagagcatctctaaccgctctccaacaaataactattaaaaacagattttaagggccatactaagagcatctctaaccgctctccaacaaataactattaaaaactagtttttaggagtatctcaaaaattattagggtagattttaaccatttctccaaccattctcataactaggccaagccactcttggacccacattgatatgtttcacttgtgtattttcttcttccacgactttgacatctgtccaacgaccaaacatataccaccatcaaaggttgttggttgtacgtgggcggacgtggccggtgagagactaccaacggcgagaccgagcgatagcagagatctgatcgacaacggaggttcaatagcgggttgtgagatggtagaagcaggatagtgtgggcgcgttgccagcaacggacgacgaggttgcgcagatggggaggatgcgctcacggaggtagacgacgaggttgcgtgggtggtagcggattgtgaggttgtgtgggcgtggcacgtttgtgttttctaggaagcccaaaaagcccccgtttgtagctacaaatgagagttttaatgactataaagaagttggagcactttagagaaaccgtcgaagacaagttttttgtgtttt

SEQ ID NO: 33871 - DNA, 6019 bp, Zea Mays
gtgtcccttcgtggggtgcgcccgccacctgccgatgcgacgtgagaggagccaagcgcgcagtgggccctggacacgagagcggtgcggtgtcgtgctggcggcggcggcggcggcggcgaaggataaatagggccgtagggccatcgttttgcattgccgtcgcgtggccgtgggttttcatcgacgaacgacgacgactctgccgcgcgcgtttaggcgcgtcgccgccggccacccggccggccacttcgacgcggctgtggtggtttaaaattctccggctcgccgcccacggcctcgctgcacgtagttgcaggtgagtgaggttcttcgattccccccaaacccggcccatctccgacgatccattatttgttcgtccatatgaaaatgcatctctttttgtacccagttgttacctacatgcagcttttactgcttcattcagttatggtcgtgtacatcttcagaaaaccagacatgttcaggcaagaccagtgggtatgcaaaaacaacagcaaagtggctcggcatgtcgacagccagctgctacttctacttctacatataaaccacgcgctggcatgaactccactccagcatggatagacgacatcatcgcacaaatcacataccaggtcaaggcaccacgtttcacaaacctagtgaacacccaagaactattatgcaataccatcattttgctcgatagattttcctagcccagttgtttcatctgagcaagtgtctgtaggaactaaaacacagtagtatgctgtatatactgtcaagcatgaaacgcaaccagatcagctgcaggatttgcagcaccaagctctggccattaggtaggctgcatatcacaacacacaaagggaacatcaaactacatacactagctccgtcccctccagggacactgcaggttggcaggcccaaagctagcacagggtctcgcaacccacaaggtcataatcagtacaagcatccatcggcaaggggaagcaagagcaatcccagatcaagctctctcacgagggtttaattttcatgcaaggcctgacatttctgcgctgaggttacattgctcacagttgttcagtagcagcttgtccaacagtacttgcccgttccagcagtacttccaggcaaagtagcaaatttacgcagagcgcaaaggtagaagctagcaacatccaaaggaaataacaaaacactagcagcatccaaagaaatttggtattctgcactccctattgtatttggttgtcattaaccaaacaacacagtttggagtttggactgaactgaacttgaataaggcgcaaccaatcaaggtcctgcttgtgggctttaccgttcagatttcaagaaaaaaaaatataccgtaccttcctggatctcgtatccttcaaagcatttctcagaagattttccagcttctccagctcatctacatctgattcgtcagcattgctctggggagacctgccggtttgaagaaattgtgattatttatcaaaaatgggaaaccagagtgggtggaaatcctgagttctgggtgtgtaccaggtcgcaatcttgctcagcatcaactgcaaatctgaagaagcttcatccttgttctgtaccaaaaacaccctaaaaattgctgatagcggttatatgtatcctctatgctgaaaaaggagaaaaaaaatgaatatgatattagctccttgcataatgtactcttggacaatcaacatctatatattcacctcacgtggaacaaaaatgcaggcagttttattggaggacttttgagcatcaatgtgatgctaatggagtttgcattagtggtgtattgatgcaagaggcacatggaggtggattgatggaacattttaatgtcaagaagataaagtgttggtcacatacttcttctatccaaggatgaggcaagatgtagagaggttcgtagcttgatacacgacatgtcaaatagctaaatcgcggttgaacccatatggtttgtatatgttggttcatttcttctatttcttgggtggatatatatatatgaactttgttttggaattgcaaagaactaataggggggatagtatttttgtggtggttgatcatttatctgaagtgataacttttattccctatcataaaagcgacgatgacattcacattgctaacaaagtctttcaagaaatcattcacttgtagaggtagggacttttaaatatatgctcctagcttagcgtcatagatcagttttgcacctctctagtattaaaaacgcctcatccattactactagaggggtagaactgagcagtggtgctaaagtaggggaataggattaaaagtacctctaaagaagaatctatgtctagggttagtccatctttaacgttgcagatttaaagccatatttagatgaagaattgagtcaagaatgactccatttcaattgaggaaggatgataaggacatcacaccttcagatgcgcctactaatcatccgatcgttatataaggtccaatgacttgagcacaaatgtgatgattaaattttcaaaggtaagtgatcctttcgataattttgggaatagattatctaattatgttatcgtgcttgataacattagagagggtcatgaagtaattgaaggtgtggaggtgaagatcaaaaagaacgcccaagaccaattaaaggcattagtccaactcgagtttgagtctgagtggacctttaggaccatcctgtagtaaaacagatgtgcgagacatacacgacatacataatccattttttatgatcaatatatgaatagaaatatattttcataagctaactaataattttgatctaaggtctaatttccaccggaattaatgaaattatcgaaataagtcagcattcaaaatatgttagtgttgtgtcacaattttttggttggctaggcatgtgttgtcttagagcccattaggggacacgttcaaggggtgtgatagccttaggatatataattagtagccactactcatgttaggactcaagttttgcttttaaaaattatctttgaataattgtcattatagggttataaaaccccacttttgtgatcttagtcatacatatattgttagcatttttgttgagctgtgtactttcaagttctttcttgtgttttcgattcactgacatggattagccttcttaacgagatcaaccggattagtgacacggttgatcaccataagagtcgtagtaccacgttccaccaaaacagaagttatcatgaacccgatggaacattaaggactccattatcataacaaatagcgtattaggtaaccttgtgaataattctgattccttgtttggggactaggtagaaaattagtaaaaacatgatgatttggtgatgtttggatgtggggttgtactggttgtactttgggccacttggaaaactaggaatgatatgtgctttagtagtaaaatgattatcgatccttctaatgtgatatttttgtgctatttctagatggattcaagtttattgtgtgctaaaatacccgctgttgggggtcttcttctctgccgaacattttttattacttcttttggatgctgaacaatatagaattatgttttgagttgaataaattagaattttgatctaaaattttgtgataattggtctaattttcttagttgaaagatgaagccgaatatttattcctttatctaaaaaatctaataataacttaaaatgtttaataataggtagacatggatatcggaattctaataactctcgtcgtccaagtatatgagatgcaaccacttttttattctagtctcataatataaggtgttgccttggagcctgaaagcatctaggcccctggttggttttagtgattaatgacaacgtaatattatatgtgactagcgtgtgttttgcagagcaaatggtaagttaggtcgcattacagaaagttgtactacaatggtgaaaacaatccctgagatgagaacttgaagcgacaactgaaacgacgaatcaaaagatgaaagtcttcatattccgagtgttgaaggagttgtagacactcggtatagaattaggtcttctattttgttttagccgtactataaagagaggttgtggatgagtagtttgaccaagagaattctagtgtagtgttggtgcatattcacacttacatctagtgttaggtgtcactctataacacactcacgagttagaacaaaaacggttttgaaaaacaaaaggaaaaacgaagttagggtttctgtcttaggggcaccagactgtccgatgtgcaccagactgtccggtgcaccccctgacagtggtgccagtcagccccgggggcagtgattctgtccccgagaaaatccgagagcaacgagtggagaaaaagaattttagccgccacaccggactgtccggtgtgcaccggacaggtactgttcactgtccgttgtgccatcagcccaactgctagctgtcagaactagccgttggagacgaccgttggcgcaccggtggcacacggactgtccggtgcgcccatacgcagaacagccaggtaacgactagtttggtgagtggggctatttataccccgtccacctaccttattgagtgtcttgctgcccacattgatgaccacatattgctacaacattgcaagcacaacaaagactagtgaggtgactagaaaatcttaattccacgtcaggacctcattagtgcaagtgagagccacctagagcacacaccacatgcattaagcttctcttggtaaagtgaaagtctattgcttgttactcttggtgatcggtatcacctagatggcttggtagcgtttggagcacggtgatcacctcggatgatttgttggtgacccgactcaaagattgtaagcggtcgtgagggatccaccgcgccggagtggcaaaggatcacctcatagtgagtacttagttcttgaccaagggggagcgatacccttgcgcgggtgctccaacgatgactaggaaagagtgccgactcttcgatacctcgacaaaatattggaggagtcttctcaaccttgttttactttccgcatttaattcaagcattttactttattcaattgtttagcaagtagttgaagtgatgtcttaggattgttatctttctagtagtattctcttattgctagtagttaggtgaagttgggctctagcttagggtttaaatatttgctcagggtttaattgttgttgaatttttagaaaaaagcccaattcaccccctcttgggcatcatgattctttcagagccatactaagagcatctctaaccgctctccaacaaataactattaaaaacagattttaagggccatactaagagcatctctaaccgctctccaacaaataactattaaaaactagtttttaggagtatctcaaaaattattagggtagattttaaccatttctccaaccattctcataactaggccaagccactcttggacccacattgatatgtttcacttgtgtattttcttcttccacgactttgacatctgtccaacgaccaaacatataccaccatcaaaggttgttggttgtacgtgggcggacgtggccggtgagagactaccaacggcgagaccgagcgatagcagagatctgatcgacaacggaggttcaatagcgggttgtgagatggtagaagcaggatagtgtgggcgcgttgccagcaacggacgacgaggttgcgcagatggggaggatgcgctcacggaggtagacgacgaggttgcgtgggtggtagcggattgtgaggttgtgtgggcgtggcacgtttgtgttttctaggaagcccaaaaagcccccgtttgtagctacaaatgagagttttaatgactataaagaagttggagcactttagagaaaccgtcgaagacaagttttttgtgtttt

SEQ ID NO: 33872 - DNA, 733 bp, Zea Mays
attttatcaacctgctgtgtggtaggatctttgattttggagggagtatgcatgcaatgcaattgcatgcacataggtgcaagatgtacccggacatggcagagcaggtgaccaccacccagactgtcatcatgggtgttgcaccatccaagggcgggttcgaggcggccgccggagctgagaatggcgggtgcaagtgcggcgccaactgcacctgcgacccctgcacctgcaagtgagacgacggcggcggcgatgacgctgcagggtctgcaggccctgatggggtcggaaggactctttatctctctagctaattaataagctctagctagtatataatattctagcagtgtcgtttgctgtgttttgttcgagtcagttagacagtcagctgcgtgccatgggccatgcccatggcatagcatgccttgctctatctgctccatcgccttgttctagtggtggtactgatgggggaacgaataattgtaccgagatgttggcgccgtgtcgtgtcgtgccctgtcctgtcctgtcctgtccttcctggggctcatctagcagtcagactgtgttgtgttgtgttgtgctgtgtgggccgagtgtgcactacagcatcgggccatgcccctgttcgatctgtctgcgactttaatttgtttgtgctgtgtcatctatctatctaatccatctatgctatcctctatagtctatacatagcgtgtctaaa

SEQ ID NO: 33873 - DNA, 716 bp, Zea Mays
gtcggatctgctgttccatggctccgtttccgtctagtagcgccttcaatattcacacggtgcaagatgtacccggacatggcagagcaggtgaccaccacccagactgtcatcatgggtgttgcaccatccaagggcgggttcgaggcggccgccggagctgagaatggcgggtgcaagtgcggcgccaactgcacctgcgacccctgcacctgcaagtgagacgacggcggcggcgatgacgctgcagggtctgcaggccctgatggggtcggaaggactctttatctctctagctaattaataagctctagctagtatataatattctagcagtgtcgtttgctgtgttttgttcgagtcagttagacagtcagctgcgtgccatgggccatgcccatggcatagcatgccttgctctatctgctccatcgccttgttctagtggtggtactgatgggggaacgaataattgtaccgagatgttggcgccgtgtcgtgtcgtgccctgtcctgtcctgtcctgtccttcctggggctcatctagcagtcagactgtgttgtgttgtgttgtgctgtgtgggccgagtgtgcactacagcatcgggccatgcccctgttcgatctgtctgcgactttaatttgtttgtgctgtgtcatctatctatctaatccatctatgctatcctctatagtctatacatagcgtgtctaaa

SEQ ID NO: 33874 - DNA, 934 bp, Zea Mays
cccgcataaggtttcatcctaactcaagcagtgtctcaggtagtggataatcgaagtctaacattatgtacgtaaaaatggtcatgtcaacatacctattggtgggatcaacaaccggcggaacgtcctgcttgggaggttgtggtttccgacctccgccaccaccgtgatcggacttatcatcgtcagagaacattcggctggacgcctcagatggcgacatgccggtcatagcagggatcggcacctgctgttgagcttgtatatacatgggcagctgctgctcggagattcccatctgcgcgaagtggtcctcgacggcggtaggttgcatgatgcgggcgtccgacgggcggtcctccggccgcacgcgtataggcggaagattcgatagcgacggggccgaggaggtagacccgaacgaggagttcttatccagcatcggcgagtctggcacggactggacgtcgtgcgggtgcctcccggtaccgacggcggcagcggcggcgcccgcctggagcttcggctggctggcgcgctggtcctccgtgggagccgagttggttactccgctacgggagtgcacggaggagtcgtcctcgaggccgagaaggcagttgacggaggctgaatcggtggagattcccctcgggataccgtcgagggagccggagatggcgctgttgagggcgtcgacgaaccagttctcggactttgaagagtcgtcgagcagggagccgagcgaggacgaggactcgggcttggcggggaagaggaagaggcggatccgggaggtgcgcgaggttcctccgccggaggaggtcgcagcgatgcggtcgtactcgtcgacgaggttgtcgaggtcctcgtccgtagagacggagatgagggagtccaggtcctcgttgggtagctgatacttgagcgtgaaggg

SEQ ID NO: 33875 - DNA, 2331 bp, Zea Mays
ctagttgtccacactgtagccttcttgctacagctttcaatgggtacttcccaaacaacagagcctgaacaacaaggctgctcgcccaaggcatgcgggagcctgaacatctcgtacccgttctggctggaggagccagggcagccgccgtgcgggtcgccgcccttccagctcaagtgcaacagcagcggcgcgttcctgacccactccatgttccaggcgtaccgggtggtcaacatcttcaacgagaacaactctctgcacgtggtggacgagaacctgccactcgccgccggctgcccggcgccgtgcttcaacatctcgatcgccatggagttcatgggggcgttcgccgtcagcagagccaacagcgagctccggttcctctcccgatgcgacgagccggtgccggaggctctgctctgcctgggttccagcgcatgccctgcgacaactcctcgttcgtcgggtttagacggcggttcgggagctacagctacagagagcacggggcgggggcggcaacaccgccgggctcgggctgccttgtcgccgtcatgcctaccgtcccgccgccagaccgggacagcaggcacaactacgtcgcgggcctgaggaacggatttctcctcgagtggacggcggtctcgggggattgctccaagtgcactgcaagcggcggggaatgcatgtaccctgccaacggcctggctttctcctgcaattgcccagacggcatacattacccagtgagctgcggtagtaagaggactggcagaagaacgataatgtcaatagtgttgatggcagtagctggaaccttgctccttccatgtatttatttgctgatatgtcatataaagggacaaaaaccacgttttctcatcagcaaaatgactgtcaacaaaaacgaaaggaacattgaggccctaatttcatcgcatggatcactagctccaaaaaggtacaaatactcagaagcaacaaaaataacatcttgtacaaataacaagctcggtgaaggcggttatggtgtggttttcaaaggaaggctaaatgatggtcgtctagttgccgtgaaattcttgcatgactacaaagcaaaaggggaggaatttgtaaatgaggttatgagcattggcaggacctcacatgttaatattgtcagcttgtatgggttttgtttggagggctcaaaacgagctcttatatatgagtacatggccaatggttctttggataagcatatctactcggagaaccccaaacaaattttaggatgggaaagactctatgcaatagcagttgggattgctcgtggactagaatatttgcactattgttgtaatacacgcattgtccatttcgatatcaagcctcaaaatatccttcttgatcacaatttttgccctaagattgctgattttggtttagcaaaattgtgccataccaaggagagcaagctttcagtgactggtgctagaggaacaattggatttatagctcctgaagtgcattcacgagcatttggagtggcttcaacaaaatcagatgtttatagttacggaatgttgttgctagagatggttggaggtaggaaaaatatgaaattaatggttgagaagtcaagtcaaacttattttccagattggatctatgatcactatgcgcaaaatgatggattactagcttgtgaagttacacatgaagatgaggaaatcgcaagaaaaatgattttgattggcctatggtgcatacagatattgcctatgcatcgccctacaatgaccgaagtattagacatgtttgaaagaggcttagatgaattggatatgccatcaaagcaaaacttcagtcaagtgcttgaggatctagcttataacatgaatgcagaaagcacaaatcccagcagtactgcaagaacacaagcttcagtggcatgttaaaagtcaaggagataagccttactaaaaaaatcctacgactgttaaccaactgtgtgagatgggcacctaatgtagagtaaggaatacccaatacattagtattcattagtattagatgtcatttggttcacatatttgtaatacaatggttaactaataatgttaaatcatatttgtttaaatccaactgtaatcagatggcacactagaaattgatatcggtctattcaaatttattaccgctggtattcgagtgtgaaccattatcattgctatttacgttacatttcgtgaaccaaattacaccttagtcttatttccatcgtaagttggtaatatccatgcagtaactgcttataagcatggagagccaaaataattgagg

SEQ ID NO: 33876 - DNA, 2325 bp, Zea Mays
ctagttgtccacactgtagccttcttgctacagctttcaatgggtacttcccaaacaacagagcctgaacaacaaggctgctcgcccaaggcatgcgggagcctgaacatctcgtacccgttctggctggaggagccagggcagccgccgtgcgggtcgccgcccttccagctcaagtgcaacagcagcggcgcgttcctgacccactccatgttccaggcgtaccgggtggtcaacatcttcaacgagaacaactctctgcacgtggtggacgagaacctgccactcgccgccggctgcccggcgccgtgcttcaacatctcgatcgccatggagttcatgggggcgttcgccgtcagcagagccaacagcgagctccggttcctctcccgatgcgacgagccggtgccggaggctctgctctgcctgggttccagcgcatgccctgcgacaactcctcgttcgtcgggtttagacggcggttcgggagctacagctacagagagcacggggcgggggcggcaacaccgccgggctcgggctgccttgtcgccgtcatgcctaccgtcccgccgccagaccgggacagcaggcacaactacgtcgcgggcctgaggaacggatttctcctcgagtggacggcggtctcgggggattgctccaagtgcactgcaagcggcggggaatgcatgtaccctgccaacggcctggctttctcctgcaattgcccagacggcatacattacccagtgagctgcggtgaaaaattaacttgtactttaatttactcagtgttgatggcagtagctggaaccttgctccttccatgtatttatttgctgatatgtcatataaagggacaaaaaccacgttttctcatcagcaaaatgactgtcaacaaaaacgaaaggaacattgaggccctaatttcatcgcatggatcactagctccaaaaaggtacaaatactcagaagcaacaaaaataacatcttgtacaaataacaagctcggtgaaggcggttatggtgtggttttcaaaggaaggctaaatgatggtcgtctagttgccgtgaaattcttgcatgactacaaagcaaaaggggaggaatttgtaaatgaggttatgagcattggcaggacctcacatgttaatattgtcagcttgtatgggttttgtttggagggctcaaaacgagctcttatatatgagtacatggccaatggttctttggataagcatatctactcggagaaccccaaacaaattttaggatgggaaagactctatgcaatagcagttgggattgctcgtggactagaatatttgcactattgttgtaatacacgcattgtccatttcgatatcaagcctcaaaatatccttcttgatcacaatttttgccctaagattgctgattttggtttagcaaaattgtgccataccaaggagagcaagctttcagtgactggtgctagaggaacaattggatttatagctcctgaagtgcattcacgagcatttggagtggcttcaacaaaatcagatgtttatagttacggaatgttgttgctagagatggttggaggtaggaaaaatatgaaattaatggttgagaagtcaagtcaaacttattttccagattggatctatgatcactatgcgcaaaatgatggattactagcttgtgaagttacacatgaagatgaggaaatcgcaagaaaaatgattttgattggcctatggtgcatacagatattgcctatgcatcgccctacaatgaccgaagtattagacatgtttgaaagaggcttagatgaattggatatgccatcaaagcaaaacttcagtcaagtgcttgaggatctagcttataacatgaatgcagaaagcacaaatcccagcagtactgcaagaacacaagcttcagtggcatgttaaaagtcaaggagataagccttactaaaaaaatcctacgactgttaaccaactgtgtgagatgggcacctaatgtagagtaaggaatacccaatacattagtattcattagtattagatgtcatttggttcacatatttgtaatacaatggttaactaataatgttaaatcatatttgtttaaatccaactgtaatcagatggcacactagaaattgatatcggtctattcaaatttattaccgctggtattcgagtgtgaaccattatcattgctatttacgttacatttcgtgaaccaaattacaccttagtcttatttccatcgtaagttggtaatatccatgcagtaactgcttataagcatggagagccaaaataattgagg

SEQ ID NO: 33877 - DNA, 3122 bp, Zea Mays
cgaagatgcacgcgtgccgtgttcccgccgctggcccgctgctctgcccagccattgccatgctactgctcgctctgctactagccagccttcctaccaccgccgccgccgccgccgtgaaaatgtcgatggtgccatgcgcgccggcgcagtgcgggaacctcagcatctactacccgttctggctcacgggcacgcaccagcggcactgcggctacaaggcgttcgaggtcacctgcgaggagcggaaggtgtacctgaagaactcgtactgggcgtaccaggtcctggacatctcgtacgagaacagctcgttcgtcgtcaccaacgtcaacctgcagaaggacggctccttctgcaacctcaatctcgtcagcaacgcctcctccggcctgagcgccgcgccgttcaggatcagcagcagaaacctggagctgttcttcctcagcggttgcccgggccaggcacggcagcggcagccgtcccctccttcttcttgggcgcaaatgaattgtagcgactacgacaacggctcggccgccaagtcgttcgcgtggcttgctggcaagtacaggcccgacgacaccttgaagccgccgctgccgctgaactgcacggtgtcgtcattgatgccggtgctgggataccagggggcggggccggccgactacgaccgcctaatgaatcttgggttccttctcgagcacaacttcacggcggaggactgcgcggcttgcgctagcaccggcgacaggtgctcggtcgaccccgacgacgaccagctggtgtgcaactgctccgacggccagtactggtttttctgcggtgccaacgggaaaggcaggaagacaatactaataggcaaaaactcaggtttttcctatgcaaaaaaaccagcagcagcatacaagagaacattgaggctctaatatcatcgtatggatcactagctccaaaaagatacaagtactcagaagtaacaaaaataacatcatgcataaataataagcttggagaaggtggttatggcgtggttttcaaaggaatgctagatgacagtcgtctagttgcagtgaaattcctgcatgactccaaaggtgatggtgaggagtttgtgaacgaggttatgagtattggcaggacatctcatattaatattgttagcttatttgggttttgtttggaaggctcaaagcgggccctaatatatgagtatatgccaaatggctctttggataagtacatatactcagataacccaaaggaagttttaggatgggataggctctataccatagcaattgggatcgctcgagggttggaatacttgcaccatagttgtaatacacgcatagtccatttcgatatcaagcctcaaaatatccttctagatcaaaacttccagccaaagattgctgattttggtttggcaaagttatgtcataccaaggagagcaagctttctatgactggtgctagaggtacacctgggtttatagctcctgaagtacattctcgaaccttcggagttgtttctacaaaatcagatgtttatagttatggaatgatgttactagagatggttggaggcaggaaaaatgttaaatcatttgctcaagtttcaagtgaaaagtattttccacattggatttatgaccactttggtcaaaacgatggattactggcatgtgaaggcacacctgaaaaagaagaaatcgccaaaaagatggctctggttggtatgtggtgcatccaaatattaccattgcatcgccctactataacaaaggttttggaaatgtttgatagaggcttagatgaattggacatgccaccgaggcaaaacttcagtcaaacatttgaagatccgacttacaatttcaacgcagaaaatatgagcactagcagtggtaccaaaacacaaagatgaagagataaaaattcggtcagggagggatgaccatcaaaatgacccaaacaacggtcccgaccgagaaaatctccgaccactggcctcccatcactaacaagatatcgtaaccagagagcggacgaggcacaatacgagatttttttaactaagcccgaaaattcgtcctgagggtaatcgaatctgggacttgaagattaaccactaggctagagaccctttcgcaaagatgaagagataagcactttgaattcaaaatttatatgacagttaccttaccaatattaccaacaactctgtaaaatgataccttacaacatcgaaattcgacattaaacttctgtatgtatatatgtgagatattttaaatttgaagttattacatgttaggaatttaggattagggatacaaagattaacataaaaactcctctaatatagaggagaaaaaacattggaaaatagatctactaacatgacataagtgaaacagacacaagagtggtctatttatataggcgtacagagctattccccaaacactgctagttggaaaaaaaattcgatttctatgcataaaagattctgtactggcatagtctggccaactaaaaatgctcaaatctgatgtagtaagcgaacataactttctctactactgtggtgtggctagaatttaggttttagataattaaacaaactctgttgcattattacagcctaactaaatcgtagccacgcaaccaaacgtttctcagtcggggcaagagccaagaggtgtctgacatgcgccggtgagtccgaattttttctttttcagccctacctttaaaaaatatttacgtttggaccccaggaattttatatgcaattttggacccgatactcggcgccataggctatggcgccgagctgtgacgtggcagcaacggctccctgcgcctagggctgacatggcattgacgtggcgccgacatggcattgacacggcgccgacgcggcctcgtagctcggcgccacagatcttggcgccgagctacgaaggcctataaaatcggccgcgctgttggccgagaggagcacatttcctctcatttcaaaacttcgtcaaaatttgctggattcaaagattcgagttggttcacttcgtagaccaaggtatggtgtccaactgattcgttttttatattgg

SEQ ID NO: 33878 - DNA, 3261 bp, Zea Mays
ccttcttctgcgagttcacttcttcacaaatccttatctcccctgcgtcacagactcacggctcgcagcgcgaagagccgaagatgcacgcgtgccgtgttcccgccgctggcccgctgctctgcccagccattgccatgctactgctcgctctgctactagccagccttcctaccaccgccgccgccgccgccgtgaaaatgtcgatggtgccatgcgcgccggcgcagtgcgggaacctcagcatctactacccgttctggctcacgggcacgcaccagcggcactgcggctacaaggcgttcgaggtcacctgcgaggagcggaaggtgtacctgaagaactcgtactgggcgtaccaggtcctggacatctcgtacgagaacagctcgttcgtcgtcaccaacgtcaacctgcagaaggacggctccttctgcaacctcaatctcgtcagcaacgcctcctccggcctgagcgccgcgccgttcaggatcagcagcagaaacctggagctgttcttcctcagcggttgcccgggccaggcacggcagcggcagccgtcccctccttcttcttgggcgcaaatgaattgtagcgactacgacaacggctcggccgccaagtcgttcgcgtggcttgctggcaagtacaggcccgacgacaccttgaagccgccgctgccgctgaactgcacggtgtcgtcattgatgccggtgctgggataccagggggcggggccggccgactacgaccgcctaatgaatcttgggttccttctcgagcacaacttcacggcggaggactgcgcggcttgcgctagcaccggcgacaggtgctcggtcgaccccgacgacgaccagctggtgtgcaactgctccgacggccagtactggtttttctgcggtgccaacgggaaaggcaggaagacaatactaatagtttcgatttcagtagctgcaagcttgttcctaccatgtatatatgtgttggtatggcacaggcaaaaactcaggtttttcctatgcaaaaaaaccagcagcagcatacaagagaacattgaggctctaatatcatcgtatggatcactagctccaaaaagatacaagtactcagaagtaacaaaaataacatcatgcataaataataagcttggagaaggtggttatggcgtggttttcaaaggaatgctagatgacagtcgtctagttgcagtgaaattcctgcatgactccaaaggtgatggtgaggagtttgtgaacgaggttatgagtattggcaggacatctcatattaatattgttagcttatttgggttttgtttggaaggctcaaagcgggccctaatatatgagtatatgccaaatggctctttggataagtacatatactcagataacccaaaggaagttttaggatgggataggctctataccatagcaattgggatcgctcgagggttggaatacttgcaccatagttgtaatacacgcatagtccatttcgatatcaagcctcaaaatatccttctagatcaaaacttccagccaaagattgctgattttggtttggcaaagttatgtcataccaaggagagcaagctttctatgactggtgctagaggtacacctgggtttatagctcctgaagtacattctcgaaccttcggagttgtttctacaaaatcagatgtttatagttatggaatgatgttactagagatggttggaggcaggaaaaatgttaaatcatttgctcaagtttcaagtgaaaagtattttccacattggatttatgaccactttggtcaaaacgatggattactggcatgtgaaggcacacctgaaaaagaagaaatcgccaaaaagatggctctggttggtatgtggtgcatccaaatattaccattgcatcgccctactataacaaaggttttggaaatgtttgatagaggcttagatgaattggacatgccaccgaggcaaaacttcagtcaaacatttgaagatccgacttacaatttcaacgcagaaaatatgagcactagcagtggtaccaaaacacaaagatgaagagataaaaattcggtcagggagggatgaccatcaaaatgacccaaacaacggtcccgaccgagaaaatctccgaccactggcctcccatcactaacaagatatcgtaaccagagagcggacgaggcacaatacgagatttttttaactaagcccgaaaattcgtcctgagggtaatcgaatctgggacttgaagattaaccactaggctagagaccctttcgcaaagatgaagagataagcactttgaattcaaaatttatatgacagttaccttaccaatattaccaacaactctgtaaaatgataccttacaacatcgaaattcgacattaaacttctgtatgtatatatgtgagatattttaaatttgaagttattacatgttaggaatttaggattagggatacaaagattaacataaaaactcctctaatatagaggagaaaaaacattggaaaatagatctactaacatgacataagtgaaacagacacaagagtggtctatttatataggcgtacagagctattccccaaacactgctagttggaaaaaaaattcgatttctatgcataaaagattctgtactggcatagtctggccaactaaaaatgctcaaatctgatgtagtaagcgaacataactttctctactactgtggtgtggctagaatttaggttttagataattaaacaaactctgttgcattattacagcctaactaaatcgtagccacgcaaccaaacgtttctcagtcggggcaagagccaagaggtgtctgacatgcgccggtgagtccgaattttttctttttcagccctacctttaaaaaatatttacgtttggaccccaggaattttatatgcaattttggacccgatactcggcgccataggctatggcgccgagctgtgacgtggcagcaacggctccctgcgcctagggctgacatggcattgacgtggcgccgacatggcattgacacggcgccgacgcggcctcgtagctcggcgccacagatcttggcgccgagctacgaaggcctataaaatcggccgcgctgttggccgagaggagcacatttcctctcatttcaaaacttcgtcaaaatttgctggattcaaagattcgagttggttcacttcgtagaccaaggtatggtgtccaactgattcgttttttatattgg

SEQ ID NO: 33879 - DNA, 885 bp, Zea Mays
cacagactcacggctcgcagcgcgaagagccgaagatgcacgcgtgccgtgttcccgccgctggcccgctgctctgcccagccattgccatgctactgctcgctctgctactagccagccttcctaccaccgccgccgccgccgccgtgaaaatgtcgatggtgccatgcgcgccggcgcagtgcgggaacctcagcatctactacccgttctggctcacgggcacgcaccagcggcactgcggctacaaggcgttcgaggtcacctgcgaggagcggaaggtgtacctgaagaactcgtactgggcgtaccaggtcctggacatctcgtacgagaacagctcgttcgtcgtcaccaacgtcaacctgcagaaggacggctccttctgcaacctcaatctcgtcagcaacgcctcctccggcctgagcgccgcgccgttcaggatcagcagcagaaacctggagctgttcttcctcagcggttgcccgggccaggcacggcagcggcagccgtcccctccttcttcttgggcgcaaatgaattgtagcgactacgacaacggctcggccgccaagtcgttcgcgtggcttgctggcaagtacaggcccgacgacaccttgaagccgccgctgccgctgaactgcacggtgtcgtcattgatgccggtgctgggataccagggggcggggccggccgactacgaccgcctaatgaatcttgggttccttctcgagcacaacttcacggcggaggactgcgcggcttgcgctagcaccggcgacaggtgctcggtcgaccccgacgacgaccagctggtgtgcaactgctccgacggccagtactggtttttctgcggttcattgccataacaccatcccgcacctg

SEQ ID NO: 33880 - DNA, 1365 bp, Zea Mays
cacgaagccgatgacgatgacccgaatgcccccattcaaaaagttttcgtgtctacgcacacgacgcgcggactcaccttcatcattttacccagccaccacctgtgtgcctgactgcctgtacgtgaggccagtgagagcggttcacccactcctgtccgttcactaccactactcccgtagtcgaagctttccatggctctggtcccattctcgttgctgctcttcctagtctcgctgtcggtgtgggtggccttacccttaccgttgccggtggcagcagcacatggcgggccaggagagcactgctcgccgtttctatgcggtaacgtgagcatctcctttccatttgggattatccagaaggacgccgagcagaccaactgcggcgccgggattggcttccaggttcgttgccataacaccatcccgcacctgggatactatcagaacgagatcaccttgcggatcctcagcatcttttaccacaaccgctccttgctcatcgccgatcgaccaaggtggcctacatatttcaatacgactaccagcaccgaagggtgccgcatcccgacggccaacacctcgtcccggcttgtccctccgctctcggtcagctccgacaaccagaacctcatcttctacagctgcaccaagccaccgtcgccaggcgagggactcgtggccacggtatgccacaacaacacgtttgttcgtgccgccgatgggcggcgttccgacgagtcaggcggctacgttttgcaaggttgcaccgctaccagggtgcctgtgcttggagtgtctggcaaggtgaacgctagcaactacgaccaactcgtctgggatggcttcctcgcgacatggcagttgccgccgacgccgtcagggctggtttggtgacgaaggaattgaggacgttctccaattctatcacccaacccggctgattctatgatttacaattctacaattggtctaaatactgtgcggttcgtgtcttcttcctttccggcggccggcgggtgcagaaagtggcatacggctgtggtcacaaagtggcatacaattagcgctttgattttatttctggtcaaagtagaatgcacctttcctacggacaagagtcccacaagtcacaaagtaggtttactcattacaattacaagtttacaactaggcggttgattatatcaaacacagtttccaggttgtattgctcaaagcagttcttagactgaatctaggaaagactctagcaaacattttttttaccgagaaattaaagtattttatgctagttctatggagtgattttcggaaataatagaagctggaagctgacaaaggtaaccttgtgtgtgttac

SEQ ID NO: 33881 - DNA, 1234 bp, Zea Mays
cgaatccgttcgggattcggggccgggagcctgacagcaaccggcaaccgcgaactggactaccgtctgacggcggcgaggaggcgattgcccatcgtggctgtggcgtcgcacaagctgccgcctcgcctggcgagagcggagacccggctggttgccgtctgctcattcaggagaacaaataagcctgtacggatgtacaacatagatgtacttgcagatgtcaaataggtatattcgcaatgttttgctaatgataaacctgcaaattctcagtgtcctacagccagcattgaacatgatgttgtcctagagacaaagccacattatttggtccctacagaaacatcatggaaaaaacagaaagttggctatgttacaacctaaatcttaacgacgtgtcaaggtataaatgattatggtaagaaactggaggcgtagagcggaaaaggacaccacaagaaaatgcagcaactgctcgatgtcagattctcaattgaaggtggtaatcttgacttctttagaattaaaagaaatagtaatcttgacttatttagaggtaaaataaataataatcttgacttctagaccatggtaacgacatcaaaattgtatgtccatatagattatgtggtctttggaactgctgaaaacaggaccagcatcagttaagaaaatatctgagacaagacaaaaaaaaagctaggatggaagcacatctgtgatacgttaaattaggatggcaacagtaatccagtgccttgtttgaaacctccttgtgttgttttcggttaccattattgtgtagacctataactggattgaaagcgacaggacgacgccttagcctactcagtaaggcgacctggacgcctttaccgctgatccttatcttaccgcttagcgatgccttaacaaggtgtcacgatctcgtcggcggaggccggctgccttgccccgcccctgaagatcctttgatcgtgaccggcatctttttcaaacagtgtagttgaatacctcaaccaatgtgtttggctataatacagacagcaggcctcaacgccccaatcaatggaataactgacactaatcaaccaaaaacatttatttgccgtcgaagcaggctggtgttacgaatcctgctgcgatgcgcaggacggggaggcgtacaccacgaagggtgagttagtggattgagtggaggagcgcagggaatagggcacgcagcgtggcg

SEQ ID NO: 33882 - DNA, 1153 bp, Zea Mays
aaacggcctagggcgaggagggcgaatccgttcgggattcggggccgggagcctgacagcaaccggcaaccgcgaactggactaccgtctgacggcggcgaggaggcgattgcccatcgtggctgtggcgtcgcacaagctgccgcctcgcctggcgagagcggagacccggctggttgccgtctgctcattcagtgtcctacagccagcattgaacatgatgttgtcctagagacaaagccacattatttggtccctacagaaacatcatggaaaaaacagaaagttggctatgttacaacctaaatcttaacgacgtgtcaaggtataaatgattatggtaagaaactggaggcgtagagcggaaaaggacaccacaagaaaatgcagcaactgctcgatgtcagattctcaattgaaggtggtaatcttgacttctttagaattaaaagaaatagtaatcttgacttatttagaggtaaaataaataataatcttgacttctagaccatggtaacgacatcaaaattgtatgtccatatagattatgtggtctttggaactgctgaaaacaggaccagcatcagttaagaaaatatctgagacaagacaaaaaaaaagctaggatggaagcacatctgtgatacgttaaattaggatggcaacagtaatccagtgccttgtttgaaacctccttgtgttgttttcggttaccattattgtgtagacctataactggattgaaagcgacaggacgacgccttagcctactcagtaaggcgacctggacgcctttaccgctgatccttatcttaccgcttagcgatgccttaacaaggtgtcacgatctcgtcggcggaggccggctgccttgccccgcccctgaagatcctttgatcgtgaccggcatctttttcaaacagtgtagttgaatacctcaaccaatgtgtttggctataatacagacagcaggcctcaacgccccaatcaatggaataactgacactaatcaaccaaaaacatttatttgccgtcgaagcaggctggtgttacgaatcctgctgcgatgcgcaggacggggaggcgtacaccacgaagggtgagttagtggattgagtggaggagcgcagggaatagggcacgcagcgtggcg

SEQ ID NO: 33883 - DNA, 738 bp, Zea Mays
gtggagatagctcgagatgtctcaggaattggttgtactagctcatatggatggtctggtcctataaataccctgccacgcgcagggctgcaagccaccaaggaaattcacaaagcgatactagctagtccctaccaaagcatacttcctgaaacactcttgcaatccactgagttctgtttgttgagacgcatagagctagagtcgacaatgtcgctcgtgaggcgcagcaacgtgttcgaccccttctcgatggatctctgggaccccttcgacaccatgttccgctccatcgtcccgtcggcgacctccaccaactccgagactgccgccttcgccagcgcccgcatcgactggaaggagacgcccgaggcgcacgtgttcaaggccgacctccccggcgtcaagaaggaagaggtcaaggtcgaggtcgaggacggcaacatgctggtcatcagcggccagcgcagcagggagaaggaggacaaggacgacaagtggcaccgcgtcgagcgcagcagcggccagttcgtcaggcgcttccgcctgccggagaacaccaaggtggatcaggtcaaggctggcctcgagaacggcgtgctcacggtcaccgtgcccaaggcggaggagaagaagcctgaggtgaaggctggccttgagaatggcgtgctcacggtcaccgtgcccaaggcggaggagaagaagcctgaggtgaaggctattgagatatctggttga

SEQ ID NO: 33884 - DNA, 1999 bp, Zea Mays
gcccaaaccacaccaactcacccaaatcatcctactcctactactattcgagcagctagcccagccaatcactctgctgaaaatacttcgagaccttggcgcacaagaaaccgtgaacgattgatcatccctgcgatagcaagcgcagcaatggcggcgaagcgtctgtacaacggggtgatccgggaggccatgatgcagaagcacatgcagagcctgttcaggtgtctggagcctctcctccgccgagtggtgaaagaggagctccatgcagggctgacgctgatgcagagcccgcgctacatcgagaggctgccggcggagcgggcggcgtggaggctggcgttccggaccccgccgcagctgcccatcttcacgggcagcaagatcgaggacgaggccgggaacccgctggaggtgatcctggtggacgcggacacgggctcgccggccgcgctcccgcaggcgctgcgcgtcgagctggtcccggtgtacggcgacttcccgcaggacgggcgcgaggactggtccgacgacgagttccagaggaacgtcgtgaaggagcgcgcggggaagcgcccgctcctgaccggcgacgtgagcctggccctgagggacgggcgcgccacggtgggcgagctccagttcacggacaactcgtcctgggtccgctgccgcaagttccgcatcgccgcccgcgtggtgcccggcgcctgggacggcgcccgcgtccaggaggccatgaccgaggccttcatcgtccgggaccaccgcggcgagctgtaccgcaagcactacccgcccgtcctcgccgacgacgtctggaggctggagaagatcggcaaggaaggcgcgttccacaggaagctcaggcgcagcaacgtcggcaccgtgcaggagttcgtcaggatgctgatggtgaagcccgacgagttgcgcgcgattctgggcgacggcatgaccgaccgcatgtgggaggcgacgacgaaccacgccaggacctgcgccaccgacgacaaggtgtacgcgcacagcacgccccacggcaccatctacgtggactccgtcttcaacgtcgtgagggtcgacatcggcggcgcggagtggccgctgcaccagctgaacagaggccagacgatggtggtgcagcagatgctgcaggacgcgtacgagcaccgccacagcctccaggaggccgaacccttcatggtccatggccacgccgccagcgacgtcccactgctgcagaacgcggtgccggcgctggtggacacaccgccgctctggttcccgaacgccgcggagatggacttccccgtcgacgacgtggtccccgttccccaagccaacagcagcttcggctaccagtggactggccaagcgttccacatgccaggttaacccagtggtcccgaacaagataaacaagtgacccaggtgaagatcacttgcaaggttccagttccagcaataggatgtacattaacaaaatactgctacgcggttatatgtccacgatcagcgtcggtcggtctgtctgtctatctgtctgtctgtccaagtaacagcagggtttaagggtaggtgaaacttgagcggcccttccctgcattcgccggacgcgccgagcgtccgcgggcagcgagaagcggcgaccaagtgcaagattcttttgtttgattcgtatcctttgtttttgttgtaacttctcaagtttttccgttctgcctggccaagtactagcgtcctgctcttctcccaagattgggttgcattgcatgtaaaaaaaatgtaacgccggagcagcgacgctttgtgggctggcgaacaggtgtggtatgcctacaatacaaaggctagcaagcagaactggctgggtaaacacacagctctgctttcttcttcttcgacattttcgcaagttttttttgtgtgtgtgtcctgtaaacatcaaggtctcaataaagaaagggaaccgctttttttgtgtacataaaca

SEQ ID NO: 33885 - DNA, 943 bp, Zea Mays
actagtgcattttaaatcccaagacgtctctcactcttcagccgctttacaactccccaccccatcccatccacacacacttcacccagcgcggcggccgccggccgccggcaatggaggccgtggcgcgcagcggcgactacctttggcggttcgtggcggagacagagtggtacaacgaggttgtcctcagcgccgtggcgccaggcgactggtggcgcggcctgccgcacccggtgcagtcatggatgcgcaactgcgtcggcggttacctcctctatttcatctctggtttcctctggtgcttcgtcatctactactggaagcgccacgcctacatccccaaaggacacatattgcactcttgttcctagaggctgtgtggacaacaaacatccacgactgcattcatggcaagatatggccagtcatgggtgctggatatcacaccattcaccatacgacataccgccacaactatggccactacaccatctggatggactggatgtttggtacgctcaatgagccagaagatatcctcaagaaggcttgagtttctcggagctgtggtattcctatggtgctggtgctggaactgctcgatctgttcccagtgtttctaatccgttgagcctgttcagcactgtctgtttatgtaggcatcagtgtgttaattagtttgctaggttcatatggctttgtgcttattctgtaatttagcgatgtttgtctcatgacgcaacggagttcaggacgaataaaactttgctagacacattctggattccagctgcttgtacaatgttgcaactcaactgtcaatataggatgtaaaacggattccttctagtcttgtacctgatgagttatttgtggtttctgtgcatgcattgctcagcctatgaatgttgcttatgttttgtggtcaagccaaatgaag

SEQ ID NO: 33886 - DNA, 1041 bp, Zea Mays
ctggtcaaacatgagctatcactgagagagaagaatcatgtctctggtgtttctacctgcgtggtgtctccccttcaatgcgtgccctcttccctccggttctccctgattctcacagtttgatgcaaatgggaagatatcacgagctgctataagggcctatcttgttgaaagatcccgtgtctgtcaaatatctgatccagaaagaaactaccactgcttttgcatgctctgttctgcaccatcagaagattttttcttgcaaggctggttcatatttggacctgatgtgagatccttgtttctcaccatattcccttttcttgcacccatggtggtcttctacatatttgtgcctaaacattttatcaacgacttccctggtcattggggagttttagttatggtcatagcgattgtcttcacaatatacatcctatgcataccgatctattagagctcggtcgtcaccgatcaaaaaggttgcaaataagctgtttacaattgaaatcatgagtgaaaacattgatggagggtctagacctcaatggtggcctaaagccctaaaggaacttgaagtgggtcactgattttgtatagggtacaaaagactccatcagccatccattccatcctatttagatagtcttctaactcacctcctttttggtacttattgttttgtattattctgatgtacaaggtatgtaatatcatagagataaataagcccctgatgttacagctaactaataattactgtctagcggcaagtgttttattgtcccattaacagtttcaacaacccacatttttttttatccagtgcgcataacaaactcacttacattgaacacactgccactatttttaaccttgaatcaggctagggcttcattagaagaagcgaacacctccataacataaactgggtcaccaaccttgatgatctttccttcgccctttcctgatagagattccttgcagagaaaattctattcaaagtacacctaaaataatttattaaagtgttctattgtc

SEQ ID NO: 33887 - DNA, 2128 bp, Zea Mays
aacataccaaggcatattgtagacatttccaagtgctcaaacacccaagtgcttaatagaatcacttggtgattagcgtaggtgctttgcgaagtgcttaggttagttagaccgcattagcgcttgctctaggtgaatcctagtttgttgagtgagtttagacaaaccacacaacccctcggctcttgcgtgtgccattgtaattgtaccgagtggggcgagagtcttgcgagaccgtgacaaccgcgtttgtgtcacggccgccaccgtgtaccggagagaacgaggcccgcagcgtttcggccggaagctcgatactggagacggcggggagcgtccgagaggagccagaagcggagcaccacttgcgcgtggagaaggcccacagctctctacggagttactcgaccgtggtgcttggccctcgcgtgggcttccctttgcgtaggggcaccaacgaggattagtcgggaccttgcgtggtttcggatacctcggtaaaaataccggcgtcatccatgagagtttgcttctctactttgctctttaagttttacggtagagatagcaacacttagacaaaacctagattgcactttctagtttgattatttgcataggttttgctctagggatttatttgtggcctagtttagtaaaagttttagaagtcctaattcaccccccctcttaggcgtcacccgtttcctacaatgataaaaaagaaaggaatatcttcatgccggtgagcgggtatagggatgacaaaaaaagaaaggtatatcttcatgtcggtgagcgggtacagggatgacaaaaaaaagaaagggtgagattatgaaggtttaattatgccagagatcaaataaaaacatgtgttgagtttccagagtgttttgtatgtaagtagtgcacattatattttcttttcattttttgtaccttgtatgttttaaaatttaaaaaatgattgggtatctgagctccatgccttctatagaggattgctggtcaaacatgagctatcactgagagagaagaatcatgtctctggtgtttctacctgcgtggtgtctccccttcaatgcgtgccctcttccctccggttctccctgattctcacagcgaaaacagtaggggaagccctaaacaaactagttcttgaggcatttggcaatgcaaaaaactatcaggaacaattcaagtttgatgcaaatgggaagatatcacgagctgctataagggcctatcttgttgaaagatcccgtgtctgtcaaatatctgatccagaaagaaactaccactgcttttgcatgctctgttctgcaccatcagaagattttttcttgcaaggctggttcatatttggacctgatgtgagatccttgtttctcaccatattcccttttcttgcacccatggtggtcttctacatatttgtgcctaaacattttatcaacgacttccctggtcattggggagttttagttatggtcatagcgattgtcttcacaatatacatcctatgcataccgatctattagagctcggtcgtcaccgatcaaaaaggttgcaaataagctgtttacaattgaaatcatgagtgaaaacattgatggagggtctagacctcaatggtggcctaaagccctaaaggaacttgaagtgggtcactgattttgtatagggtacaaaagactccatcagccatccattccatcctatttagatagtcttctaactcacctcctttttggtacttattgttttgtattattctgatgtacaaggtatgtaatatcatagagataaataagcccctgatgttacagctaactaataattactgtctagcggcaagtgttttattgtcccattaacagtttcaacaacccacatttttttttatccagtgcgcataacaaactcacttacattgaacacactgccactatttttaaccttgaatcaggctagggcttcattagaagaagcgaacacctccataacataaactgggtcaccaaccttgatgatctttccttcgccctttcctgatagagattccttgcagagaaaattctattcaaagtacacctaaaataatttattaaagtgttctattgtc

SEQ ID NO: 33888 - DNA, 2060 bp, Zea Mays
aacataccaaggcatattgtagacatttccaagtgctcaaacacccaagtgcttaatagaatcacttggtgattagcgtaggtgctttgcgaagtgcttaggttagttagaccgcattagcgcttgctctaggtgaatcctagtttgttgagtgagtttagacaaaccacacaacccctcggctcttgcgtgtgccattgtaattgtaccgagtggggcgagagtcttgcgagaccgtgacaaccgcgtttgtgtcacggccgccaccgtgtaccggagagaacgaggcccgcagcgtttcggccggaagctcgatactggagacggcggggagcgtccgagaggagccagaagcggagcaccacttgcgcgtggagaaggcccacagctctctacggagttactcgaccgtggtgcttggccctcgcgtgggcttccctttgcgtaggggcaccaacgaggattagtcgggaccttgcgtggtttcggatacctcggtaaaaataccggcgtcatccatgagagtttgcttctctactttgctctttaagttttacggtagagatagcaacacttagacaaaacctagattgcactttctagtttgattatttgcataggttttgctctagggatttatttgtggcctagtttagtaaaagttttagaagtcctaattcaccccccctcttaggcgtcacccgtttcctacaatgataaaaaagaaaggaatatcttcatgccggtgagcgggtatagggatgacaaaaaaagaaaggtatatcttcatgtcggtgagcgggtacagggatgacaaaaaaaagaaagggtgagattatgaaggtttaattatgccagagatcaaataaaaacatgtgttgagtttccagagtgttttgtataggattgctggtcaaacatgagctatcactgagagagaagaatcatgtctctggtgtttctacctgcgtggtgtctccccttcaatgcgtgccctcttccctccggttctccctgattctcacagcgaaaacagtaggggaagccctaaacaaactagttcttgaggcatttggcaatgcaaaaaactatcaggaacaattcaagtcgttttggaatttttttgttgagattcagtttgatgcaaatgggaagatatcacgagctgctataagggcctatcttgttgaaagatcccgtgtctgtcaaatatctgatccagaaagaaactaccactgcttttgcatgctctgttctgcaccatcagaagattttttcttgcaaggctggttcatatttggacctgatgtgagatccttgtttctcaccatattcccttttcttgcacccatggtggtcttctacatatttgtgcctaaacattttatcaacgacttccctggtcattggggagttttagttatggtcatagcgattgtcttcacaatatacatcctatgcataccgatctattagagctcggtcgtcaccgatcaaaaaggttgcaaataagctgtttacaattgaaatcatgagtgaaaacattgatggagggtctagacctcaatggtggcctaaagccctaaaggaacttgaagtgggtcactgattttgtatagggtacaaaagactccatcagccatccattccatcctatttagatagtcttctaactcacctcctttttggtacttattgttttgtattattctgatgtacaaggtatgtaatatcatagagataaataagcccctgatgttacagctaactaataattactgtctagcggcaagtgttttattgtcccattaacagtttcaacaacccacatttttttttatccagtgcgcataacaaactcacttacattgaacacactgccactatttttaaccttgaatcaggctagggcttcattagaagaagcgaacacctccataacataaactgggtcaccaaccttgatgatctttccttcgccctttcctgatagagattccttgcagagaaaattctattcaaagtacacctaaaataatttattaaagtgttctattgtc

SEQ ID NO: 33889 - DNA, 840 bp, Zea Mays
tagccgtcgtccgtcttctccgggtcatacagatggtcatatggggcttctccatgtaaataccaatacattggttgttggagatcattgtgtagggcatggaagtgcaaccttggacagtagaaatggtggcaacatgaaggattactttgaaactacatacaaattcttggagttgtcaccacatgtattaattccaatgcatggaaggattaatctatggcccaagtatatgctttgtggatacctcaggaatcgaagggctagagaagcgtccattctgcactctatagagaatggggcccaaactctttttgatatagtttcgaagacttacagtgatgttgacaggaagttgtggattcctgcttctttcaatgttcgccttcatgttgatcatctgaactccctacataaattgcccaaggacttctcattggagaactttaaggaaagctgtggagtgcatttcatgttgcgttgggcggtggcatatgtgcattcaaggagctccccagctatccttgcggcaagtgcccttgctggtggtcttgcaattgcttgtgctctcagaaggaactactgcaagcaatcataggttctctcggtcgataattttccagctagatgcacattatattattcacaagattctgctaccagtatgttgagtcgaacggtgaattgccagaactcttattctactattattgtccgtgattgccacatctatatacaagagaagtatctagactaggagcatgagaatcgaatgcaaccgagtcctaaaatcactgaaagcaattgcctcataaaaaacaggggcatgcaaggtgaaac

SEQ ID NO: 33890 - DNA, 963 bp, Zea Mays
atctccttatttataaggttctgaaatctgttaagcatgatacttgaataaacgaggaggaacttggcagattgactacacttcagtaactggtggtgaaaagatatgcataggtgaccaagaactacaagttgtttttgcacctggtcatacagatggtcatatggggcttctccatgtaaataccaatacattggttgttggagatcattgtgtagggcatggaagtgcaaccttggacagtagaaatggtggcaacatgaaggattactttgaaactacatacaaattcttggagttgtcaccacatgtattaattccaatgcatggaaggattaatctatggcccaagtatatgctttgtggatacctcaggaatcgaagggctagagaagcgtccattctgcactctatagagaatggggcccaaactctttttgatatagtttcgaagacttacagtgatgttgacaggaagttgtggattcctgcttctttcaatgttcgccttcatgttgatcatctgaactccctacataaattgcccaaggacttctcattggagaactttaaggaaagctgtggagtgcatttcatgttgcgttgggcggtggcatatgtgcattcaaggagctccccagctatccttgcggcaagtgcccttgctggtggtcttgcaattgcttgtgctctcagaaggaactactgcaagcaatcataggttctctcggtcgataattttccagctagatgcacattatattattcacaagattctgctaccagtatgttgagtcgaacggtgaattgccagaactcttattctactattattgtccgtgattgccacatctatatacaagagaagtatctagactaggagcatgagaatcgaatgcaaccgagtcctaaaatcactgaaagcaattgcctcataaaaaacaggggcatgcaaggtgaaac

SEQ ID NO: 33891 - DNA, 1628 bp, Zea Mays
gttgcagttggtacccgtggctacagttggttagcaacagcaaactagttctcacagtggcgcctcgatttcgacctgtaatttttgatttttcaccaatttggcttgccggctgggatgagtggggagtggaggctcctgaagtatgtggaggaagcagaatttggcccggatgctggcattaacacggtgtacattgtcggatctcttgagttgagattggatgatctgccagagtcatgtaaatggatgtccaaggagtgtgcattgaggttgctttcggaagcgaaaccaggtaatgatcgcataggacagtatgcatatattggacttctgaattcggagctgtcatcaaactgcacagcttctcctgcattgcccttccaggaatacccacctggaataacacttgtacctatgaagagtaggacactagcgccattccgtacaactaatcttgtggtagtaagatcaaccaatggtgctggtggatctacatgttctgatttttttgcttcgggggaagctctgcttatagatcccggatgcagctctcaggttcatgcagagcttgcagatctcattgattcccttccaaaaaggttattagttcttgttacacatcatcatcaggatcacattgagggtctttcagtcgttcagagatgcaatcctaatgctgttcttctgacacaccaaagtacaatggatcgcattgggaaaggaacttggcagattgactacacttcagtaactggtggtgaaaagatatgcataggtgaccaagaactacaagttgtttttgcacctggtcatacagatggtcatatggggcttctccatgtaaataccaatacattggttgttggagatcattgtgtagggcatggaagtgcaaccttggacagtagaaatggtggcaacatgaaggattactttgaaactacatacaaattcttggagttgtcaccacatgtattaattccaatgcatggaaggattaatctatggcccaagtatatgctttgtggatacctcaggaatcgaagggctagagaagcgtccattctgcactctatagagaatggggcccaaactctttttgatatagtttcgaagacttacagtgatgttgacaggaagttgtggattcctgcttctttcaatgttcgccttcatgttgatcatctgaactccctacataaattgcccaaggacttctcattggagaactttaaggaaagctgtggagtgcatttcatgttgcgttgggcggtggcatatgtgcattcaaggagctccccagctatccttgcggcaagtgcccttgctggtggtcttgcaattgcttgtgctctcagaaggaactactgcaagcaatcataggttctctcggtcgataattttccagctagatgcacattatattattcacaagattctgctaccagtatgttgagtcgaacggtgaattgccagaactcttattctactattattgtccgtgattgccacatctatatacaagagaagtatctagactaggagcatgagaatcgaatgcaaccgagtcctaaaatcactgaaagcaattgcctcataaaaaacaggggcatgcaaggtgaaac

SEQ ID NO: 33892 - DNA, 1728 bp, Zea Mays
cccattagccgagttaccgagttaattttcgcgctctgttgcagttggtacccgtggctacagttggttagcaacagcaaactagttctcacagtggcgcctcgatttcgacctgtaatttttgatttttcaccaatttggcttgccggctgggatgagtggggagtggaggctcctgaagtatgtggaggaagcagaatttggcccggatgctggcattaacacggtgtacattgtcggatctcttgagttgagattggatgatctgccagagtcatgtaaatggatgtccaaggagtgtgcattgaggttgctttcggaagcgaaaccaggtaatgatcgcataggacagtatgcatatattggacttctgaattcggagctgtcatcaaactgcacagcttctcctgcattgcccttccaggaatacccacctggaataacacttgtacctatgaagagtaggacactagcgccattccgtacaactaatcttgtggtagtaagatcaaccaatggtgctggtggatctacatgttctgatttttttgcttcgggggaagctctgcttatagatcccggatgcagctctcaggttcatgcagagcttgcagatctcattgattcccttccaaaaaggttattagttcttgttacacatcatcatcaggatcacattgagggtctttcagtcgttcagagatgcaatcctaatgctgttcttctgacacaccaaagtacaatggatcgcattgggaaaggaacttggcagattgactacacttcagtaactggtggtgaaaagatatgcataggtgaccaagaactacaagttgtttttgcacctggtcatacagatggtcatatggggcttctccatgtaaataccaatacattggttgttggagatcattgtgtagggcatggaagtgcaaccttggacagtagaaatggtggcaacatgaaggattactttgaaactacatacaaattcttggagttgtcaccacatgtattaattccaatgcatggaaggattaatctatggcccaagtatatgctttgtggatacctcaggaatcgaagggctagagaagcgtccattctgcactctatagagaatggggcccaaactctttttgatatagtttcgaagacttacagtgatgttgacaggaagttgtggattcctgcttctttcaatgttcgccttcatgttgatcatctgaactccctacataaattgcccaaggatttctctttggaaatgttcagtcgaagttgtgatgattttatctctagagtttgatggcaagacttctcattggagaactttaaggaaagctgtggagtgcatttcatgttgcgttgggcggtggcatatgtgcattcaaggagctccccagctatccttgcggcaagtgcccttgctggtggtcttgcaattgcttgtgctctcagaaggaactactgcaagcaatcataggttctctcggtcgataattttccagctagatgcacattatattattcacaagattctgctaccagtatgttgagtcgaacggtgaattgccagaactcttattctactattattgtccgtgattgccacatctatatacaagagaagtatctagactaggagcatgagaatcgaatgcaaccgagtcctaaaatcactgaaagcaattgcctcataaaaaacaggggcatgcaaggtgaaac

SEQ ID NO: 33893 - DNA, 1990 bp, Zea Mays
cacggactgggaccgcgccagccaagcgtgtgcaggtcgctgtctgctgccatagcttgccccgtctgcctgcgcggatgaagctaggcgtaggcagtaggcacctcgcctagtctcctgtaaacacccgcccgctagtgccaaccgccaaccacctccaattacttcacagcagcgcggcgccgagaagatggcttccccctcgtacaggcttgcggcggcgatcacggccccctcgaccggcgagttcctcgtcgtccggcagccgcgcccgccatccccacccgaggaggaagaggattaccggcgcttcgtcgacagcgatctctacgacctcccgtccgcgcccctcgggccactcgagggggcaccccggtcggaggtggccatcggcggcgcggactctgtcgccagccgcctcgacctctcgcgcctcgacgtgtccgccgcccttgatcagatttttcaccaatttggcttgccggctgggatgagtggggagtggaggctcctgaagtatgtggaggaagcagaatttggcccggatgctggcattaacacggtgtacattgtcggatctcttgagttgagattggatgatctgccagagtcatgtaaatggatgtccaaggagtgtgcattgaggttgctttcggaagcgaaaccaggtaatgatcgcataggacagtatgcatatattggacttctgaattcggagctgtcatcaaactgcacagcttctcctgcattgcccttccaggaatacccacctggaataacacttgtacctatgaagagtaggacactagcgccattccgtacaactaatcttgtggtagtaagatcaaccaatggtgctggtggatctacatgttctgatttttttgcttcgggggaagctctgcttatagatcccggatgcagctctcaggttcatgcagagcttgcagatctcattgattcccttccaaaaaggttattagttcttgttacacatcatcatcaggatcacattgagggtctttcagtcgttcagagatgcaatcctaatgctgttcttctgacacaccaaagtacaatggatcgcattgggaaagattgactacacttcagtaactggtggtgaaaagatatgcataggtgaccaagaactacaagttgtttttgcacctggtcatacagatggtcatatggggcttctccatgtaaataccaatacattggttgttggagatcattgtgtagggcatggaagtgcaaccttggacagtagaaatggtggcaacatgaaggattactttgaaactacatacaaattcttggagttgtcaccacatgtattaattccaatgcatggaaggattaatctatggcccaagtatatgctttgtggatacctcaggaatcgaagggctagagaagcgtccattctgcactctatagagaatggggcccaaactctttttgatatagtttcgaagacttacagtgatgttgacaggaagttgtggattcctgcttctttcaatgttcgccttcatgttgatcatctgaactccctacataaattgcccaaggacttctcattggagaactttaaggaaagctgtggagtgcatttcatgttgcgttgggcggtggcatatgtgcattcaaggagctccccagctatccttgcggcaagtgcccttgctggtggtcttgcaattgcttgtgctctcagaaggaactactgcaagcaatcataggttctctcggtcgataattttccagctagatgcacattatattattcacaagattctgctaccagtatgttgagtcgaacggtgaattgccagaactcttattctactattattgtccgtgattgccacatctatatacaagagaagtatctagactaggagcatgagaatcgaatgcaaccgagtcctaaaatcactgaaagcaattgcctcataaaaaacaggggcatgcaaggtgaaac

SEQ ID NO: 33894 - DNA, 2628 bp, Zea Mays
gcgcgctctagatccttgtcctctggtctccggatgcgcaacgtttactcgcaagcacggactgggaccgcgccagccaagcgtgtgcaggtcgctgtctgctgccatagcttgccccgtctgcctgcgcggatgaagctaggcgtaggcagtaggcacctcgcctagtctcctgtaaacacccgcccgctagtgccaaccgccaaccacctccaattacttcacagcagcgcggcgccgagaagatggcttccccctcgtacaggcttgcggcggcgatcacggccccctcgaccggcgagttcctcgtcgtccggcagccgcgcccgccatccccacccgaggaggaagaggattaccggcgcttcgtcgacagcgatctctacgacctcccgtccgcgcccctcgggccactcgagggggcaccccggtcggaggtggccatcggcggcgcggactctgtcgccagccgcctcgacctctcgcgcctcgacgtgtccgccgcccttgatcagatttttcaccaatttggcttgccggctgggatgagtggggagtggaggctcctgaagtatgtggaggaagcagaatttggcccggatgctggcattaacacggtgtacattgtcggatctcttgagttgagattggatgatctgccagagtcatgtaaatggatgtccaaggagtgtgcattgaggttgctttcggaagcgaaaccaggtaatgatcgcataggacagtatgcatatattggacttctgaattcggagctgtcatcaaactgcacagcttctcctgcattgcccttccaggtatcacctcccctccccccctcttcagttcatgccatatagtgatagtttcccagtcctgaaatgcattgctcaataggaatacccacctggaataacacttgtacctatgaagagtaggacactagcgccattccgtacaactaatcttgtggtagtaagatcaaccaatggtgctggtggatctacatgttctgatttttttgcttcgggggaagctctgcttatagatcccggatgcagctctcaggttcatgcagaggtaagagaaaatttcattagattgtgttctttagaaaaaaaataatgtgcatacatgatacatgtaagtatctttaacatcactgtattatgaagtgcatttcccaccttagatttgcttgttttaattggattgtagaatttcagaagtgtcttccccttatttatttgctgcagttccttcatgctagacctatattactgagtactgacagtcttcttcatgtgcccttatttccttgaggcctcaagatttgcccgtatctttatgaggaaaggattgatgcctgattatttctgtatatcagagcacagtagaagcagcaaaaaaatgcaaaccaaaatgttccaactgtttctgtagaataacactgtatggacacctgcagacaccatggagtgtttattagaatgcttactctgagtagaagctgtccttttgcatgtactagttcttccattatactgactaattacattcttatcatattcagcttgcagatctcattgattcccttccaaaaaggttattagttcttgttacacatcatcatcaggatcacattgagggtctttcagtcgttcagagatgcaatcctaatgctgttcttctgacacaccaaagtacaatggatcgcattgggaaaggaacttggcagattgactacacttcagtaactggtggtgaaaagatatgcataggtgaccaagaactacaagttgtttttgcacctggtcatacagatggtcatatggggcttctccatgtaaataccaatacattggttgttggagatcattgtgtagggcatggaagtgcaaccttggacagtagaaatggtggcaacatgaaggattactttgaaactacatacaaattcttggagttgtcaccacatgtattaattccaatgcatggaaggattaatctatggcccaagtatatgctttgtggatacctcaggaatcgaagggctagagaagcgtccattctgcactctatagagaatggggcccaaactctttttgatatagtttcgaagacttacagtgatgttgacaggaagttgtggattcctgcttctttcaatgttcgccttcatgttgatcatctgaactccctacataaattgcccaaggacttctcattggagaactttaaggaaagctgtggagtgcatttcatgttgcgttgggcggtggcatatgtgcattcaaggagctccccagctatccttgcggcaagtgcccttgctggtggtcttgcaattgcttgtgctctcagaaggaactactgcaagcaatcataggttctctcggtcgataattttccagctagatgcacattatattattcacaagattctgctaccagtatgttgagtcgaacggtgaattgccagaactcttattctactattattgtccgtgattgccacatctatatacaagagaagtatctagactaggagcatgagaatcgaatgcaaccgagtcctaaaatcactgaaagcaattgcctcataaaaaacaggggcatgcaaggtgaaac

SEQ ID NO: 33895 - DNA, 2966 bp, Zea Mays
gaccgggtcgccaccttctcttcgcgctcactgacaagggagggagggaggccacgcccacgctcgactctcttgcctccgtgtacctcctcgcggcgcgtgccgaggtggaggaggagcaggggaaggggagctacctgccgttgcgtgccagctactacaccttccagctcccggatcgaagcacgggtcggttaaagcacggggccccgagcggcacggccgacttggcagcagccagcaggtgaggcggagggagagggatgagcagcctcgctatagtggagaagaagccgccgccgttccccggcggcggctgcacgggcggcgtgctcttccacctcctggactggcaccgccgcctcgcctgcaagcgcaggctcttctccccgcgtcgcctcctcccttcgtccctccgctcctcgtccccacgcaggctcccgtgcccgcctcctgctgcctcgccgccaccgccgacgctgccacatccggccgatggggccgccccgggcgttgtcgcgcgcctcatgggcctggagtcctggcccgccaccgccaccgccgcgccgccgagaccgcagaagcagaggaaggtggaggcgtcgcgcgcggacggcgctgactcggcggtcgtgctcgtgctgcctacgacccggagccgtcgacctcccgcgtccgcgcccgtgccgacggcgaggagccaccacggggccgacctgccagcgcggagcccgaggcggacccgtctcgtgcacgcggccgcggcgaagctgctgcatccgggcgcgcgcgccggctcacgcgcaagcgccaggctggccctcgcgtacgcttgctcttcgccgcagcaccgcaaggatgaccacgccggcaccttgtttcaaggctccggaatgaccgacgacttcctatctcgctctgagagcttgcccttggagcgttctgcactgctacaggtacagcctcctggtcttcctgcggagacagattgtgacaccgctgttgtatcgcgtaggcacgaccattgttccactaataacgtcgatgcagcgatcagtgccagtacggtagtgttgcctagaatgggttttggtgatggaaacaggagtaaacggagctctgatgtggatgctaagcacaaggggagtggaattagaaatgacgtaacgcgcacttgtgccagggctagatcgagcggtgctgccgttcaaactggagatgagaggttgttgcgcaaacgagcaacacctactcggccggaggtttctgggatgccagagtctggggacttggctggttcgacgcgcctagctgggggtgctcgtgacttggtatctgctactaggaagtttgcacacggtggttctggtccaagaagagagttcgcgggatcgatcagtggacaagggagcacgacccacagggatttgaacagccaaaatgggttagcatccacaagtaggatttcaagcaatggatctgggcataaaaggggatcagggagaaaggtggggcatgatagagcaataagtaacagagatgacagaaatgcaattgcatttacttctagatcatctacaaagccagtggccagagcttcgtcacagagcaatctattgaagagtggatccccaaatagactagcacctgatacaactcgcacacgagttctggctcctgaaaaaagatacattgaagcttcaccttcttttatgtctacttccgagaaaggtgaatttagcaggctgttgaaagcaaaaatcaatgagcttggcatgtcggacaggattgagtgtacaccagatgattcaccttcaggaaaactgactgtacctgtgttgcaagagctcatttctgcccttacaaacgacatgagcactccaatctcccaatgtagcaactactctgctgcatcagcacccttaagttgcaatggaaatgttgactgcatcaatgaaccacattgtatattctccaatgatcaatcacctgatttccagaaatgctttaagggtgaacaagatgttgattcttctgccgcatcattaaacaatgagcccaatcagccaagtccaacgtcagtccttgaagcatccttctcaaatgatacttctttaggaagtccagttgaaaaaaatgaaggaaaagacttaatcatgtcaattgagaacaaaatggaagatctctttaatttggagtctgacattgtcgatttagcaatgtcaattgacacgaggaaaactgatgctgaagaaacacaccgtgacaatgacaagttatcatgtttacagaattttcttgcacatgatttcaacatcttagaatccaggctctgcagcattagagaagctatttcaaatgctgaactgcttgtgggcagtagcctctcgcgtagcacagcatcaggtctcccactccaccctttcattgtcgaaatgctggaaaacaccatggatatgtttagtggaggagagtattcaggtttcactgaagataagaagtatcaacgtaccaacttcctgtttgactgcatcatagagtcactggattcaaaattctgcaatttcggcaaatgtggatacaaggcctggctgagcctgcctctcagtttgagcgaggacctgctgaagcgccaggtattggaagacatcggcaactggagggagtcgagtgggactgctcttagacaagtctctgacaaagaagtggaccaagtgactgacaggtgggatgcaagccaggttgaagcatttgacataagcattgcaatcgagaacgacattcttgaggcgcttgccgcttgtcagcttgtggactgtccggtcaagtggaggatactcggcaggaaacaagcaggaattagagaacaaatcagagccagttctcgaagcagtactctgtcgaaaaggcactcctcgattcgcttaatctatccaggatacgagacagctgaccgtcagctgctc

SEQ ID NO: 33896 - DNA, 409 bp, Zea Mays
gtcggagcggcagccacccgtgatgagcaaagcaggcagcggccccgggtccgacggggcgacggctgcggcggcgtccgccgcggtgcagaagcagaagtcgctgatgtagaaggcgggcccagccgtctccagcctcgtcgacaatttctcctccctcatcaacatcgctcgagtcaacgatccgccagtgcacaactcacaggaggcctttcagatggagatgcgcgctgtccgcatgggggattgaagtgctgggtcagcaagctaagggaactgagagaatgctggaaaggattgggcaggaggtagcagcgagcctcaaggagctagaggcacactactactcatatgttgtgcgatcaccatcctatgattgagggtaagcaggagcaacggtgtcctgcta

SEQ ID NO: 33897 - DNA, 600 bp, Zea Mays
cacacaggtcggagcggcagccacccgtgatgagcaaagcaggcagcggccccgggtccgacggggcgacggctgcggcggcgtccgccgcggtgcagaagcagaagtcgctgatgtagaaggcgggcccagccgtctccagcctcgtcgacaatttctcctccctcatcaacatcgctcgagtcaacgatccgccagtgcacaactcacaggaggcctttcagatggagatgcgcgctgtccgcatgggggattgaagtgctgggtcagcaagctaagggaactgagagaatgctggaaaggattgggcaggaggtagcagcgagcctcaaggagctagaggcacactactactcatatgttgtgcgatcaccatcctatgattgaggttaatcttatcattccaggataaaatttcttgtgtttccaatatgcactcatttcacatatggtttaacagcgactgtttgttctatcattggagtatcactaagttgtagcagtgttaatgttatgtggaatgatttaatctcagtgctagttgtatcgtgctttacatatatatatatataggtgcatgatgcataattcataaagtcg

SEQ ID NO: 33898 - DNA, 1587 bp, Zea Mays
ggaaggggattaaatatcgtcggacgaggcgtggccaacccctttcgctcctctcgccgctttgggttggggtttaagcgcgtgtaagggaggccggaggcgacgacgacggcgccggcgtcggagaagaagaagcagacaactctcgtatatgtcttcttgccccttttccgatctggtggtcgtagcgctcatcatcgccgtcttcgccgtcatcctccgcgccctcgcttgctctggccgatctatgcgcaaggggctcaacggctggaacaaatcctcgtcgatgctcagggacgggttcggggtgaagtattccggattcctccacataaggccgtgcggcttctgtagaggagattgacggattcggccgatttgcgctcgtctccgtcattttttttgcacccagagtttcttgtttttctttagaagttttcccccatagtttttggcaattttggcgacaagttttggagttctccccgtcggaagagatagaagagagatgtctccgttgaaccagcaacaggttctcctcaagaaggccctggcgaagaagcccaacgctaagaagatgtctgagtttggccttaaaccctctgctgccctcttgaagtcccggacgcagcagctgccggcgccggtccagccgaggcgccgcgtccgtgtcctatttgaggaccccgacgccacggactcggactccgactcggacgacgaggagcggcgccgccgcgggctgcccgtggccgcgtcctcagcagacactccggcaagcggcagcaccccgacggcttcctcctcgtcgtccgcctcgaccgctccattcgcgcacccgtcgccgtcgtccgtgcttgaaccgagcaaggaagcgcggaacacgcagtccccagaggcgacgcccgcccggccgtcgaccgactcagcgcagctgccggaggacccagagttctaccaggaccttctgcgcggcctgcagctgcccgacatcgacccgctggacttccgcgccgggctggacgctctggatctctccgatgcggacttcggcctggacgacgaacatgacctcctgctcggggacttcggggacgaggagatggagatcgacctcgacctcgacgacatcaacgacgtcttcccggagatgcccggctgcgacctcggccgcggcatggacgacttcctgcaaaccgttgatttctgcgtgtgaattaaaagggagtgtgcccttgatatgttagggttgtttggtttcataaacgagcccctgagagtgtgcttggaaaggggagatgagatatcttgggttttttccccgggcaagttggatctgctcgtgcccaggagatttcctctttgccgaacacaccaccattagcggccggagagaagaggtaattttggtaggttatattatgtttaaggtttaaggtatagtgcctaagtgtttgctttgttatttggtaattggtaatgcttgtcaaagacattgtagtggacaagttcattgagctgttactattaagcaatgaaagggaaaaaaataagtttcgtggtagctgtgcgcgcattcgcctttat

SEQ ID NO: 33899 - DNA, 2235 bp, Zea Mays
ctccttccacctcatctcactttctctcccagatatgtttcatcttccttcgctttcctcctctctacattgctctggatgtatgcgtagcgcctgctacatcaccgaaaaggcatcgcagaccttcgatcgtatcagacggtggagagtaacaccagctcaaaaccctagcctccaactcatatacctgctgctcgccccgacgcgcatcaacttccgccgccgccccttcctcttcgtcgctcgcctcacgcctacgccaccacctctgccatggccccgaagaaggataaggccccgccgccgtcgtccaagccagccaagtccggaggcgggaagcagcaaaagaagaagtggagcaagggtaagcaaaaggagaaggtcaacaacgttgtgctcttcgaccaggccacctatgacaagttgctctccgatgtgcccaagtacaagcagatcaccccatccgtcctctccgagcgtctcagggctacatcagtgagacattgcagctcatacgagtcttgaaagacgtcctgattccgatgaaagcttgaggcaagaggaggtctataatcacttctaaagtaggctacatcactgagacattgcagcccataatagaagaggtgtatgaggttcagctgctaatggtcctgtgattttgcatttctgccatcatcattatcatcatccttggtcaatacaaataccgttccaagggagtcacatatgttcactgtaattaattaaaaaccctatttttaagggcagtaaattaaatcagtgaaataatgaagcaccaatcatcttactttttctcgatacaatgttaacttcacttgaaatatgacttatttacttattaattttatatgttcattcgctatttgggatcgtgcaaacccatcaccaaaaactacgtgttctactgaacacagatatgccttttccattgaagacaatgcaatgttgttcttttcatcttttaatttccattgaaacaatatagtttatccgataaacaaactgtagtcagttttttaccccaatttttttcaagaaaatatacaacatagtatttaaacatgccccttaactgcataaataaatgaatgtacaagtcagcagccatattctatttaacaacgtttttatgtccatacacggtaatccgtatacacaaaaacataatttattgccacacatactatatatgtgttttacatatctacgaacttatatcggttacacagcctcacacaaagagcgggatcaaatctaggctactcaatctcaggtaagaaggattttcttcctcccattcttgaattgtcgtgatcctactttcttatactaaggggatattctacgttaatgtgcattttttactcatggtggttgttaatatttttttctaagaacaaaaaccttaagtgactacatgatgttttcttagtcctaactaataagttgcgcagttgctctagaattctacaagcttaggtacaataatataagttgttaccatattattatattgctaaggattcctaactgttttgatacttctgagtatcttgatttgttgttttcttcaggtgatccatgattaattgatggagaatttcttgacaagtttgacattgttatacttagcattgcatctcttaaaatgaagttgcatattcttctctggaaatagttctactttttaatatgtcacttcagtaactctacagaaagttttcatgctcatcatgctttttttcagttgtttattaatgaaaactgccgaaagagcagcaaacacattgtgttttatactatagactgcgaggattcatgtgaagtatttattgatttatagaagcatagttatgttaaggtatgttgcatacttaaacgtgattaacattgatttttaatgttcagagctagcacaaggtatacctttatgacctaagtattcctgtgcaaccacttgcaattgaagtatgttctgcctataatatatgttcattttcttcaaaactataaatggacatatatgcagttaaaatgttaaactcatcaatgtttcccttccatatgtttgcactgaaaaaatgtgtcataaaatgtgagaaaaccatatgttcaaaactataaatagtttactgaactatctcttatattatgaaatgtgtatgtatatgtacaacttgcttgaaacaatataatattgttacaacttat

SEQ ID NO: 33900 - DNA, 1981 bp, Zea Mays
cttcgggatacttctccttccacctcatctcactttctctcccagatatgtttcatcttccttcgctttcctcctctctacattgctctggatgtatgcgtagcgcctgctacatcaccgaaaaggcatcgcagaccttcgatcgtatcagacggtggagagtaacaccagctcaaaaccctagcctccaactcatatacctgctgctcgccccgacgcgcatcaacttccgccgccgccccttcctcttcgtcgctcgcctcacgcctacgccaccacctctgccatggccccgaagaaggataaggccccgccgccgtcgtccaagccagccaagtccggaggcgggaagcagcaaaagaagaagtggagcaagggtaagcaaaaggagaaggtcaacaacgttgtgctcttcgaccaggccacctatgacaagttgctctccgatgtgcccaagtacaagcagatcaccccatccgtcctctccgagcgtctcagggcaagagcaagtctataatctttttttaacgcaggctacatcagtgagacattgcagctcatacgagtcttgaaagacgtcctgattccgatgaaagcttgaggcaagaggaggtctataatcacttctaaagtaggctacatcactgagacattgcagcccataatagaagaggtgtatgaggttcagctgctaatggtcctgtgattttgcatttctgccatcatcattatcatcatccttggtcaatacaaataccgttccaagggagtcacatatgttcactgtaattaattaaaaaccctatttttaagggcagtaaattaaatcagtgaaataatgaagcaccaatcatcttactttttctcgatacaatgttaacttcacttgaaatatgacttatttacttattaattttatatgttcattcgctatttgggatcgtgcaaacccatcaccaaaaactacgtgttctactgaacacagatatgccttttccattgaagacaatgcaatgttgttcttttcatcttttaatttccattgaaacaatatagtttatccgataaacaaactgtagtcagttttttaccccaatttttttcaagaaaatatacaacatagtatttaaacatgccccttaactgcataaataaatgaatgtacaagtcagcagccatattctatttaacaacgtttttatgtccatacacggtaatccgtatacacaaaaacataatttattgccacacatactatatatgtgttttacatatctacgaacttatatcggttacacagcctcacacaaagagcgggatcaaatctaggctactcaatctcaggtgatccatgattaattgatggagaatttcttgacaagtttgacattgttatacttagcattgcatctcttaaaatgaagttgcatattcttctctggaaatagttctactttttaatatgtcacttcagtaactctacagaaagttttcatgctcatcatgctttttttcagttgtttattaatgaaaactgccgaaagagcagcaaacacattgtgttttatactatagactgcgaggattcatgtgaagtatttattgatttatagaagcatagttatgttaaggtatgttgcatacttaaacgtgattaacattgatttttaatgttcagagctagcacaaggtatacctttatgacctaagtattcctgtgcaaccacttgcaattgaagtatgttctgcctataatatatgttcattttcttcaaaactataaatggacatatatgcagttaaaatgttaaactcatcaatgtttcccttccatatgtttgcactgaaaaaatgtgtcataaaatgtgagaaaaccatatgttcaaaactataaatagtttactgaactatctcttatattatgaaatgtgtatgtatatgtacaacttgcttgaaacaatataatattgttacaacttat

SEQ ID NO: 33901 - DNA, 2282 bp, Zea Mays
cttcgggatacttctccttccacctcatctcactttctctcccagatatgtttcatcttccttcgctttcctcctctctacattgctctggatgtatgcgtagcgcctgctacatcaccgaaaaggcatcgcagaccttcgatcgtatcagacggtggagagtaacaccagctcaaaaccctagcctccaactcatatacctgctgctcgccccgacgcgcatcaacttccgccgccgccccttcctcttcgtcgctcgcctcacgcctacgccaccacctctgccatggccccgaagaaggataaggccccgccgccgtcgtccaagccagccaagtccggaggcgggaagcagcaaaagaagaagtggagcaagggtaagcaaaaggagaaggtcaacaacgttgtgctcttcgaccaggccacctatgacaagttgctctccgatgtgcccaagtacaagcagatcaccccatccgtcctctccgagcgtctcagggcaagagcaagtctataatctttttttaacgcaggctacatcagtgagacattgcagctcatacgagtcttgaaagacgtcctgattccgatgaaagcttgaggcaagaggaggtctataatcacttctaaagtaggctacatcactgagacattgcagcccataatagaagaggtgtatgaggttcagctgctaatggtcctgtgattttgcatttctgccatcatcattatcatcatccttggtcaatacaaataccgttccaagggagtcacatatgttcactgtaattaattaaaaaccctatttttaagggcagtaaattaaatcagtgaaataatgaagcaccaatcatcttactttttctcgatacaatgttaacttcacttgaaatatgacttatttacttattaattttatatgttcattcgctatttgggatcgtgcaaacccatcaccaaaaactacgtgttctactgaacacagatatgccttttccattgaagacaatgcaatgttgttcttttcatcttttaatttccattgaaacaatatagtttatccgataaacaaactgtagtcagttttttaccccaatttttttcaagaaaatatacaacatagtatttaaacatgccccttaactgcataaataaatgaatgtacaagtcagcagccatattctatttaacaacgtttttatgtccatacacggtaatccgtatacacaaaaacataatttattgccacacatactatatatgtgttttacatatctacgaacttatatcggttacacagcctcacacaaagagcgggatcaaatctaggctactcaatctcaggtaagaaggattttcttcctcccattcttgaattgtcgtgatcctactttcttatactaaggggatattctacgttaatgtgcattttttactcatggtggttgttaatatttttttctaagaacaaaaaccttaagtgactacatgatgttttcttagtcctaactaataagttgcgcagttgctctagaattctacaagcttaggtacaataatataagttgttaccatattattatattgctaaggattcctaactgttttgatacttctgagtatcttgatttgttgttttcttcaggtgatccatgattaattgatggagaatttcttgacaagtttgacattgttatacttagcattgcatctcttaaaatgaagttgcatattcttctctggaaatagttctactttttaatatgtcacttcagtaactctacagaaagttttcatgctcatcatgctttttttcagttgtttattaatgaaaactgccgaaagagcagcaaacacattgtgttttatactatagactgcgaggattcatgtgaagtatttattgatttatagaagcatagttatgttaaggtatgttgcatacttaaacgtgattaacattgatttttaatgttcagagctagcacaaggtatacctttatgacctaagtattcctgtgcaaccacttgcaattgaagtatgttctgcctataatatatgttcattttcttcaaaactataaatggacatatatgcagttaaaatgttaaactcatcaatgtttcccttccatatgtttgcactgaaaaaatgtgtcataaaatgtgagaaaaccatatgttcaaaactataaatagtttactgaactatctcttatattatgaaatgtgtatgtatatgtacaacttgcttgaaacaatataatattgttacaacttat

SEQ ID NO: 33902 - DNA, 527 bp, Zea Mays
cctctctacattgctctggatgtatgcgtagcgcctgctacatcaccgaaaaggcatcgcagaccttcgatcgtatcagacggtggagagtaacaccagctcaaaaccctagcctccaactcatatacctgctgctcgccccgacgcgcatcaacttccgccgccgccccttcctcttcgtcgctcgcctcacgcctacgccaccacctctgccatggccccgaagaaggataaggccccgccgccgtcgtccaagccagccaagtccggaggcgggaagcagcaaaagaagaagtggagcaagggtaagcaaaaggagaaggtcaacaacgttgtgctcttcgaccaggccacctatgacaagttgctctccgatgtgcccaagtacaagcagatcaccccatccgtcctctccgagcgtctcaggattacaatagtgtggaatgtgctcgatgtgaattctttttaataccacaaagtacatgccgctagctgctgataggactactccatttatgtcaactata

SEQ ID NO: 33903 - DNA, 412 bp, Zea Mays
caggcgcccagctgctgcctgctagccgcagccgccaggcgccactgccgcactgcgccagccgcggtcgcctcgccggacaccggctcgccctctgcccctcgcgccggacctcgaacagccgaacagggagcggcctgtccatctgctgtctgctgaagcctgaagacttggagttggagagagtgataggtataagtttcacttttggataaaccgaatgtccgttgtccctggcagcttggcagctttttgtacatatttcacgggcatgtgatctgtgccatagcgtcaaattatcagtatgcttatgagtgtagatataatttctcactcaaataatgccactatgtgtttatgttgatgctataaacttaatatatattaatgtttgaattaagtcattcagttt

SEQ ID NO: 33904 - DNA, 3235 bp, Zea Mays
cccctggacatgccactcaatgcattcagagggcgtagctgctcagctgccactgctcactccccgccattaattcttcacgctgcagggcagtggccatagagtagctcgtgagcgagggagcaaaaaccagtgaagaaaaagaaaaaaaaaacaacggggcaaaacgaaatgctgtctttttctcgttcggccatcctctcctacctactgtggtgtcttctatttctcacattggcaagcagcaatggcgcggtcgccacagcaaagccgaaggctgggtgcgggtacaagctggtctcccttgttcagctgcccaacgggggaggccttgtgggttacctgcaggtgaagcagcgcacctccacttatggtcctgacatccctcgcctcaggctctttgtcaagcacgagaccagggagagggtgcgcgtgcagattacagatgcagataagcagaggtgggaggtcccctacaacctgctcccaagggagccagccccacccgtgaccggcggcaaggtcacgggcgcccccttcacgggcgccgagtaccccggcgaggagctggtgttcacctatgggcgcgacccgttctggttcgcggtgcaccgccggtccactcggcagccgctgttcaacaccagcgccggcgcgctggtgttcaaggaccagtacctggaggtgtccacggcgctgcccaagaacgccgccctgtacgggctcggcgagaacacgcagccggggggcatccggctgcggcccaacgacccctacaccatctacaccacggacatttccgccatcaacctcaacaccgacctctacggctcgcacccggtgtacatggacctccgcagcctgggcggccgcggcgtcgcgcacgccgtgctgctgctcaacagcaatggcatggatgtgttctacaggggcacgtcgctgacctacaaggtcatcggaggtcttctcgacttctacttcttctcgggcccgacgccgttggccatagtggatcagtacacgtcgatgatcggccgtcccgcgcccatgccttactgggcattcgggttccaccaatgtaggtgggggtacaagaacctttcagtggtagagggcgttgtggaaggttaccgtaatgcccagataccgctggacgtgatctggaacgatgacgaccacatggatgccgctaaggacttcacactcgatccggtcaactacccacgccccaaactgctggcgttccttgacaagatccatgcgcaaggcatgaagtacatcgtcctcatcgaccctggcattgccgtgaacagctcctatggcgtctaccagcgtggcatggaacgtgacatctttatcaagctggacgggcagccatacctcgcccaggtgtggcctggccccgtctacttcccggacttcctcaacccgaacggtgtgtcgtggtggatcgatgaggtgcggaggtttcatgatctggtcccggtggatggcctctggattgacatgaacgaggcctccaacttctgcacgggcaagtgcacgattccgaagacgcaccagtgccctattcctgacaccaagacaccatggctctgttgcttggattgcaagaaccttacaaacacgaggtgggatgagccgccgtacaagatcaacgcctccgggcagactgcccgtctcggcttcaacaccatcgcaaccagcgctacacactacaacggcatcctggagtacaatgcgcacagtctgtatggcttctcgcaggccattgccacgcatacggcgctgcaagggctgcaggggaagaggccgttcatcctgacccgctccacgttcgtcgggtcgggggcgtatgccgcgcactggaccggagacaacaagggcacgtgggaaaatctccgttactcgatctcaaccatgctcaactttggcatcttcggcatgcccatggttggctctgacatctgcggtttctacccgtcgccgactgaggagctctgcaacaggtggattgagctcggggccttctaccccttctccagggaccatgccaacttcgcgtcaccgaggcaggagctgtatgtctgggactccgtggcgaagtctgctcggaacgcgctcggcatgcggtacaagctgctcccctacctgtacacgctcaactaccaggcgcacctgaccggggcccccgtggcgcggccggtgttcttctccttccccgacttcacgccgtgctacgggctgagcacgcagttcctgctcggtcccggcgtcatggtgtccccggtcctcgagcagggcgccacttcggtgagcgccatgttcccgccgggcacctggtacaacctgttcgacatgagtaaggtggtggtgtccaggagcggggccccagtgaagctggacgcgccgctgaacgagatcaacgtgcacgtgtaccagaacacgatcctgccgatgcagcgcggcgggttcgtctccaaggacgcccgggcgacgccgttcacgctcgtggtcgcgttcccgttcggggcgacgcaggccgacgcggagggcgcggtgtacgtggacgacgacgagcgcccggagatggtgctcgcggaaggccaggcgtcgtacgtgcgtttccacgcgagcgtgcgcggaaaggccgtgacggtgcggtcggaggtgctgatgggaagctacagcctgcacaaggggctggtcgtcgagaagctctcggtgctgggtctggagggtaccggcaaggaccttgccatccaggtggacggcacggacgccactgccgtcgcgacgtcgagcccttactttgcagcaggtggcaacgcgaagctgcagggggaagaaggcgtcgaggatagtaagaacggcgtcatggtggagatcggcgggctggcattgccgctcgggaagagcttcaccatgacatggaacatgcggatcgaagcataggtcgagtgatgctgtgcttccgtctccatgaatttgcttaaagtcgtgttccgtttctgatttagatgggtagatcctgccatgctgatgtgcagtcagaatccatattctgaaaaatctgtcatcagggggtgctctgtgcaaggagcagagtacaacattgctgcaacaataaaagattgaatctttgacgtttgactagtatgatgaatgtgttaggatttatgggtttggcccagttgagaaattcaaataaattgcaggaaaatctcaaaagctt

SEQ ID NO: 33905 - DNA, 2684 bp, Zea Mays
cccctggacatgccactcaatgcattcagagggcgtagctgctcagctgccactgctcactccccgccattaattcgtagtattcaataccacagcagtacctctctctctctctctctcaccttctatctaggcatctcctcgtgacctcgtcactgtcttgcatttcatatacagttcacagttcacgctgcagggcagtggccatagagtagctcgtgagcgagggagcaaaaaccagtgaagaaaaagaaaaaaaaaacaacggggcaaaacgaaatgctgtctttttctcgttcggccatcctctcctacctactgtggtgtcttctatttctcacattggcaagcagcaatggcgcggtcgccacagcaaagccgaaggctgggtgcgggtacaagctggtctcccttgttcagctgcccaacgggggaggccttgtgggttacctgcaggtgaagcagcgcacctccacttatggtcctgacatccctcgcctcaggctctttgtcaaggttccaccaatgtaggtgggggtacaagaacctttcagtggtagagggcgttgtggaaggttaccgtaatgcccagataccgctggacgtgatctggaacgatgacgaccacatggatgccgctaaggacttcacactcgatccggtcaactacccacgccccaaactgctggcgttccttgacaagatccatgcgcaaggcatgaagtacatcgtcctcatcgaccctggcattgccgtgaacagctcctatggcgtctaccagcgtggcatggaacgtgacatctttatcaagctggacgggcagccatacctcgcccaggtgtggcctggccccgtctacttcccggacttcctcaacccgaacggtgtgtcgtggtggatcgatgaggtgcggaggtttcatgatctggtcccggtggatggcctctggattgacatgaacgaggcctccaacttctgcacgggcaagtgcacgattccgaagacgcaccagtgccctattcctgacaccaagacaccatggctctgttgcttggattgcaagaaccttacaaacacgaggtgggatgagccgccgtacaagatcaacgcctccgggcagactgcccgtctcggcttcaacaccatcgcaaccagcgctacacactacaacggcatcctggagtacaatgcgcacagtctgtatggcttctcgcaggccattgccacgcatacggcgctgcaagggctgcaggggaagaggccgttcatcctgacccgctccacgttcgtcgggtcgggggcgtatgccgcgcactggaccggagacaacaagggcacgtgggaaaatctccgttactcgatctcaaccatgctcaactttggcatcttcggcatgcccatggttggctctgacatctgcggtttctacccgtcgccgactgaggagctctgcaacaggtggattgagctcggggccttctaccccttctccagggaccatgccaacttcgcgtcaccgaggcaggagctgtatgtctgggactccgtggcgaagtctgctcggaacgcgctcggcatgcggtacaagctgctcccctacctgtacacgctcaactaccaggcgcacctgaccggggcccccgtggcgcggccggtgttcttctccttccccgacttcacgccgtgctacgggctgagcacgcagttcctgctcggtcccggcgtcatggtgtccccggtcctcgagcagggcgccacttcggtgagcgccatgttcccgccgggcacctggtacaacctgttcgacatgagtaaggtggtggtgtccaggagcggggccccagtgaagctggacgcgccgctgaacgagatcaacgtgcacgtgtaccagaacacgatcctgccgatgcagcgcggcgggttcgtctccaaggacgcccgggcgacgccgttcacgctcgtggtcgcgttcccgttcggggcgacgcaggccgacgcggagggcgcggtgtacgtggacgacgacgagcgcccggagatggtgctcgcggaaggccaggcgtcgtacgtgcgtttccacgcgagcgtgcgcggaaaggccgtgacggtgcggtcggaggtgctgatgggaagctacagcctgcacaaggggctggtcgtcgagaagctctcggtgctgggtctggagggtaccggcaaggaccttgccatccaggtggacggcacggacgccactgccgtcgcgacgtcgagcccttactttgcagcaggtggcaacgcgaagctgcagggggaagaaggcgtcgaggatagtaagaacggcgtcatggtggagatcggcgggctggcattgccgctcgggaagagcttcaccatgacatggaacatgcggatcgaagcataggtcgagtgatgctgtgcttccgtctccatgaatttgcttaaagtcgtgttccgtttctgatttagatgggtagatcctgccatgctgatgtgcagtcagaatccatattctgaaaaatctgtcatcagggggtgctctgtgcaaggagcagagtacaacattgctgcaacaataaaagattgaatctttgacgtttgactagtatgatgaatgtgttaggatttatgggtttggcccagttgagaaattcaaataaattgcaggaaaatctcaaaagctt

SEQ ID NO: 33906 - DNA, 1542 bp, Zea Mays
gaactttcaggttttccactctctttctctccctccccacattatagctgtactggagtactctctccctctacgccccaaaccaacactttaaagatcacagccttttcccctatgcatttgctgctacgaaactgcgttgtcttttttgcttttgtgccatcaaactgcactagtaaaccgtaatactctactcagtactcacatcacatgctccctgctaccagcactccagcagtgtaccatagctgcgagtactgatctctctctctctcctacctgctccccggtcccttctctttctacaactccaatccaccatccgatatatatccccttccggccacttctgttttccctcaatccccttccaaatcttcattgcacatctcatagtgtgttcagctgtctccttccccgctggcctgctctctctgctgctccaccatgaggcaagtagggagcccattggacctgaacaacttgccggaggagtacggcaagcaagcggtagagagctccacgaccaccgccacatcaagctcccatgcagttaggacagggataaagaagaagggcgatggagggaaagacgatgctgcaaaggtgtatgagtgccggttttgctccctcaagttcggcaagtctcaagcgcttggcggccatatgaaccgccatcgacaagagagggagactgaaaccctcaaccgtgcccggcaactcgtcttcggcaacgagagcctcgccgccatcggggcgcaagcgcagatgacgatgactttcagggatgtaaatatggctggcgctgccccaccgaccgtattgggaggaaacttccggggaggcgccagcgccaccggtggcagcagcgtcggcgacccgtgtctcccgttccggccggtgcatccggggctatcgtcgcagccttcgtaccattacctctacacggcgccatccacactgcacccgatgagctacccgccggcgacgtacccgggccctcctcgtcagcctgcggtcggcgactatgtcatcggtcacgcagtctccgccggtggcggtgacgcactgatgcagtcgacgcaccgcagcagcttctcttgcttcggagctccactcaccgctccgccggcagcagcggcggcgggggctgctgctgctgctatgaacgtgcaggccgacaagcttaactgcaactgcagcttcggctgcggtggccacagcagaaataataacgtgaatgcgtccacttgagcagatgcggaccgcacgctgtggttaatgcatgcaattaagtcagtgtaaagagccaagaaattaaattagatgatgcgtgttttcgacattaaagacagaagtgttctgaggatctacttctatatgaatgcctgcaatggatccctgaatctaaactaaaaatcttcagttttgcatgaattgttggttttggtactcacatagtacagaacatatatttcacaacggatgtttgcaaaaatggaatggaggaaaaacaaagtaaatttagaggattcaattcct

SEQ ID NO: 33907 - DNA, 2862 bp, Zea Mays
ctactatggtgacaggagctcaggatcaagtgggaacaaaagcataaagctggaaaggtatctccacgactcaccaaggttaaggtgtctcctacaagagaggtcagaaaggagtttgttgctgaaggctgaagctaaagatacaagggaggagccatggtgaagaagaagctgaagaaactgtatggccgggatgctcgggagttctttaaccaggtcatggtggagcaacctttgctgcccttcctgatcccgcttggcctctttgcgtggttcatcgaacggtgggttgtgccattctcgaactgggttcccctcgctgctgccgtttgggcaaccattcagtatgggaggattaagaggaggacaactgtagaagatttgaacaaaagatggaagcatcttatactgaatacaacacccaccacaccaatcgagccttgcgaatggttgaacaaacttttgttagaagtttggcctaattacatggagccaaaactatcgaagaggtttcagtctaccgtcgagagacgtttaaagaatcgaaaaccaaaattaatagataaaatagaattacaggaattctcacttggttcttgtccacctaccttgggagatcagggcatgcgttggattacttctggtgaccagcaagtcatgtgcttgggatttgattggaatagccacgagatgagtgtaatgtttttggcgaaattagcgaagccactgattgggacttgtcgaattgttataaacagcattcacatcaagggagatcttctactatcacccatacttgatggggaagctatactctattcttttgaatcaaccccagaagtcaggattggggtagcatttggaagtggtggaagtcaagcaattcctggtatggagttaccaggtgtctcgacatggctggtgaagcttttgactgaaaccttagggaaaacaatggttgaacctcgccggctatgtttttctttgccatcagtagatctaaggaaacgagcagttggaggtgttctctcagttactgttgtatcagctagtaacctctgtaagagcacagctaatgatatagggaactgccaaagctcaaatggaggggccacgtatggaattgctgataacaaggtatcacagacatttgttgaggtagaagttggcaatttgatgagaaaaacaagtaccagtaagggtctaaatcctacatggaacagtacatttaacatggtacttcatggagagacaggcattgtcaagtttcttctgtatgaattggattctggcggtgtcaaattcaattacttgacaagctgtgagataaaggtaaagtatgttcatgatggttcaacaatattttgggctataggacataactctggtgttgttgcaaagcatactgagcattgtggacaagaagttggaatggttgttccatttgaggatataaatggcgagttaactgtaagccttgtgctaaaagaatggcagttctctgatggatcggttacattgagtaattctctgggcaatggacttcaaagctcatttgatggatcgacaaagcttcagtccacaacaggaaggaaagttagggtcagagttgttgagggcagggcacttacagctaatagtaaatctggaaaatgtgacccttatgtgaaactccagtatggaaagatatgtttggtgatgaaagcattggtagtgcgagagttaatttggagggacttttagagggtgctacccgtgatgtttgggtcccacttgaaaaagtagattcaggagagataaggcttgaaatagaggcaataaagaatgatcacaacaatagcttgcagagctcaagcagtaaagctggatctggttggattgagctagtcataatcgaagccagagatcttgttgctgcggatctgagaggcactagtgatccttatgtcagggtgcactatgggagcaagaagaaacgaaccaaggtcatttacaaaacactgtctccacagtggaaccagacattcgagttcctggaaaccggagaacccctgattttgcatgtgaaggaccacaacgccgtccttccaaccgccagtatcggccattgcaccgtcgagtacagcatgctgtctccaaaccaatccgctgagaaatggataccgctccaaggcgtaaaaagcggagagatccatgtaagggtggcactgaaggtatcagtaccaggttcggagaagaagaacatgctcggggcaggtccgttcggcaaggggcacaagatgtcgacacagatgagagacagcctgaagagattcacgggcttgatcgacgacggcggtgacccggaggcactggcactagccgtggcggagatggaaggcatccagggcgagcaggaagagtacgtcgaaaccctggagcgggagaaggcgatgctgttgcacaagataaatgagcttggttccgaaatcattaggacagcatctggtcctccaaggacgccgtactagttagatctgcaaatgcacacccccccactactgaatgaacacgcatttatttatcggcaggcgaagacctggttgtacgtagaactctatagtgtgcatgtacaagtgagcagtacagctcgtgtaagtaggccaggcgtgtaggaagcacaggtgtatcttgtagtgattgataaaaactgctcaagcatcaaccggctggaagcttacagaagttggtcgactttgtacacagttagggcatgtttgggaacaatgtttttttaaaaccacattttataataccacagtttactgaatgttagaacaagactatggtatatattttacatcacctgttttggaggaagta

SEQ ID NO: 33908 - DNA, 2950 bp, Zea Mays
ggggagatggagtgggctactatggtgacaggagctcaggatcaagtgggaacaaaagcataaagctggaaaggtatctccacgactcaccaaggttaaggtgtctcctacaagagaggtcagaaaggagtttgttgctgaaggctgaagctaaagatacaagggaggagccatggtgaagaagaagctgaagaaactgtatggccgggatgctcgggagttctttaaccaggtcatggtggagcaacctttgctgcccttcctgatcccgcttggcctctttgcgtggttcatcgaacggtgggttgtgccattctcgaactgggttcccctcgctgctgccgtttgggcaaccattcagtatgggaggattaagaggaggacaactgtagaagatttgaacaaaagatggaagcatcttatactgaatacaacacccaccacaccaatcgagccttgcgaatggttgaacaaacttttgttagaagtttggcctaattacatggagccaaaactatcgaagaggtttcagtctaccgtcgaggaattctcacttggttcttgtccacctaccttgggagatcagggcatgcgttggattacttctggtgaccagcaagtcatgtgcttgggatttgattggaatagccacgagatgagtgtaatgtttttggcgaaattagcgaagccactgattgggacttgtcgaattgttataaacagcattcacatcaagggagatcttctactatcacccatacttgatggggaagctatactctattcttttgaatcaaccccagaagtcaggattggggtagcatttggaagtggtggaagtcaagcaattcctggtatggagttaccaggtgtctcgacatggctggtgaagcttttgactgaaaccttagggaaaacaatggttgaacctcgccggctatgtttttctttgccatcagtagatctaaggaaacgagcagttggaggtgttctctcagttactgttgtatcagctagtaacctctgtaagagcacagctaatgatatagggaactgccaaagctcaaatggaggggccacgtatggaattgctgataacaaggtatcacagacatttgttgaggtagaagttggcaatttgatgagaaaaacaagtaccagtaagggtctaaatcctacatggaacagtacatttaacatggtacttcatggagagacaggcattgtcaagtttcttctgtatgaattggattctggcggtgtcaaattcaattacttgacaagctgtgagataaaggtaaagtatgttcatgatggttcaacaatattttgggctataggacataactctggtgttgttgcaaagcatactgagcattgtggacaagaagttggaatggttgttccatttgaggatataaatggcgagttaactgtaagccttgtgctaaaagaatggcagttctctgatggatcggttacattgagtaattctctgggcaatggacttcaaagctcatttgatggatcgacaaagcttcagtccacaacaggaaggaaagttagggtcagagttgttgagggcagggcacttacagctaatagtaaatctggaaaatgtgacccttatgtgaaactccagtatggaaaggctctataccgaacaaaaacactgacacatacggtccgaccagtttggaatcacaagtttgagtttgatgagatctctggtggtgaatatctgaagatcaaatgctataatgcagatatgtttggtgatgaaagcattggtagtgcgagagttaatttggagggacttttagagggtgctacccgtgatgtttgggtcccacttgaaaaagtagattcaggagagataaggcttgaaatagaggcaataaagaatgatcacaacaatagcttgcagagctcaagcagtaaagctggatctggttggattgagctagtcataatcgaagccagagatcttgttgctgcggatctgagaggcactagtgatccttatgtcagggtgcactatgggagcaagaagaaacgaaccaaggtcagatggtcatttacaaaacactgtctccacagtggaaccagacattcgagttcctggaaaccggagaacccctgattttgcatgtgaaggaccacaacgccgtccttccaaccgccagtatcggccattgcaccgtcgagtacagcatgctgtctccaaaccaatccgctgagaaatggataccgctccaaggcgtaaaaagcggagagatccatgtaagggtggcactgaaggtatcagtaccaggttcggagaagaagaacatgctcggggcaggtccgttcggcaaggggcacaagatgtcgacacagatgagagacagcctgaagagattcacgggcttgatcgacgacggcggtgacccggaggcactggcactagccgtggcggagatggaaggcatccagggcgagcaggaagagtacgtcgaaaccctggagcgggagaaggcgatgctgttgcacaagataaatgagcttggttccgaaatcattaggacagcatctggtcctccaaggacgccgtactagttagatctgcaaatgcacacccccccactactgaatgaacacgcatttatttatcggcaggcgaagacctggttgtacgtagaactctatagtgtgcatgtacaagtgagcagtacagctcgtgtaagtaggccaggcgtgtaggaagcacaggtgtatcttgtagtgattgataaaaactgctcaagcatcaaccggctggaagcttacagaagttggtcgactttgtacacagttagggcatgtttgggaacaatgtttttttaaaaccacattttataataccacagtttactgaatgttagaacaagactatggtatatattttacatcacctgttttggaggaagta

SEQ ID NO: 33909 - DNA, 3406 bp, Zea Mays
acccgacccgactcctccctcccagttccaaatttccaatcctcctcgatcccaccagtagaaccctccgcttgtttcttgctcccggttcttggatcgcggaactgctccaaaccttttcttggatcgcggaaccactccaaacctgcaaaagtttgatctttgtcgactgcttcgggttctaggacctgccgagtggtatttaggcaaagaaggctctgtcggcagtagccgtccttgtgattggttccgggacttgggttttagctcccaaacgagacccccaggcgcgtctgcggcgagctggttgctaaagaaggtaggtgtctcgggggctattacaggaatctacaacaccggcctcgcaccattggtggacagatacctattactacaggtgcaaaaggggagatggagtgggctactatggtgacaggagctcaggatcaagtgggaacaaaagcataaagctggaaaggtatctccacgactcaccaaggttaaggtgtctcctacaagagaggtcagaaaggagtttgttgctgaaggctgaagctaaagatacaagggaggagccatggtgaagaagaagctgaagaaactgtatggccgggatgctcgggagttctttaaccaggtcatggtggagcaacctttgctgcccttcctgatcccgcttggcctctttgcgtggttcatcgaacggtgggttgtgccattctcgaactgggttcccctcgctgctgccgtttgggcaaccattcagtatgggaggattaagaggaggacaactgtagaagatttgaacaaaagatggaagcatcttatactgaatacaacacccaccacaccaatcgagccttgcgaatggttgaacaaacttttgttagaagtttggcctaattacatggagccaaaactatcgaagaggtttcagtctaccgtcgagagacgtttaaagaatcgaaaaccaaaattaatagataaaatagaattacaggaattctcacttggttcttgtccacctaccttgggagatcagggcatgcgttggattacttctggtgaccagcaagtcatgtgcttgggatttgattggaatagccacgagatgagtgtaatgtttttggcgaaattagcgaagccactgattgggacttgtcgaattgttataaacagcattcacatcaagggagatcttctactatcacccatacttgatggggaagctatactctattcttttgaatcaaccccagaagtcaggattggggtagcatttggaagtggtggaagtcaagcaattcctggtatggagttaccaggtgtctcgacatggctggtgaagcttttgactgaaaccttagggaaaacaatggttgaacctcgccggctatgtttttctttgccatcagtagatctaaggaaacgagcagttggaggtgttctctcagttactgttgtatcagctagtaacctctgtaagagcacagctaatgatatagggaactgccaaagctcaaatggaggggccacgtatggaattgctgataacaaggtatcacagacatttgttgaggtagaagttggcaatttgatgagaaaaacaagtaccagtaagggtctaaatcctacatggaacagtacatttaacatggtacttcatggagagacaggcattgtcaagtttcttctgtatgaattggattctggcggtgtcaaattcaattacttgacaagctgtgagataaaggtaaagtatgttcatgatggttcaacaatattttgggctataggacataactctggtgttgttgcaaagcatactgagcattgtggacaagaagttggaatggttgttccatttgaggatataaatggcgagttaactgtaagccttgtgctaaaagaatggcagttctctgatggatcggttacattgagtaattctctgggcaatggacttcaaagctcatttgatggatcgacaaagcttcagtccacaacaggaaggaaagttagggtcagagttgttgagggcagggcacttacagctaatagtaaatctggaaaatgtgacccttatgtgaaactccagtatggaaaggctctataccgaacaaaaacactgacacatacggtccgaccagtttggaatcacaagtttgagtttgatgagatctctggtggtgaatatctgaagatcaaatgctataatgcagatatgtttggtgatgaaagcattggtagtgcgagagttaatttggagggacttttagagggtgctacccgtgatgtttgggtcccacttgaaaaagtagattcaggagagataaggcttgaaatagaggcaataaagaatgatcacaacaatagcttgcagagctcaagcagtaaagctggatctggttggattgagctagtcataatcgaagccagagatcttgttgctgcggatctgagaggcactagtgatccttatgtcagggtgcactatgggagcaagaagaaacgaaccaaggtcagatggtcatttacaaaacactgtctccacagtggaaccagacattcgagttcctggaaaccggagaacccctgattttgcatgtgaaggaccacaacgccgtccttccaaccgccagtatcggccattgcaccgtcgagtacagcatgctgtctccaaaccaatccgctgagaaatggataccgctccaaggcgtaaaaagcggagagatccatgtaagggtggcactgaaggtatcagtaccaggttcggagaagaagaacatgctcggggcaggtccgttcggcaaggggcacaagatgtcgacacagatgagagacagcctgaagagattcacgggcttgatcgacgacggcggtgacccggaggcactggcactagccgtggcggagatggaaggcatccagggcgagcaggaagagtacgtcgaaaccctggagcgggagaaggcgatgctgttgcacaagataaatgagcttggttccgaaatcattaggacagcatctggtcctccaaggacgccgtactagttagatctgcaaatgcacacccccccactactgaatgaacacgcatttatttatcggcaggcgaagacctggttgtacgtagaactctatagtgtgcatgtacaagtgagcagtacagctcgtgtaagtaggccaggcgtgtaggaagcacaggtgtatcttgtagtgattgataaaaactgctcaagcatcaaccggctggaagcttacagaagttggtcgactttgtacacagttagggcatgtttgggaacaatgtttttttaaaaccacattttataataccacagtttactgaatgttagaacaagactatggtatatattttacatcacctgttttggaggaagta

SEQ ID NO: 33910 - DNA, 3318 bp, Zea Mays
gttgcccgaagcccacccgacccgactcctccctcccagttccaaatttccaatcctcctcgatcccaccagtagaaccctccgcttgtttcttgctcccggttcttggatcgcggaactgctccaaaccttttcttggatcgcggaaccactccaaacctgcaaaagtttgatctttgtcgactgcttcgggttctaggacctgccgagtggtatttaggcaaagaaggctctgtcggcagtagccgtccttgtgattggttccgggacttgggttttagctcccaaacgagacccccaggcgcgtctgcggcgagctggttgctaaagaaggtaggtgtctcgggggctattacaggaatctacaacaccggcctcgcaccattggtgcaaaaggggagatggagtgggctactatggtgacaggagctcaggatcaagtgggaacaaaagcataaagctggaaaggctgaagctaaagatacaagggaggagccatggtgaagaagaagctgaagaaactgtatggccgggatgctcgggagttctttaaccaggtcatggtggagcaacctttgctgcccttcctgatcccgcttggcctctttgcgtggttcatcgaacggtgggttgtgccattctcgaactgggttcccctcgctgctgccgtttgggcaaccattcagtatgggaggattaagaggaggacaactgtagaagatttgaacaaaagatggaagcatcttatactgaatacaacacccaccacaccaatcgagccttgcgaatggttgaacaaacttttgttagaagtttggcctaattacatggagccaaaactatcgaagaggtttcagtctaccgtcgagagacgtttaaagaatcgaaaaccaaaattaatagataaaatagaattacaggaattctcacttggttcttgtccacctaccttgggagatcagggcatgcgttggattacttctggtgaccagcaagtcatgtgcttgggatttgattggaatagccacgagatgagtgtaatgtttttggcgaaattagcgaagccactgattgggacttgtcgaattgttataaacagcattcacatcaagggagatcttctactatcacccatacttgatggggaagctatactctattcttttgaatcaaccccagaagtcaggattggggtagcatttggaagtggtggaagtcaagcaattcctggtatggagttaccaggtgtctcgacatggctggtgaagcttttgactgaaaccttagggaaaacaatggttgaacctcgccggctatgtttttctttgccatcagtagatctaaggaaacgagcagttggaggtgttctctcagttactgttgtatcagctagtaacctctgtaagagcacagctaatgatatagggaactgccaaagctcaaatggaggggccacgtatggaattgctgataacaaggtatcacagacatttgttgaggtagaagttggcaatttgatgagaaaaacaagtaccagtaagggtctaaatcctacatggaacagtacatttaacatggtacttcatggagagacaggcattgtcaagtttcttctgtatgaattggattctggcggtgtcaaattcaattacttgacaagctgtgagataaaggtaaagtatgttcatgatggttcaacaatattttgggctataggacataactctggtgttgttgcaaagcatactgagcattgtggacaagaagttggaatggttgttccatttgaggatataaatggcgagttaactgtaagccttgtgctaaaagaatggcagttctctgatggatcggttacattgagtaattctctgggcaatggacttcaaagctcatttgatggatcgacaaagcttcagtccacaacaggaaggaaagttagggtcagagttgttgagggcagggcacttacagctaatagtaaatctggaaaatgtgacccttatgtgaaactccagtatggaaaggctctataccgaacaaaaacactgacacatacggtccgaccagtttggaatcacaagtttgagtttgatgagatctctggtggtgaatatctgaagatcaaatgctataatgcagatatgtttggtgatgaaagcattggtagtgcgagagttaatttggagggacttttagagggtgctacccgtgatgtttgggtcccacttgaaaaagtagattcaggagagataaggcttgaaatagaggcaataaagaatgatcacaacaatagcttgcagagctcaagcagtaaagctggatctggttggattgagctagtcataatcgaagccagagatcttgttgctgcggatctgagaggcactagtgatccttatgtcagggtgcactatgggagcaagaagaaacgaaccaaggtcatttacaaaacactgtctccacagtggaaccagacattcgagttcctggaaaccggagaacccctgattttgcatgtgaaggaccacaacgccgtccttccaaccgccagtatcggccattgcaccgtcgagtacagcatgctgtctccaaaccaatccgctgagaaatggataccgctccaaggcgtaaaaagcggagagatccatgtaagggtggcactgaaggtatcagtaccaggttcggagaagaagaacatgctcggggcaggtccgttcggcaaggggcacaagatgtcgacacagatgagagacagcctgaagagattcacgggcttgatcgacgacggcggtgacccggaggcactggcactagccgtggcggagatggaaggcatccagggcgagcaggaagagtacgtcgaaaccctggagcgggagaaggcgatgctgttgcacaagataaatgagcttggttccgaaatcattaggacagcatctggtcctccaaggacgccgtactagttagatctgcaaatgcacacccccccactactgaatgaacacgcatttatttatcggcaggcgaagacctggttgtacgtagaactctatagtgtgcatgtacaagtgagcagtacagctcgtgtaagtaggccaggcgtgtaggaagcacaggtgtatcttgtagtgattgataaaaactgctcaagcatcaaccggctggaagcttacagaagttggtcgactttgtacacagttagggcatgtttgggaacaatgtttttttaaaaccacattttataataccacagtttactgaatgttagaacaagactatggtatatattttacatcacctgttttggaggaagta

SEQ ID NO: 33911 - DNA, 3334 bp, Zea Mays
gttgcccgaagcccacccgacccgactcctccctcccagttccaaatttccaatcctcctcgatcccaccagtagaaccctccgcttgtttcttgctcccggttcttggatcgcggaactgctccaaaccttttcttggatcgcggaaccactccaaacctgcaaaagtttgatctttgtcgactgcttcgggttctaggacctgccgagtggtatttaggcaaagaaggctctgtcggcagtagccgtccttgtgattggttccgggacttgggttttagctcccaaacgagacccccaggcgcgtctgcggcgagctggttgctaaagaaggtaggtgtctcgggggctattacaggaatctacaacaccggcctcgcaccattgatacctattactacaggtgcaaaaggggagatggagtgggctactatggtgacaggagctcaggatcaagtgggaacaaaagcataaagctggaaaggctgaagctaaagatacaagggaggagccatggtgaagaagaagctgaagaaactgtatggccgggatgctcgggagttctttaaccaggtcatggtggagcaacctttgctgcccttcctgatcccgcttggcctctttgcgtggttcatcgaacggtgggttgtgccattctcgaactgggttcccctcgctgctgccgtttgggcaaccattcagtatgggaggattaagaggaggacaactgtagaagatttgaacaaaagatggaagcatcttatactgaatacaacacccaccacaccaatcgagccttgcgaatggttgaacaaacttttgttagaagtttggcctaattacatggagccaaaactatcgaagaggtttcagtctaccgtcgagagacgtttaaagaatcgaaaaccaaaattaatagataaaatagaattacaggaattctcacttggttcttgtccacctaccttgggagatcagggcatgcgttggattacttctggtgaccagcaagtcatgtgcttgggatttgattggaatagccacgagatgagtgtaatgtttttggcgaaattagcgaagccactgattgggacttgtcgaattgttataaacagcattcacatcaagggagatcttctactatcacccatacttgatggggaagctatactctattcttttgaatcaaccccagaagtcaggattggggtagcatttggaagtggtggaagtcaagcaattcctggtatggagttaccaggtgtctcgacatggctggtgaagcttttgactgaaaccttagggaaaacaatggttgaacctcgccggctatgtttttctttgccatcagtagatctaaggaaacgagcagttggaggtgttctctcagttactgttgtatcagctagtaacctctgtaagagcacagctaatgatatagggaactgccaaagctcaaatggaggggccacgtatggaattgctgataacaaggtatcacagacatttgttgaggtagaagttggcaatttgatgagaaaaacaagtaccagtaagggtctaaatcctacatggaacagtacatttaacatggtacttcatggagagacaggcattgtcaagtttcttctgtatgaattggattctggcggtgtcaaattcaattacttgacaagctgtgagataaaggtaaagtatgttcatgatggttcaacaatattttgggctataggacataactctggtgttgttgcaaagcatactgagcattgtggacaagaagttggaatggttgttccatttgaggatataaatggcgagttaactgtaagccttgtgctaaaagaatggcagttctctgatggatcggttacattgagtaattctctgggcaatggacttcaaagctcatttgatggatcgacaaagcttcagtccacaacaggaaggaaagttagggtcagagttgttgagggcagggcacttacagctaatagtaaatctggaaaatgtgacccttatgtgaaactccagtatggaaaggctctataccgaacaaaaacactgacacatacggtccgaccagtttggaatcacaagtttgagtttgatgagatctctggtggtgaatatctgaagatcaaatgctataatgcagatatgtttggtgatgaaagcattggtagtgcgagagttaatttggagggacttttagagggtgctacccgtgatgtttgggtcccacttgaaaaagtagattcaggagagataaggcttgaaatagaggcaataaagaatgatcacaacaatagcttgcagagctcaagcagtaaagctggatctggttggattgagctagtcataatcgaagccagagatcttgttgctgcggatctgagaggcactagtgatccttatgtcagggtgcactatgggagcaagaagaaacgaaccaaggtcatttacaaaacactgtctccacagtggaaccagacattcgagttcctggaaaccggagaacccctgattttgcatgtgaaggaccacaacgccgtccttccaaccgccagtatcggccattgcaccgtcgagtacagcatgctgtctccaaaccaatccgctgagaaatggataccgctccaaggcgtaaaaagcggagagatccatgtaagggtggcactgaaggtatcagtaccaggttcggagaagaagaacatgctcggggcaggtccgttcggcaaggggcacaagatgtcgacacagatgagagacagcctgaagagattcacgggcttgatcgacgacggcggtgacccggaggcactggcactagccgtggcggagatggaaggcatccagggcgagcaggaagagtacgtcgaaaccctggagcgggagaaggcgatgctgttgcacaagataaatgagcttggttccgaaatcattaggacagcatctggtcctccaaggacgccgtactagttagatctgcaaatgcacacccccccactactgaatgaacacgcatttatttatcggcaggcgaagacctggttgtacgtagaactctatagtgtgcatgtacaagtgagcagtacagctcgtgtaagtaggccaggcgtgtaggaagcacaggtgtatcttgtagtgattgataaaaactgctcaagcatcaaccggctggaagcttacagaagttggtcgactttgtacacagttagggcatgtttgggaacaatgtttttttaaaaccacattttataataccacagtttactgaatgttagaacaagactatggtatatattttacatcacctgttttggaggaagta

SEQ ID NO: 33912 - DNA, 3359 bp, Zea Mays
cgccttccaacattggtgttgcccgaagcccacccgacccgactcctccctcccagttccaaatttccaatcctcctcgatcccaccagtagaaccctccgcttgtttcttgctcccggttcttggatcgcggaactgctccaaaccttttcttggatcgcggaaccactccaaacctgcaaaagtttgatctttgtcgactgcttcgggttctaggacctgccgagtggtatttaggcaaagaaggctctgtcggcagtagccgtccttgtgattggttccgggacttgggttttagctcccaaacgagacccccaggcgcgtctgcggcgagctggttgctaaagaaggtaggtgtctcgggggctattacaggaatctacaacaccggcctcgcaccattggtggacagatacctattactacaggtgcaaaaggggagatggagtgggctactatggtgacaggagctcaggatcaagtgggaacaaaagcataaagctggaaaggctgaagctaaagatacaagggaggagccatggtgaagaagaagctgaagaaactgtatggccgggatgctcgggagttctttaaccaggtcatggtggagcaacctttgctgcccttcctgatcccgcttggcctctttgcgtggttcatcgaacggtgggttgtgccattctcgaactgggttcccctcgctgctgccgtttgggcaaccattcagtatgggaggattaagaggaggacaactgtagaagatttgaacaaaagatggaagcatcttatactgaatacaacacccaccacaccaatcgagccttgcgaatggttgaacaaacttttgttagaagtttggcctaattacatggagccaaaactatcgaagaggtttcagtctaccgtcgagagacgtttaaagaatcgaaaaccaaaattaatagataaaatagaattacaggaattctcacttggttcttgtccacctaccttgggagatcagggcatgcgttggattacttctggtgaccagcaagtcatgtgcttgggatttgattggaatagccacgagatgagtgtaatgtttttggcgaaattagcgaagccactgattgggacttgtcgaattgttataaacagcattcacatcaagggagatcttctactatcacccatacttgatggggaagctatactctattcttttgaatcaaccccagaagtcaggattggggtagcatttggaagtggtggaagtcaagcaattcctggtatggagttaccaggtgtctcgacatggctggtgaagcttttgactgaaaccttagggaaaacaatggttgaacctcgccggctatgtttttctttgccatcagtagatctaaggaaacgagcagttggaggtgttctctcagttactgttgtatcagctagtaacctctgtaagagcacagctaatgatatagggaactgccaaagctcaaatggaggggccacgtatggaattgctgataacaaggtatcacagacatttgttgaggtagaagttggcaatttgatgagaaaaacaagtaccagtaagggtctaaatcctacatggaacagtacatttaacatggtacttcatggagagacaggcattgtcaagtttcttctgtatgaattggattctggcggtgtcaaattcaattacttgacaagctgtgagataaaggtaaagtatgttcatgatggttcaacaatattttgggctataggacataactctggtgttgttgcaaagcatactgagcattgtggacaagaagttggaatggttgttccatttgaggatataaatggcgagttaactgtaagccttgtgctaaaagaatggcagttctctgatggatcggttacattgagtaattctctgggcaatggacttcaaagctcatttgatggatcgacaaagcttcagtccacaacaggaaggaaagttagggtcagagttgttgagggcagggcacttacagctaatagtaaatctggaaaatgtgacccttatgtgaaactccagtatggaaaggctctataccgaacaaaaacactgacacatacggtccgaccagtttggaatcacaagtttgagtttgatgagatctctggtggtgaatatctgaagatcaaatgctataatgcagatatgtttggtgatgaaagcattggtagtgcgagagttaatttggagggacttttagagggtgctacccgtgatgtttgggtcccacttgaaaaagtagattcaggagagataaggcttgaaatagaggcaataaagaatgatcacaacaatagcttgcagagctcaagcagtaaagctggatctggttggattgagctagtcataatcgaagccagagatcttgttgctgcggatctgagaggcactagtgatccttatgtcagggtgcactatgggagcaagaagaaacgaaccaaggtcatttacaaaacactgtctccacagtggaaccagacattcgagttcctggaaaccggagaacccctgattttgcatgtgaaggaccacaacgccgtccttccaaccgccagtatcggccattgcaccgtcgagtacagcatgctgtctccaaaccaatccgctgagaaatggataccgctccaaggcgtaaaaagcggagagatccatgtaagggtggcactgaaggtatcagtaccaggttcggagaagaagaacatgctcggggcaggtccgttcggcaaggggcacaagatgtcgacacagatgagagacagcctgaagagattcacgggcttgatcgacgacggcggtgacccggaggcactggcactagccgtggcggagatggaaggcatccagggcgagcaggaagagtacgtcgaaaccctggagcgggagaaggcgatgctgttgcacaagataaatgagcttggttccgaaatcattaggacagcatctggtcctccaaggacgccgtactagttagatctgcaaatgcacacccccccactactgaatgaacacgcatttatttatcggcaggcgaagacctggttgtacgtagaactctatagtgtgcatgtacaagtgagcagtacagctcgtgtaagtaggccaggcgtgtaggaagcacaggtgtatcttgtagtgattgataaaaactgctcaagcatcaaccggctggaagcttacagaagttggtcgactttgtacacagttagggcatgtttgggaacaatgtttttttaaaaccacattttataataccacagtttactgaatgttagaacaagactatggtatatattttacatcacctgttttggaggaagta

SEQ ID NO: 33913 - DNA, 3381 bp, Zea Mays
gtttgacgccttccaacattggtgttgcccgaagcccacccgacccgactcctccctcccagttccaaatttccaatcctcctcgatcccaccagtagaaccctccgcttgtttcttgctcccggttcttggatcgcggaactgctccaaaccttttcttggatcgcggaaccactccaaacctgcaaaagtttgatctttgtcgactgcttcgggttctaggacctgccgagtggtatttaggcaaagaaggctctgtcggcagtagccgtccttgtgattggttccgggacttgggttttagctcccaaacgagacccccaggcgcgtctgcggcgagctggttgctaaagaaggtggacagatacctattactacaggtgcaaaaggggagatggagtgggctactatggtgacaggagctcaggatcaagtgggaacaaaagcataaagctggaaaggtatctccacgactcaccaaggttaaggtgtctcctacaagagaggtcagaaaggagtttgttgctgaaggctgaagctaaagatacaagggaggagccatggtgaagaagaagctgaagaaactgtatggccgggatgctcgggagttctttaaccaggtcatggtggagcaacctttgctgcccttcctgatcccgcttggcctctttgcgtggttcatcgaacggtgggttgtgccattctcgaactgggttcccctcgctgctgccgtttgggcaaccattcagtatgggaggattaagaggaggacaactgtagaagatttgaacaaaagatggaagcatcttatactgaatacaacacccaccacaccaatcgagccttgcgaatggttgaacaaacttttgttagaagtttggcctaattacatggagccaaaactatcgaagaggtttcagtctaccgtcgagagacgtttaaagaatcgaaaaccaaaattaatagataaaatagaattacaggaattctcacttggttcttgtccacctaccttgggagatcagggcatgcgttggattacttctggtgaccagcaagtcatgtgcttgggatttgattggaatagccacgagatgagtgtaatgtttttggcgaaattagcgaagccactgattgggacttgtcgaattgttataaacagcattcacatcaagggagatcttctactatcacccatacttgatggggaagctatactctattcttttgaatcaaccccagaagtcaggattggggtagcatttggaagtggtggaagtcaagcaattcctggtatggagttaccaggtgtctcgacatggctggtgaagcttttgactgaaaccttagggaaaacaatggttgaacctcgccggctatgtttttctttgccatcagtagatctaaggaaacgagcagttggaggtgttctctcagttactgttgtatcagctagtaacctctgtaagagcacagctaatgatatagggaactgccaaagctcaaatggaggggccacgtatggaattgctgataacaaggtatcacagacatttgttgaggtagaagttggcaatttgatgagaaaaacaagtaccagtaagggtctaaatcctacatggaacagtacatttaacatggtacttcatggagagacaggcattgtcaagtttcttctgtatgaattggattctggcggtgtcaaattcaattacttgacaagctgtgagataaaggtaaagtatgttcatgatggttcaacaatattttgggctataggacataactctggtgttgttgcaaagcatactgagcattgtggacaagaagttggaatggttgttccatttgaggatataaatggcgagttaactgtaagccttgtgctaaaagaatggcagttctctgatggatcggttacattgagtaattctctgggcaatggacttcaaagctcatttgatggatcgacaaagcttcagtccacaacaggaaggaaagttagggtcagagttgttgagggcagggcacttacagctaatagtaaatctggaaaatgtgacccttatgtgaaactccagtatggaaaggctctataccgaacaaaaacactgacacatacggtccgaccagtttggaatcacaagtttgagtttgatgagatctctggtggtgaatatctgaagatcaaatgctataatgcagatatgtttggtgatgaaagcattggtagtgcgagagttaatttggagggacttttagagggtgctacccgtgatgtttgggtcccacttgaaaaagtagattcaggagagataaggcttgaaatagaggcaataaagaatgatcacaacaatagcttgcagagctcaagcagtaaagctggatctggttggattgagctagtcataatcgaagccagagatcttgttgctgcggatctgagaggcactagtgatccttatgtcagggtgcactatgggagcaagaagaaacgaaccaaggtcatttacaaaacactgtctccacagtggaaccagacattcgagttcctggaaaccggagaacccctgattttgcatgtgaaggaccacaacgccgtccttccaaccgccagtatcggccattgcaccgtcgagtacagcatgctgtctccaaaccaatccgctgagaaatggataccgctccaaggcgtaaaaagcggagagatccatgtaagggtggcactgaaggtatcagtaccaggttcggagaagaagaacatgctcggggcaggtccgttcggcaaggggcacaagatgtcgacacagatgagagacagcctgaagagattcacgggcttgatcgacgacggcggtgacccggaggcactggcactagccgtggcggagatggaaggcatccagggcgagcaggaagagtacgtcgaaaccctggagcgggagaaggcgatgctgttgcacaagataaatgagcttggttccgaaatcattaggacagcatctggtcctccaaggacgccgtactagttagatctgcaaatgcacacccccccactactgaatgaacacgcatttatttatcggcaggcgaagacctggttgtacgtagaactctatagtgtgcatgtacaagtgagcagtacagctcgtgtaagtaggccaggcgtgtaggaagcacaggtgtatcttgtagtgattgataaaaactgctcaagcatcaaccggctggaagcttacagaagttggtcgactttgtacacagttagggcatgtttgggaacaatgtttttttaaaaccacattttataataccacagtttactgaatgttagaacaagactatggtatatattttacatcacctgttttggaggaagta

SEQ ID NO: 33914 - DNA, 2987 bp, Zea Mays
cacgctgcacgcggctggggcaagcgacactggtggacagatacctattactacaggtgcaaaaggggagatggagtgggctactatggtgacaggagctcaggatcaagtgggaacaaaagcataaagctggaaaggctgaagctaaagatacaagggaggagccatggtgaagaagaagctgaagaaactgtatggccgggatgctcgggagttctttaaccaggtcatggtggagcaacctttgctgcccttcctgatcccgcttggcctctttgcgtggttcatcgaacggtgggttgtgccattctcgaactgggttcccctcgctgctgccgtttgggcaaccattcagtatgggaggattaagaggaggacaactgtagaagatttgaacaaaagatggaagcatcttatactgaatacaacacccaccacaccaatcgagccttgcgaatggttgaacaaacttttgttagaagtttggcctaattacatggagccaaaactatcgaagaggtttcagtctaccgtcgagagacgtttaaagaatcgaaaaccaaaattaatagataaaatagaattacaggaattctcacttggttcttgtccacctaccttgggagatcagggcatgcgttggattacttctggtgaccagcaagtcatgtgcttgggatttgattggaatagccacgagatgagtgtaatgtttttggcgaaattagcgaagccactgattgggacttgtcgaattgttataaacagcattcacatcaagggagatcttctactatcacccatacttgatggggaagctatactctattcttttgaatcaaccccagaagtcaggattggggtagcatttggaagtggtggaagtcaagcaattcctggtatggagttaccaggtgtctcgacatggctggtgaagcttttgactgaaaccttagggaaaacaatggttgaacctcgccggctatgtttttctttgccatcagtagatctaaggaaacgagcagttggaggtgttctctcagttactgttgtatcagctagtaacctctgtaagagcacagctaatgatatagggaactgccaaagctcaaatggaggggccacgtatggaattgctgataacaaggtatcacagacatttgttgaggtagaagttggcaatttgatgagaaaaacaagtaccagtaagggtctaaatcctacatggaacagtacatttaacatggtacttcatggagagacaggcattgtcaagtttcttctgtatgaattggattctggcggtgtcaaattcaattacttgacaagctgtgagataaaggtaaagtatgttcatgatggttcaacaatattttgggctataggacataactctggtgttgttgcaaagcatactgagcattgtggacaagaagttggaatggttgttccatttgaggatataaatggcgagttaactgtaagccttgtgctaaaagaatggcagttctctgatggatcggttacattgagtaattctctgggcaatggacttcaaagctcatttgatggatcgacaaagcttcagtccacaacaggaaggaaagttagggtcagagttgttgagggcagggcacttacagctaatagtaaatctggaaaatgtgacccttatgtgaaactccagtatggaaaggctctataccgaacaaaaacactgacacatacggtccgaccagtttggaatcacaagtttgagtttgatgagatctctggtggtgaatatctgaagatcaaatgctataatgcagatatgtttggtgatgaaagcattggtagtgcgagagttaatttggagggacttttagagggtgctacccgtgatgtttgggtcccacttgaaaaagtagattcaggagagataaggcttgaaatagaggcaataaagaatgatcacaacaatagcttgcagagctcaagcagtaaagctggatctggttggattgagctagtcataatcgaagccagagatcttgttgctgcggatctgagaggcactagtgatccttatgtcagggtgcactatgggagcaagaagaaacgaaccaaggtcatttacaaaacactgtctccacagtggaaccagacattcgagttcctggaaaccggagaacccctgattttgcatgtgaaggaccacaacgccgtccttccaaccgccagtatcggccattgcaccgtcgagtacagcatgctgtctccaaaccaatccgctgagaaatggataccgctccaaggcgtaaaaagcggagagatccatgtaagggtggcactgaaggtatcagtaccaggttcggagaagaagaacatgctcggggcaggtccgttcggcaaggggcacaagatgtcgacacagatgagagacagcctgaagagattcacgggcttgatcgacgacggcggtgacccggaggcactggcactagccgtggcggagatggaaggcatccagggcgagcaggaagagtacgtcgaaaccctggagcgggagaaggcgatgctgttgcacaagataaatgagcttggttccgaaatcattaggacagcatctggtcctccaaggacgccgtactagttagatctgcaaatgcacacccccccactactgaatgaacacgcatttatttatcggcaggcgaagacctggttgtacgtagaactctatagtgtgcatgtacaagtgagcagtacagctcgtgtaagtaggccaggcgtgtaggaagcacaggtgtatcttgtagtgattgataaaaactgctcaagcatcaaccggctggaagcttacagaagttggtcgactttgtacacagttagggcatgtttgggaacaatgtttttttaaaaccacattttataataccacagtttactgaatgttagaacaagactatggtatatattttacatcacctgttttggaggaagta

SEQ ID NO: 33915 - DNA, 1661 bp, Zea Mays
cgggcacaccaccgcacatgtgttgtgtgttttgcgcaagaccgccggaccagagaccgtccgccccgcccgccggtcacgcacgccgtctcgcgccacccagccgtccgtcggctggtccgctgactcttcgccccccgcgtgtcctgtctgtggtggcgcggcgcgggacggaagcacgcagcagcagcaggtcaggtggtggtggggatgccggccgcggcgcggtcgtggacgtggacctgcgggtgctgcgcgggcaggaggcggaccagcggcggcgctgcgggcgacacggccggcgcgtcggggcgcgccgccgaggagggggacgagtggagcctcttcatcgacctgcccgtcctcgaggccgccaccggcggcttctccgacgacaacctcctcggccgcggcggcttcggccccgtctacaagggggtgatggagaatgggcagcagatcgctgtgaagaggctgtctctggggtcacggcaaggcgtgcgcgagttcctgaacgaggtccggctcctgctcaaggtgcagcaccggaacctggtgtccctgcttggctgctgtgcttcctccggccacaagatgctcgtctatccctacttccccaatagcagcctcgaccacactctcttcggaataagtgtgcggcgctagattggccaaaacggtaccatataatcgtgggactggcaagagggctcctctacctgcacgaagagtctccggtaaagatcatccaccgagacatcaaggcgagcaacgtgctcctggacgaccagctgaacccgaagatctcggacttcggcatggcgaggctcttcctggaggacgccacgcacgtgaacacgttcaggatctccggcacataagtacgcgatgaacggctacctgtccgccaagaccgacgtcttcagcttcgggatcctggtgctggagatcgtgagcgggcggaagaacatcgtccggcatctggacgacgagaaggtcgacctgttgagctatacatggaagctattcggagaaggacggtccctggagatcgtggacccgtcgctgtccagccccgacagcgatcaggcgctgctgtgcatccagctcggcctgctgtgctgccaggccgcggtgtcggaccggcccgacatgcacagcgtgcacctgatgctgtcgagcgactcgttcacgctgcccaggcccgggaagccggccgtacacggcaggaccggccggtggacggcagcgacgacgacggcctcagggtccgcgtcggcgtcgagcgccaccaacaccaccagcacgttcgggttcggcaccgacacgaacacgaccagggcctctgcgctgctggccagtgtcgccgaggacgagtcccggaactccatctccatatccttcaccactgatggccggtaggcgcagtgcagagtgtataagggaacgatacatgagtgagtgaaccagagtgatttgtgaggagggtattgtttggtactcctagctagctaggtagattaggttgattttgtagaatcccagccatatggcgtacagttgggttgggccgttggggcttggtagaatgctgaactgttgatcactctgttttactagtaacagcgaaacctatggtttgtcaaccgcgaaaagcgaaa

SEQ ID NO: 33916 - DNA, 2231 bp, Zea Mays
cgggcacaccaccgcacatgtgttgtgtgttttgcgcaagaccgccggaccagagaccgtccgccccgcccgccggtcacgcacgccgtctcgcgccacccagccgtccgtcggctggtccgctgactcttcgccccccgcgtgtcctgtctgtggtggcgcggcgcgggacggaagcacgcagcagcagcaggtggtggtggggatgccggccgcggcgcggtcgtggacgtggacctgcgggtgctgcgcgggcaggaggcggaccagcggcggcgctgcgggcgacacggccggcgcgtcggggcgcgccgccgaggagggggacgagtggagcctcttcatcgacctgcccgtcctcgaggccgccaccggcggcttctccgacgacaacctcctcggccgcggcggcttcggccccgtctacaaggcaacctcacttcggccttcacacgtcccttgtgcctttcacaggatttatttgcttatttatttctcgctagattatttattgcttcagaagactatatactatcgtacttatgtaccttctcctaaagcccagttggctggccggccaatctgttttatcctgtgtaccttggtcatctactatataataactgattaattaaaagaattgctccggaatttgtttttctttactctctgcttctgtccgacgctattattacctgtttgggcagacaactgcatttcagatcaaattcggcgcatatctccggcccactataacacctgttaacgctgtctccgacttcgacatacagtctaaatcatctactgtattttatatgatctgccgcggataaaacactatgtctcgaactctcgatatgaaagtgttattttgcattcagcattgaagtttctttagataaacatactgatactgtatctttctttccagggaaagaacataactcctttccaacgataaaactcacggggggaaactccctgcgctctatcctttgcagggggtgatggagaatgggcagcagatcgctgtgaagaggctgtctctggggtcacggcaaggcgtgcgcgagttcctgaacgaggtccggctcctgctcaaggtgcagcaccggaacctggtgtccctgcttggctgctgtgcttcctccggccacaagatgctcgtctatccctacttccccaatagcagcctcgaccacactctcttcgacaggaataagtgtgcggcgctagattggccaaaacggtaccatataatcgtgggactggcaagagggctcctctacctgcacgaagagtctccggtaaagatcatccaccgagacatcaaggcgagcaacgtgctcctggacgaccagctgaacccgaagatctcggacttcggcatggcgaggctcttcctggaggacgccacgcacgtgaacacgttcaggatctccggcacataagtacgcgatgaacggctacctgtccgccaagaccgacgtcttcagcttcgggatcctggtgctggagatcgtgagcgggcggaagaacatcgtccggcatctggacgacgagaaggtcgacctgttgagctatacatggaagctattcggagaaggacggtccctggagatcgtggacccgtcgctgtccagccccgacagcgatcaggcgctgctgtgcatccagctcggcctgctgtgctgccaggccgcggtgtcggaccggcccgacatgcacagcgtgcacctgatgctgtcgagcgactcgttcacgctgcccaggcccgggaagccggccgtacacggcaggaccggccggtggacggcagcgacgacgacggcctcagggtccgcgtcggcgtcgagcgccaccaacaccaccagcacgttcgggttcggcaccgacacgaacacgaccagggcctctgcgctgctggccagtgtcgccgaggacgagtcccggaactccatctccatatccttcaccactgatggccggtaggcgcagtgcagagtgtataagggaacgatacatgagtgagtgaaccagagtgatttgtgaggagggtattgtttggtactcctagctagctaggtagattaggttgattttgtagaatcccagccatatggcgtacagttgggttgggccgttggggcttggtagaatgctgaactgttgatcactctgttttactagtaacagcgaaacctatggtttgtcaaccgcgaaaagcgaaa

SEQ ID NO: 33917 - DNA, 1641 bp, Zea Mays
cgggcacaccaccgcacatgtgttgtgtgttttgcgcaagaccgccggaccagagaccgtccgccccgcccgccggtcacgcacgccgtctcgcgccacccagccgtccgtcggctggtccgctgactcttcgccccccgcgtgtcctgtctgtggtggcgcggcgcgggacggaagcacgcagcagcagcaggtcaggtaggtggtggtggggatgccggccgcggcgcggtcgtggacgtggacctgcgggtgctgcgcgggcaggaggcggaccagcggcggcgctgcgggcgacacggccggcgcgtcggggcgcgccgccgaggagggggacgagtggagcctcttcatcgacctgcccgtcctcgaggccgccaccggcggcttctccgacgacaacctcctcggccgcggcggcttcggccccgtctacaagatcgctgtgaagaggctgtctctggggtcacggcaaggcgtgcgcgagttcctgaacgaggtccggctcctgctcaaggtgcagcaccggaacctggtgtccctgcttggctgctgtgcttcctccggccacaagatgctcgtctatccctacttccccaatagcagcctcgaccacactctcttcggaataagtgtgcggcgctagattggccaaaacggtaccatataatcgtgggactggcaagagggctcctctacctgcacgaagagtctccggtaaagatcatccaccgagacatcaaggcgagcaacgtgctcctggacgaccagctgaacccgaagatctcggacttcggcatggcgaggctcttcctggaggacgccacgcacgtgaacacgttcaggatctccggcacataagtacgcgatgaacggctacctgtccgccaagaccgacgtcttcagcttcgggatcctggtgctggagatcgtgagcgggcggaagaacatcgtccggcatctggacgacgagaaggtcgacctgttgagctatacatggaagctattcggagaaggacggtccctggagatcgtggacccgtcgctgtccagccccgacagcgatcaggcgctgctgtgcatccagctcggcctgctgtgctgccaggccgcggtgtcggaccggcccgacatgcacagcgtgcacctgatgctgtcgagcgactcgttcacgctgcccaggcccgggaagccggccgtacacggcaggaccggccggtggacggcagcgacgacgacggcctcagggtccgcgtcggcgtcgagcgccaccaacaccaccagcacgttcgggttcggcaccgacacgaacacgaccagggcctctgcgctgctggccagtgtcgccgaggacgagtcccggaactccatctccatatccttcaccactgatggccggtaggcgcagtgcagagtgtataagggaacgatacatgagtgagtgaaccagagtgatttgtgaggagggtattgtttggtactcctagctagctaggtagattaggttgattttgtagaatcccagccatatggcgtacagttgggttgggccgttggggcttggtagaatgctgaactgttgatcactctgttttactagtaacagcgaaacctatggtttgtcaaccgcgaaaagcgaaa

SEQ ID NO: 33918 - DNA, 1734 bp, Zea Mays
gtcccgcaggccaccagcacaaaccacgtaactaactcctcgatttggctgcgctgcttggccgcgacaaaacccgcacgggcacaccaccgcacatgtgttgtgtgttttgcgcaagaccgccggaccagagaccgtccgccccgcccgccggtcacgcacgccgtctcgcgccacccagccgtccgtcggctggtccgctgactcttcgccccccgcgtgtcctgtctgtggtggcgcggcgcgggacggaagcacgcagcagcagcaggtggtggtggggatgccggccgcggcgcggtcgtggacgtggacctgcgggtgctgcgcgggcaggaggcggaccagcggcggcgctgcgggcgacacggccggcgcgtcggggcgcgccgccgaggagggggacgagtggagcctcttcatcgacctgcccgtcctcgaggccgccaccggcggcttctccgacgacaacctcctcggccgcggcggcttcggccccgtctacaagggggtgatggagaatgggcagcagatcgctgtgaagaggctgtctctggggtcacggcaaggcgtgcgcgagttcctgaacgaggtccggctcctgctcaaggtgcagcaccggaacctggtgtccctgcttggctgctgtgcttcctccggccacaagatgctcgtctatccctacttccccaatagcagcctcgaccacactctcttcggaataagtgtgcggcgctagattggccaaaacggtaccatataatcgtgggactggcaagagggctcctctacctgcacgaagagtctccggtaaagatcatccaccgagacatcaaggcgagcaacgtgctcctggacgaccagctgaacccgaagatctcggacttcggcatggcgaggctcttcctggaggacgccacgcacgtgaacacgttcaggatctccggcacataagtacgcgatgaacggctacctgtccgccaagaccgacgtcttcagcttcgggatcctggtgctggagatcgtgagcgggcggaagaacatcgtccggcatctggacgacgagaaggtcgacctgttgagctatacatggaagctattcggagaaggacggtccctggagatcgtggacccgtcgctgtccagccccgacagcgatcaggcgctgctgtgcatccagctcggcctgctgtgctgccaggccgcggtgtcggaccggcccgacatgcacagcgtgcacctgatgctgtcgagcgactcgttcacgctgcccaggcccgggaagccggccgtacacggcaggaccggccggtggacggcagcgacgacgacggcctcagggtccgcgtcggcgtcgagcgccaccaacaccaccagcacgttcgggttcggcaccgacacgaacacgaccagggcctctgcgctgctggccagtgtcgccgaggacgagtcccggaactccatctccatatccttcaccactgatggccggtaggcgcagtgcagagtgtataagggaacgatacatgagtgagtgaaccagagtgatttgtgaggagggtattgtttggtactcctagctagctaggtagattaggttgattttgtagaatcccagccatatggcgtacagttgggttgggccgttggggcttggtagaatgctgaactgttgatcactctgttttactagtaacagcgaaacctatggtttgtcaaccgcgaaaagcgaaa

SEQ ID NO: 33919 - DNA, 1796 bp, Zea Mays
ctccgtttacttctgcaatactagtaaattccaaatttccggtcccgcaggccaccagcacaaaccacgtaactaactcctcgatttggctgcgctgcttggccgcgacaaaacccgcacgggcacaccaccgcacatgtgttgtgtgttttgcgcaagaccgccggaccagagaccgtccgccccgcccgccggtcacgcacgccgtctcgcgccacccagccgtccgtcggctggtccgctgactcttcgccccccgcgtgtcctgtctgtggtggcgcggcgcgggacggaagcacgcagcagcagcaggtggtggtggggatgccggccgcggcgcggtcgtggacgtggacctgcgggtgctgcgcgggcaggaggcggaccagcggcggcgctgcgggcgacacggccggcgcgtcggggcgcgccgccgaggagggggacgagtggagcctcttcatcgacctgcccgtcctcgaggccgccaccggcggcttctccgacgacaacctcctcggccgcggcggcttcggccccgtctacaagggggtgatggagaatgggcagcagatcgctgtgaagaggctgtctctggggtcacggcaaggcgtgcgcgagttcctgaacgaggtccggctcctgctcaaggtgcagcaccggaacctggtgtccctgcttggctgctgtgcttcctccggccacaagatgctcgtctatccctacttccccaatagcagcctcgaccacactctcttcgacaggaataagtgtgcggcgctagattggccaaaacggtaccatataatcgtgggactggcaagagggctcctctacctgcacgaagagtctccggtaaagatcatccaccgagacatcaaggcgagcaacgtgctcctggacgaccagctgaacccgaagatctcggacttcggcatggcgaggctcttcctggaggacgccacgcacgtgaacacgttcaggatctccggcacatatggttacatggctccagagtacgcgatgaacggctacctgtccgccaagaccgacgtcttcagcttcgggatcctggtgctggagatcgtgagcgggcggaagaacatcgtccggcatctggacgacgagaaggtcgacctgttgagctatacatggaagctattcggagaaggacggtccctggagatcgtggacccgtcgctgtccagccccgacagcgatcaggcgctgctgtgcatccagctcggcctgctgtgctgccaggccgcggtgtcggaccggcccgacatgcacagcgtgcacctgatgctgtcgagcgactcgttcacgctgcccaggcccgggaagccggccgtacacggcaggaccggccggtggacggcagcgacgacgacggcctcagggtccgcgtcggcgtcgagcgccaccaacaccaccagcacgttcgggttcggcaccgacacgaacacgaccagggcctctgcgctgctggccagtgtcgccgaggacgagtcccggaactccatctccatatccttcaccactgatggccggtaggcgcagtgcagagtgtataagggaacgatacatgagtgagtgaaccagagtgatttgtgaggagggtattgtttggtactcctagctagctaggtagattaggttgattttgtagaatcccagccatatggcgtacagttgggttgggccgttggggcttggtagaatgctgaactgttgatcactctgttttactagtaacagcgaaacctatggtttgtcaaccgcgaaaagcgaaa

SEQ ID NO: 33920 - DNA, 2648 bp, Zea Mays
ctagattatagcatggcttattattttgtagggtcctgtattgtaagcatggatggatttgtcggtgcttccatatggtttaaatctggcaccagtgccaagtgtgtgacgatgagtgacttgcaccttgcaattttttgtgaaatacatgccgatgtgaacaatttaattccttaattttaatcatgtctgcttctgccctagaaacataaatacaatctaaatttaccatctcattcctcttttttacatccttatcctactcttgggtgtgcatcacctgaagtacaaccttacctcattgcattatagaatcttctacccttgtccacatattttatttacctcattgcattatagaatcttctacccttgtccacatattttatttctacatgacaatcactttgaatcatagagataatgcaaagggattacgacaaaaggaatcttcagcaagagaaggaaaaggtgtgatggtttattgctagtgcatctgatgcttatggagccccaaaatcttggaaacacagacgatcagtttgtctggccttggatgggtgttctagttaatgtgcctactgagtggaagaatgggcgccaagttggagagagtggaaatcggcttaaagagcaactttcacgcttctgccctcagaaggttattcctttatggagttatagaggtcacaccggcaatgctattgttgagtttgcaaaagactggactggcttcaaaaatgcgcttgcctttgaaaatcattttgaggccgagggatatggcaaaagggattggaagctgaagtacagtgggtcagagatgtttggatgggttgcaagagctgatgatcatagatgccaagggcctataggagactatttgcgaaaaaatggtgatctgaaaactgttggtgatcttgaaactgaagggacccgtaaaactgacaagcttgtggcaaatttagctagtcagattgaagtaaagaacaagcatgtgcaagaactggaatccaagtgcaatgagacgaccgcatcacttgacaggatgatggagcaaagggagcagatactccagaagtataatgaagaaattcgcaagatgcagcaaattgctcgtaggcattcgcagatgatcattgatgataataaaaaactccacaaagagttggagtccaagatgcaggaacttgacttaagatccaaggagcttgatgacatagctctgcaaagggattgtgacagaagaaatcttcagcaagagaaggaaaagaacaaaattaaaactaagcatctcatgatggcaacaatggagcaacagaaggccgacgagaatgtgcttaagcttgtcgaagaacataagagagagaaacaagctgctctagggaagattctcaggttacaacaacaattggacgccaaacagaagcttgaactggaagtacaaacgctggaaagcaagatgaaagttatgatgcatatgccaggtgatcaggattctgagtcaaagaagaagatggatgaacttgctgaggagctgaaggaaaaggtcgatgaattggaagcaatggagtctctgaaccaaactctgattatcaaggaaaggaagagcaacgatgagttgcaacacgctcggaaggagctgatagatggctttatggagcttgctgttgttggccgagctaacataggtataaagagaatgggtgagcttgatctcaaagcattcggaattgcttgcaagaaaaggttaccaaaggaggatgcagaagtcatttctgctaccctttgttcaaagtggcaagaagaaattagaaacccaagctggtacccttttaaggttaaggtggtggatgggaaagaaatggaaattctcaaagaggacgatgagatgctccaggagctgaaagaagagcacggtgaagaaatttatgggttggtaacaaaggccctgcttgagatcaatgagtacaaccctagtggccgctatcctgtaccagagctgtggaactacaaggagggccgtaaagcaacactgaaggaagccgtccagcacgtcatgaggcagtggaagtctcacaagagaaagcgctgagcaaattggttgctgggttcttctgcctgccccctattaactcgatagtcgatactgggtagcattaggtcgtagcttttaattaactcctaatgatgagtgggtaacagtggctggctaatattaacgttaagttgccggaggttcggtctggattcttttgttggtagtgtatacgaatgctgttagtcggtctggattctcctgtcgttgcatgggcatttgtatgtccaggatattgaccgcttcatggatcagccgtcaaactttggcaaaggagaggcatgaacgaccttccagttcctccatgatacgtagacgtgatgggcaattcttggttgatatttggccgtgcagcaccattgagcggctataacttgtacctgatgactctgggtatggattactactaaacttccatgtgcctaaaatgtgttgcagttataaattatgattttgtcaagtagaatctaatattttacaataccgatcattatgatcttgcagtctgatataagcgctattttttaaaagtgtctaactcaaggctccgatg

SEQ ID NO: 33921 - DNA, 2190 bp, Zea Mays
cttcatttcactgcgtggttgggatgaaaaccgggcatctgatgcttatggagccccaaaatcttggaaacacagacgatcagtttgtctggccttggatgggtgttctagttaatgtgcctactgagtggaagaatgggcgccaagttggagagagtggaaatcggcttaaagagcaactttcacgcttctgccctcagaaggttattcctttatggagttatagaggtcacaccggcaatgctattgttgagtttgcaaaagactggactggcttcaaaaatgcgcttgcctttgaaaatcattttgaggccgagggatatggcaaaagggattggaagctgaagtacagtgggtcagagatgtttggatgggttgcaagagctgatgatcatagatgccaagggcctataggagactatttgcgaaaaaatggtgatctgaaaactgttggtgatcttgaaactgaagggacccgtaaaactgacaagcttgtggcaaatttagctagtcagattgaagtaaagaacaagcatgtgcaagaactggaatccaagtgcaatgagacgaccgcatcacttgacaggatgatggagcaaagggagcagatactccagaagtataatgaagaaattcgcaagatgcagcaaattgctcgtaggcattcgcagatgatcattgatgataataaaaaactccacaaagagttggagtccaagatgcaggaacttgacttaagatccaaggagcttgatgacatagctctgcaaagggattgtgacagaagaaatcttcagcaagagaaggaaaagaacaaaattaaaactaagcatctcatgatggcaacaatggagcaacagaaggccgacgagaatgtgcttaagcttgtcgaagaacataagagagagaaacaagctgctctagggaagattctcaggttacaacaacaattggacgccaaacagaagcttgaactggaagtacaaacgctggaaagcaagatgaaagttatgatgcatatgccaggtgatcaggattctgagtcaaagaagaagatggatgaacttgctgaggagctgaaggaaaaggtcgatgaattggaagcaatggagtctctgaaccaaactctgattatcaaggaaaggaagagcaacgatgagttgcaacacgctcggaaggagctgatagatggctttatggagcttgctgttgttggccgagctaacataggtataaagagaatgggtgagcttgatctcaaagcattcggaattgcttgcaagaaaaggttaccaaaggaggatgcagaagtcatttctgctaccctttgttcaaagtggcaagaagaaattagaaacccaagctggtacccttttaaggttaaggtggtggatgggaaagaaatggaaattctcaaagaggacgatgagatgctccaggagctgaaagaagagcacggtgaagaaatttatgggttggtaacaaaggccctgcttgagatcaatgagtacaaccctagtggccgctatcctgtaccagagctgtggaactacaaggagggccgtaaagcaacactgaaggaagccgtccagcacgtcatgaggcagtggaagtctcacaagagaaagcgctgagcaaattggttgctgggttcttctgcctgccccctattaactcgatagtcgatactgggtagcattaggtcgtagcttttaattaactcctaatgatgagtgggtaacagtggctggctaatattaacgttaagttgccggaggttcggtctggattcttttgttggtagtgtatacgaatgctgttagtcggtctggattctcctgtcgttgcatgggcatttgtatgtccaggatattgaccgcttcatggatcagccgtcaaactttggcaaaggagaggcatgaacgaccttccagttcctccatgatacgtagacgtgatgggcaattcttggttgatatttggccgtgcagcaccattgagcggctataacttgtacctgatgactctgggtatggattactactaaacttccatgtgcctaaaatgtgttgcagttataaattatgattttgtcaagtagaatctaatattttacaataccgatcattatgatcttgcagtctgatataagcgctattttttaaaagtgtctaactcaaggctccgatg

SEQ ID NO: 33922 - DNA, 1722 bp, Zea Mays
ctccctcgtctacatcctgtctctcctcgcactctccgttctcccgccgcttctggtctcggaggtcgcagcgttcctccacttgtccgttcgcctactcgcctgcggctccgtccacagtacgctacgcaaaagcgaggtggcgaccgctgttcgccggagaaattcgcaagatgcagcaaattgctcgtaggcattcgcagatgatcattgatgataataaaaaactccacaaagagttggagtccaagatgcaggaacttgacttaagatccaaggagcttgatgacatagctctgcaaagggattgtgacagaagaaatcttcagcaagagaaggaaaagaacaaaattaaaactaagcatctcatgatggcaacaatggagcaacagaaggccgacgagaatgtgcttaagcttgtcgaagaacataagagagagaaacaagctgctctagggaagattctcaggttacaacaacaattggacgccaaacagaagcttgaactggaagtacaaacgctggaaagcaagatgaaagttatgatgcatatgccaggtgatcaggattctgagtcaaagaagaagatggatgaacttgctgaggagctgaaggaaaaggtcgatgaattggaagcaatggagtctctgaaccaaactctgattatcaaggaaaggaagagcaacgatgagttgcaacacgctcggaaggagctgatagatggctttatggagcttgctgttgttggccgagctaacataggtataaagagaatgggtgagcttgatctcaaagcattcggaattgcttgcaagaaaaggttaccaaaggaggatgcagaagtcatttctgctaccctttgttcaaagtggcaagaagaaattagaaacccaagctggtacccttttaaggttaaggtggtggatgggaaagaaatggaaattctcaaagaggacgatgagatgctccaggagctgaaagaagagcacggtgaagaaatttatgggttggtaacaaaggccctgcttgagatcaatgagtacaaccctagtggccgctatcctgtaccagagctgtggaactacaaggagggccgtaaagcaacactgaaggaagccgtccagcacgtcatgaggcagtggaagtctcacaagagaaagcgctgagcaaattggttgctgggttcttctgcctgccccctattaactcgatagtcgatactgggtagcattaggtcgtagcttttaattaactcctaatgatgagtgggtaacagtggctggctaatattaacgttaagttgccggaggttcggtctggattcttttgttggtagtgtatacgaatgctgttagtcggtctggattctcctgtcgttgcatgggcatttgtatgtccaggatattgaccgcttcatggatcagccgtcaaactttggcaaaggagaggcatgaacgaccttccagttcctccatgatacgtagacgtgatgggcaattcttggttgatatttggccgtgcagcaccattgagcggctataacttgtacctgatgactctgggtatggattactactaaacttccatgtgcctaaaatgtgttgcagttataaattatgattttgtcaagtagaatctaatattttacaataccgatcattatgatcttgcagtctgatataagcgctattttttaaaagtgtctaactcaaggctccgatg

SEQ ID NO: 33923 - DNA, 2192 bp, Zea Mays
agaatcctccctcgtctacatcctgtctctcctcgcactctccgttctcccgccgcttctggtctcggaggtcgcagacgatcagtttgtctggccttggatgggtgttctagttaatgtgcctactgagtggaagaatgggcgccaagttggagagagtggaaatcggcttaaagagcaactttcacgcttctgccctcagaaggttattcctttatggagttatagaggtcacaccggcaatgctattgttgagtttgcaaaagactggactggcttcaaaaatgcgcttgcctttgaaaatcattttgaggccgagggatatggcaaaagggattggaagctgaagtacagtgggtcagagatgtttggatgggttgcaagagctgatgatcatagatgccaagggcctataggagactatttgcgaaaaaatggtgatctgaaaactgttggtgatcttgaaactgaagggacccgtaaaactgacaagcttgtggcaaatttagctagtcagattgaagtaaagaacaagcatgtgcaagaactggaatccaagtgcaatgagacgaccgcatcacttgacaggatgatggagcaaagggagcagatactccagaagtataatgaagaaattcgcaagatgcagcaaattgctcgtaggcattcgcagatgatcattgatgataataaaaaactccacaaagagttggagtccaagatgcaggaacttgacttaagatccaaggagcttgatgacatagctctgcaaagggattgtgacagaagaaatcttcagcaagagaaggaaaagaacaaaattaaaactaagcatctcatgatggcaacaatggagcaacagaaggccgacgagaatgtgcttaagcttgtcgaagaacataagagagagaaacaagctgctctagggaagattctcaggttacaacaacaattggacgccaaacagaagcttgaactggaagtacaaacgctggaaagcaagatgaaagttatgatgcatatgccaggtgatcaggattctgagtcaaagaagaagatggatgaacttgctgaggagctgaaggaaaaggtcgatgaattggaagcaatggagtctctgaaccaaactctgattatcaaggaaaggaagagcaacgatgagttgcaacacgctcggaaggagctgatagatggctttatggagcttgctgttgttggccgagctaacataggtataaagagaatgggtgagcttgatctcaaagcattcggaattgcttgcaagaaaaggttaccaaaggaggatgcagaagtcatttctgctaccctttgttcaaagtggcaagaagaaattagaaacccaagctggtacccttttaaggttaaggtggtggatgggaaagaaatggaaattctcaaagaggacgatgagatgctccaggagctgaaagaagagcacggtgaagaaatttatgggttggtaacaaaggccctgcttgagatcaatgagtacaaccctagtggccgctatcctgtaccagagctgtggaactacaaggagggccgtaaagcaacactgaaggaagccgtccagcacgtcatgaggcagtggaagtctcacaagagaaagcgctgagcaaattggttgctgggttcttctgcctgccccctattaactcgatagtcgatactgggtagcattaggtcgtagcttttaattaactcctaatgatgagtgggtaacagtggctggctaatattaacgttaagttgccggaggttcggtctggattcttttgttggtagtgtatacgaatgctgttagtcggtctggattctcctgtcgttgcatgggcatttgtatgtccaggatattgaccgcttcatggatcagccgtcaaactttggcaaaggagaggcatgaacgaccttccagttcctccatgatacgtagacgtgatgggcaattcttggttgatatttggccgtgcagcaccattgagcggctataacttgtacctgatgactctgggtatggattactactaaacttccatgtgcctaaaatgtgttgcagttataaattatgattttgtcaagtagaatctaatattttacaataccgatcattatgatcttgcagtctgatataagcgctattttttaaaagtgtctaactcaaggctccgatg

SEQ ID NO: 33924 - DNA, 2246 bp, Zea Mays
cttcgttctaacacagaatcctccctcgtctacatcctgtctctcctcgcactctccgttctcccgccgcttctggtctcggaggtcgcagcatctgatgcttatggagccccaaaatcttggaaacacagacgatcagtttgtctggccttggatgggtgttctagttaatgtgcctactgagtggaagaatgggcgccaagttggagagagtggaaatcggcttaaagagcaactttcacgcttctgccctcagaaggttattcctttatggagttatagaggtcacaccggcaatgctattgttgagtttgcaaaagactggactggcttcaaaaatgcgcttgcctttgaaaatcattttgaggccgagggatatggcaaaagggattggaagctgaagtacagtgggtcagagatgtttggatgggttgcaagagctgatgatcatagatgccaagggcctataggagactatttgcgaaaaaatggtgatctgaaaactgttggtgatcttgaaactgaagggacccgtaaaactgacaagcttgtggcaaatttagctagtcagattgaagtaaagaacaagcatgtgcaagaactggaatccaagtgcaatgagacgaccgcatcacttgacaggatgatggagcaaagggagcagatactccagaagtataatgaagaaattcgcaagatgcagcaaattgctcgtaggcattcgcagatgatcattgatgataataaaaaactccacaaagagttggagtccaagatgcaggaacttgacttaagatccaaggagcttgatgacatagctctgcaaagggattgtgacagaagaaatcttcagcaagagaaggaaaagaacaaaattaaaactaagcatctcatgatggcaacaatggagcaacagaaggccgacgagaatgtgcttaagcttgtcgaagaacataagagagagaaacaagctgctctagggaagattctcaggttacaacaacaattggacgccaaacagaagcttgaactggaagtacaaacgctggaaagcaagatgaaagttatgatgcatatgccaggtgatcaggattctgagtcaaagaagaagatggatgaacttgctgaggagctgaaggaaaaggtcgatgaattggaagcaatggagtctctgaaccaaactctgattatcaaggaaaggaagagcaacgatgagttgcaacacgctcggaaggagctgatagatggctttatggagcttgctgttgttggccgagctaacataggtataaagagaatgggtgagcttgatctcaaagcattcggaattgcttgcaagaaaaggttaccaaaggaggatgcagaagtcatttctgctaccctttgttcaaagtggcaagaagaaattagaaacccaagctggtacccttttaaggttaaggtggtggatgggaaagaaatggaaattctcaaagaggacgatgagatgctccaggagctgaaagaagagcacggtgaagaaatttatgggttggtaacaaaggccctgcttgagatcaatgagtacaaccctagtggccgctatcctgtaccagagctgtggaactacaaggagggccgtaaagcaacactgaaggaagccgtccagcacgtcatgaggcagtggaagtctcacaagagaaagcgctgagcaaattggttgctgggttcttctgcctgccccctattaactcgatagtcgatactgggtagcattaggtcgtagcttttaattaactcctaatgatgagtgggtaacagtggctggctaatattaacgttaagttgccggaggttcggtctggattcttttgttggtagtgtatacgaatgctgttagtcggtctggattctcctgtcgttgcatgggcatttgtatgtccaggatattgaccgcttcatggatcagccgtcaaactttggcaaaggagaggcatgaacgaccttccagttcctccatgatacgtagacgtgatgggcaattcttggttgatatttggccgtgcagcaccattgagcggctataacttgtacctgatgactctgggtatggattactactaaacttccatgtgcctaaaatgtgttgcagttataaattatgattttgtcaagtagaatctaatattttacaataccgatcattatgatcttgcagtctgatataagcgctattttttaaaagtgtctaactcaaggctccgatg

SEQ ID NO: 33925 - DNA, 2341 bp, Zea Mays
tatattatcgcgaagtgatacgtttgaagtatcaaatatacgattgtctctcacgttcccacattagggaaaaaaggaagaaaaaaaaataactccaccattcccttccctctcgcgagctcagatcacgcgaagcaaggaaaaaagaaaaatggcgcagctggtggagacgtacgcgtgctcgccggccacggaacgcggccgtggaatcctcctggccggggaccccaagacagacacgatcgcctactgcaccggccgcagcgttatcatccgccgcctcgatgcgcctctcgacgcttgggcctaccccgaccacgcctaccccacgaccgtcgcccgcttctcccccaacggcgagtgggtcgcctccgccgacgcctccggctgcgtccgcgtctggggccgctacggtgaccgcgctctcaaggccgagtttcggcccctctcgggacgcgtcgacgacctccgctggtcccccgacggcctacgcatcgtcgtctctggggacggcaagggcaagtccttcgtccgcgcatttgtgtgggactctggcagcactgttggtgaatttgatgggcactcaaagagggttctgagctgtgacttcaaaccaacacgtccatttcgcattgtgacatgtggtgaagattttctggctaacttctatgaaggaccaccattcaaatttaagcattccataagggatcactcaaattttgttaactgtatccggtatgctcctgatggtagtaagtttatcactgtgagttctgataagaagggtttgatatatgatggcaaaactggagaaaaaataggagaactttccactgaaggcaatcatacagggagcatatatgctgttagctggagtcctgacagtaaacagaatgaccacctcgtgacagtctctcttggtgggacatttaatgtgttctctgcaagcaacccagaccaagaaccagttacatttgcaggacatttgaagactgttagttctttggtcttctttcctcaaagtagcccaagaactatactatctactagctatgatggtgtcatcatgaggtggatacagggtgttggatttggtggcagattggtgcgcagaaacaacactcaaataaaatgttttgctgcagtagaagaagagcttgttacctcaggttatgataataaggtcttcagaattcctcttaatggaaaccagtgtggagatgctgagtcagttgatataggcggtcagccaaatgctttgaaccttgcaattcagaaacctgaatttgcactgatcactactgattccgggattgtgttgctgcacaattcaaaagtcatttctacaacaaaagttaactatgccatcacgtcatcttcagtgtctcctgatggcacttatgctgtcgtgggtgctcaagatgggaaactgcgaatctattccatcagtggagatacactcacagaagaagctctgcttgagaagcaccggggtgctatcacttccttacattattcgccagatgtttctatgtttgcttctgctgataccaacagggaagctgttgtgtgggatcgagcaagtagagaggtcaagctgaagaacatgttgtaccacacagccaggataaactccctggcttggtcacctgacagtcgattggttgccactggctcactggacacctgtgcaattgtctacgagatagacaagccggtagccagtcgcgtcaccatcaagggagcccatcttggtggggttcatgggttaaccttcctcgacaatgatattctggtgactgccggtgaagatgcttgcattcgtgtttggaaggtggtgcagcaataggccgctcttcattctggtgtgcaatgagaatgtctgtgctgttgattggaataaactttttttttgttggtttggtggctgttactcacggggtcatagcatggtttgttgctttatctgcgatttgtgctctaaatttcctttacaattctttttgagctgtattatttttgcttgttttttttcaggaagactcctttgtaagtggatccggtatccctgcatctgattttgttaggagttgtgagaatatagggatactgttgttgctttttctaccccaggtccctaaaatagtcgttaataactgacttcgctgtggttaagtttttacgaacgttgactgtgctttcatatacttcatctgcatcgtaactgtatcatgcacataaatacttggaaacttttgctgcaagacatcgtttaaacgtgtattatgcggtggaacactgttaaaagcttaaaattcggctgcccagcgctgggctgctt

SEQ ID NO: 33926 - DNA, 2273 bp, Zea Mays
tatattatcgcgaagtgatacgtttgaagtatcaaatatacgattgtctctcacgttcccacattagggaaaaaaggaagaaaaaaaaataactccaccattcccttccctctcgcgagctcagatcacgcgaagcaaggaaaaaagaaaaatggcgcagctggtggagacgtacgcgtgctcgccggccacggaacgcggccgtggaatcctcctggccggggaccccaagacagacacgatcgcctactgcaccggccgcagcgttatcatccgccgcctcgatgcgcctctcgacgcttgggcctaccccgaccacgcctaccccacgaccgtcgcccgcttctcccccaacggcgagtgggtcgcctccgccgacgcctccggctgcgtccgcgtctggggccgctacggtgaccgcgctctcaaggccgagtttcggcccctctcgggacgcgtcgacgacctccgctggtcccccgacggcctacgcatcgtcgtctctggggacggcaagggcaagtccttcgtccgcgcatttgtgtgggactctggcagcactgttggtgaatttgatgggcactcaaagagggttctgagctgtgacttcaaaccaacacgtccatttcgcattgtgacatgtggtgaagattttctggctaacttctatgaaggaccaccattcaaatttaagcattccataagggatcactcaaattttgttaactgtatccggtatgctcctgatggtagtaagtttatcactgtgagttctgataagaagggtttgatatatgatggcaaaactggagaaaaaataggagaactttccactgaaggcaatcatacagggagcatatatgctgttagctggagtcctgacagtaaacaggttctaacagtttctgctgataaatctgcaaaagtatgggatatcatggaagatgcaagtgggaaattgaatcgaactttgtcttgccctggtataggaggtgtggatgatatgcttgttggttgtctctggcagaatgaccacctcgtgacagtctctcttggtgggacatttaatgtgttctctgcaagcaacccagaccaagaaccagttacatttgcaggacatttgaagactgttagttctttggtcttctttcctcaaagtagcccaagaactatactatctactagctatgatggtgtcatcatgaggtggatacagggtgttggatttggtggcagattggtgcgcagaaacaacactcaaataaaatgttttgctgcagtagaagaagagcttgttacctcaggttatgataataaggtcttcagaattcctcttaatggaaaccagtgtggagatgctgagtcagttgatataggcggtcagccaaatgctttgaaccttgcaattcagaaacctgaatttgcactgatcactactgattccgggattgtgttgctgcacaattcaaaagtcatttctacaacaaaagttaactatgccatcacgtcatcttcagtgtctcctgatggcacttatgctgtcgtgggtgctcaagatgggaaactgcgaatctattccatcagtggagatacactcacagaagaagctctgcttgagaagcaccggggtgctatcacttccttacattattcgccagatgtttctatgtttgcttctgctgataccaacagggaagctgttgtgtgggatcgagcaagtagagaggtcaagctgaagaacatgttgtaccacacagccaggataaactccctggcttggtcacctgacagtcgattggttgccactggctcactggacacctgtgcaattgtctacgagatagacaagccggtagccagtcgcgtcaccatcaagggagcccatcttggtggggttcatgggttaaccttcctcgacaatgatattctggtgactgccggtgaagatgcttgcattcgtgtttggaaggaagactcctttgtaagtggatccggtatccctgcatctgattttgttaggagttgtgagaatatagggatactgttgttgctttttctaccccaggtccctaaaatagtcgttaataactgacttcgctgtggttaagtttttacgaacgttgactgtgctttcatatacttcatctgcatcgtaactgtatcatgcacataaatacttggaaacttttgctgcaagacatcgtttaaacgtgtattatgcggtggaacactgttaaaagcttaaaattcggctgcccagcgctgggctgctt

SEQ ID NO: 33927 - DNA, 2474 bp, Zea Mays
tatattatcgcgaagtgatacgtttgaagtatcaaatatacgattgtctctcacgttcccacattagggaaaaaaggaagaaaaaaaaataactccaccattcccttccctctcgcgagctcagatcacgcgaagcaaggaaaaaagaaaaatggcgcagctggtggagacgtacgcgtgctcgccggccacggaacgcggccgtggaatcctcctggccggggaccccaagacagacacgatcgcctactgcaccggccgcagcgttatcatccgccgcctcgatgcgcctctcgacgcttgggcctaccccgaccacgcctaccccacgaccgtcgcccgcttctcccccaacggcgagtgggtcgcctccgccgacgcctccggctgcgtccgcgtctggggccgctacggtgaccgcgctctcaaggccgagtttcggcccctctcgggacgcgtcgacgacctccgctggtcccccgacggcctacgcatcgtcgtctctggggacggcaagggcaagtccttcgtccgcgcatttgtgtgggactctggcagcactgttggtgaatttgatgggcactcaaagagggttctgagctgtgacttcaaaccaacacgtccatttcgcattgtgacatgtggtgaagattttctggctaacttctatgaaggaccaccattcaaatttaagcattccataagggatcactcaaattttgttaactgtatccggtatgctcctgatggtagtaagtttatcactgtgagttctgataagaagggtttgatatatgatggcaaaactggagaaaaaataggagaactttccactgaaggcaatcatacagggagcatatatgctgttagctggagtcctgacagtaaacaggttctaacagtttctgctgataaatctgcaaaagtatgggatatcatggaagatgcaagtgggaaattgaatcgaactttgtcttgccctggtataggaggtgtggatgatatgcttgttggttgtctctggcagaatgaccacctcgtgacagtctctcttggtgggacatttaatgtgttctctgcaagcaacccagaccaagaaccagttacatttgcaggacatttgaagactgttagttctttggtcttctttcctcaaagtagcccaagaactatactatctactagctatgatggtgtcatcatgaggtggatacagggtgttggatttggtggcagattggtgcgcagaaacaacactcaaataaaatgttttgctgcagtagaagaagagcttgttacctcaggttatgataataaggtcttcagaattcctcttaatggaaaccagtgtggagatgctgagtcagttgatataggcggtcagccaaatgctttgaaccttgcaattcagaaacctgaatttgcactgatcactactgattccgggattgtgttgctgcacaattcaaaagtcatttctacaacaaaagttaactatgccatcacgtcatcttcagtgtctcctgatggcacttatgctgtcgtgggtgctcaagatgggaaactgcgaatctattccatcagtggagatacactcacagaagaagctctgcttgagaagcaccggggtgctatcacttccttacattattcgccagatgtttctatgtttgcttctgctgataccaacagggaagctgttgtgtgggatcgagcaagtagaggtcaagctgaagaacatgttgtaccacacagccaggataaactccctggcttggtcacctgacagtcgattggttgccactggctcactggacacctgtgcaattgtctacgagatagacaagccggtagccagtcgcgtcaccatcaagggagcccatcttggtggggttcatgggttaaccttcctcgacaatgatattctggtgactgccggtgaagatgcttgcattcgtgtttggaaggtggtgcagcaataggccgctcttcattctggtgtgcaatgagaatgtctgtgctgttgattggaataaactttttttttgttggtttggtggctgttactcacggggtcatagcatggtttgttgctttatctgcgatttgtgctctaaatttcctttacaattctttttgagctgtattatttttgcttgttttttttcaggaagactcctttgtaagtggatccggtatccctgcatctgattttgttaggagttgtgagaatatagggatactgttgttgctttttctaccccaggtccctaaaatagtcgttaataactgacttcgctgtggttaagtttttacgaacgttgactgtgctttcatatacttcatctgcatcgtaactgtatcatgcacataaatacttggaaacttttgctgcaagacatcgtttaaacgtgtattatgcggtggaacactgttaaaagcttaaaattcggctgcccagcgctgggctgctt

SEQ ID NO: 33928 - DNA, 550 bp, Zea Mays
ccaaaagtgatggagcctcttctatgcgtgcaaataaaagtctattgatcaaaagtgacctagtcttttttgcatagacacacaattctaggaaggttcaacatcaggttaatatgtacataaaagtctcatgaccaaaggtgatggagcctcttctatgcttgcaaaaaaagaaacagtaccagtatacaaatgagagtagtatgttagcatagacaacaccaaagagcacaatgtaatatcaggatcataaaacaaataacattttttgaaaagagagaaacaataacatacaatatgtttattttatctttccctctgatcacgacaagcaggtactaatagcgtgtttggtctgatggtttggctcatccatcgtggtctggctccggatggagcggtcctgcactttattgcggagtgagctgatctcacatgttagtttgttattagaacaacgcagtgacgaacgacatcgttccgcgattcaaaccaaatgatgatgtaggctcggacgcaggtctgaatgacttcggaagccgcccaacct

SEQ ID NO: 33929 - DNA, 2030 bp, Zea Mays
cgtgctgaagcctcccaggaccctcgcggcacggtgggacatagcgacaggcgcctcacgctcctcccccctctcttccccctgccactgccaggcaagagagaagaaacgcacgcgagccgcgagcagaatacagcagcacgggcgccagcgccatcctgatctcgctatctcccttctcccccgatgcgatctcgccaaaccctaatcccgccgcccgccgcgcggccgtcgcaggagccctagccccgaatgtggcggtgacgcgcgcggcgtgtcaccaccaccaccaactcagcgagcgtgcgcgcccgccacgccacgccacgccaccgcccgtcgtgccggccgacaccgagcagccatgggcgccgccgacaagtggctgctcccgctcgtctccgtctccgtcgtctcgctcctgctcttcctctccgcgctctcgggcttctccgcctcctccgcgctcttcgcgcgcctcccgccgccctcctacgtgcgccggggcgccgccgcgccgccctccttcgcctacctgctcgcgggcggccgaggggacggcaggaagctcctgcggctgctcctcgccgtctaccaccccaggaaccgctacctgctccacctctccgccgacgcgccggattccgagcgcgccgagctcgccgcggccgccgcgcgcgccgctcccgccgcgcgcgccttcgggaacgttgatgtcgtgggcaggcccaccgcgggcaccccaatgggctcctccggccttgccgccacgctccgcgccgccgccgcgatgctccggctcgatgcggagtgggactggttcatcacgcttagcgccgccgactacccgcttctcacccaggacgacttgattcatgttttctcctctgttccaaggcacctcaactttatagatcacaccagtgacattggatggaaagaatctcagagagtgcaaccggttatagtagatgctggaatatacttggcagggaggaaccagttcttccaagccacagagaaacgtgacactcctgatggtttcaaatttttcacaggttctccatgggtcattttaaacagacactttgttgagtattgtgtttttggttgggagaatctccctaggacactcctcatgtacttcacaaatgtgatgctacctctagagggttatttccattcggttgcatgcaactcggacttccacaatttcacagtgaacaacgacttgcggcctgttcctggcgcatggtgcacaggcaaaaggaggtggttcagtgatccttgctcccagtggagcaacgtcaacattgtaagacccggtcctcaagctgagaagttccgaacatatataaaccagattatggaagaatcaaagtcaagcaacaactcttgcaagcaatagcggtagaatccgagcacgaggcttcacttcccgcagttgaagcgttgagcttgtctcattttgcgccgaggagctctccatgtctcgagcacttcctggcatctgcttcaggagcaagcatttttgcacctgttgtatgaactgaacacacggccaaggtgatagatggatttattctttccagaatttttttgggtgacatggcttcaagggcttagtgcacactagtgttgttggaagccaagaaagcctactgtgggaatacagaagctaatagtcattgtaattagtagcagcgagttgaatggcctgtgcctttgttcatagatctgatggaattgttggtgcttccatacaaaattgcgaaaatgaagagcgggggaatgttatcgattggttggtcacggtggtggttgttatggacatatggtcaatacaatgcatactgatcctcccccctggacacgcagttattctcataatctcatgtgtcctactggcctcttgatatgacattctgcatttttcatatcatctgtgcatataaactaacaagtctggtctcttgcagtgacgcagtgccccctaattgcaggacttagtcagataatgaactgtggat

SEQ ID NO: 33930 - DNA, 3027 bp, Zea Mays
ctcaaccccccttcctcttataaaaagatttggtttatgggtgagcattcccatatgtctgcagagcttgataatgttgtttctgcagttctggaaaattatgagagcccatatgcaaatgctgataatgatgccgctattgaggatagacgaattcagtgggtggatgaagtgctcaaagctgaaggtcatgaacctcctgctgttaccattttgacaagggttccttcatggaaagttattagaactgttcacgagaagaatcaacaagtccaaatttttggtcagggatttgtctacataaccttgctagaatatccagggaagcaacaacagtgcgacgagttctggaagttatatttcgttattttgataataacaatctgtggtcaccttctaaaggatttgcactgtgtgtcctactggatatgcagattgtcatggagaaatctggacagaatgctcatatattgttgtctatgttagtcaagcatcttgaacacaagaatgtattgaaacaaccagatatgaatctagatatcattgaagttacttcacgccttgctgggcactccaaagctcagtcttctacagcactaatggcttcaataagtgatatggtcaggcatatgggtaaaagcatgcaatccttggccagcgatgcaggtcctggagacaacatggtcaaatggaatagcagatatgggaaagctgtagatgaatgtcttgttcaattgtctagaaaggtcggtgatgctggacctatccttgatacattagctgtagtgctggaaaacatttcaagttctatgattgttgcacggtctactatctttgcagcatatcgtactgctcaaatagttgcatcattgccaaacttgtcacatcagagcaaagcatttcctgaggcattgtttcaccaactgcttttagcaatggtctatccggactgtgggacacatttaggagcacatcggattttctctgttgttcttgttccctctgctgtcgctccgtgctcattttcagacacttcacggacaaggaagattgatctccgaaggacattatctagaacaacatcagtgttttcatcttctgctgctttgtttgggaaacttaaaagagacatgctttcatttcgtgaaagtccgctccatgataatacaaagctactacccatcagtgaggatgcagatgagatcagcgcaaatgatgcaaaactattcaagtcacagactattcaaaggatggctagtacaaaagatatttctcttccctcttccacagatgcaagtactttgagtgaacaaactccaaatcaggaaaaggatgctgtcacccttatgctcagtgttcgtcaggcaaatcttcttctttcctcgttatggactcaggcactgtcacctgaaaatgttccacggaattatgaagcaatttctcatacttacagcttgatgctattgttttctagagccaagggctcaggtgccgacgttttggttggtagctttcagcttgctttttcattaagaagtgtttcgttacaagcaggttttcttccaccttcacgcaggcgctctctttttactttggcaacttcaatgcttgtgtttttctcgaaagctttcaacgttccagcgctcattccagttgtgaagcatgtgttgacagaaagtacagttgatccatttctttgtttaatagaagactgtagattgcaggctcttgatagtgctgctcagtcttgcaaactctatggttcaaaagaagatgacgatcaagctctgaaatcactctcgaacattgacatgaatgaacatcagtcaaaagaaacatcagtgtctcttatacttgatagcttggaagatctgtcagagtcagaattgtctactattagaaaacagctgattgaggaattttcagcagatgacatttgtctgggatctcattttactgaaacaccttcgaaatctgcagcacaaaatggaaaactgcaccacaaatctatggaggttattccattcggatttgtttttgaagatgatactctcgttgaagcatctgacagcttagtagaacctcacttgcgacatctgccatgtaacagcgttcttgatgttgaccggcttcttaattcggttttggaaacatctcagcatgttggaaggatgtcagtttcaacagaccaggatttgcctttcaaggaggtagccaaccaatgtgaagcacttctgattgggaagcagcaaaagctatctatctgcatgagtgttcgtgaaaaaaaggatggtgaatcatccatcgagaagtcatctcagcaggatcctcaagcatatacgtttctctgcacagctgatgaacaatggcacctcaattcctgtaagctgccagtgctgtgtccctatgaccggttccttgcaacgtctgggtgctaagatgatctcttctggtacgcggacctttataactatgaatgtgttcagtggactcctaaaaattggcggttccagctcatgcatgccaaaataggtgccctacaaactgatgtccgtcgggccaacccagatgagcccatgtgtgcgtgccagatggcatcatttccatcatatgtaaattgttccctcgtttgtaaaggctagttgagagctaaaatatcagagggggttggaggagttaaaatccatttcttattcaaaattgaataaggagattttagcccctttaacccctccggttttgtggctctcaaactaaccttaaatggttcgtctaccatgggaaatacatggttgattctggcatttttgaggccggagcgaaagttactattgaagccccttctatatccatgagtgtgtatatatgtctatatgtataatatatatacttttatatggaaacttataaacacataattattgatctcaaatagtttttcagtaaatttagttttaaaagttttttttggtaaatgaaacaattacagactcaataaataagatttaatatgcaatagagacatta

SEQ ID NO: 33931 - DNA, 3636 bp, Zea Mays
gggtttggtacaagtggagtggcccatatgttgtgcggaggagcactggtgaagcctaagaacccttatgtcgatgggcgtggtctcaagggaggtgttgtcagcatgcgagaggctctgcttcatttgcccgtcactgcggacgaggtcccgccatccggtcaagcgctacaagaaattgcttgcagaaatcttccctcggacacaggatgaagaaccaaatgatcgcaagatagggaaactgtgcgaatatatttcaaggaatcctatgcgtgttccaaagattacattttacttagagcaaaagtgctacaaggaattaagggctgagcgctatggttcagtgaaagttgttattgcaatctatcgaaaggccactttttgccaacagcttgctaacaattgtagagacattattggagcaaaatagacaggatgacttgcggaaattggcatgtcaaacactttttgactttataaataatcaggttgacagtacttacatgttcaatttagaaaaccagattcctaaactatgtcatctggcccaagagatgggtgaaaaggagaagatatgcattcttcatgcagctgggctacaagctctttcatctatgatttggtttatgggtgagcattcccatatgtctgcagagcttgataatgttgtttctgcagttctggaaaattatgagagcccatatgcaaatgctgataatgatgccgctattgaggatagacgaattcagtgggtggatgaagtgctcaaagctgaaggtcatgaacctcctgctgttaccattttgacaagggttccttcatggaaagttattagaactgttcacggtgaattaagtttgacaatagaagaatcaacaagtccaaatttttggtcagggatttgtctacataaccttgctagaatatccagggaagcaacaacagtgcgacgagttctggaagttatatttcgttattttgataataacaatctgtggtcaccttctaaaggatttgcactgtgtgtcctactggatatgcagattgtcatggagaaatctggacagaatgctcatatattgttgtctatgttagtcaagcatcttgaacacaagaatgtattgaaacaaccagatatgaatctagatatcattgaagttacttcacgccttgctgggcactccaaagctcagtcttctacagcactaatggcttcaataagtgatatggtcaggcatatgggtaaaagcatgcaatccttggccagcgatgcaggtcctggagacaacatggtcaaatggaatagcagatatgggaaagctgtagatgaatgtcttgttcaattgtctagaaaggtcggtgatgctggacctatccttgatacattagctgtagtgctggaaaacatttcaagttctatgattgttgcacggtctactatctttgcagcatatcgtactgctcaaatagttgcatcattgccaaacttgtcacatcagagcaaagcatttcctgaggcattgtttcaccaactgcttttagcaatggtctatccggactgtgggacacatttaggagcacatcggattttctctgttgttcttgttccctctgctgtcgctccgtgctcattttcagacacttcacggacaaggaagattgatctccgaaggacattatctagaacaacatcagtgttttcatcttctgctgctttgtttgggaaacttaaaagagacatgctttcatttcgtgaaagtccgctccatgataatacaaagctactacccatcagtgaggatgcagatgagatcagcgcaaatgatgcaaaactattcaagtcacagactattcaaaggatggctagtacaaaagatatttctcttccctcttccacagatgcaagtactttgagtgaacaaactccaaatcaggaaaaggatgctgtcacccttatgctcagtgttcgtcaggcaaatcttcttctttcctcgttatggactcaggcactgtcacctgaaaatgttccacggaattatgaagcaatttctcatacttacagcttgatgctattgttttctagagccaagggctcaggtgccgacgttttggttggtagctttcagcttgctttttcattaagaagtgtttcgttacaagcaggttttcttccaccttcacgcaggcgctctctttttactttggcaacttcaatgcttgtgtttttctcgaaagctttcaacgttccagcgctcattccagttgtgaagcatgtgttgacagaaagtacagttgatccatttctttgtttaatagaagactgtagattgcaggctcttgatagtgctgctcagtcttgcaaactctatggttcaaaagaagatgacgatcaagctctgaaatcactctcgaacattgacatgaatgaacatcagtcaaaagaaacatcagtgtctcttatacttgatagcttggaagatctgtcagagtcagaattgtctactattagaaaacagctgattgaggaattttcagcagatgacatttgtctgggatctcattttactgaaacaccttcgaaatctgcagcacaaaatggaaaactgcaccacaaatctatggaggttattccattcggatttgtttttgaagatgatactctcgttgaagcatctgacagcttagtagaacctcacttgcgacatctgccatgtaacagcgttcttgatgttgaccggcttcttaattcggttttggaaacatctcagcatgttggaaggatgtcagtttcaacagaccaggatttgcctttcaaggaggtagccaaccaatgtgaagcacttctgattgggaagcagcaaaagctatctatctgcatgagtgttcgtgaaaaaaaggatggtgaatcatccatcgagaagtcatctcagcaggatcctcaagcatatacgtttctctgcacagctgatgaacaatggcacctcaattcctgtaagctgccagtgctgtgtccctatgaccggttccttgcaacgtctgggtgctaagatgatctcttctggtacgcggacctttataactatgaatgtgttcagtggactcctaaaaattggcggttccagctcatgcatgccaaaataggtgccctacaaactgatgtccgtcgggccaacccagatgagcccatgtgtgcgtgccagatggcatcatttccatcatatgtaaattgttccctcgtttgtaaaggctagttgagagctaaaatatcagagggggttggaggagttaaaatccatttcttattcaaaattgaataaggagattttagcccctttaacccctccggttttgtggctctcaaactaaccttaaatggttcgtctaccatgggaaatacatggttgattctggcatttttgaggccggagcgaaagttactattgaagccccttctatatccatgagtgtgtatatatgtctatatgtataatatatatacttttatatggaaacttataaacacataattattgatctcaaatagtttttcagtaaatttagttttaaaagttttttttggtaaatgaaacaattacagactcaataaataagatttaatatgcaatagagacatta

SEQ ID NO: 33932 - DNA, 3657 bp, Zea Mays
gggtttggtacaagtggagtggcccatatgttgtgcggaggagcactggtgaagcctaagaacccttatgtcgatgggcgtggtctcaagggaggtgttgtcagcatgcgagaggctctgcttcatttgcccgtcactgcggacgaggtcccgccatccggtcaagcgctacaagaaattgcttgcagaaatcttccctcggacacaggatgaagaaccaaatgatcgcaagatagggaaactgtgcgaatatatttcaaggaatcctatgcgtgttccaaagattacattttacttagagcaaaagtgctacaaggaattaagggctgagcgctatggttcagtgaaagttgttattgcaatctatcgaaaggtgatatgttcttgtcaggagcaattgccactttttgccaacagcttgctaacaattgtagagacattattggagcaaaatagacaggatgacttgcggaaattggcatgtcaaacactttttgactttataaataatcaggttgacagtacttacatgttcaatttagaaaaccagattcctaaactatgtcatctggcccaagagatgggtgaaaaggagaagatatgcattcttcatgcagctgggctacaagctctttcatctatgatttggtttatgggtgagcattcccatatgtctgcagagcttgataatgttgtttctgcagttctggaaaattatgagagcccatatgcaaatgctgataatgatgccgctattgaggatagacgaattcagtgggtggatgaagtgctcaaagctgaaggtcatgaacctcctgctgttaccattttgacaagggttccttcatggaaagttattagaactgttcacggtgaattaagtttgacaatagaagaatcaacaagtccaaatttttggtcagggatttgtctacataaccttgctagaatatccagggaagcaacaacagtgcgacgagttctggaagttatatttcgttattttgataataacaatctgtggtcaccttctaaaggatttgcactgtgtgtcctactggatatgcagattgtcatggagaaatctgaatgctcatatattgttgtctatgttagtcaagcatcttgaacacaagaatgtattgaaacaaccagatatgaatctagatatcattgaagttacttcacgccttgctgggcactccaaagctcagtcttctacagcactaatggcttcaataagtgatatggtcaggcatatgggtaaaagcatgcaatccttggccagcgatgcaggtcctggagacaacatggtcaaatggaatagcagatatgggaaagctgtagatgaatgtcttgttcaattgtctagaaaggtcggtgatgctggacctatccttgatacattagctgtagtgctggaaaacatttcaagttctatgattgttgcacggtctactatctttgcagcatatcgtactgctcaaatagttgcatcattgccaaacttgtcacatcagagcaaagcatttcctgaggcattgtttcaccaactgcttttagcaatggtctatccggactgtgggacacatttaggagcacatcggattttctctgttgttcttgttccctctgctgtcgctccgtgctcattttcagacacttcacggacaaggaagattgatctccgaaggacattatctagaacaacatcagtgttttcatcttctgctgctttgtttgggaaacttaaaagagacatgctttcatttcgtgaaagtccgctccatgataatacaaagctactacccatcagtgaggatgcagatgagatcagcgcaaatgatgcaaaactattcaagtcacagactattcaaaggatggctagtacaaaagatatttctcttccctcttccacagatgcaagtactttgagtgaacaaactccaaatcaggaaaaggatgctgtcacccttatgctcagtgttcgtcaggcaaatcttcttctttcctcgttatggactcaggcactgtcacctgaaaatgttccacggaattatgaagcaatttctcatacttacagcttgatgctattgttttctagagccaagggctcaggtgccgacgttttggttggtagctttcagcttgctttttcattaagaagtgtttcgttacaagcaggttttcttccaccttcacgcaggcgctctctttttactttggcaacttcaatgcttgtgtttttctcgaaagctttcaacgttccagcgctcattccagttgtgaagcatgtgttgacagaaagtacagttgatccatttctttgtttaatagaagactgtagattgcaggctcttgatagtgctgctcagtcttgcaaactctatggttcaaaagaagatgacgatcaagctctgaaatcactctcgaacattgacatgaatgaacatcagtcaaaagaaacatcagtgtctcttatacttgatagcttggaagatctgtcagagtcagaattgtctactattagaaaacagctgattgaggaattttcagcagatgacatttgtctgggatctcattttactgaaacaccttcgaaatctgcagcacaaaatggaaaactgcaccacaaatctatggaggttattccattcggatttgtttttgaagatgatactctcgttgaagcatctgacagcttagtagaacctcacttgcgacatctgccatgtaacagcgttcttgatgttgaccggcttcttaattcggttttggaaacatctcagcatgttggaaggatgtcagtttcaacagaccaggatttgcctttcaaggaggtagccaaccaatgtgaagcacttctgattgggaagcagcaaaagctatctatctgcatgagtgttcgtgaaaaaaaggatggtgaatcatccatcgagaagtcatctcagcaggatcctcaagcatatacgtttctctgcacagctgatgaacaatggcacctcaattcctgtaagctgccagtgctgtgtccctatgaccggttccttgcaacgtctgggtgctaagatgatctcttctggtacgcggacctttataactatgaatgtgttcagtggactcctaaaaattggcggttccagctcatgcatgccaaaataggtgccctacaaactgatgtccgtcgggccaacccagatgagcccatgtgtgcgtgccagatggcatcatttccatcatatgtaaattgttccctcgtttgtaaaggctagttgagagctaaaatatcagagggggttggaggagttaaaatccatttcttattcaaaattgaataaggagattttagcccctttaacccctccggttttgtggctctcaaactaaccttaaatggttcgtctaccatgggaaatacatggttgattctggcatttttgaggccggagcgaaagttactattgaagccccttctatatccatgagtgtgtatatatgtctatatgtataatatatatacttttatatggaaacttataaacacataattattgatctcaaatagtttttcagtaaatttagttttaaaagttttttttggtaaatgaaacaattacagactcaataaataagatttaatatgcaatagagacatta

SEQ ID NO: 33933 - DNA, 3716 bp, Zea Mays
cgccaccgccgtggtgctccccttgcgacgcctaagctacttcttttgcagtcagggtttggtacaagtggagtggcccatatgttgtgcggaggagcactggtgaagcctaagaacccttatgtcgatgggcgtggtctcaagggaggtgttgtcagcatgcgagaggctctgcttcatttgcccgtcactgcggacgaggtcccgccatccggtcaagcgctacaagaaattgcttgcagaaatcttccctcggacacaggatgaagaaccaaatgatcgcaagatagggaaactgtgcgaatatatttcaaggaatcctatgcgtgttccaaagattacattttacttagagcaaaagtgctacaaggaattaagggctgagcgctatggttcagtgaaagttgttattgcaatctatcgaaaggtgatatgttcttgtcaggagcaattgccactttttgccaacagcttgctaacaattgtagagacattattggagcaaaatagacaggatgacttgcggaaattggcatgtcaaacactttttgactttataaataatcaggttgacagtacttacatgttcaatttagaaaaccagattcctaaactatgtcatctggcccaagagatgggtgaaaaggagaagatatgcattcttcatgcagctgggctacaagctctttcatctatgatttggtttatgggtgagcattcccatatgtctgcagagcttgataatgttgtttctgcagttctggaaaattatgagagcccatatgcaaatgctgataatgatgccgctattgaggatagacgaattcagtgggtggatgaagtgctcaaagctgaaggtcatgaacctcctgctgttaccattttgacaagggttccttcatggaaagttattagaactgttcacggtgaattaagtttgacaatagaagaatcaacaagtccaaatttttggtcagggatttgtctacataaccttgctagaatatccagggaagcaacaacagtgcgacgagttctggaagttatatttcgttattttgataataacaatctgtggtcaccttctaaaggatttgcactgtgtgtcctactggatatgcagattgtcatggagaaatctggacagaatgctcatatattgttgtctatgttagtcaagcatcttgaacacaagaatgtattgaaacaaccagatatgaatctagatatcattgaagttacttcacgccttgctgggcactccaaagctcagtcttctacagcactaatggcttcaataagtgatatggtcaggcatatgggtaaaagcatgcaatccttggccagcgatgcaggtcctggagacaacatggtcaaatggaatagcagatatgggaaagctgtagatgaatgtcttgttcaattgtctagaaaggtcggtgatgctggacctatccttgatacattagctgtagtgctggaaaacatttcaagttctatgattgttgcacggtctactatctttgcagcatatcgtactgctcaaatagttgcatcattgccaaacttgtcacatcagagcaaagcatttcctgaggcattgtttcaccaactgcttttagcaatggtctatccggactgtgggacacatttaggagcacatcggattttctctgttgttcttgttccctctgctgtcgctccgtgctcattttcagacacttcacggacaaggaagattgatctccgaaggacattatctagaacaacatcagtgttttcatcttctgctgctttgtttgggaaacttaaaagagacatgctttcatttcgtgaaagtccgctccatgataatacaaagctactacccatcagtgaggatgcagatgagatcagcgcaaatgatgcaaaactattcaagtcacagactattcaaaggatggctagtacaaaagatatttctcttccctcttccacagatgcaagtactttgagtgaacaaactccaaatcaggaaaaggatgctgtcacccttatgctcagtgttcgtcaggcaaatcttcttctttcctcgttatggactcaggcactgtcacctgaaaatgttccacggaattatgaagcaatttctcatacttacagcttgatgctattgttttctagagccaagggctcaggtgccgacgttttggttggtagctttcagcttgctttttcattaagaagtgtttcgttacaagcaggttttcttccaccttcacgcaggcgctctctttttactttggcaacttcaatgcttgtgtttttctcgaaagctttcaacgttccagcgctcattccagttgtgaagcatgtgttgacagaaagtacagttgatccatttctttgtttaatagaagactgtagattgcaggctcttgatagtgctgctcagtcttgcaaactctatggttcaaaagaagatgacgatcaagctctgaaatcactctcgaacattgacatgaatgaacatcagtcaaaagaaacatcagtgtctcttatacttgatagcttggaagatctgtcagagtcagaattgtctactattagaaaacagctgattgaggaattttcagcagatgacatttgtctgggatctcattttactgaaacaccttcgaaatctgcagcacaaaatggaaaactgcaccacaaatctatggaggttattccattcggatttgtttttgaagatgatactctcgttgaagcatctgacagcttagtagaacctcacttgcgacatctgccatgtaacagcgttcttgatgttgaccggcttcttaattcggttttggaaacatctcagcatgttggaaggatgtcagtttcaacagaccaggatttgcctttcaaggaggtagccaaccaatgtgaagcacttctgattgggaagcagcaaaagctatctatctgcatgagtgttcgtgaaaaaaaggatggtgaatcatccatcgagaagtcatctcagcaggatcctcaagcatatacgtttctctgcacagctgatgaacaatggcacctcaattcctgtaagctgccagtgctgtgtccctatgaccggttccttgcaacgtctgggtgctaagatgatctcttctggtacgcggacctttataactatgaatgtgttcagtggactcctaaaaattggcggttccagctcatgcatgccaaaataggtgccctacaaactgatgtccgtcgggccaacccagatgagcccatgtgtgcgtgccagatggcatcatttccatcatatgtaaattgttccctcgtttgtaaaggctagttgagagctaaaatatcagagggggttggaggagttaaaatccatttcttattcaaaattgaataaggagattttagcccctttaacccctccggttttgtggctctcaaactaaccttaaatggttcgtctaccatgggaaatacatggttgattctggcatttttgaggccggagcgaaagttactattgaagccccttctatatccatgagtgtgtatatatgtctatatgtataatatatatacttttatatggaaacttataaacacataattattgatctcaaatagtttttcagtaaatttagttttaaaagttttttttggtaaatgaaacaattacagactcaataaataagatttaatatgcaatagagacatta

SEQ ID NO: 33934 - DNA, 3695 bp, Zea Mays
ctggcgtcacggtgagggaatgccacaacgtggcggacgccaccgccgtggtgctccccttgcgacgcctaagctacttcttttgcagggtttggtacaagtggagtggcccatatgttgtgcggaggagcactggtgaagcctaagaacccttatgtcgatgggcgtggtctcaagggaggtgttgtcagcatgcgagaggctctgcttcatttgcccgtcactgcggacgaggtcccgccatccggtcaagcgctacaagaaattgcttgcagaaatcttccctcggacacaggatgaagaaccaaatgatcgcaagatagggaaactgtgcgaatatatttcaaggaatcctatgcgtgttccaaagattacattttacttagagcaaaagtgctacaaggaattaagggctgagcgctatggttcagtgaaagttgttattgcaatctatcgaaaggtgatatgttcttgtcaggagcaattgccactttttgccaacagcttgctaacaattgtagagacattattggagcaaaatagacaggatgacttgcggaaattggcatgtcaaacactttttgactttataaataatcaggttgacagtacttacatgttcaatttagaaaaccagattcctaaactatgtcatctggcccaagagatgggtgaaaaggagaagatatgcattcttcatgcagctgggctacaagctctttcatctatgatttggtttatgggtgagcattcccatatgtctgcagagcttgataatgttgtttctgcagttctggaaaattatgagagcccatatgcaaatgctgataatgatgccgctattgaggatagacgaattcagtgggtggatgaagtgctcaaagctgaaggtcatgaacctcctgctgttaccattttgacaagggttccttcatggaaagttattagaactgttcacggtgaattaagtttgacaatagaagaatcaacaagtccaaatttttggtcagggatttgtctacataaccttgctagaatatccagggaagcaacaacagtgcgacgagttctggaagttatatttcgttattttgataataacaatctgtggtcaccttctaaaggatttgcactgtgtgtcctactggatatgcagattgtcatggagaaatctgaatgctcatatattgttgtctatgttagtcaagcatcttgaacacaagaatgtattgaaacaaccagatatgaatctagatatcattgaagttacttcacgccttgctgggcactccaaagctcagtcttctacagcactaatggcttcaataagtgatatggtcaggcatatgggtaaaagcatgcaatccttggccagcgatgcaggtcctggagacaacatggtcaaatggaatagcagatatgggaaagctgtagatgaatgtcttgttcaattgtctagaaaggtcggtgatgctggacctatccttgatacattagctgtagtgctggaaaacatttcaagttctatgattgttgcacggtctactatctttgcagcatatcgtactgctcaaatagttgcatcattgccaaacttgtcacatcagagcaaagcatttcctgaggcattgtttcaccaactgcttttagcaatggtctatccggactgtgggacacatttaggagcacatcggattttctctgttgttcttgttccctctgctgtcgctccgtgctcattttcagacacttcacggacaaggaagattgatctccgaaggacattatctagaacaacatcagtgttttcatcttctgctgctttgtttgggaaacttaaaagagacatgctttcatttcgtgaaagtccgctccatgataatacaaagctactacccatcagtgaggatgcagatgagatcagcgcaaatgatgcaaaactattcaagtcacagactattcaaaggatggctagtacaaaagatatttctcttccctcttccacagatgcaagtactttgagtgaacaaactccaaatcaggaaaaggatgctgtcacccttatgctcagtgttcgtcaggcaaatcttcttctttcctcgttatggactcaggcactgtcacctgaaaatgttccacggaattatgaagcaatttctcatacttacagcttgatgctattgttttctagagccaagggctcaggtgccgacgttttggttggtagctttcagcttgctttttcattaagaagtgtttcgttacaagcaggttttcttccaccttcacgcaggcgctctctttttactttggcaacttcaatgcttgtgtttttctcgaaagctttcaacgttccagcgctcattccagttgtgaagcatgtgttgacagaaagtacagttgatccatttctttgtttaatagaagactgtagattgcaggctcttgatagtgctgctcagtcttgcaaactctatggttcaaaagaagatgacgatcaagctctgaaatcactctcgaacattgacatgaatgaacatcagtcaaaagaaacatcagtgtctcttatacttgatagcttggaagatctgtcagagatgacatttgtctgggatctcattttactgaaacaccttcgaaatctgcagcacaaaatggaaaactgcaccacaaatctatggaggttattccattcggatttgtttttgaagatgatactctcgttgaagcatctgacagcttagtagaacctcacttgcgacatctgccatgtaacagcgttcttgatgttgaccggcttcttaattcggttttggaaacatctcagcatgttggaaggatgtcagtttcaacagaccaggatttgcctttcaaggaggtagccaaccaatgtgaagcacttctgattgggaagcagcaaaagctatctatctgcatgagtgttcgtgaaaaaaaggatggtgaatcatccatcgagaagtcatctcagcaggatcctcaagcatatacgtttctctgcacagctgatgaacaatggcacctcaattcctgtaagctgccagtgctgtgtccctatgaccggttccttgcaacgtctgggtgctaagatgatctcttctggtacgcggacctttataactatgaatgtgttcagtggactcctaaaaattggcggttccagctcatgcatgccaaaataggtgccctacaaactgatgtccgtcgggccaacccagatgagcccatgtgtgcgtgccagatggcatcatttccatcatatgtaaattgttccctcgtttgtaaaggctagttgagagctaaaatatcagagggggttggaggagttaaaatccatttcttattcaaaattgaataaggagattttagcccctttaacccctccggttttgtggctctcaaactaaccttaaatggttcgtctaccatgggaaatacatggttgattctggcatttttgaggccggagcgaaagttactattgaagccccttctatatccatgagtgtgtatatatgtctatatgtataatatatatacttttatatggaaacttataaacacataattattgatctcaaatagtttttcagtaaatttagttttaaaagttttttttggtaaatgaaacaattacagactcaataaataagatttaatatgcaatagagacatta

SEQ ID NO: 33935 - DNA, 4020 bp, Zea Mays
ccgccgccccgtaacccgcgcggccgaccccagctccgcctcctccgctcgtccgctcatccgccgtcttccgttcctccactgcatggcctccaccctccgcccgagcacctcggctcctccatcctgcggccccacgcctcggctgctccgctcgtccagccttcggccccgcgctcaccgcggccgccgtatctcccgtcatctggccatccacaacggtgatgtggagcacgtggtatgtcgtgaagggctaaaggcagtttcatctctggcgtcacggtgagggaatgccacaacgtggcggacgccaccgccgtggtgctccccttgcgacgcctaagctacttcttttgcagggtttggtacaagtggagtggcccatatgttgtgcggaggagcactggtgaagcctaagaacccttatgtcgatgggcgtggtctcaagggaggtgttgtcagcatgcgagaggctctgcttcatttgcccgtcactgcggacgaggtcccgccatccggtcaagcgctacaagaaattgcttgcagaaatcttccctcggacacaggatgaagaaccaaatgatcgcaagatagggaaactgtgcgaatatatttcaaggaatcctatgcgtgttccaaagattacattttacttagagcaaaagtgctacaaggaattaagggctgagcgctatggttcagtgaaagttgttattgcaatctatcgaaaggtgatatgttcttgtcaggagcaattgccactttttgccaacagcttgctaacaattgtagagacattattggagcaaaatagacaggatgacttgcggaaattggcatgtcaaacactttttgactttataaataatcaggttgacagtacttacatgttcaatttagaaaaccagattcctaaactatgtcatctggcccaagagatgggtgaaaaggagaagatatgcattcttcatgcagctgggctacaagctctttcatctatgatttggtttatgggtgagcattcccatatgtctgcagagcttgataatgttgtttctgcagttctggaaaattatgagagcccatatgcaaatgctgataatgatgccgctattgaggatagacgaattcagtgggtggatgaagtgctcaaagctgaaggtcatgaacctcctgctgttaccattttgacaagggttccttcatggaaagttattagaactgttcacggtgaattaagtttgacaatagaagaatcaacaagtccaaatttttggtcagggatttgtctacataaccttgctagaatatccagggaagcaacaacagtgcgacgagttctggaagttatatttcgttattttgataataacaatctgtggtcaccttctaaaggatttgcactgtgtgtcctactggatatgcagattgtcatggagaaatctggacagaatgctcatatattgttgtctatgttagtcaagcatcttgaacacaagaatgtattgaaacaaccagatatgaatctagatatcattgaagttacttcacgccttgctgggcactccaaagctcagtcttctacagcactaatggcttcaataagtgatatggtcaggcatatgggtaaaagcatgcaatccttggccagcgatgcaggtcctggagacaacatggtcaaatggaatagcagatatgggaaagctgtagatgaatgtcttgttcaattgtctagaaaggtcggtgatgctggacctatccttgatacattagctgtagtgctggaaaacatttcaagttctatgattgttgcacggtctactatctttgcagcatatcgtactgctcaaatagttgcatcattgccaaacttgtcacatcagagcaaagcatttcctgaggcattgtttcaccaactgcttttagcaatggtctatccggactgtgggacacatttaggagcacatcggattttctctgttgttcttgttccctctgctgtcgctccgtgctcattttcagacacttcacggacaaggaagattgatctccgaaggacattatctagaacaacatcagtgttttcatcttctgctgctttgtttgggaaacttaaaagagacatgctttcatttcgtgaaagtccgctccatgataatacaaagctactacccatcagtgaggatgcagatgagatcagcgcaaatgatgcaaaactattcaagtcacagactattcaaaggatggctagtacaaaagatatttctcttccctcttccacagatgcaagtactttgagtgaacaaactccaaatcaggaaaaggatgctgtcacccttatgctcagtgttcgtcaggcaaatcttcttctttcctcgttatggactcaggcactgtcacctgaaaatgttccacggaattatgaagcaatttctcatacttacagcttgatgctattgttttctagagccaagggctcaggtgccgacgttttggttggtagctttcagcttgctttttcattaagaagtgtttcgttacaagcaggttttcttccaccttcacgcaggcgctctctttttactttggcaacttcaatgcttgtgtttttctcgaaagctttcaacgttccagcgctcattccagttgtgaagcatgtgttgacagaaagtacagttgatccatttctttgtttaatagaagactgtagattgcaggctcttgatagtgctgctcagtcttgcaaactctatggttcaaaagaagatgacgatcaagctctgaaatcactctcgaacattgacatgaatgaacatcagtcaaaagaaacatcagtgtctcttatacttgatagcttggaagatctgtcagagtcagaattgtctactattagaaaacagctgattgaggaattttcagcagatgacatttgtctgggatctcattttactgaaacaccttcgaaatctgcagcacaaaatggaaaactgcaccacaaatctatggaggttattccattcggatttgtttttgaagatgatactctcgttgaagcatctgacagcttagtagaacctcacttgcgacatctgccatgtaacagcgttcttgatgttgaccggcttcttaattcggttttggaaacatctcagcatgttggaaggatgtcagtttcaacagaccaggatttgcctttcaaggaggtagccaaccaatgtgaagcacttctgattgggaagcagcaaaagctatctatctgcatgagtgttcgtgaaaaaaaggatggtgaatcatccatcgagaagtcatctcagcaggatcctcaagcatatacgtttctctgcacagctgatgaacaatggcacctcaattcctgtaagctgccagtgctgtgtccctatgaccggttccttgcaacgtctgggtgctaagatgatctcttctggtacgcggacctttataactatgaatgtgttcagtggactcctaaaaattggcggttccagctcatgcatgccaaaataggtgccctacaaactgatgtccgtcgggccaacccagatgagcccatgtgtgcgtgccagatggcatcatttccatcatatgtaaattgttccctcgtttgtaaaggctagttgagagctaaaatatcagagggggttggaggagttaaaatccatttcttattcaaaattgaataaggagattttagcccctttaacccctccggttttgtggctctcaaactaaccttaaatggttcgtctaccatgggaaatacatggttgattctggcatttttgaggccggagcgaaagttactattgaagccccttctatatccatgagtgtgtatatatgtctatatgtataatatatatacttttatatggaaacttataaacacataattattgatctcaaatagtttttcagtaaatttagttttaaaagttttttttggtaaatgaaacaattacagactcaataaataagatttaatatgcaatagagacatta

SEQ ID NO: 33936 - DNA, 2308 bp, Zea Mays
gggtttggtacaagtggagtggcccatatgttgtgcggaggagcactggtgaagcctaagaacccttatgtcgatgggcgtggtctcaagggaggtgttgtcagcatgcgagaggctctgcttcatttgcccgtcactgcggacgaggtcccgccatccggtcaagcgctacaagaaattgcttgcagaaatcttccctcggacacaggatgaagaaccaaatgatcgcaagatagggaaactgtgcgaatatatttcaaggaatcctatgcgtgttccaaagattacattttacttagagcaaaagtgctacaaggaattaagggctgagcgctatggttcagtgaaagttgttattgcaatctatcgaaaggtgatatgttcttgtcaggagcaattgccactttttgccaacagcttgctaacaattgtagagacattattggagcaaaatagacaggatgacttgcggaaattggcatgtcaaacactttttgactttataaataatcaggttgacagtacttacatgttcaatttagaaaaccagattcctaaactatgtcatctggcccaagagatgggtgaaaaggagaagatatgcattcttcatgcagctgggctacaagctctttcatctatgatttggtttatgggtgagcattcccatatgtctgcagagcttgataatgttgtttctgcagttctggaaaattatgagagcccatatgcaaatgctgataatgatgccgctattgaggatagacgaattcagtgggtggatgaagtgctcaaagctgaaggtcatgaacctcctgctgttaccattttgacaagggttccttcatggaaagttattagaactgttcacggtgaattaagtttgacaatagaagaatcaacaagtccaaatttttggtcagggatttgtctacataaccttgctagaatatccagggaagcaacaacagtgcgacgagttctggaagttatatttcgttattttgataataacaatctgtggtcaccttctaaaggatttgcactgtgtgtcctactggatatgcagattgtcatggagaaatctggacagaatgctcatatattgttgtctatgttagtcaagcatcttgaacacaagaatgtattgaaacaaccagatatgaatctagatatcattgaagttacttcacgccttgctgggcactccaaagctcagtcttctacagcactaatggcttcaataagtgatatggtcaggcatatgggtaaaagcatgcaatccttggccagcgatgcaggtcctggagacaacatggtcaaatggaatagcagatatgggaaagctgtagatgaatgtcttgttcaattgtctagaaaggtcggtgatgctggacctatccttgatacattagctgtagtgctggaaaacatttcaagttctatgattgttgcacggtctactatctttgcagcatatcgtactgctcaaatagttgcatcattgccaaacttgtcacatcagagcaaagcatttcctgaggcattgtttcaccaactgcttttagcaatggtctatccggactgtgggacacatttaggagcacatcggattttctctgttgttcttgttccctctgctgtcgctccgtgctcattttcagacacttcacggacaaggaagattgatctccgaaggacattatctagaacaacatcagtgttttcatcttctgctgctttgtttgggaaacttaaaagagacatgctttcatttcgtgaaagtccgctccatgataatacaaagctactacccatcagtgaggatgcagatgagatcagcgcaaatgatgcaaaactattcaagtcacagactattcaaaggatggctagtacaaaagatatttctcttccctcttccacagatgcaagtactttgagtgaacaaactccaaatcaggaaaaggatgctgtcacccttatgctcagtgttcgtcaggcaaatcttcttctttcctcgttatggactcaggcactgtcacctgaaaatgttccacggaattatgaagcaatttctcatacttacagcttgatgctattgttttctagagccaaggtgccgacgttttggttggtagctttcagcttgctttttcattaagaagtgtttcgttacaagcaggttttcttccaccttcacgcaggcgctctctttttactttggcaacttcaatgcttgtgtttttctcgaaagctttcaacgttccagcgctcattccagttgtgaagcatgtgttgacagaaagta

SEQ ID NO: 33937 - DNA, 2565 bp, Zea Mays
atggcctccaccctccgcccgagcacctcggctcctccatcctgcggccccacgcctcggctgctccgctcgtccagccttcggccccgcgctcaccgcggccgccgtatctcccgtcatctggccatccacaacggtgatgtggagcacgtggtatgtcgtgaagggctaaaggcagtttcatctctggcgtcacggtgagggaatgccacaacgtggcggacgccaccgccgtggtgctccccttgcgacgcctaagctacttcttttgcaggaaataatccggttgaagatttcaagatgatgcagacctggacactatcattgcaagcaagaattggtttggtacaagtggagtggcccatatgttgtgcggaggagcactggtgaagcctaagaacccttatgtcgatgggcgtggtctcaagggaggtgttgtcagcatgcgagaggctctgcttcatttgcccgtcactgcggacgaggtcccgccatccggtcaagcgctacaagaaattgcttgcagaaatcttccctcggacacaggatgaagaaccaaatgatcgcaagatagggaaactgtgcgaatatatttcaaggaatcctatgcgtgttccaaagattacattttacttagagcaaaagtgctacaaggaattaagggctgagcgctatggttcagtgaaagttgttattgcaatctatcgaaaggtgatatgttcttgtcaggagcaattgccactttttgccaacagcttgctaacaattgtagagacattattggagcaaaatagacaggatgacttgcggaaattggcatgtcaaacactttttgactttataaataatcaggttgacagtacttacatgttcaatttagaaaaccagattcctaaactatgtcatctggcccaagagatgggtgaaaaggagaagatatgcattcttcatgcagctgggctacaagctctttcatctatgatttggtttatgggtgagcattcccatatgtctgcagagcttgataatgttgtttctgcagttctggaaaattatgagagcccatatgcaaatgctgataatgatgccgctattgaggatagacgaattcagtgggtggatgaagtgctcaaagctgaagagaagaatcaacaagtccaaatttttggtcagggatttgtctacataaccttgctagaatatccagggaagcaacaacagtgcgacgagttctggaagttatatttcgttattttgataataacaatctgtggtcaccttctaaaggatttgcactgtgtgtcctactggatatgcagattgtcatggagaaatctggacagaatgctcatatattgttgtctatgttagtcaagcatcttgaacacaagaatgtattgaaacaaccagatatgaatctagatatcattgaagttacttcacgccttgctgggcactccaaagctcagtcttctacagcactaatggcttcaataagtgatatggtcaggcatatgggtaaaagcatgcaatccttggccagcgatgcaggtcctggagacaacatggtcaaatggaatagcagatatgggaaagctgtagatgaatgtcttgttcaattgtctagaaaggtcggtgatgctggacctatccttgatacattagctgtagtgctggaaaacatttcaagttctatgattgttgcacggtctactatctttgcagcatatcgtactgctcaaatagttgcatcattgccaaacttgtcacatcagagcaaagcatttcctgaggcattgtttcaccaactgcttttagcaatggtctatccggactgtgggacacatttaggagcacatcggattttctctgttgttcttgttccctctgctgtcgctccgtgctcattttcagacacttcacggacaaggaagattgatctccgaaggacattatctagaacaacatcagtgttttcatcttctgctgctttgtttgggaaacttaaaagagacatgctttcatttcgtgaaagtccgctccatgataatacaaagctactacccatcagtgaggatgcagatgagatcagcgcaaatgatgcaaaactattcaagtcacagactattcaaaggatggctagtacaaaagatatttctcttccctcttccacagatgcaagtactttgagtgaacaaactccaaatcaggaaaaggatgctgtcacccttatgctcagtgttcgtcaggcaaatcttcttctttcctcgttatggactcaggcactgtcacctgaaaatgttccacggaattatgaagcaatttctcatacttacagcttgatgctattgttttctagagccaagggctcaggtgccgacgttttggttggtagctttcagcttgctttttcattaagaagtgtttcgttacaagcaggttttcttccaccttcacgcaggcgctctctttttactttggcaacttcaatgcttgtgtttttctcgaaagctttcaacgttccagcgctcattccagttgtgaagcatgtgttgacagaaagta

SEQ ID NO: 33938 - DNA, 2632 bp, Zea Mays
ccgaccccagctccgcctcctccgctcgtccgctcatccgccgtcttccgttcctccactgcatggcctccaccctccgcccgagcacctcggctcctccatcctgcggccccacgcctcggctgctccgctcgtccagccttcggccccgcgctcaccgcggccgccgtatctcccgtcatctggccatccacaacggtgatgtggagcacgtggtatgtcgtgaagggctaaaggcagtttcatctctggcgtcacggtgagggaatgccacaacgtggcggacgccaccgccgtggtgctccccttgcgacgcctaagctacttcttttgcagggtttggtacaagtggagtggcccatatgttgtgcggaggagcactggtgaagcctaagaacccttatgtcgatgggcgtggtctcaagggaggtgttgtcagcatgcgagaggctctgcttcatttgcccgtcactgcggacgaggtcccgccatccggtcaagcgctacaagaaattgcttgcagaaatcttccctcggacacaggatgaagaaccaaatgatcgcaagatagggaaactgtgcgaatatatttcaaggaatcctatgcgtgttccaaagattacattttacttagagcaaaagtgctacaaggaattaagggctgagcgctatggttcagtgaaagttgttattgcaatctatcgaaaggtgatatgttcttgtcaggagcaattgccactttttgccaacagcttgctaacaattgtagagacattattggagcaaaatagacaggatgacttgcggaaattggcatgtcaaacactttttgactttataaataatcaggttgacagtacttacatgttcaatttagaaaaccagattcctaaactatgtcatctggcccaagagatgggtgaaaaggagaagatatgcattcttcatgcagctgggctacaagctctttcatctatgatttggtttatgggtgagcattcccatatgtctgcagagcttgataatttctggaaaattatgagagcccatatgcaaatgctgataatgatgccgctattgaggatagacgaattcagtgggtggatgaagtgctcaaagctgaaggtcatgaacctcctgctgttaccattttgacaagggttccttcatggaaagttattagaactgttcacggtgaattaagtttgacaatagaagaatcaacaagtccaaatttttggtcagggatttgtctacataaccttgctagaatatccagggaagcaacaacagtgcgacgagttctggaagttatatttcgttattttgataataacaatctgtggtcaccttctaaaggatttgcactgtgtgtcctactggatatgcagattgtcatggagaaatctgaatgctcatatattgttgtctatgttagtcaagcatcttgaacacaagaatgtattgaaacaaccagatatgaatctagatatcattgaagttacttcacgccttgctgggcactccaaagctcagtcttctacagcactaatggcttcaataagtgatatggtcaggcatatgggtaaaagcatgcaatccttggccagcgatgcaggtcctggagacaacatggtcaaatggaatagcagatatgggaaagctgtagatgaatgtcttgttcaattgtctagaaaggtcggtgatgctggacctatccttgatacattagctgtagtgctggaaaacatttcaagttctatgattgttgcacggtctactatctttgcagcatatcgtactgctcaaatagttgcatcattgccaaacttgtcacatcagagcaaagcatttcctgaggcattgtttcaccaactgcttttagcaatggtctatccggactgtgggacacatttaggagcacatcggattttctctgttgttcttgttccctctgctgtcgctccgtgctcattttcagacacttcacggacaaggaagattgatctccgaaggacattatctagaacaacatcagtgttttcatcttctgctgctttgtttgggaaacttaaaagagacatgctttcatttcgtgaaagtccgctccatgataatacaaagctactacccatcagtgaggatgcagatgagatcagcgcaaatgatgcaaaactattcaagtcacagactattcaaaggatggctagtacaaaagatatttctcttccctcttccacagatgcaagtactttgagtgaacaaactccaaatcaggaaaaggatgctgtcacccttatgctcagtgttcgtcaggcaaatcttcttctttcctcgttatggactcaggcactgtcacctgaaaatgttccacggaattatgaagcaatttctcatacttacagcttgatgctattgttttctagagccaagggctcaggtgccgacgttttggttggtagctttcagcttgctttttcattaagaagtgtttcgttacaagcaggttttcttccaccttcacgcaggcgctctctttttactttggcaacttcaatgcttgtgtttttctcgaaagctttcaacgttccagcgctcattccagttgtgaagcatgtgttgacagaaagta

SEQ ID NO: 33939 - DNA, 1308 bp, Zea Mays
gtctccggcccttcaacccatgaacagcaagggcgaatagtctagtccagttccctccccagattcccctttccataaagctccccatctcgtcgtcttcctattctacatctgctgtgttttttatattattattattatatcatttctgctacgtatttttccctttttttttgctcctctagtcgtccctgcgatagtttacggtgttctgcacatagatctcatgtccggttttgcttctttctcgcgtttctcggccgtggtctggtctggtctgttcttgtctctggccacaaacatgcagatgctttggatttgaagcggagctcctctcattccaatgaagggtccttccgaagggtggttccgctgctcgttcatggttcccactatcctatctcatccatgtttgcgtgtcttcgagaggaagcggaagagattcctgtggtcgccttttgagataggcttgtggtttgcatgaccgaggagctgcaccgaccccgtgctggccgctctttggattgaagggagctctgcatcctgatccacccccccaccccatgcttgccttgctgcatccgtcgtcctcggtccatgagatctgaggctcatgtagccgatgcgtctttttttttcctttctcttcctgctgtttctccaagattcaagttggctggccgtgcttatccgtgcaggagctgaagcaggtttctgcccctgttggtggtgatggtatctatcggtacccgtactttgcgtcgctttattcccatctttgctggtgaggtgctatgtcagtgttgtcacactcgtttattttgttctcatatttttcggtttccttgttcgtaccggcggcgcgtgcattttgcggtggggctcctggatctcgctctggacggaggcacggagagcttcccttgcttcctcaacctgctgtgctcctgtgccgttcgaagacgttcagagcagtgctctcgcgacggttcagggtgtcttgctagccatctgtaaggtctgggatgcaggttgtcgttctagcagaaacatcattcgccgtagatatgatgcgccaagtttattattcttgtttgggctagggatcttgcgtttttttagctagagaagtcttgtaaccaaatgcagcgtaatggaaaacgaggtatctatgcggcagtgccacttggatactgtgtcgttggatgtttgtaattgtaatatactcagcgtttcttgcttcaataatggtgtttattatatgtaatcccttgttcgaataacagtggagagagtcgtccaatgtct

SEQ ID NO: 33940 - DNA, 422 bp, Zea Mays
ctgaaaccaagaaaacagctagctttaccagctaagctgtcgcaaaacagccaaacgaggccaatacagtggtccatccgctttcatttttgataaggaacacattggtctcatcatcatccatcacttcttaattatcatcattaacagggtccaacaagagcccgtacgtacgtcaattttctttccatcaattttcagtgttctctcatgcagtgtgtgctatatatatttatctttagaattattgtccgtttacttgtatggttcaccccaatacaagaatgtttgcttgttgacgcggcggcagagctttgttgtagaagccagcaactggtggctgactgttgcatgtagggttgcatggatactcgcagccaacctgcctcaccaccgggctcgggctcctaccaaagtaccag

SEQ ID NO: 33941 - DNA, 285 bp, Zea Mays
tgggaatctaataatgctctagcttacaaaaaattattactgactgaaatatcagctttattttggtccatctggctctgtcgaaaggaggtgacttttaatcataaaccattatcatcaattgtgcatgttattttcaggggtacccactggttcagattctggagacgtgtacagaaggaggaaaagcatcaacaaatactcgatgtctgtcgagctttggaggtggtggcgctagaagtctttgcaatgcatagatgacgctcaaatgcaagaattgaagat

SEQ ID NO: 33942 - DNA, 2133 bp, Zea Mays
cgagagttggcccagcagcgagtgatcacttgaggagctcaacaagtgagtacatcgaggaagaatgatccgcctctagttcttgggatccacctctctctcttgtcttaggctcggagaccttccgaagacgagaagctagatatggctgcgctggcccgcggcgcggccatgaaaggcggcggcgacaagaataagaaggtggcggcaggtggcaggttgctgtccgtcgtcgccgtcggctgcttcctcctcttcgtcgtcgtcgtcttcacgctctcctcccgacgctacgccaccctcgtcctcgacgctcgtgatcgccgaggtgacttccacccgtcgcagctgcaggggggcagccacggcggcggcggcggcgagggtgacctcaagcatctgcttgttgctcagcggagcaacgacgacgacgacaaggcggtcacggaagcggagctggaggaatcagggatcagaggaaagatcagcatcaacgtcgtcggggccggggggcaagcggagatggaggaggcggcgccagagagcagcgccgccgccgccgccgccgccgacgcgacatctaactccgacgacgaccgagcaaggccaggagacatcatgacacgtgcagctgcagcagcctccgtgaagcagcagcggcaaccgctgtgcgacctttcgggctcacgagctgacgtgtgtgacctcaccggcgacatccgcttgaatgccactgcctccgaattcatcgtggtggacccagcggccgcggacgacgggccaacaacggcgtacgagatcaggccgtacgcacggaagggcgacgccacgagcatgggccgcgtcaccgcggtcaccgtgcgcgtgcgggcgacggccgacgcggcgccgcgctgcacggtgacgcacgccgagccggcggtcgcgttctccgtcggcgggtacacgggcaacctcttccacgacttcaccgacgtgatcgtgccgctgtacggcacggcgcagcgctaccgcggcgacgtccgcctcgtggtcaccgacgcgggctcgtcgtcgtcgtggtggctggccaagtacgacgcggtgctgcgcgggctgtcgcgccacccgccgctccacctgcacctcgccaaggccgcgggcgaggtgcactgcttcggccacgtcgtgctcggcctgcgcgcgcgccgggagctcatggtcgagccggacccggacccggaccgcggccgcccggacggggtcgggatggccgacttcgcgcggttcctccggcgcgcgctctcgctgccccgggacgcgcccacacgccccgccgccgccagcagcgacgacaggaggaagccccgcctgctggtcgtctcccgccgcggcacccggcggctgctgaacgcggacgccgtcgcgcgcgtggcggaggaggtgggcttcgaggccgtcgtgagcgagctggaggtgagccgcgacgccgcgggcgtgggccggctcatcaactcgttcgacgcgctggtgggcgtgcacggcgcgggcctcaccaacatggtgttcctgccgccgggggccacggtggtgcagatcgtgccgtggggtggcctgcagtggatcgcccggatggacttcggcgatccggcggatgccatggggctcaggtacatccagtacgagatcgccgtgcacgagagctcgctcgcagacaagtacccgagagatcacgagatcttcaccaacccgaccgcgttgcacaagaagggcttcaagttcttgaggcacaccttcttgatcggacaggatatcacactcgacgtcgatcgcttcagggtggtgctactccaggcgctccggaacctcaccgagtaatagctatcgcggctgaaggacgccaccggccatggcaggacctagggctaagttgggctcgctggtctattttgtttttttgggccgggctaagctaaagatgtttccgttctctactgtttattctctttctttttttctttcatttatatattgcatttcatattgtactagaaaactacgataatacatttatatagtcttgtctataccaatatataggcgtatttgctagtatacttaatattattaaagtacagcgttgtgatcctttac

SEQ ID NO: 33943 - DNA, 2388 bp, Zea Mays
ctcatggctactaataacacgtttggtcagtatacaatacggtacaatgcatgtagtgtagtaggttggcagtgttaggctggcgatggtgtaaaggtggtggtggtggaggcaagagctacgagagttggcccagcagcgagtgatcacttgaggagctcaacaagctcggagaccttccgaagacgagaagctagatatggctgcgctggcccgcggcgcggccatgaaaggcggcggcgacaagaataagaaggtggcggcaggtggcaggttgctgtccgtcgtcgccgtcggctgcttcctcctcttcgtcgtcgtcgtcttcacgctctcctcccgacgctacgccaccctcgtcctcgacgctcgtgatcgccgaggtgacttccacccgtcgcagctgcaggggggcagccacggcggcggcggcggcgagggtgacctcaagcatctgcttgttgctcagcggagcaacgacgacgacgacaaggcggtcacggaagcggagctggaggaatcagggatcagaggaaagatcagcatcaacgtcgtcggggccggggggcaagcggagatggaggaggcggcgccagagagcagcgccgccgccgccgccgccgccgacgcgacatctaactccgacgacgaccgagcaaggccaggtagtagtagtacgcctttccaaaagctgcgtaacgaagctagtccataaatgcacggcttgcgctctaaaagcttgacctgcaagtctgcaactccttaaagccgccgaggatgcggacccggaccgagacaaattaaccgcggaccgcagccgccggaacaaccgtgcaagcgacgtctcctcagcaccaacacccaggagacatcatgacacgtgcagctgcagcagcctccgtgaagcagcagcggcaaccgctgtgcgacctttcgggctcacgagctgacgtgtgtgacctcaccggcgacatccgcttgaatgccactgcctccgaattcatcgtggtggacccagcggccgcggacgacgggccaacaacggcgtacgagatcaggccgtacgcacggaagggcgacgccacgagcatgggccgcgtcaccgcggtcaccgtgcgcgtgcgggcgacggccgacgcggcgccgcgctgcacggtgacgcacgccgagccggcggtcgcgttctccgtcggcgggtacacgggcaacctcttccacgacttcaccgacgtgatcgtgccgctgtacggcacggcgcagcgctaccgcggcgacgtccgcctcgtggtcaccgacgcgggctcgtcgtcgtcgtggtggctggccaagtacgacgcggtgctgcgcgggctgtcgcgccacccgccgctccacctgcacctcgccaaggccgcgggcgaggtgcactgcttcggccacgtcgtgctcggcctgcgcgcgcgccgggagctcatggtcgagccggacccggacccggaccgcggccgcccggacggggtcgggatggccgacttcgcgcggttcctccggcgcgcgctctcgctgccccgggacgcgcccacacgccccgccgccgccagcagcgacgacaggaggaagccccgcctgctggtcgtctcccgccgcggcacccggcggctgctgaacgcggacgccgtcgcgcgcgtggcggaggaggtgggcttcgaggccgtcgtgagcgagctggaggtgagccgcgacgccgcgggcgtgggccggctcatcaactcgttcgacgcgctggtgggcgtgcacggcgcgggcctcaccaacatggtgttcctgccgccgggggccacggtggtgcagatcgtgccgtggggtggcctgcagtggatcgcccggatggacttcggcgatccggcggatgccatggggctcaggtacatccagtacgagatcgccgtgcacgagagctcgctcgcagacaagtacccgagagatcacgagatcttcaccaacccgaccgcgttgcacaagaagggcttcaagttcttgaggcacaccttcttgatcggacaggatatcacactcgacgtcgatcgcttcagggtggtgctactccaggcgctccggaacctcaccgagtaatagctatcgcggctgaaggacgccaccggccatggcaggacctagggctaagttgggctcgctggtctattttgtttttttgggccgggctaagctaaagatgtttccgttctctactgtttattctctttctttttttctttcatttatatattgcatttcatattgtactagaaaactacgataatacatttatatagtcttgtctataccaatatataggcgtatttgctagtatacttaatattattaaagtacagcgttgtgatcctttac

SEQ ID NO: 33944 - DNA, 1015 bp, Zea Mays
tattggctgttcttctctgtgtatttggactggaatgagaactgtgcggtacttcgatgggaggacatacgaatgggttggtttgagccgccaacccaacattatcagtaaggtaaaaaggatgctgggacagttcacaccagcgcagtgggacaaggatgagtggcaccctacgcggggtccttggagattcatccaggtgctgagcctctgcgttgttttcatggctgtcgagctgaacacattcttcctcaagttctgcctgtggatccctccgcggaaccccttgattgtctatcggctggtcctttggtggttaatcgcgataccaaccatccgcgagtacaatacctacttgcaagacagcaaaccatttaaaaaggtgggatccttctgctggctttccctggctatatgcattgtggagctcctaatctgcatcaagtttggacacggtctgtttccaaagtcaatgccttcgtggctgatcacattctggtcagcagtcgccttgcttctcgtgctctttgtgtggacgtggaaataccgaacaatgaaaaggaaaatgatataattgtgaccaaaaaaatgatttgtttgcctccattctttacccgatttagtgttatcgtgtacataaaaatttattcaaattgtgtacatgtgctagcagtcaagtcttggtgatctgaagaggattatccatgagaaatttctatgccttctttgtctttgtattttccgtcagcgaagtaggatactggttcccctttggccctttaattcgtctgtattgccgcgtactacttcgttggccgtctcttaaatgtggagaacccttgatgcaacaacctatgaaataatgggattcgaatcccaaactgttgaataatgtttctcgatggcccaggaaaccatatctgcaggttgcacgacactaacactgacgtgggcacggaaattaactgcatcgtttccttttagtgaagcagcagactatatagtcctatctgtg

SEQ ID NO: 33945 - DNA, 2339 bp, Zea Mays
ctctgccgcgtttgactgctcatctagcagcctttatttcgccccctccctgcttaccgtttctctggtgtgcacttcccttgagagcgctcccgttcgtgggagtcgccggcggattcccaccggatttgatgcgcgcatcttcaaattcgcggccttttttttttgctgcctcgcaaaagctgctgcgtcttagcttttccggcttcttaatttggacgatgtgtacggatcactgtcggccctaattatttccacagttttttaacccgcgggctgttttatatgtgtttctttttgaattgctcgatcccttctggcgctcttcatcttcttccgtggaatggatttttcctttgctcggccttgccctttgctgcctcaggtcccgtctgttttgctctaacgcagcatctggttgcagcagcacaccacaccccttctgttgttttggaataactggaagcctttcgggtttggaatttggcacctagcctgaatgccaccgaaaccattttggagatgagtgggattcattaagtgatccctggcaaatgattgagcaagcagtgacaacttgtacttagcaaaatagtaaattgccaaggctgttgtaatgggggtcaacggtcatcacgaacctcgcagaggatgtaatggcaccgtctgcaatggtagtgtaagatcactagatcattttggtgatgtagatccatggacggcatgggcatacaagcctcgaacgatctcgctcttgctgatgggaacatgctttttaatttgggcaagtggtgctctcgatccagaacggagctcatctgctgatcgtgtttcgtcagtcaagaggggtgtatttgcgatgattgctgtttttttggcttactcttttcttcaggcgccttcaactgtactcattagaccacatcctgccatttggaggctagttcatgggatggcagttgtttaccttgtcgccctcactttcttgcttttccagactcgtgatgatgctaggcaattcatgaagtatcttcatcctgatcttggtgtcgaattacctgaaagatcatatggaactgattgccgcatatatgtacctgaccatccgaaaagcaggtttaacaatgtttatttttttctaggagataatttttgatgagtttgttatcgctcatatcctcggatggtggggtaaggctataatgatacgaaaccaaccacttttgtgggtgttatcaattgggtttgaattaatggagctcacttttcgccatatgttgccaaatttcaacgagtgctggtgggacagcattgtcctagacatattgatctgcaattggtttggtatttggactggaatgagaactgtgcggtacttcgatgggaggacatacgaatgggttggtttgagccgccaacccaacattatcagtaaggtaaaaaggatgctgggacagttcacaccagcgcagtgggacaaggatgagtggcaccctacgcggggtccttggagattcatccaggtgctgagcctctgcgttgttttcatggctgtcgagctgaacacattcttcctcaagttctgcctgtggatccctccgcggaaccccttgattgtctatcggctggtcctttggtggttaatcgcgataccaaccatccgcgagtacaatacctacttgcaagacagcaaaccatttaaaaaggtgggatccttctgctggctttccctggctatatgcattgtggagctcctaatctgcatcaagtttggacacggtctgtttccaaagtcaatgccttcgtggctgatcacattctggtcagcagtcgccttgcttctcgtgctctttgtgtggacgtggaaataccgaacaatgaaaaggaaaatgatataattgtgaccaaaaaaatgatttgtttgcctccattctttacccgatttagtgttatcgtgtacataaaaatttattcaaattgtgtacatgtgctagcagtcaagtcttggtgatctgaagaggattatccatgagaaatttctatgccttctttgtctttgtattttccgtcagcgaagtaggatactggttcccctttggccctttaattcgtctgtattgccgcgtactacttcgttggccgtctcttaaatgtggagaacccttgatgcaacaacctatgaaataatgggattcgaatcccaaactgttgaataatgtttctcgatggcccaggaaaccatatctgcaggttgcacgacactaacactgacgtgggcacggaaattaactgcatcgtttccttttagtgaagcagcagactatatagtcctatctgtg

SEQ ID NO: 33946 - DNA, 2004 bp, Zea Mays
cccgttcctgcggttatgcccggcctcctcctgtcctggggcttgggcaccgtacgcaacggcacggtctctgccgctggcggccggcggctacccggcagttgccgtttcagtttatcgtcgcggcgttgattaatgcgctcctggccgttcgccggcgaaccaccggtcgcgggcgggcgggcgggcgtgcggacctgcggggcaggctcaacggaacgccgccttttccggtgttttatgctgttgttaatgcccagtgccgtatagtaaattgccaaggctgttgtaatgggggtcaacggtcatcacgaacctcgcagaggatgtaatggcaccgtctgcaatggtagtgtaagatcactagatcattttggtgatgtagatccatggacggcatgggcatacaagcctcgaacgatctcgctcttgctgatgggaacatgctttttaatttgggcaagtggtgctctcgatccagaacggagctcatctgctgatcgtgtttcgtcagtcaagaggggtgtatttgcgatgattgctgtttttttggcttactcttttcttcaggcgccttcaactgtactcattagaccacatcctgccatttggaggctagttcatgggatggcagttgtttaccttgtcgccctcactttcttgcttttccagactcgtgatgatgctaggcaattcatgaagtatcttcatcctgatcttggtgtcgaattacctgaaagatcatatggaactgattgccgcatatatgtacctgaccatccgaaaagcaggtttaacaatgtttatgagataatttttgatgagtttgttatcgctcatatcctcggatggtggggtaaggctataatgatacgaaaccaaccacttttgtgggtgttatcaattgggtttgaattaatggagctcacttttcgccatatgttgccaaatttcaacgagtgctggtgggacagcattgtcctagacatattgatctgcaattggtttggtatttggactggaatgagaactgtgcggtacttcgatgggaggacatacgaatgggttggtttgagccgccaacccaacattatcagtaaggtaaaaaggatgctgggacagttcacaccagcgcagtgggacaaggatgagtggcaccctacgcggggtccttggagattcatccaggtgctgagcctctgcgttgttttcatggctgtcgagctgaacacattcttcctcaagttctgcctgtggatccctccgcggaaccccttgattgtctatcggctggtcctttggtggttaatcgcgataccaaccatccgcgagtacaatacctacttgcaagacagcaaaccatttaaaaaggtgggatccttctgctggctttccctggctatatgcattgtggagctcctaatctgcatcaagtttggacacggtctgtttccaaagtcaatgccttcgtggctgatcacattctggtcagcagtcgccttgcttctcgtgctctttgtgtggacgtggaaataccgaacaatgaaaaggaaaatgatataattgtgaccaaaaaaatgatttgtttgcctccattctttacccgatttagtgttatcgtgtacataaaaatttattcaaattgtgtacatgtgctagcagtcaagtcttggtgatctgaagaggattatccatgagaaatttctatgccttctttgtctttgtattttccgtcagcgaagtaggatactggttcccctttggccctttaattcgtctgtattgccgcgtactacttcgttggccgtctcttaaatgtggagaacccttgatgcaacaacctatgaaataatgggattcgaatcccaaactgttgaataatgtttctcgatggcccaggaaaccatatctgcaggttgcacgacactaacactgacgtgggcacggaaattaactgcatcgtttccttttagtgaagcagcagactatatagtcctatctgtg

SEQ ID NO: 33947 - DNA, 2378 bp, Zea Mays
ctacctctgtctatgagagagaaagagagcgtttaaaaaaattaaaagaaaaaacagaggggagagtgaaccatcatcaatgctccaatgatcccccttcaagactccgattcctttctcccccctctctctatctcgagccttttctttgaccgcctctctctctaacctcttatataagatgagaagattcgctcttcaccgcctcgcagggctacactccattctatccctctctatatccccccgcaccctctcctggtcctggccatctccatctcccgtctctctctctctctacgaactccacctcgcgaacagccgctgcttgcctgccgcgttggagagaacggaagaaaagcgagcgagggagagggacagcaactccctcggtcgctttcgacggcctggatctccccgcacgcgggatcgtacgaccggcacgctgttgtcgctttccaccgcatagtaaattgccaaggctgttgtaatgggggtcaacggtcatcacgaacctcgcagaggatgtaatggcaccgtctgcaatggtagtttgggcaagtggtgctctcgatccagaacggagctcatctgctgatcgtgtttcgtcagtcaagaggggtgtatttgcgatgattgctgtttttttggcttactcttttcttcaggcgccttcaactgtactcattagaccacatcctgccatttggaggctagttcatgggatggcagttgtttaccttgtcgccctcactttcttgcttttccaggggtgctttcaccccctcctgccgaagattgaaaccagatcaggagctatgcactgctgtatttccaccatgtgaagccaatctcagtcccaaattttccctcatctctactctgatgttatgttgtattattactcaatggctcatcctcataagataaaacagtatttcagcaagtcagacttcaatggcaaagattttaaagagaagagcggcaaaatgtagtcattatgtcatttcatattttcatgaactttgttttgcagactcgtgatgatgctaggcaattcatgaagtatcttcatcctgatcttggtgtcgaattacctgaaagatcatatggaactgattgccgcatatatgtacctgaccatccgaaaagcaggtttaacaatgtttatttttttctaggagataatttttgatgagtttgttatcgctcatatcctcggatggtggggtaaggctataatgatacgaaaccaaccacttttgtgggtgttatcaattgggtttgaattaatggagctcacttttcgccatatgttgccaaatttcaacgagtgctggtgggacagcattgtcctagacatattgatctgcaattggtttggtatttggactggaatgagaactgtgcggtacttcgatgggaggacatacgaatgggttggtttgagccgccaacccaacattatcagtaaggtaaaaaggatgctgggacagttcacaccagcgcagtgggacaaggatgagtggcaccctacgcggggtccttggagattcatccaggtgctgagcctctgcgttgttttcatggctgtcgagctgaacacattcttcctcaagttctgcctgtggatccctccgcggaaccccttgattgtctatcggctggtcctttggtggttaatcgcgataccaaccatccgcgagtacaatacctacttgcaagacagcaaaccatttaaaaaggtgggatccttctgctggctttccctggctatatgcattgtggagctcctaatctgcatcaagtttggacacggtctgtttccaaagtcaatgccttcgtggctgatcacattctggtcagcagtcgccttgcttctcgtgctctttgtgtggacgtggaaataccgaacaatgaaaaggaaaatgatataattgtgaccaaaaaaatgatttgtttgcctccattctttacccgatttagtgttatcgtgtacataaaaatttattcaaattgtgtacatgtgctagcagtcaagtcttggtgatctgaagaggattatccatgagaaatttctatgccttctttgtctttgtattttccgtcagcgaagtaggatactggttcccctttggccctttaattcgtctgtattgccgcgtactacttcgttggccgtctcttaaatgtggagaacccttgatgcaacaacctatgaaataatgggattcgaatcccaaactgttgaataatgtttctcgatggcccaggaaaccatatctgcaggttgcacgacactaacactgacgtgggcacggaaattaactgcatcgtttccttttagtgaagcagcagactatatagtcctatctgtg

SEQ ID NO: 33948 - DNA, 2453 bp, Zea Mays
ctacctctgtctatgagagagaaagagagcgtttaaaaaaattaaaagaaaaaacagaggggagagtgaaccatcatcaatgctccaatgatcccccttcaagactccgattcctttctcccccctctctctatctcgagccttttctttgaccgcctctctctctaacctcttatataagatgagaagattcgctcttcaccgcctcgcagggctacactccattctatccctctctatatccccccgcaccctctcctggtcctggccatctccatctcccgtctctctctctctctacgaactccacctcgcgaacagccgctgcttgcctgccgcgttggagagaacggaagaaaagcgagcgagggagagggacagcaactccctcggtcgctttcgacggcctggatctccccgcacgcgggatcgtacgaccggcacgctgttgtcgctttccaccgcatagtaaattgccaaggctgttgtaatgggggtcaacggtcatcacgaacctcgcagaggatgtaatggcaccgtctgcaatggtagtgtaagatcactagatcattttggtgatgtagatccatggacggcatgggcatacaagcctcgaacgatctcgctcttgctgatgggaacatgctttttaatttgggcaagtggtgctctcgatccagaacggagctcatctgctgatcgtgtttcgtcagtcaagaggggtgtatttgcgatgattgctgtttttttggcttactcttttcttcaggcgccttcaactgtactcattagaccacatcctgccatttggaggctagttcatgggatggcagttgtttaccttgtcgccctcactttcttgcttttccaggggtgctttcaccccctcctgccgaagattgaaaccagatcaggagctatgcactgctgtatttccaccatgtgaagccaatctcagtcccaaattttccctcatctctactctgatgttatgttgtattattactcaatggctcatcctcataagataaaacagtatttcagcaagtcagacttcaatggcaaagattttaaagagaagagcggcaaaatgtagtcattatgtcatttcatattttcatgaactttgttttgcagactcgtgatgatgctaggcaattcatgaagtatcttcatcctgatcttggtgtcgaattacctgaaagatcatatggaactgattgccgcatatatgtacctgaccatccgaaaagcaggagataatttttgatgagtttgttatcgctcatatcctcggatggtggggtaaggctataatgatacgaaaccaaccacttttgtgggtgttatcaattgggtttgaattaatggagctcacttttcgccatatgttgccaaatttcaacgagtgctggtgggacagcattgtcctagacatattgatctgcaattggtttggtatttggactggaatgagaactgtgcggtacttcgatgggaggacatacgaatgggttggtttgagccgccaacccaacattatcagtaaggtaaaaaggatgctgggacagttcacaccagcgcagtgggacaaggatgagtggcaccctacgcggggtccttggagattcatccaggtgctgagcctctgcgttgttttcatggctgtcgagctgaacacattcttcctcaagttctgcctgtggatccctccgcggaaccccttgattgtctatcggctggtcctttggtggttaatcgcgataccaaccatccgcgagtacaatacctacttgcaagacagcaaaccatttaaaaaggtgggatccttctgctggctttccctggctatatgcattgtggagctcctaatctgcatcaagtttggacacggtctgtttccaaagtcaatgccttcgtggctgatcacattctggtcagcagtcgccttgcttctcgtgctctttgtgtggacgtggaaataccgaacaatgaaaaggaaaatgatataattgtgaccaaaaaaatgatttgtttgcctccattctttacccgatttagtgttatcgtgtacataaaaatttattcaaattgtgtacatgtgctagcagtcaagtcttggtgatctgaagaggattatccatgagaaatttctatgccttctttgtctttgtattttccgtcagcgaagtaggatactggttcccctttggccctttaattcgtctgtattgccgcgtactacttcgttggccgtctcttaaatgtggagaacccttgatgcaacaacctatgaaataatgggattcgaatcccaaactgttgaataatgtttctcgatggcccaggaaaccatatctgcaggttgcacgacactaacactgacgtgggcacggaaattaactgcatcgtttccttttagtgaagcagcagactatatagtcctatctgtg

SEQ ID NO: 33949 - DNA, 2274 bp, Zea Mays
ctacctctgtctatgagagagaaagagagcgtttaaaaaaattaaaagaaaaaacagaggggagagtgaaccatcatcaatgctccaatgatcccccttcaagactccgattcctttctcccccctctctctatctcgagccttttctttgaccgcctctctctctaacctcttatataagatgagaagattcgctcttcaccgcctcgcagggctacactccattctatccctctctatatccccccgcaccctctcctggtcctggccatctccatctcccgtctctctctctctctacgaactccacctcgcgaacagccgctgcttgcctgccgcgttggagagaacggaagaaaagcgagcgagggagagggacagcaactccctcggtcgctttcgacggcctggatctccccgcacgcgggatcgtacgaccggcacgctgttgtcgctttccaccgcatagtaaattgccaaggctgttgtaatgggggtcaacggtcatcacgaacctcgcagaggatgtaatggcaccgtctgcaatggtagtgtaagatcactagatcattttggtgatgtagatccatggacggcatgggcatacaagcctcgaacgatctcgctcttgctgatgggaacatgctttttaatttgggcaagtggtgctctcgatccagaacggagctcatctgctgatcgtgtttcgtcagtcaagaggggtgtatttgcgatgattgctgtttttttggcttactcttttcttcaggcgccttcaactgtactcattagaccacatcctgccatttggaggctagttcatgggatggcagttgtttaccttgtcgccctcactttcttgcttttccaggggtgctttcaccccctcctgccgaagattgaaaccagatcaggagctatgcactgctgtatttccaccatactcgtgatgatgctaggcaattcatgaagtatcttcatcctgatcttggtgtcgaattacctgaaagatcatatggaactgattgccgcatatatgtacctgaccatccgaaaagcaggtttaacaatgtttatgagataatttttgatgagtttgttatcgctcatatcctcggatggtggggtaaggctataatgatacgaaaccaaccacttttgtgggtgttatcaattgggtttgaattaatggagctcacttttcgccatatgttgccaaatttcaacgagtgctggtgggacagcattgtcctagacatattgatctgcaattggtttggtatttggactggaatgagaactgtgcggtacttcgatgggaggacatacgaatgggttggtttgagccgccaacccaacattatcagtaaggtaaaaaggatgctgggacagttcacaccagcgcagtgggacaaggatgagtggcaccctacgcggggtccttggagattcatccaggtgctgagcctctgcgttgttttcatggctgtcgagctgaacacattcttcctcaagttctgcctgtggatccctccgcggaaccccttgattgtctatcggctggtcctttggtggttaatcgcgataccaaccatccgcgagtacaatacctacttgcaagacagcaaaccatttaaaaaggtgggatccttctgctggctttccctggctatatgcattgtggagctcctaatctgcatcaagtttggacacggtctgtttccaaagtcaatgccttcgtggctgatcacattctggtcagcagtcgccttgcttctcgtgctctttgtgtggacgtggaaataccgaacaatgaaaaggaaaatgatataattgtgaccaaaaaaatgatttgtttgcctccattctttacccgatttagtgttatcgtgtacataaaaatttattcaaattgtgtacatgtgctagcagtcaagtcttggtgatctgaagaggattatccatgagaaatttctatgccttctttgtctttgtattttccgtcagcgaagtaggatactggttcccctttggccctttaattcgtctgtattgccgcgtactacttcgttggccgtctcttaaatgtggagaacccttgatgcaacaacctatgaaataatgggattcgaatcccaaactgttgaataatgtttctcgatggcccaggaaaccatatctgcaggttgcacgacactaacactgacgtgggcacggaaattaactgcatcgtttccttttagtgaagcagcagactatatagtcctatctgtg

SEQ ID NO: 33950 - DNA, 2373 bp, Zea Mays
ctacctctgtctatgagagagaaagagagcgtttaaaaaaattaaaagaaaaaacagaggggagagtgaaccatcatcaatgctccaatgatcccccttcaagactccgattcctttctcccccctctctctatctcgagccttttctttgaccgcctctctctctaacctcttatataagatgagaagattcgctcttcaccgcctcgcagggctacactccattctatccctctctatatccccccgcaccctctcctggtcctggccatctccatctcccgtctctctctctctctacgaactccacctcgcgaacagccgctgcttgcctgccgcgttggagagaacggaagaaaagcgagcgagggagagggacagcaactccctcggtcgctttcgacggcctggatctccccgcacgcgggatcgtacgaccggcacgctgttgtcgctttccaccgcatagtaaattgccaaggctgttgtaatgggggtcaacggtcatcacgaacctcgcagaggatgtaatggcaccgtctgcaatgttgggcaagtggtgctctcgatccagaacggagctcatctgctgatcgtgtttcgtcagtcaagaggggtgtatttgcgatgattgctgtttttttggcttactcttttcttcaggcgccttcaactgtactcattagaccacatcctgccatttggaggctagttcatgggatggcagttgtttaccttgtcgccctcactttcttgcttttccaggggtgctttcaccccctcctgccgaagattgaaaccagatcaggagctatgcactgctgtatttccaccatgtgaagccaatctcagtcccaaattttccctcatctctactctgatgttatgttgtattattactcaatggctcatcctcataagataaaacagtatttcagcaagtcagacttcaatggcaaagattttaaagagaagagcggcaaaatgtagtcattatgtcatttcatattttcatgaactttgttttgcagactcgtgatgatgctaggcaattcatgaagtatcttcatcctgatcttggtgtcgaattacctgaaagatcatatggaactgattgccgcatatatgtacctgaccatccgaaaagcaggtttaacaatgtttatttttttctaggagataatttttgatgagtttgttatcgctcatatcctcggatggtggggtaaggctataatgatacgaaaccaaccacttttgtgggtgttatcaattgggtttgaattaatggagctcacttttcgccatatgttgccaaatttcaacgagtgctggtgggacagcattgtcctagacatattgatctgcaattggtttggtatttggactggaatgagaactgtgcggtacttcgatgggaggacatacgaatgggttggtttgagccgccaacccaacattatcagtaaggtaaaaaggatgctgggacagttcacaccagcgcagtgggacaaggatgagtggcaccctacgcggggtccttggagattcatccaggtgctgagcctctgcgttgttttcatggctgtcgagctgaacacattcttcctcaagttctgcctgtggatccctccgcggaaccccttgattgtctatcggctggtcctttggtggttaatcgcgataccaaccatccgcgagtacaatacctacttgcaagacagcaaaccatttaaaaaggtgggatccttctgctggctttccctggctatatgcattgtggagctcctaatctgcatcaagtttggacacggtctgtttccaaagtcaatgccttcgtggctgatcacattctggtcagcagtcgccttgcttctcgtgctctttgtgtggacgtggaaataccgaacaatgaaaaggaaaatgatataattgtgaccaaaaaaatgatttgtttgcctccattctttacccgatttagtgttatcgtgtacataaaaatttattcaaattgtgtacatgtgctagcagtcaagtcttggtgatctgaagaggattatccatgagaaatttctatgccttctttgtctttgtattttccgtcagcgaagtaggatactggttcccctttggccctttaattcgtctgtattgccgcgtactacttcgttggccgtctcttaaatgtggagaacccttgatgcaacaacctatgaaataatgggattcgaatcccaaactgttgaataatgtttctcgatggcccaggaaaccatatctgcaggttgcacgacactaacactgacgtgggcacggaaattaactgcatcgtttccttttagtgaagcagcagactatatagtcctatctgtg

SEQ ID NO: 33951 - DNA, 2197 bp, Zea Mays
ctacctctgtctatgagagagaaagagagcgtttaaaaaaattaaaagaaaaaacagaggggagagtgaaccatcatcaatgctccaatgatcccccttcaagactccgattcctttctcccccctctctctatctcgagccttttctttgaccgcctctctctctaacctcttatataagatgagaagattcgctcttcaccgcctcgcagggctacactccattctatccctctctatatccccccgcaccctctcctggtcctggccatctccatctcccgtctctctctctctctacgaactccacctcgcgaacagccgctgcttgcctgccgcgttggagagaacggaagaaaagcgagcgagggagagggacagcaactccctcggtcgctttcgacggcctggatctccccgcacgcgggatcgtacgaccggcacgctgttgtcgctttccaccgcatagtaaattgccaaggctgttgtaatgggggtcaacggtcatcacgaacctcgcagaggatgtaatggcaccgtctgcaatggtagtgtaagatcactagatcattttggtgatgtagatccatggacggcatgggcatacaagcctcgaacgatctcgctcttgctgatgggaacatgctttttaatttgggcaagtggtgctctcgatccagaacggagctcatctgctgatcgtgtttcgtcagtcaagaggggtgtatttgcgatgattgctgtttttttggcttactcttttcttcaggcgccttcaactgtactcattagaccacatcctgccatttggaggctagttcatgggatggcagttgtttaccttgtcgccctcactttcttgcttttccagactcgtgatgatgctaggcaattcatgaagtatcttcatcctgatcttggtgtcgaattacctgaaagatcatatggaactgattgccgcatatatgtacctgaccatccgaaaagcagttttttctaggagataatttttgatgagtttgttatcgctcatatcctcggatggtggggtaaggctataatgatacgaaaccaaccacttttgtgggtgttatcaattgggtttgaattaatggagctcacttttcgccatatgttgccaaatttcaacgagtgctggtgggacagcattgtcctagacatattgatctgcaattggtttggtatttggactggaatgagaactgtgcggtacttcgatgggaggacatacgaatgggttggtttgagccgccaacccaacattatcagtaaggtaaaaaggatgctgggacagttcacaccagcgcagtgggacaaggatgagtggcaccctacgcggggtccttggagattcatccaggtgctgagcctctgcgttgttttcatggctgtcgagctgaacacattcttcctcaagttctgcctgtggatccctccgcggaaccccttgattgtctatcggctggtcctttggtggttaatcgcgataccaaccatccgcgagtacaatacctacttgcaagacagcaaaccatttaaaaaggtgggatccttctgctggctttccctggctatatgcattgtggagctcctaatctgcatcaagtttggacacggtctgtttccaaagtcaatgccttcgtggctgatcacattctggtcagcagtcgccttgcttctcgtgctctttgtgtggacgtggaaataccgaacaatgaaaaggaaaatgatataattgtgaccaaaaaaatgatttgtttgcctccattctttacccgatttagtgttatcgtgtacataaaaatttattcaaattgtgtacatgtgctagcagtcaagtcttggtgatctgaagaggattatccatgagaaatttctatgccttctttgtctttgtattttccgtcagcgaagtaggatactggttcccctttggccctttaattcgtctgtattgccgcgtactacttcgttggccgtctcttaaatgtggagaacccttgatgcaacaacctatgaaataatgggattcgaatcccaaactgttgaataatgtttctcgatggcccaggaaaccatatctgcaggttgcacgacactaacactgacgtgggcacggaaattaactgcatcgtttccttttagtgaagcagcagactatatagtcctatctgtg

SEQ ID NO: 33952 - DNA, 4584 bp, Zea Mays
atggctctaaccatggtcacgttcgtcctcaggttcacacacccgtgcgcgtgtgcgggcccgcgttgcagttgcagatgtgtgcgacgcgacacgaccccgcaaaccccacttgtcagcgacctgccctcccactaccagggactgctcacccctttcctcaccgccatccgccatcccatcctatccttcgaaacccgggtagccgccgcaaggaggcactcccccgaccacgccgcgcaatcgccgtcgcgtttctacgccggcgtcagcgttttctctcgctccgcagatccccagagcctcacgttacagcgacgaaccctccgacgagccggcttcccccgccgcgcgcagagcagcggaaccggaggcggattgcacgagacatgtgagcctgctgtcgcggcgacggcgctggtggtgatgctcctgacctccgtcctccggggtcgcgtccgccttctccaccggcaccgctccctgaccatgccctcccctctcttcctctccagaaaccctaatactagcctcggcaccactaacccccacctctcatcgccccccgtgtcggctgcaatgagcaccaccggagtctacgtgccgccgatgcggcggctccgctccgttatcgcgtccaccaacgggagccttgcgccaccaccgtccgccgcggcgcaggcacagcagacgcggacgccagagtggctggtggacgggcgttcgctcagcccccagtcgccgcctcagctgcggcggcgcgatatacctcccttgccgaggccacccctgccagagcattaccggcagcagagcgctgggtttgcccgctatgcatacgatgatttctctgaggatgactcagataaggacattgaccgcacgtcagtttcgagcaagggtgcatctactttagataatgttgatgaatggaaatggaaactgcatatgcttcttcgtaatgatgatgaacaagagattatctcaagggaaagaaaggataggcgagattttgaacaactcgcccaattggctgacagaatgcgcttgcacagccgtcagtattctagagttgttgtgttcagtaaggttccattgcctaattatagatcagatcttgatgataaaagaccccaaagagaggtatctatacctgctggcttgcaaagagaggttgatgctctgcttgcaggctatgttgcacggaagggaacatacattggcaactttcctagttcagctttctcacgatcaagcagcacagacagttttgcaactgatgaaggcttctttgagcagcaagataatcaaacttccactagtgctgtaatggacagaatccaaagaaggaaaagcctgcagttgcggaatcagcaggctgcttggcaggaatcaaatgatggccaaagcatgatggagtttcgtcgcagtcttcctgcttataaagagaagcaaactttattggaagctatatcacagaatcaggtcattgtagtttcaggcgagactggctgtggtaagacgacacaactaccacagtacattttagaatctgaaatcgatgctgctcgtggtgctacgtgcagtattatttgcactcaaccaaggcgaatatcagcaattgctgtgtctgaaagagtcgctgctgaaagaggcgagaaaattggtgaatcggttggctacaaagttcggctggaaggcatgagaggaagagatacgcgccttcttttctgcaccactggagtcctgttgcggagattgttggtggacaggaatttgaaaggtgttacccatgttattgttgatgaaatccatgaaagaggcatgaatgaagattttcttcttattgtcttaaaggatcttcttccacgtcgccctgagctgaggcttatattgatgagtgcaacccttaatgctgagctattctcttcatactttggtggagcacccatgatacatatacctggttttacatatcctgtccggagtcattttctggaagatattcttgaaattactgggcactggttaactccatacaatcaaattgatgactatggtcaagaaaaaagttggaagatgcaaaagcaagctctacaaaagcggaagagccaaatcgcttctgttgtggaagatgctgttgaagctgctgatttgagggactatagttcgcgaactcgtgattccttatcctgttggaatcctgattcaattggttttaatttaatagaaaatgtcttatgccatatttgtcaaaaggaacgatctggtgcaattcttgtatttatgactgggtgggatgacattaatgcattaaaagagcagctccaagcaaatccattgcttggaaatccaagcgcagttttgttgctcgcttgtcatggctctatggccagttcagagcagaaattaatatttgataagcctgagcctggagtaaggaaaatagttcttgccacgaatttggctgaaactagtattactatcaacgatgtagtttttgttgttgattgtggcaaagcaaaagagacatcttacgatgcactgaataatactccctgtctgcttccaacctggatctccaaggcttctgccagacaaagacgaggacgagctggccgagtccaaccaggggagtgctaccatctttatccacgatgtgtatatgatgcatttgctgactaccagttaccagaacttcttagaactcctctccagtccctctgtttgcaaataaaaagcttgaggctgggaagtatatcagaatttttatccagagctttacaatcacctgaatctctatcagtacaaaatgccattgaatatcttaaagtcattggagcatttgatcagaatgaagaattgacggttcttggaaagcacttgtctatgcttccagttgaacctaagttaggaaagatgcttatttttggggctatttttaattgtctggatcccatattaaccatagtttctggacttagtgttagagatccctttttaacccccttcgataagaaagatcttgcagagtcagctaagttgcagttttcatgccgggactacagtgatcatcttgcacttgttcgtgcatatgatggatggagggaggctgaaagagaccgtgctggttatgactactgctggaaaaattttctttcggtgcaaacattgaaagcaatagattctcttcggcggcagtttctctttcttctgaaggatactggtttggttgacgaaaacatgactatgtgcaataaatggagtcgtgatgaaaatctagttcgggcggtaatttgtgcaggactgtatccaggtgtttcctctgttttgaacaaggagaaatccatctccctcaagacaatggaagatggacaggttatgctttattcgagttcagttaatggtaaagaaaccaagattccattcccctggctagttttcaatgagaaggtgaaagtgaattctgttttcctccgggattcaactgctatatctgattctatactgttgttattcggaggctgcataaaacaagggggcttggatggacacttaaaaatgcttggaggttatcttgagttcttcatgaatcgcgatcttgcttcaacttatctccaaaacccaaggatggatatccaaacgagtgaagagctgctatcagccatccgtttgctggtgactgaggatccatgcagtgggcggttcgtgtacggccgacaggagccaagatcaaagaaagcaaagacgatgctttcgccatcctctctgagtgaggctggtggcaacggaggggataatgccaagaaccagctccagacttacctgacccgggccgggcacagcaaccccacctacaagacgaagcagatcaagagctatctcttcagatcgacggttgagttcaacggcatgcagttcgtggggcaaccgtgtgcaaacaagaaacttgcggagaaagatgccgcgagcgaggcactgaactggctcacaggagatggtggagcgattactgactctaggggggctcaggatgcagaccccatgtccttgctgatgcaaccaccgcgtaggcgtcgacatagccatcgtcggaggaactgattagcacgacatgcttttcttcctttttgatcgttttcttatttatgtagcattcgagaagcatagttaagcatagaaggtagcgaggaaaaaatgttatagactcttgaaatgtactacaatagttttgacgtgcagtgcctgtgaattttagagcatggttcgtcagtggtgacggtgagtgatgggctgatggcgtgcgagaatcgcagagaacactagctgtaacggtcgaagggtgatccaattttttttttgctgtgggtactgaattcattatttgttggcgccatattaactgaagagttatgcgtagtgggcaagggcagccacgatgtatgtatttagactaaggtagtctaaatgagggggctcgtgtcaggtatcattgtatgttgtcagatgcggagaactggagactaagactatccgccggttttctctaaatttctaactctatatcaattttttttgtcacat

SEQ ID NO: 33953 - DNA, 4619 bp, Zea Mays
atggctctaaccatggtcacgttcgtcctcaggttcacacacccgtgcgcgtgtgcgggcccgcgttgcagttgcagatgtgtgcgacgcgacacgaccccgcaaaccccacttgtcagcgacctgccctcccactaccagggactgctcacccctttcctcaccgccatccgccatcccatcctatccttcgaaacccgggtagccgccgcaaggaggcactcccccgaccacgccgcgcaatcgccgtcgcgtttctacgccggcgtcagcgttttctctcgctccgcagatccccagagcctcacgttacagcgacgaaccctccgacgagccggcttcccccgccgcgcgcagagcagcggaaccggaggcggattgcacgagacatgtgagcctgctgtcgcggcgacggcgctggtggtgatgctcctgacctccgtcctccggggtcgcgtccgccttctccaccggcaccgctccctgaccatgccctcccctctcttcctctccagaaaccctaatactagcctcggcaccactaacccccacctctcatcgccccccgtgtcggctgcaatgagcaccaccggagtctacgtgccgccgatgcggcggctccgctccgttatcgcgtccaccaacgggagccttgcgccaccaccgtccgccgcggcgcaggcacagcagacgcggacgccagagtggctggtggacgggcgttcgctcagcccccagtcgccgcctcagctgcggcggcgcgatatacctcccttgccgaggccacccctgccagagcattaccggcagcagagcgctgggtttgcccgctatgcatacgatgatttctctgaggatgactcagataaggacattgaccgcacgtcagtttcgagcaagggtgcatctactttagataatgttgatgaatggaaatggaaactgcatatgcttcttcgtaatgatgatgaacaagagattatctcaagggaaagaaaggataggcgagattttgaacaactcgcccaattggctgacagaatgcgcttgcacagccgtcagtattctagagttgttgtgttcagtaaggttccattgcctaattatagatcagatcttgatgataaaagaccccaaagagaggtatctatacctgctggcttgcaaagagaggttgatgctctgcttgcaggctatgttgcacggaagggaacatacattggcaactttcctagttcagctttctcacgatcaagcagcacagacagttttgcaactgatgaaggcttctttgagcagcaagataatcaaacttccactagtgctgtaatggacagaatccaaagaaggaaaagcctgcagttgcggaatcagcaggctgcttggcaggaatcaaatgatggccaaagcatgatggagtttcgtcgcagtcttcctgcttataaagagaagcaaactttattggaagctatatcacagaatcaggtcattgtagtttcaggcgagactggctgtggtaagacgacacaactaccacagtacattttagaatctgaaatcgatgctgctcgtggtgctacgtgcagtattatttgcactcaaccaaggcgaatatcagcaattgctgtgtctgaaagagtcgctgctgaaagaggcgagaaaattggtgaatcggttggctacaaagttcggctggaaggcatgagaggaagagatacgcgccttcttttctgcaccactggagtcctgttgcggagattgttggtggacaggaatttgaaaggtgttacccatgttattgttgatgaaatccatgaaagaggcatgaatgaagattttcttcttattgtcttaaaggatcttcttccacgtcgccctgagctgaggcttatattgatgagtgcaacccttaatgctgagctattctcttcatactttggtggagcacccatgatacatatacctggttttacatatcctgtccggagtcattttctggaagatattcttgaaattactgggcactggttaactccatacaatcaaattgatgactatggtcaagaaaaaagttggaagatgcaaaagcaagctctacaaaagcggaagagccaaatcgcttctgttgtggaagatgctgttgaagctgctgatttgagggactatagttcgcgaactcgtgattccttatcctgttggaatcctgattcaattggttttaatttaatagaaaatgtcttatgccatatttgtcaaaaggaacgatctggtgcaattcttgtatttatgactgggtgggatgacattaatgcattaaaagagcagctccaagcaaatccattgcttggaaatccaagcgcagttttgttgctcgcttgtcatggctctatggccagttcagagcagaaattaatatttgataagcctgagcctggagtaaggaaaatagttcttgccacgaatttggctgaaactagtattactatcaacgatgtagtttttgttgttgattgtggcaaagcaaaagagacatcttacgatgcactgaataatactccctgtctgcttccaacctggatctccaaggcttctgccagacaaagacgaggacgagctggccgagtccaaccaggggagtgctaccatctttatccacgatgtgtatatgatgcatttgctgactaccagttaccagaacttcttagaactcctctccagtccctctgtttgcaaataaaaagcttgaggctgggaagtatatcagaatttttatccagagctttacaatcacctgaatctctatcagtacaaaatgccattgaatatcttaaagtcattggagcatttgatcagaatgaagaattgacggttcttggaaagcacttgtctatgcttccagttgaacctaagttaggaaagatgcttatttttggggctatttttaattgtctggatcccatattaaccatagtttctggacttagtgttagagatccctttttaacccccttcgataagaaagatcttgcagagtcagctaagttgcagttttcatgccgggactacagtgatcatcttgcacttgttcgtgcatatgatggatggagggaggctgaaagagaccgtgctggttatgactactgctggaaaaattttctttcggtgcaaacattgaaagcaatagattctcttcggcggcagtttctctttcttctgaaggatactggtttggttgacgaaaacatgactatgtgcaataaatggagtcgtgatgaaaatctagttcgggcggtaatttgtgcaggactgtatccaggtgtttcctctgttttgaacaaggagaaatccatctccctcaagacaatggaagatggacaggttatgctttattcgttaatggtaaagaaaccaagattccattcccctggctagttttcaatgagaaggtgaaagtgaattctgttttcctccgggattcaactgctatatctgattctatactgttgttattcggaggctgcataaaacaagggggcttggatggacacttaaaaatgcttggaggttatcttgagttcttcatgaatcgcgatcttgcttcaacttatgtgagtttgaagagagaacttgagaatttaatccattgcaagctccaaaacccaaggatggatatccaaacgagtgaagagctgctatcagccatccgtttgctggtgactgaggatccatgcagtgggcggttcgtgtacggccgacaggagccaagatcaaagaaagcaaagacgatgctttcgccatcctctctgagtgaggctggtggcaacggaggggataatgccaagaaccagctccagacttacctgacccgggccgggcacagcaaccccacctacaagacgaagcagatcaagagctatctcttcagatcgacggttgagttcaacggcatgcagttcgtggggcaaccgtgtgcaaacaagaaacttgcggagaaagatgccgcgagcgaggcactgaactggctcacaggagatggtggagcgattactgactctaggggggctcaggatgcagaccccatgtccttgctgatgcaaccaccgcgtaggcgtcgacatagccatcgtcggaggaactgattagcacgacatgcttttcttcctttttgatcgttttcttatttatgtagcattcgagaagcatagttaagcatagaaggtagcgaggaaaaaatgttatagactcttgaaatgtactacaatagttttgacgtgcagtgcctgtgaattttagagcatggttcgtcagtggtgacggtgagtgatgggctgatggcgtgcgagaatcgcagagaacactagctgtaacggtcgaagggtgatccaattttttttttgctgtgggtactgaattcattatttgttggcgccatattaactgaagagttatgcgtagtgggcaagggcagccacgatgtatgtatttagactaaggtagtctaaatgagggggctcgtgtcaggtatcattgtatgttgtcagatgcggagaactggagactaagactatccgccggttttctctaaatttctaactctatatcaattttttttgtcacat

SEQ ID NO: 33954 - DNA, 4437 bp, Zea Mays
atggctctaaccatggtcacgttcgtcctcaggttcacacacccgtgcgcgtgtgcgggcccgcgttgcagttgcagatgtgtgcgacgcgacacgaccccgcaaaccccacttgtcagcgacctgccctcccactaccagggactgctcacccctttcctcaccgccatccgccatcccatcctatccttcgaaacccgggtagccgccgcaaggaggcactcccccgaccacgccgcgcaatcgccgtcgcgtttctacgccggcgtcagcgttttctctcgctccgcagatccccagagcctcacgttacagcgacgaaccctccgacgagccggcttcccccgccgcgcgcagagcagcggaaccggaggcggattgcacgagacatgtgagcctgctgtcgcggcgacggcgctggtggtgatgctcctgacctccgtcctccggggtcgcgtccgccttctccaccggcaccgctccctgaccatgccctcccctctcttcctctccagaaaccctaatactagcctcggcaccactaacccccacctctcatcgccccccgtgtcggctgcaatgagcaccaccggagtctacgtgccgccgatgcggcggctccgctccgttatcgcgtccaccaacgggagccttgcgccaccaccgtccgccgcggcgcaggcacagcagacgcggacgccagagtggctggtggacgggcgttcgctcagcccccagtcgccgcctcagctgcggcggcgcgatatacctcccttgccgaggccacccctgccagagcattaccggcagcagagcgctgggtttgcccgctatgcatacgatgatttctctgaggatgactcagataaggacattgaccgcacgtcagtttcgagcaagggtgcatctactttagataatgttgatgaatggaaatggaaactgcatatgcttcttcgtaatgatgatgaacaagagattatctcaagggaaagaaaggataggcgagattttgaacaactcgcccaattggctgacagaatgcgcttgcacagccgtcagtattctagagttgttgtgttcagtaaggttccattgcctaattatagatcagatcttgatgataaaagaccccaaagagaggtatctatacctgctggcttgcaaagagaggttgatgctctgcttgcaggctatgttgcacggaagggaacatacattggcaactttcctagttcagctttctcacgatcaagcagcacagacagttttgcaactgatgaaggcttctttgagcagcaagataatcaaacttccactagtgctgtaatggacagaatccaaagaaggaaaagcctgcagttgcggaatcagcaggctgcttggcaggaatcaaatgatggccaaagcatgatggagtttcgtcgcagtcttcctgcttataaagagaagcaaactttattggaagctatatcacagaatcaggttggctacaaagttcggctggaaggcatgagaggaagagatacgcgccttcttttctgcaccactggagtcctgttgcggagattgttggtggacaggaatttgaaaggtgttacccatgttattgttgatgaaatccatgaaagaggcatgaatgaagattttcttcttattgtcttaaaggatcttcttccacgtcgccctgagctgaggcttatattgatgagtgcaacccttaatgctgagctattctcttcatactttggtggagcacccatgatacatatacctggttttacatatcctgtccggagtcattttctggaagatattcttgaaattactgggcactggttaactccatacaatcaaattgatgactatggtcaagaaaaaagttggaagatgcaaaagcaagctctacaaaagcggaagagccaaatcgcttctgttgtggaagatgctgttgaagctgctgatttgagggactatagttcgcgaactcgtgattccttatcctgttggaatcctgattcaattggttttaatttaatagaaaatgtcttatgccatatttgtcaaaaggaacgatctggtgcaattcttgtatttatgactgggtgggatgacattaatgcattaaaagagcagctccaagcaaatccattgcttggaaatccaagcgcagttttgttgctcgcttgtcatggctctatggccagttcagagcagaaattaatatttgataagcctgagcctggagtaaggaaaatagttcttgccacgaatttggctgaaactagtattactatcaacgatgtagtttttgttgttgattgtggcaaagcaaaagagacatcttacgatgcactgaataatactccctgtctgcttccaacctggatctccaaggcttctgccagacaaagacgaggacgagctggccgagtccaaccaggggagtgctaccatctttatccacgatgtgtatatgatgcatttgctgactaccagttaccagaacttcttagaactcctctccagtccctctgtttgcaaataaaaagcttgaggctgggaagtatatcagaatttttatccagagctttacaatcacctgaatctctatcagtacaaaatgccattgaatatcttaaagtcattggagcatttgatcagaatgaagaattgacggttcttggaaagcacttgtctatgcttccagttgaacctaagttaggaaagatgcttatttttggggctatttttaattgtctggatcccatattaaccatagtttctggacttagtgttagagatccctttttaacccccttcgataagaaagatcttgcagagtcagctaagttgcagttttcatgccgggactacagtgatcatcttgcacttgttcgtgcatatgatggatggagggaggctgaaagagaccgtgctggttatgactactgctggaaaaattttctttcggtgcaaacattgaaagcaatagattctcttcggcggcagtttctctttcttctgaaggatactggtttggttgacgaaaacatgactatgtgcaataaatggagtcgtgatgaaaatctagttcgggcggtaatttgtgcaggactgtatccaggtgtttcctctgttttgaacaaggagaaatccatctccctcaagacaatggaagatggacaggttatgctttattcgagttcagttaatggtaaagaaaccaagattccattcccctggctagttttcaatgagaaggtgaaagtgaattctgttttcctccgggattcaactgctatatctgattctatactgttgttattcggaggctgcataaaacaagggggcttggatggacacttaaaaatgcttggaggttatcttgagttcttcatgaatcgcgatcttgcttcaacttatgtgagtttgaagagagaacttgagaatttaatccattgcaagctccaaaacccaaggatggatatccaaacgagtgaagagctgctatcagccatccgtttgctggtgactgaggatccatgcagtgggcggttcgtgtacggccgacaggagccaagatcaaagaaagcaaagacgatgctttcgccatcctctctgagtgaggctggtggcaacggaggggataatgccaagaaccagctccagacttacctgacccgggccgggcacagcaaccccacctacaagacgaagcagatcaagagctatctcttcagatcgacggttgagttcaacggcatgcagttcgtggggcaaccgtgtgcaaacaagaaacttgcggagaaagatgccgcgagcgaggcactgaactggctcacaggagatggtggagcgattactgactctaggggggctcaggatgcagaccccatgtccttgctgatgcaaccaccgcgtaggcgtcgacatagccatcgtcggaggaactgattagcacgacatgcttttcttcctttttgatcgttttcttatttatgtagcattcgagaagcatagttaagcatagaaggtagcgaggaaaaaatgttatagactcttgaaatgtactacaatagttttgacgtgcagtgcctgtgaattttagagcatggttcgtcagtggtgacggtgagtgatgggctgatggcgtgcgagaatcgcagagaacactagctgtaacggtcgaagggtgatccaattttttttttgctgtgggtactgaattcattatttgttggcgccatattaactgaagagttatgcgtagtgggcaagggcagccacgatgtatgtatttagactaaggtagtctaaatgagggggctcgtgtcaggtatcattgtatgttgtcagatgcggagaactggagactaagactatccgccggttttctctaaatttctaactctatatcaattttttttgtcacat

SEQ ID NO: 33955 - DNA, 4613 bp, Zea Mays
atggctctaaccatggtcacgttcgtcctcaggttcacacacccgtgcgcgtgtgcgggcccgcgttgcagttgcagatgtgtgcgacgcgacacgaccccgcaaaccccacttgtcagcgacctgccctcccactaccagggactgctcacccctttcctcaccgccatccgccatcccatcctatccttcgaaacccgggtagccgccgcaaggaggcactcccccgaccacgccgcgcaatcgccgtcgcgtttctacgccggcgtcagcgttttctctcgctccgcagatccccagagcctcacgttacagcgacgaaccctccgacgagccggcttcccccgccgcgcgcagagcagcggaaccggaggcggattgcacgagacatgtgagcctgctgtcgcggcgacggcgctggtggtgatgctcctgacctccgtcctccggggtcgcgtccgccttctccaccggcaccgctccctgaccatgccctcccctctcttcctctccagaaaccctaatactagcctcggcaccactaacccccacctctcatcgccccccgtgtcggctgcaatgagcaccaccggagtctacgtgccgccgatgcggcggctccgctccgttatcgcgtccaccaacgggagccttgcgccaccaccgtccgccgcggcgcaggcacagcagacgcggacgccagagtggctggtggacgggcgttcgctcagcccccagtcgccgcctcagctgcggcggcgcgatatacctcccttgccgaggccacccctgccagagcattaccggcagcagagcgctgggtttgcccgctatgcatacgatgatttctctgaggatgactcagataaggacattgaccgcacgtcagtttcgagcaagggtgcatctactttagataatgttgatgaatggaaatggaaactgcatatgcttcttcgtaatgatgatgaacaagagattatctcaagggaaagaaaggataggcgagattttgaacaactcgcccaattggctgacagaatgcgcttgcacagccgtcagtattctagagttgttgtgttcagtaaggttccattgcctaattatagatcagatcttgatgataaaagaccccaaagagaggtatctatacctgctggcttgcaaagagaggttgatgctctgcttgcaggctatgttgcacggaagggaacatacattggcaactttcctagttcagctttctcacgatcaagcagcacagacagttttgcaactgatgaaggcttctttgagcagcaagataatcaaacttccactagtgctgtaatggacagaatccaaagaaggaaaagcctgcagttgcggaatcagcaggctgcttggcaggaatcaaatgatggccaaagcatgatggagtttcgtcgcagtcttcctgcttataaagagaagcaaactttattggaagctatatcacagaatcaggtcattgtagtttcaggcgagactggctgtggtaagacgacacaactaccacagtacattttagaatctgaaatcgatgctgctcgtggtgctacgtgcagtattatttgcactcaaccaaggcgaatatcagcaattgctgtgtctgaaagagtcgctgctgaaagaggcgagaaaattggtgaatcgttcggctggaaggcatgagaggaagagatacgcgccttcttttctgcaccactggagtcctgttgcggagattgttggtggacaggaatttgaaaggtgttacccatgttattgttgatgaaatccatgaaagaggcatgaatgaagattttcttcttattgtcttaaaggatcttcttccacgtcgccctgagctgaggcttatattgatgagtgcaacccttaatgctgagctattctcttcatactttggtggagcacccatgatacatatacctggttttacatatcctgtccggagtcattttctggaagatattcttgaaattactgggcactggttaactccatacaatcaaattgatgactatggtcaagaaaaaagttggaagatgcaaaagcaagctctacaaaagcggaagagccaaatcgcttctgttgtggaagatgctgttgaagctgctgatttgagggactatagttcgcgaactcgtgattccttatcctgttggaatcctgattcaattggttttaatttaatagaaaatgtcttatgccatatttgtcaaaaggaacgatctggtgcaattcttgtatttatgactgggtgggatgacattaatgcattaaaagagcagctccaagcaaatccattgcttggaaatccaagcgcagttttgttgctcgcttgtcatggctctatggccagttcagagcagaaattaatatttgataagcctgagcctggagtaaggaaaatagttcttgccacgaatttggctgaaactagtattactatcaacgatgtagtttttgttgttgattgtggcaaagcaaaagagacatcttacgatgcactgaataatactccctgtctgcttccaacctggatctccaaggcttctgccagacaaagacgaggacgagctggccgagtccaaccaggggagtgctaccatctttatccacgatgtgtatatgatgcatttgctgactaccagttaccagaacttcttagaactcctctccagtccctctgtttgcaaataaaaagcttgaggctgggaagtatatcagaatttttatccagagctttacaatcacctgaatctctatcagtacaaaatgccattgaatatcttaaagtcattggagcatttgatcagaatgaagaattgacggttcttggaaagcacttgtctatgcttccagttgaacctaagttaggaaagatgcttatttttggggctatttttaattgtctggatcccatattaaccatagtttctggacttagtgttagagatccctttttaacccccttcgataagaaagatcttgcagagtcagctaagttgcagttttcatgccgggactacagtgatcatcttgcacttgttcgtgcatatgatggatggagggaggctgaaagagaccgtgctggttatgactactgctggaaaaattttctttcggtgcaaacattgaaagcaatagattctcttcggcggcagtttctctttcttctgaaggatactggtttggttgacgaaaacatgactatgtgcaataaatggagtcgtgatgaaaatctagttcgggcggtaatttgtgcaggactgtatccaggtgtttcctctgttttgaacaaggagaaatccatctccctcaagacaatggaagatggacaggttatgctttattcgagttcagttaatggtaaagaaaccaagattccattcccctggctagttttcaatgagaaggtgaaagtgaattctgttttcctccgggattcaactgctatatctgattctatactgttgttattcggaggctgcataaaacaagggggcttggatggacacttaaaaatgcttggaggttatcttgagttcttcatgaatcgcgatcttgcttcaacttatgtgagtttgaagagagaacttgagaatttaatccattgcaagctccaaaacccaaggatggatatccaaacgagtgaagagctgctatcagccatccgtttgctggtgactgaggatccatgcagtgggcggttcgtgtacggccgacaggagccaagatcaaagaaagcaaagacgatgctttcgccatcctctctgagtgaggctggtggcaacggaggggataatgccaagaaccagctccagacttacctgacccgggccgggcacagcaaccccacctacaagacgaagcagatcaagagctatctcttcagatcgacggttgagttcaacggcatgcagttcgtggggcaaccgtgtgcaaacaagaaacttgcggagaaagatgccgcgagcgaggcactgaactggctcacaggagatggtggagcgattactgactctaggggggctcaggatgcagaccccatgtccttgctgatgcaaccaccgcgtaggcgtcgacatagccatcgtcggaggaactgattagcacgacatgcttttcttcctttttgatcgttttcttatttatgtagcattcgagaagcatagttaagcatagaaggtagcgaggaaaaaatgttatagactcttgaaatgtactacaatagttttgacgtgcagtgcctgtgaattttagagcatggttcgtcagtggtgacggtgagtgatgggctgatggcgtgcgagaatcgcagagaacactagctgtaacggtcgaagggtgatccaattttttttttgctgtgggtactgaattcattatttgttggcgccatattaactgaagagttatgcgtagtgggcaagggcagccacgatgtatgtatttagactaaggtagtctaaatgagggggctcgtgtcaggtatcattgtatgttgtcagatgcggagaactggagactaagactatccgccggttttctctaaatttctaactctatatcaattttttttgtcacat

SEQ ID NO: 33956 - DNA, 4611 bp, Zea Mays
atggctctaaccatggtcacgttcgtcctcaggttcacacacccgtgcgcgtgtgcgggcccgcgttgcagttgcagatgtgtgcgacgcgacacgaccccgcaaaccccacttgtcagcgacctgccctcccactaccagggactgctcacccctttcctcaccgccatccgccatcccatcctatccttcgaaacccgggtagccgccgcaaggaggcactcccccgaccacgccgcgcaatcgccgtcgcgtttctacgccggcgtcagcgttttctctcgctccgcagatccccagagcctcacgttacagcgacgaaccctccgacgagccggcttcccccgccgcgcgcagagcagcggaaccggaggcggattgcacgagacatgtgagcctgctgtcgcggcgacggcgctggtggtgatgctcctgacctccgtcctccggggtcgcgtccgccttctccaccggcaccgctccctgaccatgccctcccctctcttcctctccagaaaccctaatactagcctcggcaccactaacccccacctctcatcgccccccgtgtcggctgcaatgagcaccaccggagtctacgtgccgccgatgcggcggctccgctccgttatcgcgtccaccaacgggagccttgcgccaccaccgtccgccgcggcgcaggcacagcagacgcggacgccagagtggctggtggacgggcgttcgctcagcccccagtcgccgcctcagctgcggcggcgcgatatacctcccttgccgaggccacccctgccagagcattaccggcagcagagcgctgggtttgcccgctatgcatacgatgatttctctgaggatgactcagataaggacattgaccgcacgtcagtttcgagcaagggtgcatctactttagataatgttgatgaatggaaatggaaactgcatatgcttcttcgtaatgatgatgaacaagagattatctcaagggaaagaaaggataggcgagattttgaacaactcgcccaattggctgacagaatgcgcttgcacagccgtcagtattctagagttgttgtgttcagtaaggttccattgcctaattatagatcagatcttgatgataaaagaccccaaagagaggtatctatacctgctggcttgcaaagagaggttgatgctctgcttgcaggctatgttgcacggaagggaacatacattggcaactttcctagttcagctttctcacgatcaagcagcacagacagttttgcaactgatgaaggcttctttgagcagcaagataatcaaacttccactagtgctgtaatggacagaatccaaagaaggaaaagcctgcagttgcggaatcagcaggctgcttggcaggaatcaaatgatggccaaagcatgatggagtttcgtcgcagtcttcctgcttataaagagaagcaaactttattggaagctatatcacagaatcaggtcattgtagtttcaggcgagactggctgtggtaagacgacacaactaccacagtacattttagaatctgaaatcgatgctgctcgtggtgctacgtgcagtattatttgcactcaaccaaggcgaatatcagcaattgctgtgtctgaaagagtcgctgctgaaagaggcgagaaaattggtgaatcggttggctacaaagttcggctggaaggcatgagaggaagagatacgcgccttcttttctgcaccactggagtcctgttgcggagattgttggtggacaggaatttgaaaggtgttacccatgttattgttgatgaaatccatgaaagaggcatgaatgaagattttcttcttattgtcttaaaggatcttcttccacgtcgccctgagctgaggcttatattgatgagtgcaacccttaatgctgagctattctcttcatactttggtggagcacccatgatacatatacctggttttacatatcctgtccggagtcattttctggaagatattcttgaaattactgggcactggttaactccatacaatcaaattgatgactatggtcaagaaaaaagttggaagatgcaaaagcaagctctacaaaagcggaagagccaaatcgcttctgttgtggaagatgctgttgaagctgctgatttgagggactatagttcgcgaactcgtgattccttatcctgttggaatcctgattcaattggttttaatttaatagaaaatgtcttatgccatatttgtcaaaaggaacgatctggtgcaattcttgtatttatgactgggtgggatgacattaatgcattaaaagagcagctccaagcaaatccattgcttggaaatccaagcgcagttttgttgctcgcttgtcatggctctatggccagttcagagcagaaattaatatttgataagcctgagcctggagtaaggaaaatagttcttgccacgaatttggctgaaactagtattactatcaacgatgtagtttttgttgttgattgtggcaaagcaaaagagacatcttacgatgcactgaataatactccctgtctgcttccaacctggatctccaaggcttctgccagacaaagacgaggacgagctggccgagtccaaccaggggagtgctaccatctttatccacgatgtgtatatgatgcatttgctgactaccagttaccagaacttcttagaactcctctccagtccctctgtttgcaaataaaaagcttgaggctgggaagtatatcagaatttttatccagagctttacaatcacctgaatctctatcagtacaaaatgccattgaatatcttaaagtcattggagcatttgatcagaatgaagaattgacggttcttggaaagcacttgtctatgcttccagttgaacctaagttaggaaagatgcttatttttggggctatttttaattgtctggatcccatattaaccatagtttctggacttagtgttagagatccctttttaacccccttcgataagaaagatcttgcagagtcagctaagttgcagttttcatgccgggactacagtgatcatcttgcacttgttcgtgcatatgatggatggagggaggctgaaagagaccgtgctggttatgactactgctggaaaaattttctttcggtgcaaacattgaaagcaatagattctcttcggcggcagtttctctttcttctgaaggatactggtttggttgacgaaaacatgactatgtgcaataaatggagtcgtgatgaaaatctagttcgggcggtaatttgtgcaggactgtatccaggtgtttcctctgttttgaacaaggagaaatccatctccctcaagacaatggaagatggacagagttcagttaatggtaaagaaaccaagattccattcccctggctagttttcaatgagaaggtgaaagtgaattctgttttcctccgggattcaactgctatatctgattctatactgttgttattcggaggctgcataaaacaagggggcttggatggacacttaaaaatgcttggaggttatcttgagttcttcatgaatcgcgatcttgcttcaacttatgtgagtttgaagagagaacttgagaatttaatccattgcaagctccaaaacccaaggatggatatccaaacgagtgaagagctgctatcagccatccgtttgctggtgactgaggatccatgcagtgggcggttcgtgtacggccgacaggagccaagatcaaagaaagcaaagacgatgctttcgccatcctctctgagtgaggctggtggcaacggaggggataatgccaagaaccagctccagacttacctgacccgggccgggcacagcaaccccacctacaagacgaagcagatcaagagctatctcttcagatcgacggttgagttcaacggcatgcagttcgtggggcaaccgtgtgcaaacaagaaacttgcggagaaagatgccgcgagcgaggcactgaactggctcacaggagatggtggagcgattactgactctaggggggctcaggatgcagaccccatgtccttgctgatgcaaccaccgcgtaggcgtcgacatagccatcgtcggaggaactgattagcacgacatgcttttcttcctttttgatcgttttcttatttatgtagcattcgagaagcatagttaagcatagaaggtagcgaggaaaaaatgttatagactcttgaaatgtactacaatagttttgacgtgcagtgcctgtgaattttagagcatggttcgtcagtggtgacggtgagtgatgggctgatggcgtgcgagaatcgcagagaacactagctgtaacggtcgaagggtgatccaattttttttttgctgtgggtactgaattcattatttgttggcgccatattaactgaagagttatgcgtagtgggcaagggcagccacgatgtatgtatttagactaaggtagtctaaatgagggggctcgtgtcaggtatcattgtatgttgtcagatgcggagaactggagactaagactatccgccggttttctctaaatttctaactctatatcaattttttttgtcacat

SEQ ID NO: 33957 - DNA, 825 bp, Zea Mays
cggagaccatcgacatcaattatattcaaattgtacgttgctacttaattgccggccatggacaagaaatcgagttgctaggaacctgcctgggatggactgtattctaatcttatcccttgatactaaatcttatctcatagtaagtgctagcatcatataaaaggcgagctggcaaggaaggagaagacaacctctctgtaagaatcaatacctaccccatggagaagctctcttctcgtcgctattcccggccggcgatgtccctgctgatcatcgtggccatcactatctcctgctccgtcgtccacagttcggaggctccagcccaagtacctcgtctggacggagaccatcagggccaagcgccgccgccaccggatgccggcaaacctcgacagccacagccgccgtgctgtcttcggcacggcgcttaacgtcctaaaatggacagggaggacggaggatacttaagatcaaccaggccgcgacgacaataagtttttaaattttattaggactagtttaggaaccctatttttttaatggatttttattttatcaaaaaaaattgggttcccaaactagttcttaacaatacaaacataagagaatccgtacaccattcgtgtcaaattataagtaatataggtcggggtgcataactgagataatttggttcatttatcatttgtggtcctacgagttcaaccgtgtgtttggtttttcaaggtaacaccactgccactcatatataatcgttgtagtgtcatatgttgttttaactataactagtcggttgcccgtgcgttgcgacggtttaca

SEQ ID NO: 33958 - DNA, 676 bp, Zea Mays
caactgctccactctcccggctccccgcagccccacgtcggcccatccctcgttcccccctgctccgcaagcgacgtgctggtcgcttcaatggcatctcgggcgcccctgccgggctcgccggcctcgatccccatcctcatcctctccttcttccaagggtcggtatgcggcatcacgttcaccttcaccaaccgctgcggcgacacggtgtggccgggcctgctgtccggctcgaggacgccgccgctggagaccacgggcttcgcgctcgcgccggggcagtcacgctctctgtacgcgccgcaggggtggtcgggccgcttctggggccactccggctgcacctttgatgcctccggcaaggggtcctgcgccacgggcgaccgcggctccggcgaggagtttcaagctgcacgtgatagcatgcaagaggttatggtgagaaattcagttgaagctaccacatccttgacaagtacacaacaagggagacacatgagaactggattattcaatgtgtcaactgtgacaccatttccccggcaattttgatcttgccacgtcaaggtcttctccgagtgagtgaattcacattgatagagattgggcatttcgtggacctagaggacaaatcacatccaaaattcgttgatgtggctcctatcaagtgcac

SEQ ID NO: 33959 - DNA, 2492 bp, Zea Mays
aaggaacccacactcgctaatcgcaatcaaagcggccgttttattccgctccacacgctctgcagcgccaccgaccaccgtcaccttcagctgctgaggagagctgatcagccgagctagtcgacgagtcctcacttatatttcacacgcacacgcacccacgccatctcatcaccagatcaccagcagcctacagctctgccatccctctccgcgcggccggtccctcggctctcgccatggccacggcgcacggcggcaggctcttcctcttcgaggccatgctcttctcggcgctgctgctgctgctcctactcctccaggcacacactgcttccgccgcagacggcagcacgtacccagccgactgcccttacccgtgcctgcctccgcccgcggcgcccgccgtcgtcaccgccaactgcccgccgccgccgccatcgtcctcctacaacactccgccttcgtcctcctggagctacccgccgccgccgccgccgtcggggggctacattccctacttgaatcctccagcgggaggcggggcggggtacggctacccggcgccgccgccgcccaaccccatcctgccgtggtacccctggtactacaagacgccgccgccgccgccgtctgcggcggcgagggggaccggttctagtgttcttggcttggccgccgtgctagccgctggccagctgatcgtggcttaggcgcttagccgcagcacctgttcgttttgcttcttcgttcgatattctctccgccctgatgcagcagagctgcagagcatcgctagttcttcatgagagagagacagagagcatcatgtatatgtgcatggacgtggctagtgactacaagaatatttgccttttgtctcggtgcgacggtgcccccctgtccgttttttgttttgtgttacatctgaagtactagttcttcctgtcaacttttaatttgtgtataaacaacattaacgctttatttcttgtttaaaatgctcgataccctgtcaaaatacgctttattcgttcgatactagctaatggtggtacaacactgtacaataagtcgtatcagcgaagaaattgcaaaagttacggcgctgtatcttcaataatataatcctgcacgctgctggtactgtacatgccatggacggatttggtgacgaactaacgaaggcgcgcggtggagctaggcgtcgtttccatgtcgggatctgtcagcggctcaccgcgtcgtggccatcgcaagcaggcctggccctggtttatcaacagcgtttggtggcgttcgtacgtcgatccttccatgcatgcatgcatggtttggggaacatgaagatcagatgacgacgacccagagtggggccggggggcttgattgcttgcttgattgcagctgctacgcagtatgcacatgttgaacgcaaccatgtacacggtccgcgttggacggcaccatcagtccagttccgaccagatgctacggacgactggtacaaaagccgtgaagctaaagttgctcgatcgatcggtcgcttgccttcggaggttccttggcacgcgattccgatccgttagcggcgcgcagagaggcatgcagcagtgccgtcgccgcgaagcttccctgccgccgcgcgaactcttccactaccactgacctgaccgcagcccacagcagtcagcaccggtggacggtggcgatcgagggaagcaagaagaaagggagccacggccacgggcgagcaaagcggagggaaagcgcgcgggagagaaaagaaacaaggaataaagtctactctactttttacaggaggaaaagaaagagaggcctggatcgatcgatccatccatctcctcgtgtaatgtaatgttaggttggcatggcgtggcgcccaaaaggactccccggcgattcgcgagagcgtgccagctgctgcccacacggcaaaaacccggcgacgtcttggtaggtgcagcagtggtgccatggcatggcatgattggaatcccttccccgactgcactgcactgttctgtgcgcgtggtgggtgcgggtcttccaaatacacacattgtattcttcttcctcctgctgactctggttcctggagccgcacggcacggcacggcacggagaatggacaatggtggctgcaagtggaaccataagctagggcaccgacacacgcgtcgacgcgttttctccggcagcactgcgcgcggactctgacgaaaaaacgccgaccgcgaaaatctggcacgttctccgctctccggcatggcacggactctctactcctctttctgttcttgcgtcccgttcacgatgccggtcgatggcaccagacgacaaacgctctatctgtcctgtagtacatatgaacagagcagtaggcaaagacaaggccacggttaccagaaatgcgcgcgggtacacggggtaggcaaagaaaggaaatttcccaaagaattcctcgaaag

SEQ ID NO: 33960 - DNA, 2549 bp, Zea Mays
cttcaacgcaagcccccttgcgccccctcccctattaatgtagctgggataggggctatagtgcccctctatccccttcaccgccttcctcttcctcctcctctcctcttctaatttcttctctctcccgctaaatggatagggacgctacggctgagaccttccccgcagccgcttccttcccacacacgcgcgcgctcggaatactccgaggaaggagctccaggcgacccgcgggcgaccgaaccgccgccggagaaggtacgcgtcgatccgtcatcgcccgcgaatcgtttgtcttcgtccggccggcgagcaccagtgggggtcgtccacgcgaatccgccgtcaagcttcgcggaccggcgacccagccgatccgtgcgaagacgccggcgccgctcgtctctgtccgtcggcacgtcagctgcggggtggaggtcgaagggaggtcatccattcgccaacagatctacgctcagcagatctgcgtcattggagcttcaaggtccaagcttgataaaattatttgattatttgacgtcatcttcaactaattgaggttctaaatcctttttcgctatagtacattgttttttatcaattgcataagtctgtctccatgttttctgtctgtgctttcatgtattctgtgcaactttagcttattatatgcaaccaacagacgtaccaaaggcacgatacatgtgtagaaatactttagcagtgcataatatttcaaccaacagttgtttgctaactgccatcaccacattagtttattaaattgaaatattagtttattatattgcaacccacagatgtttcctaactgccatgaacactttaatttcaccaattaggaacaagactttgcccctaattttttcatgtatgcaccttgtctagccaaggaggtactggttgaggatacgaatcaagatgagcagccatgatgccaaagtgctgcaacacttggtcctcaatcttgcatcctcagtggaaactggtgctttcaatattagaagctttctagaagaggctttccgtcatttgggtgacgagcattaccttctgaatgctctacttgcaattcgaaaggaggtagacctgatggagcaggatgcacttgagagcaaagcaaggtctgacccagacaaggagaggatggaggaacaaattaaccttgcggagcctgtgaagccagtgcctagacaaattactttcaccccccttcctcaccagaattgtatgaggccagtgacaatgactcgtacgactcggacaggtccactaggtatagcatttggaacttgtaattgtgaatggctgacaacaacacaaacacaccttttcgacctactggtgccagccccaattcaggtttctacccatgttcccaaccagactgaccctatcaattttgaatctgaagcagaacacagtgtccaggaagttaatagccctaccaaaccttcagacacacctatcacatttagaaggacaaaggaacagaacttcaaacctgatgaagacctgttgctttgcaaaacatggctagagattagtagtgacccagtcattagcacaggccagaggaaggaggggttatggactagaattgagaaaaggtacaatgaacttagaggtgagtttccaatgagactgaatagggccctgagcagcaggtgggacaaaataagagctgaaacaggcaaatttgttggattctacgctagagtcctaagggaaaaccagagtggcctcacagataacgacaagacttcgaaagctgcaactctatatgcaacgtcacagaaaaagccttttcatttcatgcattgctggacgcggctaaaaaacgaaccaaaatgggatgccatggttcatggaagcccctggagaggcaatgcggggacggagcctgttcgtagtcttacacctacaggttctattaatgatgtcgaatatgacgaaggtggttcaaaaggtaagagaccattaggacgtgactcgaccaaagcatcaaggaagaaggcaatgtccagttcatcccagtctactgactacctgtcaagactccatgacattcaaatagcaagattgaagcaaagtgaagaaaaatcagagctaaaacaacagaacattgagttcatgaaagaagttgaactcaagaagttggaggttcaatccaaggaaatagaagtgcaggaaaaaaaattgatgatggaagacaggaagcaaaaggacgaagagctgaagaaactttatgctatggatatggatgctttaccagaagagttgagagctgtatacatcgcgaggagaaaaggtttaatcgagtatttcatcaacaatcctgtctgaagagtactaatttatttgagaaggtgttgctcacctttgtatcggcgtaccgtggtcctgtgtgtttggacttgtgtgatttcgagtagtttgaacatttccttattagtttgagaacatgagcttggtttttgaacattgtttattttcataatattgatattcataataacgtttttttc

SEQ ID NO: 33961 - DNA, 3551 bp, Zea Mays
cttcaacgcaagcccccttgcgccccctcccctattaatgtagctgggataggggctatagtgcccctctatccccttcaccgccttcctcttcctcctcctctcctcttctaatttcttctctctcccgctaaatggatagggacgctacggctgagaccttccccgcagccgcttccttcccacacacgcgcgcgctcggaatactccgaggaaggagctccaggcgacccgcgggcgaccgaaccgccgccggagaaggtacgcgtcgatccgtcatcgcccgcgaatcgtttgtcttcgtccggccggcgagcaccagtgggggtcgtccacgcgaatccgccgtcaagcttcgcggaccggcgacccagccgatccgtgcgaagacgccggcgccgctcgtctctgtccgtcggcacgtcagctgcggggtggaggtcgaagggaggtcatccattcgccaacagatctacgctcagcagatctgcgtcattggagcttcaaggtccaaggtacgcttcgtcgcatctccaaggtgtacacctcggattgatccgggttccttaaaaaccgtaccttggattaccattagggtttagatgtactttacttctttcagcgctacgatttatgtgttcatcgcctactttgactagttagggttgcggttatgtccgatatccgatgcgcctattgtttatgtacaagaacaaagtttgatattgtggtacacatagatctgaacctatcctcaatcacgttttgctaactgatccgtgctaatgaagtaaaaaatcgatgctacttttagtatggtacaaaggaaacaacattcagacttttgtgtcatttgcatattcctcatcctcgtctactgaagtttgtgtacccaccattttctcgcatgtgaattgatttccagtcatgtggattgtatgttgtttgctcaatgttgctggtagagaaatgcatgttaatgttcctattcgaagaactcagtaccagtaccgttgaattccccaacacaaccccttgttccttccatatcgaatactttaaattggacttagttcctctgtctaagaattggactcagtgacccttcaatttcgagtagtctttccttacatgaccaaccattgcatgcaactaacgaaacctttacttattatgcagcttgataaaattatttgattatttgacgtcatcttcaactaattgaggttctaaatcctttttcgctatagtacattgttttttatcaattgcataagtctgtctccatgttttctgtctgtgctttcatgtattctgtgcaactttagcttattatatgcaaccaacagacgtaccaaaggcacgatacatgtgtagaaatactttagcagtgcataatatttcaaccaacagttgtttgctaactgccatcaccacattagtttattaaattgaaatattagtttattatattgcaacccacagatgtttcctaactgccatgaacactttaatttcaccaattaggaacaagactttgcccctaattttttcatgtatgcaccttgtctagccaaggaggtactggttgaggatacgaatcaagatgagcagccatgatgccaaagtgctgcaacacttggtcctcaatcttgcatcctcagtggaaactggtgctttcaatattagaagctttctagaagaggctttccgtcatttgggtgacgagcattaccttctgaatgctctacttgcaattcgaaaggaggtagacctgatggagcaggatgcacttgagagcaaagcaaggtctgacccagacaaggagaggatggaggaacaaattaaccttgcggagcctgtgaagccagtgcctagacaaattactttcaccccccttcctcaccagaattgtatgaggccagtgacaatgactcgtacgactcggacaggtccactaggtatagcatttggaacttgtaattgtggtacgtagactatggtcttagtggtagtaatgcatcgaaatcaaataagaacttttgtcttatgtctgtgatgcatgggtaaccgatgtacgaatgctcgaaccttatgtttattttgtatgaaccttatgtggaatggttcatccttaagttccttctctatgaaccttatgtggaatgcttaatccttatgttgctttcgtatgaacctttatgtgcaatgcttcatcattgtgttccttttctatgaaccttatgtgcaatgcattaaagtttatactttatagtacaagtctgttatgttgtccaaattaatgtattcatgtatttcattacagaatggctgacaacaacacaaacacaccttttcgacctactggtgccagccccaattcaggtttctacccatgttcccaaccagactgaccctatcaattttgaatctgaagcagaacacagtgtccaggaagttaatagccctaccaaaccttcagacacacctatcacatttagaaggacaaaggaacagaacttcaaacctgatgaagacctgttgctttgcaaaacatggctagagattagtagtgacccagtcattagcacaggccagaggaaggaggggttatggactagaattgagaaaaggtacaatgaacttagaggtgagtttccaatgagactgaatagggccctgagcagcaggtgggacaaaataagagctgaaacaggcaaatttgttggattctacgctagagtcctaagggaaaaccagagtggcctcacagataacgacaagacttcgaaagctgcaactctatatgcaacgtcacagaaaaagccttttcatttcatgcattgctggacgcggctaaaaaacgaaccaaaatgggatgccatggttcatggaagcccctggagaggcaatgcggggacggagcctgttcgtagtcttacacctacaggttctattaatgatgtcgaatatgacgaaggtggttcaaaaggtaagagaccattaggacgtgactcgaccaaagcatcaaggaagaaggcaatgtccagttcatcccagtctactgactacctgtcaagactccatgacattcaaatagcaagattgaagcaaagtgaagaaaaatcagagctaaaacaacagaacattgagttcatgaaagaagttgaactcaagaagttggaggttcaatccaaggaaatagaagtgcaggaaaaaaaattgatgatggaagacaggaagcaaaaggacgaagagctgaagaaactttatgctatggatatggatgctttaccagaagagttgagagctgtatacatcgcgaggagaaaaggtttaatcgagtatttcatcaacaatcctgtctgaagagtactaatttatttgagaaggtgttgctcacctttgtatcggcgtaccgtggtcctgtgtgtttggacttgtgtgatttcgagtagtttgaacatttccttattagtttgagaacatgagcttggtttttgaacattgtttattttcataatattgatattcataataacgtttttttc

SEQ ID NO: 33962 - DNA, 3811 bp, Zea Mays
cttcaacgcaagcccccttgcgccccctcccctattaatgtagctgggataggggctatagtgcccctctatccccttcaccgccttcctcttcctcctcctctcctcttctaatttcttctctctcccgctaaatggatagggacgctacggctgagaccttccccgcagccgcttccttcccacacacgcgcgcgctcggaatactccgaggaaggagctccaggcgacccgcgggcgaccgaaccgccgccggagaaggtacgcgtcgatccgtcatcgcccgcgaatcgtttgtcttcgtccggccggcgagcaccagtgggggtcgtccacgcgaatccgccgtcaagcttcgcggaccggcgacccagccgatccgtgcgaagacgccggcgccgctcgtctctgtccgtcggcacgtcagctgcggggtggaggtcgaagggaggtcatccattcgccaacagatctacgctcagcagatctgcgtcattggagcttcaaggtccaaggtacgcttcgtcgcatctccaaggtgtacacctcggattgatccgggttccttaaaaaccgtaccttggattaccattagggtttagatgtactttacttctttcagcgctacgatttatgtgttcatcgcctactttgactagttagggttgcggttatgtccgatatccgatgcgcctattgtttatgtacaagaacaaagtttgatattgtggtacacatagatctgaacctatcctcaatcacgttttgctaactgatccgtgctaatgaagtaaaaaatcgatgctacttttagtatggtacaaaggaaacaacattcagacttttgtgtcatttgcatattcctcatcctcgtctactgaagtttgtgtacccaccattttctcgcatgtgaattgatttccagtcatgtggattgtatgttgtttgctcaatgttgctggtagagaaatgcatgttaatgttcctattcgaagaactcagtaccagtaccgttgaattccccaacacaaccccttgttccttccatatcgaatactttaaattggacttagttcctctgtctaagaattggactcagtgacccttcaatttcgagtagtctttccttacatgaccaaccattgcatgcaactaacgaaacctttacttattatgcagcttgataaaattatttgattatttgacgtcatcttcaactaattgaggttctaaatcctttttcgctatagtacattgttttttatcaattgcataagtctgtctccatgttttctgtctgtgctttcatgtattctgtgcaactttagcttattatatgcaaccaacagacgtaccaaaggcacgatacatgtgtagaaatactttagcagtgcataatatttcaaccaacagttgtttgctaactgccatcaccacattagtttattaaattgaaatattagtttattatattgcaacccacagatgtttcctaactgccatgaacactttaatttcaccaattaggaacaagactttgcccctaattttttcatgtatgcaccttgtctagccaaggaggtactggttgaggatacgaatcaagatgagcagccatgatgccaaagtgctgcaacacttggtcctcaatcttgcatcctcagtggaaactggtgctttcaatattagaagctttctagaagaggctttccgtcatttgggtgacgagcattaccttctgaatgctctacttgcaattcgaaaggaggtagacctgatggagcaggatgcacttgagagcaaagcaaggtctgacccagacaaggagaggatggaggaacaaattaaccttgcggagcctgtgaagccagtgcctagacaaattactttcaccccccttcctcaccagaattgtatgaggccagtgacaatgactcgtacgactcggacaggtccactaggtatagcatttggaacttgtaattgtggtacgtagactatggtcttagtggtagtaatgcatcgaaatcaaataagaacttttgtcttatgtctgtgatgcatgggtaaccgatgtacgaatgctcgaaccttatgtttattttgtatgaaccttatgtggaatggttcatccttaagttccttctctatgaaccttatgtggaatgcttaatccttatgttgctttcgtatgaacctttatgtgcaatgcttcatcattgtgttccttttctatgaaccttatgtgcaatgcattaaagtttatactttatagtacaagtctgttatgttgtccaaattaatgtattcatgtatttcattacagaatggctgacaacaacacaaacacaccttttcgacctactggtgccagccccaattcaggtaaccagtctttccccccacccatgtgggatcctcagatgtggcagggccaaggtttagacccaacccatccttctacatttactagtcctacatcccatatgagcaatcctacctggtcccagggagctaatgacccatctacatatacctttcgtagtccatgtaacccattttttggtatgatgaatcctgggggtcctccaccacaaacatcattctgtcaaccccagtttgtaccacccattccatgtccacaggtttctacccatgttcccaaccagactgaccctatcaattttgaatctgaagcagaacacagtgtccaggaagttaatagccctaccaaaccttcagacacacctatcacatttagaaggacaaaggaacagaacttcaaacctgatgaagacctgttgctttgcaaaacatggctagagattagtagtgacccagtcattagcacaggccagaggaaggaggggttatggactagaattgagaaaaggtacaatgaacttagaggtgagtttccaatgagactgaatagggccctgagcagcaggtgggacaaaataagagctgaaacaggcaaatttgttggattctacgctagagtcctaagggaaaaccagagtggcctcacagataacgacaagacttcgaaagctgcaactctatatgcaacgtcacagaaaaagccttttcatttcatgcattgctggacgcggctaaaaaacgaaccaaaatgggatgccatggttcatggaagcccctggagaggcaatgcggggacggagcctgttcgtagtcttacacctacaggttctattaatgatgtcgaatatgacgaaggtggttcaaaaggtaagagaccattaggacgtgactcgaccaaagcatcaaggaagaaggcaatgtccagttcatcccagtctactgactacctgtcaagactccatgacattcaaatagcaagattgaagcaaagtgaagaaaaatcagagctaaaacaacagaacattgagttcatgaaagaagttgaactcaagaagttggaggttcaatccaaggaaatagaagtgcaggaaaaaaaattgatgatggaagacaggaagcaaaaggacgaagagctgaagaaactttatgctatggatatggatgctttaccagaagagttgagagctgtatacatcgcgaggagaaaaggtttaatcgagtatttcatcaacaatcctgtctgaagagtactaatttatttgagaaggtgttgctcacctttgtatcggcgtaccgtggtcctgtgtgtttggacttgtgtgatttcgagtagtttgaacatttccttattagtttgagaacatgagcttggtttttgaacattgtttattttcataatattgatattcataataacgtttttttc

SEQ ID NO: 33963 - DNA, 1740 bp, Zea Mays
cttcaacgcaagcccccttgcgccccctcccctattaatgtagctgggataggggctatagtgcccctctatccccttcaccgccttcctcttcctcctcctctcctcttctaatttcttctctctcccgctaaatggatagggacgctacggctgagaccttccccgcagccgcttccttcccacacacgcgcgcgctcggaatactccgaggaaggagctccaggcgacccgcgggcgaccgaaccgccgccggagaaggtacgcgtcgatccgtcatcgcccgcgaatcgtttgtcttcgtccggccggcgagcaccagtgggggtcgtccacgcgaatccgccgtcaagcttcgcggaccggcgacccagccgatccgtgcgaagacgccggcgccgctcgtctctgtccgtcggcacgtcagctgcggggtggaggtcgaagggaggtcatccattcgccaacagatctacgctcagcagatctgcgtcattggagcttcaaggtccaagaatggctgacaacaacacaaacacaccttttcgacctactggtgccagccccaattcaggtttctacccatgttcccaaccagactgaccctatcaattttgaatctgaagcagaacacagtgtccaggaagttaatagccctaccaaaccttcagacacacctatcacatttagaaggacaaaggaacagaacttcaaacctgatgaagacctgttgctttgcaaaacatggctagagattagtagtgacccagtcattagcacaggccagaggaaggaggggttatggactagaattgagaaaaggtacaatgaacttagaggtgagtttccaatgagactgaatagggccctgagcagcaggtgggacaaaataagagctgaaacaggcaaatttgttggattctacgctagagtcctaagggaaaaccagagtggcctcacagataacgacaagacttcgaaagctgcaactctatatgcaacgtcacagaaaaagccttttcatttcatgcattgctggacgcggctaaaaaacgaaccaaaatgggatgccatggttcatggaagcccctggagaggcaatgcggggacggagcctgttcgtagtcttacacctacaggttctattaatgatgtcgaatatgacgaaggtggttcaaaaggtaagagaccattaggacgtgactcgaccaaagcatcaaggaagaaggcaatgtccagttcatcccagtctactgactacctgtcaagactccatgacattcaaatagcaagattgaagcaaagtgaagaaaaatcagagctaaaacaacagaacattgagttcatgaaagaagttgaactcaagaagttggaggttcaatccaaggaaatagaagtgcaggaaaaaaaattgatgatggaagacaggaagcaaaaggacgaagagctgaagaaactttatgctatggatatggatgctttaccagaagagttgagagctgtatacatcgcgaggagaaaaggtttaatcgagtatttcatcaacaatcctgtctgaagagtactaatttatttgagaaggtgttgctcacctttgtatcggcgtaccgtggtcctgtgtgtttggacttgtgtgatttcgagtagtttgaacatttccttattagtttgagaacatgagcttggtttttgaacattgtttattttcataatattgatattcataataacgtttttttc

SEQ ID NO: 33964 - DNA, 485 bp, Zea Mays
ctggcactggcacacacagtacagcctcatcgccacttaccaccgtctaacgaaaaagcatcgacgagcgaagcgaaaaagatgccgccagctctgcggcgaacgatcctgctggccgcggcggcggcgacgacggcggtgctgctgctgtggccggccgcctgcgtcgcggacgacgacggcacgacgttcccgccgtcggcgttccccttctgcccgacgcggccggccggggtctccacggggccgttcccctggtcgccgccgccgccgtcgtcggtggcggtgttcccgcaggatccggggttcttgacgtcggacgcttgcgcggtgccacggctgccgctgctcgctgtgttctctgttctcttggtgtttttgcagtgactcgctcgcggttgctgccctggactggatgcatatctatccgtagctgcccagttcagaaaattaagtttttgcagagtgtgactctcgacaaagaa

SEQ ID NO: 33965 - DNA, 4101 bp, Zea Mays
cccagtcctagtcggataaatattataagcaagtgcctcttgaatcaaatctcgggacccaattttctataaactgtattaaaggctttgtagcactctttagcagtctcacttagttcgtacttcggtcattttagaccaaagctaatccttaaaggactcatgtgtgacagccctcccaagttatcgggcccacgtgcaccaatccttgccttaatggcctcgggtggctatgcacgtgtaccgggtaacttaacaaggctatcgagttcgccaactggaactcatcatcccaaggatctcccacacaacaggtatattacagtaatcacatttgatacacacacattggagatagagcggaaggcttttacaaagtacactttacattccagaactcaagttttacaaggtagaaagagatgtatttattacaagtcctgatagtacccaaagtgcataacttattacaataattggaacggtgaagcctttccataagagatacacataaacattctaagcttcaaggcctccacatgaagtaactaaccaaaagataagggaataaaacttctcctgcaaaaacaacaggggataaaaccctgagtacgcaattactcagcaagacttacccgactaaagaaaagactctcaagggtatgctagttgattgggaatcaaggtaaggtttatcaatgatcaaagactccttttgcagaaaagcttgctaccagttgatccttaaaccaagttttatttcactagttaggttattacctgcatctatatttgcctagtctatttcaagcacttggcctatactagctgcattttattcattctcatatttcacttgctaactacgatgatggtcaccgggatgagtctccataaccgaggagcaacgatgattcgaaccgattatacccagctggggatctctaaccacacgacatatgtagcacttaacccttgcatatgtcaaccgttcccatggagtcctccactacatgaataggtccgcgccacccgagagcacattacctaccaggcgtgcgctgtgccaggagggtacatgctactcccgccatctctccactcccagtgcgcgattgtctcttcacgtatggaatagccgggttcaagcttaccctgtcccataccagggtatgtggctagttgcaaagtctcaaccacaataggccagtcaacggtacggtccttaatcgacacagacgggcgactctgtctgctcagcgcctggtctagatttattaatcatttccccatttttggtacccggcaggggtactcttttccaatgatgagcccactccggccgaagtggagtcatcaccttagtttcctttgatttttgaataaaaagcccataaccaatgttccacaatcattctttttgaaaacaaatgatttttcagtttttaagcagggctaagcaatatcagttctctttataaaacagggattaaggagtttccaaggaatggtaatgcatcaatttttcatcacacaactcctatcacctaatgcatcagataaggtgaaaaagcatttaaaacataaggaaggggcaaatgcaccggggcttgcctttgttgcagagaagaggttctagatacttctaacacgatgatcagttagatggctccatccacttgatgaacaggcactggagtagacttcttgttcaaacatcacttcttctaggtgttctacaagtcaattacagatacatggatgcttatgtaatgatatgaaatgcaaactctcataaaggagaggtggggaacataaacacctctaactaagcgcatgacaagcttacccatacttaacttaatattttatctaaaggtctaaactgaatttagttagacaaactagagtactaaacatactaaggttcattaaatttgctacccaacaatttatagggtctaacttcgctacaacatatattaacactacttgtgtggcttttatatttcctcttttagctatttcaatgttctctagacaaaccaactctaaatacactaaaacttttactcagcactgttttagacacagtaaacctacccataaatccaaacgctagagcggctgcctaccttcaccacgggcgccgacgtttgagcagagggggaaaacgcgagcaggcaggatggaggtcgcaacgcagacgaggttggagagggtcgatgacgactgcggcgtggacgaggaggcaggacaacgacgagcagccgagcgcgaccgacagcgagtgcgcatggtcagacgatgagcgagtagggtgggcgagctccagatgcgggagcagcgtgcatagcgtcctggtgacgcccagctgcggaggatgtgaggccaagcaaggatggcagtgcgttcgctgctggaggcaagaaagccggcaatgcgaagcaaaacaagacggcgcacgggagaagctgctggggctgagcgtggtgccgcgaacggggctgcaagcgcggcgactccgtgcaacgcacgaaaaaaagggctgcgcttcaacacggtgagcaggatgaactctcagccaggaaacgcaagaagctcaacggcggtgttagacaaaggaaaaacagagaacgcactccatctagcctatccggatgaagatatttcccaactcacgacacgtcacaagccatcgcaagaggcaagcagctgcgtggccatgcatgggcatagggcgaattcaggtggcgacggtcttattaggacagaacagacagacgcataacaggtgggccaccgcttaactctatccattttgcatcaacttttgcccacttttgttatctacaacgagtccttcccttacctatgttggttcactgtcatacgccatccaaccacagttacaaagccccagctaaacatagggagtgaggagcttaaaacaccatgaactccagctctccaaactgaattcgaacagactgaaccacggtttcagccacctagactgaacctctactgttatcctaccaaaatctcactacttcaagtggtaacaaagggatcaactttaacaccaattgtttaccatattatcctctaactaattgttgtaggggctgtaggccataacaccatgaatcagtcacaaaacagctccaaagaccgaataaaactcattgcacccacgtcaactgaacaaagttcagttctctgaatctaaaccttaggccacactgcacccttcctgttaatcctcattttctcacaaatttcaatgacaccagaccaacccagttggccaaaaatgctccccaaccatagcactatcaggttactacaacaatccaaagtctagctcacacagaacaaaagttacaaatgctcaaagtgaacccaatccactgaatatcgttttcagttaactgaaaacaagaacctgacagaaagcactttggaatagatttactcccaactttgtgtagcaccaagctaagcacctctaagtaaagttgttcactaatacttggtctccaaccttgctacacaaggcatgtctcacaactgcatagaatagtcccaaaggaagttcaaagttgaggcaacatgactgaaattcagtctggattactgaacaacatgcaatgctcttttgcctgacagcacaaatttgtgcagtttgagcatgccgaccccctcccccttgctgtccaaactgaaacaaattcagccccacacgcccagttactggattggcttggattcccctttcaactaccagccttccgcatcttaaagcacaacttcaattcactaaaacaatgggcgaatggttgcagcgtgcagagctttctgctcccaaaaactgaatccagtttccagtcacttgaaacagaattcagcactaatcaactgaagacctacctttaacccctttgatcctccctagtgcaagcaatacatgccaatcttagttaacaaagattgttcccaacacatagatttaaatgtttgctgcagcagccttaggtcaaacattcatggatcaaaagttatggtgctccaaaatggtgtgaaaatacaagaattcag

SEQ ID NO: 33966 - DNA, 1963 bp, Zea Mays
cgcacgtagtacatacaggtcacccgtttcgatctcaattcgtgtactagtataatagtagtagctaggattaagttagcaagacaggagctgtgaggggacctgccggtatactactatctaaccttggctgcagctgcaaccctcctcctaccttggtttctctatcccctctcctctgatcggctggtccccgttgcattggccttggcccttgccatgccaacctcatcaacgcctctcaactctagctagccagccacacctcctctgctctggtcctccccgccattagccggtagctgcctaagctgctaaccttgctatcttagctacttctactagtctagtgcgtattttgtgtcctgtacatgcttagttcgtcccccgccccgacctaacgtgcgagtgccggactgctgcggaaggaaggaagggagggaggaggccgggcatcagggacaaggaagactagctcgacattaatttcgttccggtaaggggaatccggaatcgttcggcatggataatcagcgagccacctcaacctcaaagggaatcggctgctagctaggagctagcgaggaggagggttatcggctcctccggcaatcctgaggccggctagctgagggcgaggcagcgtcacgcccgtccgtatgcatggagagccagagggtggtggtggtggtggaggacgcgggcgccgcgcggtcggcgctgcagtgggccgtcggcaacttcatccgcggcagcgactccatcacgctgctccacgtctgcccgccggcgcggtcgcgcaggaagcgccgccgcctccgcctcggcggcttccagctcgcgctcgccttcaaggacctctgcaacggcatcgccgaggccaaggtggagatcgtggtgacggagggggagctcggggagacggtggtggcgacggtgaaccagctcggcgcctccacgctcgtcgtcggcctccacgacaagagcttcctctacaggtgaaccatgaattcgtattccgtttgtctcttgtgaactctgagcatgcaagctcgatccagaacccgttgttggactgaatctttcgcttgtttattacggcgggtgcgcgcagcagggcgccgagccagtacagccgagtcatcaggagcctgggctgcagggtcctcgccgtccggcagcacgccacggcgcgggacggcttcctgaacgccgagctcacccagatcgagaccgtgaacctgcagtaagcaagcaccacctgtctgttggcttggttcgttggctagctagctagcaagcaagtaaagcatgcgccgggtttttttttttcttcttcttcttcgtcagaatagaaaacaacgggcgggcaatgggttggttcagctgctgagcatggcactgacacccttggattcctgggctccgatcgagattagcataccaccgccaaagatcccgttcccgatgttcacgctcccccttggcgtgatatggagaagatcgaagcggagaaagtgatactcaaactgcggggaagacggaggaacagcagaacaggaacagcacggcaggcatagctgagcctgtcctgatggctagtagatatatacacgtacacgcacgcgtgcacatcaacggaggcgcagcaaatctgcggattgacgtaactgtaatgacgacagcggcaggcacagaatgttagagaggaagggtatactccagctccgggaaagacggccccgtacttgtattattagatgattaatcgacaggttggtttactggaaactagaggagccattctgttttctgaagaaaaagaagaatggagcaaggttagaggactgccggttctgatgttaagtctgtaacctctcacgacctgatgctctgttatccttaaaattgatctaagttagaaaacttcaaaactaaagaggttttggtttctaaagactaa

SEQ ID NO: 33967 - DNA, 1701 bp, Zea Mays
cgcacgtagtacatacaggtcacccgtttcgatctcaattcgtgtactagtataatagtagtagctaggattaagttagcaagacaggagctgtgaggggacctgccggtatactactatctaaccttggctgcagctgcaaccctcctcctaccttggtttctctatcccctctcctctgatcggctggtccccgttgcattggccttggcccttgccatgccaacctcatcaacgcctctcaactctagctagccagccacacctcctctgctctggtcctccccgccattagccggtagctgcctaagctgctaaccttgctatcttagctacttctactagtctagtgcgtattttgtgtcctgtacatgcttagttcgtcccccgccccgacctaacgtgcgagtgccggactgctgcggaaggaaggaagggagggaggaggccgggcatcagggacaaggaagactagctcgacattaatttcgttccggtaaggggaatccggaatcgttcggcatggataatcagcgagccacctcaacctcaaagggaatcggctgctagctaggagctagcgaggaggagggttatcggctcctccggcaatcctgaggccggctagctgagggcgaggcagcgtcacgcccgtccgtatgcatggagagccagagggtggtggtggtggtggaggacgcgggcgccgcgcggtcggcgctgcagtgggccgtcggcaacttcatccgcggcagcgactccatcacgctgctccacgtctgcccgccggcgcggtcgcgcaggaagcgccgccgcctccgcctcggcggcttccagctcgcgctcgccttcaaggacctctgcaacggcatcgccgagtcggtcgacgtccgggtccggctgacgatccggaggatgcgctgcaggccaaggtggagatcgtggtgacggagggggagctcggggagacggtggtggcgacggtgaaccagctcggcgcctccacgctcgtcgtcggcctccacgacaagagcttcctctacagcagggcgccgagccagtacagccgagtcatcaggagcctgggctgcagggtcctcgccgtccggcagcacgccacggcgcgggacggcttcctgaacgccgagctcacccagatcgagaccgtgaacctgcacataccaccgccaaagatcccgttcccgatgttcacgctcccccttggcgtgatatggagaagatcgaagcggagaaagtgatactcaaactgcggggaagacggaggaacagcagaacaggaacagcacggcaggcatagctgagcctgtcctgatggctagtagatatatacacgtacacgcacgcgtgcacatcaacggaggcgcagcaaatctgcggattgacgtaactgtaatgacgacagcggcaggcacagaatgttagagaggaagggtatactccagctccgggaaagacggccccgtacttgtattattagatgattaatcgacaggttggtttactggaaactagaggagccattctgttttctgaagaaaaagaagaatggagcaaggttagaggactgccggttctgatgttaagtctgtaacctctcacgacctgatgctctgttatccttaaaattgatctaagttagaaaacttcaaaactaaagaggttttggtttctaaagactaa

SEQ ID NO: 33968 - DNA, 2209 bp, Zea Mays
cgcacgtagtacatacaggtcacccgtttcgatctcaattcgtgtactagtataatagtagtagctaggattaagttagcaagacaggagctgtgaggggacctgccggtatactactatctaaccttggctgcagctgcaaccctcctcctaccttggtttctctatcccctctcctctgatcggctggtccccgttgcattggccttggcccttgccatgccaacctcatcaacgcctctcaactctagctagccagccacacctcctctgctctggtcctccccgccattagccggtagctgcctaagctgctaaccttgctatcttagctacttctactagtctagtgcgtattttgtgtcctgtacatgcttagttcgtcccccgccccgacctaacgtgcgagtgccggactgctgcggaaggaaggaagggagggaggaggccgggcatcagggacaaggaagactagctcgacattaatttcgttccggtaaggggaatccggaatcgttcggcatggataatcagcgagccacctcaacctcaaagggaatcggctgctagctaggagctagcgaggaggagggttatcggctcctccggcaatcctgaggccggctagctgagggcgaggcagcgtcacgcccgtccgtatgcatggagagccagagggtggtggtggtggtggaggacgcgggcgccgcgcggtcggcgctgcagtgggccgtcggcaacttcatccgcggcagcgactccatcacgctgctccacgtctgcccgccggcgcggtcgcgcaggaagcgccgccgcctccgcctcggcggcttccagctcgcgctcgccttcaaggacctctgcaacggcatcgccgaggccaaggtggagatcgtggtgacggagggggagctcggggagacggtggtggcgacggtgaaccagctcggcgcctccacgctcgtcgtcggcctccacgacaagagcttcctctacagcagggcgccgagccagtacagccgagtcatcaggagcctgggctgcagggtcctcgccgtccggcagcacgccacggcgcgggacggcttcctgaacgccgagctcacccagatcgagaccgtgaacctgcagtaagcaagcaccacctgtctgttggcttggttcgttggctagctagctagcaagcaagtaaagcatgcgccgggtttttttttttcttcttcttcttcgtcagaatagaaaacaacgggcgggcaatgggttggttcagctgctgagcatggcactgacacccttggattcctgggctccgatcgagattaggtaactcggacatcgtgaatttcatgataaaactatgcctagcctaggcgcttccaaaatgcaaatggagttggccccgccccggctctgacgatttttttgaaaccgatgttcgtgagagggggcggcgttcagggttgccgccgggcgccggcgagtcgagcccttttcgcgcctgtcgatgtgttagctcactgactaaaattccaaaatgccgcagctttcgtactaaagaaaaaaaagtttaaaagctaagcagttagcagtacgctgataatggtacagctttcagtttgagtatcgtctggctctctggctgccaacaacgccactgacctacacctttttttttttttttgcagcataccaccgccaaagatcccgttcccgatgttcacgctcccccttggcgtgatatggagaagatcgaagcggagaaagtgatactcaaactgcggggaagacggaggaacagcagaacaggaacagcacggcaggcatagctgagcctgtcctgatggctagtagatatatacacgtacacgcacgcgtgcacatcaacggaggcgcagcaaatctgcggattgacgtaactgtaatgacgacagcggcaggcacagaatgttagagaggaagggtatactccagctccgggaaagacggccccgtacttgtattattagatgattaatcgacaggttggtttactggaaactagaggagccattctgttttctgaagaaaaagaagaatggagcaaggttagaggactgccggttctgatgttaagtctgtaacctctcacgacctgatgctctgttatccttaaaattgatctaagttagaaaacttcaaaactaaagaggttttggtttctaaagactaa

SEQ ID NO: 33969 - DNA, 1354 bp, Zea Mays
tcgtttcgcgtcctagcccaggacaagttccctttttcttctcccaagtctgcgactaggaggcgacgggccgacgggccaagtttcctttctcttctcagtctgcgactggcggcggcgaccatcacgcacaagccttcgttgctacctgcgctccgccaattcggtgaattgcagtctaagcaaagggaaaaggaaggatcttttctccagacttggtaattttggacgacaaggttttgtattatctgatttttcgggatggatgccaaaaggttcctgcatctggtcgaggagaagaaaagaagggtcctcgagaagaaagaagccccactaaagtgggagcagaagctagaaacagcagctaaggccaaggttgatgcagaagcaaagcgatgttgatcgaaaacacttgaagaggaagaaccgcagaaggaacaagaagcatgagcattctgactctgatgatgccaggagacgcaatcgtagatctagaaggagcaccgactcaagtgatgagagcaacagtgaatacgagaccaggtctgaagaagaacgtccaaggaagaagcgctcgcacagaagaaggcatcaccggcactcttcaaagtcagactctgaaaactacagcagtgatgaggaacaacggagacctgccaaggaccattctcagagccgcaggcggcaccatcggtcatctgatgatgactcagacaaggacaaggtcaagtcaagacatgggaagggtctgagatctcgtgacgaggatgcaagagcagatttcaacagcaataagcatctcaggagccaatccttggaggagtcatcagatgatagagatgctgatgaatctgagaagatgaggaatggcaaaaggtctcacaagaatggcggccaccgtcaccatcaccatcgacaccaccatgaatgacatagtaactctgcagaacctaatgacaggaggcaagtactgaaagatggccagagggcccttgaaggtgacagcgcatactgaagatatcccagcaaggtcgagttaattgtccttattaaggacatgaagatcatttttttttcgttcctgatgttctcagataattattgtattgctgacaacatttctttgatttgtgaatatactaaacatgttgcctatgcatttgcttagatgtccgatctccgaaggctgaagtcgataaaagggctagaacggagacatttgtgtcactgtagtggtgcaatttaagtattagatcattaagacaccatagtgcaacagactctttgaacacgtctcaattaaacaccatgcatcgatatgctccattccactcaattaattcagaattctgac

SEQ ID NO: 33970 - DNA, 2289 bp, Zea Mays
ctcgtttcgcgtcctagcccaggacaagttccctttttcttctcccaagtctgcgactaggaggcgacgggccgacgggccaagtttcctttctcttctcagtctgcgactggcggcggcgaccatcacgcacaagccttcgttgctacctgcgctccgccaattcggtgaattgcagtctaagcaaagggaaaaggaaggatcttttctccagacttggtaattttggacgacaaggtaacaaagtgtataatcgtgcatagtctgtgttcgtttcttggtagcggctgtcttagcttctcctattgttaaccttctcagtgtggtacggtgattttataaacatgtaactacagctagttccgagctcttattactgtcacttggagatataaagataacataaaaagggcagacctcccgaggagtggtgtttgggaaagggataaaccaaggcatgcctccccgcagatgcggattagctgctttgaacccgcgacccagttacctattgagacaactctcatacaccaggcccaccctttttatataagataagatgttgggagttaaattaatttggaagtctgtgtctcttttgctgcgcccagattcataaccataatcatgtttaaacaagtgctgtgtgaagagccatatttctcacataagttttttaggatattgtgtatagttgtgatataattgtgatatctgtgagatcccttttgttaacatagttttatgagcttggaagcttagaagccatctagctttgaacatgattgattgatcactctccatagaaagttgacttgaacattaagtgaactgcgtgagtattatctgagaatactttgattacatttgatgcttaaactagctcaaagtgtctccaagtaatttgtcgttaggaattaattcactgcattttgttatgtctatacatggaagtttgttgtataaatcttttaatctatctgattagatgtacatctctactgatgtgctatataactttagatgttcaaaaaactaacagtgtttttctctcttctatgagatgcacttccttgcatcatttcatgtccctacaggttttgtattatctgatttttcgggatggatgccaaaaggttcctgcatctggtcgaggagaagaaaagaagggtcctcgagaagaaagaagccccactaaagtgggagcagaagctagaaacagcagctaaggccaaggttgatgcagaagcaaaggtgaagaagctaaattcaagaaagcacaggaggagaggagatttgtcctcagactctgatagtgactatggcagcgatgttgatcgaaaacacttgaagaggaagaaccgcagaaggaacaagaagcatgagcattctgactctgatgatgccaggagacgcaatcgtagatctagaaggagcaccgactcaagtgatgagagcaacagtgaatacgagaccaggtctgaagaagaacgtccaaggaagaagcgctcgcacagaagaaggcatcaccggcactcttcaaagtcagactctgaaaactacagcagtgatgaggaacaacggagacctgccaaggaccattctcagagccgcaggcggcaccatcggtcatctgatgatgactcagacaaggacaaggtcaagtcaagacatgggaagggtctgagatctcgtgacgaggatgcaagagcagatttcaacagcaataagcatctcaggagccaatccttggaggagtcatcagatgatagagatgctgatgaatctgagaagatgaggaatggcaaaaggtctcacaagaatggcggccaccgtcaccatcaccatcgacaccaccatgaatgacatagtaactctgcagaacctaatgacaggaggcaagtactgaaagatggccagagggcccttgaaggtgacagcgcatactgaagatatcccagcaaggtcgagttaattgtccttattaaggacatgaagatcatttttttttcgttcctgatgttctcagataattattgtattgctgacaacatttctttgatttgtgaatatactaaacatgttgcctatgcatttgcttagatgtccgatctccgaaggctgaagtcgataaaagggctagaacggagacatttgtgtcactgtagtggtgcaatttaagtattagatcattaagacaccatagtgcaacagactctttgaacacgtctcaattaaacaccatgcatcgatatgctccattccactcaattaattcagaattctgac

SEQ ID NO: 33971 - DNA, 4903 bp, Zea Mays
ttgaatctgctcgactacttcatggtcggctcagccacagcatatgtctgtgcctggttcagcgtctgcggccgcaccgccgcctcaggctggcgctgctccgccggcgcagccgcagcagccgtccggtgcggcctttaccaaccagaagctgacgacaaatgatgcgctcgtctaccttaaggcagttaaggataagtttcaggacaaacgggagaagtacgaggagttcctcgaggtcatgcgcgacttcaagagcgagaggattgacaccaatggagtgattgtccgtgtcaaaacgctgttcaacgggtaccctgaactgatccttgggttcaacgccttcttgcctaagggctatgcgatcaagctacaagaagagaagaaacctgtcgattttgtggaagctatcaatttcgtgaacaagataaagaatcggtttcagcatgatgaacaagtttacaaggcattcttggacatcctcaacatgtaccgcaaggataataagtctatccaagatgtttaccatgaggttgctatgctgttcaaagaccataaagatttgcttgaagagttccagcacttcctgcctgatacttcagtggctccacaagcagtggcctcaaagggtggtttggttaagcgggaggacaggagctctttagtgcctcctgcaaataagatccttcacaatgataagagggacagagtttacctgtcacatgctgaccgtgattttagtgttgaccgtcctgatgtggagcatgatcgccagagaagacgtcttgataaagacaaagaacggaaggtggaaagggacagaagggattatgagagagaagacaaggatggtgaacatgacagcagagacctggagctaggacagcgtaagcgaaagcctttttcaaggaatatcgaggataatgtaggtgctgagacacaccaaggaggccccagtgagaatcatggaatccacagtgtatctgcttcatcatatgacgataaggatgcgctgaagagtgtatacacacatgagttccatttctgcgagaaggtgaaggaaaagctggagcatgaagcttaccaagagtttttgaaatgtctacacatctatagccaagagattatcacaagaagtgaactgaagaacttggtgaatgatatactccaacattatccagatcttatggaagggtttaacgaattcttggagcattgtgaaaatatagatggatttcttgccggtgtcttcaacaaaaggccaagcacgagggctgttaaaactgaggataaagaaaaggatagagatcgggacagggaggacaaggatagagatcgggaaaaggaaagagaaaaggaacgagaaaggctcgataaaggatcaacattcaattcaaaggaaggttctagtcacaaaccttctatgttctctggcaaagagaagtacaacctatccaaaccaatatcagagcttgatctctcaaactgtcaacgctgcactccgagttaccggcttctacctaaaaattatcccatgcccccagccagcaacaggactgatcttggagcttctgttctgaatgatcactgggtatcagtgacatcaggaagtgaagattattcatttaaacacatgcggaagaatcagtacgaggaaagcttatttagatgcgaggatgacaggtttgagttggatatgctgttggaatcagttaatgcagcgactaagcgtgttgaagagctgatagagaagatgcaggacaactcagtcaaacctgagagcccaatacgcatcgatgaacatttgactccgttgaacctgaggtgcattgagcgactgtacggtgatcatggtctggatgtgatggatgttctacgcaaaaatgctagtgttgcattgccagttattctaactaggctcaaacagaagcaggaggagtggtcaaggtgtcgatcagatttcaacaaagtttgggccgaaatatatgccaaaaattatcacaagtcacttgaccatcgtagtttctatttcaagcagcaagatacgaagaacctgagcacaaagtctctcctgacagagataaaagaaattaatgagaagaaaaggaaggaagatgatgtgctccttgccattgctgctggaaataggcggcctatagttcccaatatgtcattcgagtatatagactcggaaatccatgaagatctacataaaatcattaagtactcctgtgctgaagtctgcaactcttcagatcaattagataaagtgatgagagtatggacaacttttctggagccagttttgggtgttcagcaaaaacatgggtctgaggatcctgatctagttaagaccaagagccgaacaacaaaattgggtcttgcaaatgtgagagaaagcaataccatagctgggattgtctccaagcaaagcaatggcgatgaaagtgaacaaggtccgtcatctcgggctagattagcaaatggagttgcagcgggcactcaaaatggtttccatgatgcagatcgaattgcccgtaaaggtgaagaaccatcaaacgctatactaaatggaagagtgcatggtgctgtctctgcagatgaaacactttccctgatcacacaaaacattgcttctaccgagcgaccagcagaaaatgctgctgctgttaggactgagcaacataaggcgaacttggtacttacgccaggcatgaatgcttctagaagttctcatgatgcagttgaggtggctggtgaaggcaagactggcaatgaaacattgctttctgccgagggaggggagaggttgggaccatctttaaatggcaccagcgagggaattaaagggcgcctaaataatgatggttctgtgccccacacttcaaaagttgaaagagaagagggtgaattgtcgcctaacggagattttgaagaggaccattttgttcctttcgaagatggaacatctaaaggaaaggaagattctacaagcagaccattccatggtaggcctggggaagtggtaccctcttctgccgaggcagctggtgagaatgatgctgatgctgatgacgagggtgaggaaagtgctcagaggtctactgaggacagtgaaaatgcttcagaggcgggtgaagatgcatcgggtagtgaatctggtgatggtgaggaatgctctcgtgaagatcatgatgaggaagaagaggatatggatcacgatgatcaggatgcaaaagctgaaagtgagggtgaggcagaaggaacaactgaaacacatgatgtggaagggggaatatcactaccactttcagaacgctttctgtactcagttaaaccacttgccaagcatgtacctacagctttacatgatcgagagttctcacgtgtattttatggaaacgattcattttatgtgttgttcagactacatcagattttatatgagagactactttcagcaaaaactaattctttcactgctgaaaagaaatggaggaattctaaggatacaaaccctcctgatttatatgcaaagtttatgagcgcgctgtacaacttgcttgatggttcctctgacaacaccaaatttgaggatgactgccgagctattattgggactcaatcatatgtcctctttactttagataaactgatttataaagttgtgaagcagcttcaagctatagcaacagatgaaatggacaataagcttctgcaactatatttatatgaaaaatcaagatctcctgggaggttctttgacctagtttatcatgaaaatgcccgtgttctactccatgatgagagcatataccgatttgaatgttgctcgagtccgacaaggttgtctattcagctgatggaatatggtcacgaaaagccagaagtgactgcagtatcaattgaaccaaatttttcttcgtatctttttagcgagtacttgtgtagtacgccagacaagaaattatctgaaggcgtctaccttggaaggaataagcggaaatattcaaataatgatgaaccttcagattctttgaaggcaatggatggtatcaatgttgtgaatggtcttgaatgcaagatatcctgcaagacctcgaaagtttcatatgtccttgatactgaagatttcttgttccggcttcggaagagaaggaaaattttgcggggcgggaatgtgcccgaccgtttgcagatttcatcaatatctgctgcaaaagtgcagcgcttcaataggttcctatccaaaccataggatcatttggcatacaaatgtatcgaaacctgttgctggggtcccagctgcttggcttgaacaatgattccatcgacgtcgcggagtcccctttcggaataacagatgggaagacatagggtaaatacagcaaagcgaagcgagcatgtaggccacagtagtcagtctgttgttccgaaagatgtgtatatatgtattagcagcatgattgttctgattatctttttactgattttcgatggtaggtctattccatcaagtatttaactaatcatttgttgctgttggtataggtcttttgttcttttagccgtcgttttgcattgaagatatgtagccaaaattaaaaacctgtgtcgaacagttatgtagtcttggctccattaatcaaacggacaccgtaatttcttggagccttttggtgaggttgccagcaacctctcttgtgtatccaattcaattgaagtataggatgtgtgttacttcttgatgttgtgtaaggtggccgaaattagtggacgtgccatccactatttttactattagattagaacatatctataaaatctagagaatgtgtaaaccgtttagtcttgttcgccatattgattatcattttaatgtattggcatggatggatggaaa

SEQ ID NO: 33972 - DNA, 4990 bp, Zea Mays
cgcgcggaggcggggaggaggtcgagctcgcctggtgctgcatgggggcatgaagcgcggcaccagggacgacgccctcatggggtcccagctcaaacgctcgaacgttgtccgatccgatccgtcggctcagccacagcatatgtctgtgcctggttcagcgtctgcggccgcaccgccgcctcaggctggcgctgctccgccggcgcagccgcagcagccgtccggtgcggcctttaccaaccagaagctgacgacaaatgatgcgctcgtctaccttaaggcagttaaggataagtttcaggacaaacgggagaagtacgaggagttcctcgaggtcatgcgcgacttcaagagcgagaggattgacaccaatggagtgattgtccgtgtcaaaacgctgttcaacgggtaccctgaactgatccttgggttcaacgccttcttgcctaagggctatgcgatcaagctacaagaagagaagaaacctgtcgattttgtggaagctatcaatttcgtgaacaagataaagcatgatgaacaagtttacaaggcattcttggacatcctcaacatgtaccgcaaggataataagtctatccaagatgtttaccatgaggttgctatgctgttcaaagaccataaagatttgcttgaagagttccagcacttcctgcctgatacttcagtggctccacaagcagtggcctcaaagggtggtttggttaagcgggaggacaggagctctttagtgcctcctgcaaataagatccttcacaatgataagagggacagagtttacctgtcacatgctgaccgtgattttagtgttgaccgtcctgatgtggagcatgatcgccagagaagacgtcttgataaagacaaagaacggaaggtggaaagggacagaagggattatgagagagaagacaaggatggtgaacatgacagcagagacctggagctaggacagcgtaagcgaaagcctttttcaaggaatatcgaggataatgtaggtgctgagacacaccaaggaggccccagtgagaatcatggaatccacagtgtatctgcttcatcatatgacgataaggatgcgctgaagagtgtatacacacatgagttccatttctgcgagaaggtgaaggaaaagctggagcatgaagcttaccaagagtttttgaaatgtctacacatctatagccaagagattatcacaagaagtgaactgaagaacttggtgaatgatatactccaacattatccagatcttatggaagggtttaacgaattcttggagcattgtgaaaatatagatggatttcttgccggtgtcttcaacaaaaggccaagcacgagggctgttaaaactgaggataaagaaaaggatagagatcgggacagggaggacaaggatagagatcgggaaaaggaaagagaaaaggaacgagaaaggctcgataaaggatcaacattcaattcaaaggaaggttctagtcacaaaccttctatgttctctggcaaagagaagtacaacctatccaaaccaatatcagagcttgatctctcaaactgtcaacgctgcactccgagttaccggcttctacctaaaaattatcccatgcccccagccagcaacaggactgatcttggagcttctgttctgaatgatcactgggtatcagtgacatcaggaagtgaagattattcatttaaacacatgcggaagaatcagtacgaggaaagcttatttagatgcgaggatgacaggtttgagttggatatgctgttggaatcagttaatgcagcgactaagcgtgttgaagagctgatagagaagatgcaggacaactcagtcaaacctgagagcccaatacgcatcgatgaacatttgactccgttgaacctgaggtgcattgagcgactgtacggtgatcatggtctggatgtgatggatgttctacgcaaaaatgctagtgttgcattgccagttattctaactaggctcaaacagaagcaggaggagtggtcaaggtgtcgatcagatttcaacaaagtttgggccgaaatatatgccaaaaattatcacaagtcacttgaccatcgtagtttctatttcaagcagcaagatacgaagaacctgagcacaaagtctctcctgacagagataaaagaaattaatgagaagaaaaggaaggaagatgatgtgctccttgccattgctgctggaaataggcggcctatagttcccaatatgtcattcgagtatatagactcggaaatccatgaagatctacataaaatcattaagtactcctgtgctgaagtctgcaactcttcagatcaattagataaagtgatgagagtatggacaacttttctggagccagttttgggtgttcagcaaaaacatgggtctgaggatcctgatctagttaagaccaagagccgaacaacaaaattgggtcttgcaaatgtgagagaaagcaataccatagctgggattgtctccaagcaaagcaatggcgatgaaagtgaacaaggtccgtcatctcgggctagattagcaaatggagttgcagcgggcactcaaaatggtttccatgatgcagatcgaattgcccgtaaaggtgaagaaccatcaaacgctatactaaatggaagagtgcatggtgctgtctctgcagatgaaacactttccctgatcacacaaaacattgcttctaccgagcgaccagcagaaaatgctgctgctgttaggactgagcaacataaggcgaacttggtacttacgccaggcatgaatgcttctagaagttctcatgatgcagttgaggtggctggtgaaggcaagactggcaatgaaacattgctttctgccgagggaggggagaggttgggaccatctttaaatggcaccagcgagggaattaaagggcgcctaaataatgatggttctgtgccccacacttcaaaagttgaaagagaagagggtgaattgtcgcctaacggagattttgaagaggaccattttgttcctttcgaagatggaacatctaaaggaaaggaagattctacaagcagaccattccatggtaggcctggggaagtggtaccctcttctgccgaggcagctggtgagaatgatgctgatgctgatgacgagggtgaggaaagtgctcagaggtctactgaggacagtgaaaatgcttcagaggcgggtgaagatgcatcgggtagtgaatctggtgatggtgaggaatgctctcgtgaagatcatgatgaggaagaagaggatatggatcacgatgatcaggatgcaaaagctgaaagtgagggtgaggcagaaggaacaactgaaacacatgatgtggaagggggaatatcactaccactttcagaacgctttctgtactcagttaaaccacttgccaagcatgtacctacagctttacatgatcgagagttctcacgtgtattttatggaaacgattcattttatgtgttgttcagactacatcagattttatatgagagactactttcagcaaaaactaattctttcactgctgaaaagaaatggaggaattctaaggatacaaaccctcctgatttatatgcaaagtttatgagcgcgctgtacaacttgcttgatggttcctctgacaacaccaaatttgaggatgactgccgagctattattgggactcaatcatatgtcctctttactttagataaactgatttataaagttgtgaagcagcttcaagctatagcaacagatgaaatggacaataagcttctgcaactatatttatatgaaaaatcaagatctcctgggaggttctttgacctagtttatcatgaaaatgcccgtgttctactccatgatgagagcatataccgatttgaatgttgctcgagtccgacaaggttgtctattcagctgatggaatatggtcacgaaaagccagaagtgactgcagtatcaattgaaccaaatttttcttcgtatctttttagcgagtacttgtgtagtacgccagacaagaaattatctgaaggcgtctaccttggaaggaataagcggaaatattcaaataatgatgaaccttcagattctttgaaggcaatggatggtatcaatgttgtgaatggtcttgaatgcaagatatcctgcaagacctcgaaagtttcatatgtccttgatactgaagatttcttgttccggcttcggaagagaaggaaaattttgcggggcgggaatgtgcccgaccgtttgcagatttcatcaatatctgctgcaaaagtgcagcgcttcaataggttcctatccaaaccataggatcatttggcatacaaatgtatcgaaacctgttgctggggtcccagctgcttggcttgaacaatgattccatcgacgtcgcggagtcccctttcggaataacagatgggaagacatagggtaaatacagcaaagcgaagcgagcatgtaggccacagtagtcagtctgttgttccgaaagatgtgtatatatgtattagcagcatgattgttctgattatctttttactgattttcgatggtaggtctattccatcaagtatttaactaatcatttgttgctgttggtataggtcttttgttcttttagccgtcgttttgcattgaagatatgtagccaaaattaaaaacctgtgtcgaacagttatgtagtcttggctccattaatcaaacggacaccgtaatttcttggagccttttggtgaggttgccagcaacctctcttgtgtatccaattcaattgaagtataggatgtgtgttacttcttgatgttgtgtaaggtggccgaaattagtggacgtgccatccactatttttactattagattagaacatatctataaaatctagagaatgtgtaaaccgtttagtcttgttcgccatattgattatcattttaatgtattggcatggatggatggaaa

SEQ ID NO: 33973 - DNA, 5036 bp, Zea Mays
gcgcgaggtggtcgagggaggaatcggctgcgcgcggaggcggggaggaggtcgagctcgcctggtgctgcatgggggcatgaagcgcggcaccagggacgacgccctcatggggtcccagctcaaacgctcgaacgttgtccgatccgatccgtcggctcagccacagcatatgtctgtgcctggttcagcgtctgcggccgcaccgccgcctcaggctggcgctgctccgccggcgcagccgcagcagccgtccggtgcggcctttaccaaccagaagctgacgacaaatgatgcgctcgtctaccttaaggcagttaaggataagtttcaggacaaacgggagaagtacgaggagttcctcgaggtcatgcgcgacttcaagagcgagaggattgacaccaatggagtgattgtccgtgtcaaaacgctgttcaacgggtaccctgaactgatccttgggttcaacgccttcttgcctaagggctatgcgatcaagctacaagaagagaagaaacctgtcgattttgtggaagctatcaatttcgtgaacaagataaagaatcggtttcagcatgatgaacaagtttacaaggcattcttggacatcctcaacatgtaccgcaaggataataagtctatccaagatgtttaccatgaggttgctatgctgttcaaagaccataaagatttgcttgaagagttccagcacttcctgcctgatacttcagtggctccacaagcagtggcctcaaagggtggtttggttaagcgggaggacaggagctctttagtgcctcctgcaaataagatccttcacaatgataagagggacagagtttacctgtcacatgctgaccgtgattttagtgttgaccgtcctgatgtggagcatgatcgccagagaagacgtcttgataaagacaaagaacggaaggtggaaagggacagaagggattatgagagagaagacaaggatggtgaacatgacagcagagacctggagctaggacagcgtaagcgaaagcctttttcaaggaatatcgaggataatgtaggtgctgagacacaccaaggaggccccagtgagaatcatggaatccacagtgtatctgcttcatcatatgacgataaggatgcgctgaagagtgtatacacacatgagttccatttctgcgagaaggtgaaggaaaagctggagcatgaagcttaccaagagtttttgaaatgtctacacatctatagccaagagattatcacaagaagtgaactgaagaacttggtgaatgatatactccaacattatccagatcttatggaagggtttaacgaattcttggagcattgtgaaaatatagatggatttcttgccggtgtcttcaacaaaaggccaagcacgagggctgttaaaactgaggataaagaaaaggatagagatcgggacagggaggacaaggatagagatcgggaaaaggaaagagaaaaggaacgagaaaggctcgataaaggatcaacattcaattcaaaggaaggttctagtcacaaaccttctatgttctctggcaaagagaagtacaacctatccaaaccaatatcagagcttgatctctcaaactgtcaacgctgcactccgagttaccggcttctacctaaaaattatcccatgcccccagccagcaacaggactgatcttggagcttctgttctgaatgatcactgggtatcagtgacatcaggaagtgaagattattcatttaaacacatgcggaagaatcagtacgaggaaagcttatttagatgcgaggatgacaggtttgagttggatatgctgttggaatcagttaatgcagcgactaagcgtgttgaagagctgatagagaagatgcaggacaactcagtcaaacctgagagcccaatacgcatcgatgaacatttgactccgttgaacctgaggtgcattgagcgactgtacggtgatcatggtctggatgtgatggatgttctacgcaaaaatgctagtgttgcattgccagttattctaactaggctcaaacagaagcaggaggagtggtcaaggtgtcgatcagatttcaacaaagtttgggccgaaatatatgccaaaaattatcacaagtcacttgaccatcgtagtttctatttcaagcagcaagatacgaagaacctgagcacaaagtctctcctgacagagataaaagaaattaatgagaagaaaaggaaggaagatgatgtgctccttgccattgctgctggaaataggcggcctatagttcccaatatgtcattcgagtatatagactcggaaatccatgaagatctacataaaatcattaagtactcctgtgctgaagtctgcaactcttcagatcaattagataaagtgatgagagtatggacaacttttctggagccagttttgggtgttcagcaaaaacatgggtctgaggatcctgatctagttaagaccaagagccgaacaacaaaattgggtcttgcaaatgtgagagaaagcaataccatagctgggattgtctccaagcaaagcaatggcgatgaaagtgaacaaggtccgtcatctcgggctagattagcaaatggagttgcagcgggcactcaaaatggtttccatgatgcagatcgaattgcccgtaaaggtgaagaaccatcaaacgctatactaaatggaagagtgcatggtgctgtctctgcagatgaaacactttccctgatcacacaaaacattgcttctaccgagcgaccagcagaaaatgctgctgctgttaggactgagcaacataaggcgaacttggtacttacgccaggcatgaatgcttctagaagttctcatgatgcagttgaggtggctggtgaaggcaagactggcaatgaaacattgctttctgccgagggaggggagaggttgggaccatctttaaatggcaccagcgagggaattaaagggcgcctaaataatgatggttctgtgccccacacttcaaaagttgaaagagaagagggtgaattgtcgcctaacggagattttgaagaggaccattttgttcctttcgaagatggaacatctaaaggaaaggaagattctacaagcagaccattccatggtaggcctggggaagtggtaccctcttctgccgaggcagctggtgagaatgatgctgatgctgatgacgagggtgaggaaagtgctcagaggtctactgaggacagtgaaaatgcttcagaggcgggtgaagatgcatcgggtagtgaatctggtgatggtgaggaatgctctcgtgaagatcatgatgaggaagaagaggatatggatcacgatgatcaggatgcaaaagctgaaagtgagggtgaggcagaaggaacaactgaaacacatgatgtggaagggggaatatcactaccactttcagaacgctttctgtactcagttaaaccacttgccaagcatgtacctacagctttacatgatcgagagttctcacgtgtattttatggaaacgattcattttatgtgttgttcagactacatcagattttatatgagagactactttcagcaaaaactaattctttcactgctgaaaagaaatggaggaattctaaggatacaaaccctcctgatttatatgcaaagtttatgagcgcgctgtacaacttgcttgatggttcctctgacaacaccaaatttgaggatgactgccgagctattattgggactcaatcatatgtcctctttactttagataaactgatttataaagttgtgaagcagcttcaagctatagcaacagatgaaatggacaataagcttctgcaactatatttatatgaaaaatcaagatctcctgggaggttctttgacctagtttatcatgaaaatgcccgtgttctactccatgatgagagcatataccgatttgaatgtgtaatgctcgagtccgacaaggttgtctattcagctgatggaatatggtcacgaaaagccagaagtgactgcagtatcaattgaaccaaatttttcttcgtatctttttagcgagtacttgtgtagtacgccagacaagaaattatctgaaggcgtctaccttggaaggaataagcggaaatattcaaataatgatgaaccttcagattctttgaaggcaatggatggtatcaatgttgtgaatggtcttgaatgcaagatatcctgcaagacctcgaaagtttcatatgtccttgatactgaagatttcttgttccggcttcggaagagaaggaaaattttgcggggcgggaatgtgcccgaccgtttgcagatttcatcaatatctgctgcaaaagtgcagcgcttcaataggttcctatccaaaccataggatcatttggcatacaaatgtatcgaaacctgttgctggggtcccagctgcttggcttgaacaatgattccatcgacgtcgcggagtcccctttcggaataacagatgggaagacatagggtaaatacagcaaagcgaagcgagcatgtaggccacagtagtcagtctgttgttccgaaagatgtgtatatatgtattagcagcatgattgttctgattatctttttactgattttcgatggtaggtctattccatcaagtatttaactaatcatttgttgctgttggtataggtcttttgttcttttagccgtcgttttgcattgaagatatgtagccaaaattaaaaacctgtgtcgaacagttatgtagtcttggctccattaatcaaacggacaccgtaatttcttggagccttttggtgaggttgccagcaacctctcttgtgtatccaattcaattgaagtataggatgtgtgttacttcttgatgttgtgtaaggtggccgaaattagtggacgtgccatccactatttttactattagattagaacatatctataaaatctagagaatgtgtaaaccgtttagtcttgttcgccatattgattatcattttaatgtattggcatggatggatggaaa

SEQ ID NO: 33974 - DNA, 4982 bp, Zea Mays
cggcggggaagggcagagcgcgcgaggtggtcgagggaggaatcggctgcgcgcggaggcggggaggaggtcgagctcgcctggtgctgcatgggggcatgaagcgcggcaccagggacgacgccctcatggggtcccagctcaaacgctcgaacgttgtccgatccgatccgtcggctcagccacagcatatgtctgtgcctggttcagcgtctgcggccgcaccgccgcctcaggctggcgctgctccgccggcgcagccgcagcagccgtccggtgcggcctttaccaaccagaagctgacgacaaatgatgcgctcgtctaccttaaggcagttaaggataagtttcaggacaaacgggagaagtacgaggagttcctcgaggtcatgcgcgacttcaagagcgagaggattgacaccaatggagtgattgtccgtgtcaaaacgctgttcaacgggtaccctgaactgatccttgggttcaacgccttcttgcctaagggctatgcgatcaagctacaagaagagaagaaacctgtcgattttgtggaagctatcaatttcgtgaacaagataaagaatcggtttcagcatgatgaacaagtttacaaggcattcttggacatcctcaacatgtaccgcaaggataataagtctatccaagatgtttaccatgaggttgctatgctgttcaaagaccataaagatttgcttgaagagttccagcacttcctgcctgatacttcagtggctccacaagcagtggcctcaaagggtggtttggttaagcgggaggacaggagctctttagtgcctcctgcaaataagatccttcacaatgataagagggacagagtttacctgtcacatgctgaccgtgattttagtgttgaccgtcctgatgtggagcatgatcgccagagaagacgtcttgataaagacaaagaacggaaggtggaaagggacagaagggattatgagagagaagacaaggatggtgaacatgacagcagagacctggagctaggacagcgtaagcgaaagcctttttcaaggaatatcgaggataatgtaggtgctgagacacaccaaggaggccccagtgagaatcatggaatccacagtgtatctgcttcatcatatgacgataaggatgcgctgaagagtgtatacacacatgagttccatttctgcgagaaggtgaaggaaaagctggagcatgaagcttaccaagagtttttgaaatgtctacacatctatagccaagagattatcacaagaagtgaactgaagaacttggtgaatgatatactccaacattatccagatcttatggaagggtttaacgaattcttggagcattgtgaaaatatagatggatttcttgccggtgtcttcaacaaaaggccaagcacgagggctgttaaaactgaggataaagaaaaggatagagatcgggacagggaggacaaggatagagatcgggaaaaggaaagagaaaaggaacgagaaaggctcgataaaggatcaacattcaattcaaaggaaggttctagtcacaaaccttctatgttctctggcaaagagaagtacaacctatccaaaccaatatcagagcttgatctctcaaactgtcaacgctgcactccgagttaccggcttctacctaaaaattatcccatgcccccagccagcaacaggactgatcttggagcttctgttctgaatgatcactgggtatcagtgacatcaggaagtgaagattattcatttaaacacatgcggaagaatcagtacgaggaaagcttatttagatgcgaggatgacaggtttgagttggatatgctgttggaatcagttaatgcagcgactaagcgtgttgaagagctgatagagaagatgcaggacaactcagtcaaacctgagagcccaatacgcatcgatgaacatttgactccgttgaacctgaggtgcattgagcgactgtacggtgatcatggtctggatgtgatggatgttctacgcaaaaatgctagtgttgcattgccagttattctaactaggctcaaacagaagcaggaggagtggtcaaggtgtcgatcagatttcaacaaagtttgggccgaaatatatgccaaaaattatcacaagtcacttgaccatcgtagtttctatttcaagcagcaagatacgaagaacctgagcacaaagtctctcctgacagagataaaagaaattaatgagaagaaaaggaaggaagatgatgtgctccttgccattgctgctggaaataggcggcctatagttcccaatatgtcattcgagtatatagactcggaaatccatgaagatctacataaaatcattaagtactcctgtgctgaagtctgcaactcttcagatcaattagataaagtgatgagagtatggacaacttttctggagccagttttgggtgttcagcaaaaacatgggtctgaggatcctgatctagttaagaccaagagccgaacaacaaaattgggtcttgcaaatgtgagagaaagcaataccatagctgggattgtctccaagcaaagcaatggcgatgaaagtgaacaagatcgaattgcccgtaaaggtgaagaaccatcaaacgctatactaaatggaagagtgcatggtgctgtctctgcagatgaaacactttccctgatcacacaaaacattgcttctaccgagcgaccagcagaaaatgctgctgctgttaggactgagcaacataaggcgaacttggtacttacgccaggcatgaatgcttctagaagttctcatgatgcagttgaggtggctggtgaaggcaagactggcaatgaaacattgctttctgccgagggaggggagaggttgggaccatctttaaatggcaccagcgagggaattaaagggcgcctaaataatgatggttctgtgccccacacttcaaaagttgaaagagaagagggtgaattgtcgcctaacggagattttgaagaggaccattttgttcctttcgaagatggaacatctaaaggaaaggaagattctacaagcagaccattccatggtaggcctggggaagtggtaccctcttctgccgaggcagctggtgagaatgatgctgatgctgatgacgagggtgaggaaagtgctcagaggtctactgaggacagtgaaaatgcttcagaggcgggtgaagatgcatcgggtagtgaatctggtgatggtgaggaatgctctcgtgaagatcatgatgaggaagaagaggatatggatcacgatgatcaggatgcaaaagctgaaagtgagggtgaggcagaaggaacaactgaaacacatgatgtggaagggggaatatcactaccactttcagaacgctttctgtactcagttaaaccacttgccaagcatgtacctacagctttacatgatcgagagttctcacgtgtattttatggaaacgattcattttatgtgttgttcagactacatcagattttatatgagagactactttcagcaaaaactaattctttcactgctgaaaagaaatggaggaattctaaggatacaaaccctcctgatttatatgcaaagtttatgagcgcgctgtacaacttgcttgatggttcctctgacaacaccaaatttgaggatgactgccgagctattattgggactcaatcatatgtcctctttactttagataaactgatttataaagttgtgaagcagcttcaagctatagcaacagatgaaatggacaataagcttctgcaactatatttatatgaaaaatcaagatctcctgggaggttctttgacctagtttatcatgaaaatgcccgtgttctactccatgatgagagcatataccgatttgaatgttgctcgagtccgacaaggttgtctattcagctgatggaatatggtcacgaaaagccagaagtgactgcagtatcaattgaaccaaatttttcttcgtatctttttagcgagtacttgtgtagtacgccagacaagaaattatctgaaggcgtctaccttggaaggaataagcggaaatattcaaataatgatgaaccttcagattctttgaaggcaatggatggtatcaatgttgtgaatggtcttgaatgcaagatatcctgcaagacctcgaaagtttcatatgtccttgatactgaagatttcttgttccggcttcggaagagaaggaaaattttgcggggcgggaatgtgcccgaccgtttgcagatttcatcaatatctgctgcaaaagtgcagcgcttcaataggttcctatccaaaccataggatcatttggcatacaaatgtatcgaaacctgttgctggggtcccagctgcttggcttgaacaatgattccatcgacgtcgcggagtcccctttcggaataacagatgggaagacatagggtaaatacagcaaagcgaagcgagcatgtaggccacagtagtcagtctgttgttccgaaagatgtgtatatatgtattagcagcatgattgttctgattatctttttactgattttcgatggtaggtctattccatcaagtatttaactaatcatttgttgctgttggtataggtcttttgttcttttagccgtcgttttgcattgaagatatgtagccaaaattaaaaacctgtgtcgaacagttatgtagtcttggctccattaatcaaacggacaccgtaatttcttggagccttttggtgaggttgccagcaacctctcttgtgtatccaattcaattgaagtataggatgtgtgttacttcttgatgttgtgtaaggtggccgaaattagtggacgtgccatccactatttttactattagattagaacatatctataaaatctagagaatgtgtaaaccgtttagtcttgttcgccatattgattatcattttaatgtattggcatggatggatggaaa

SEQ ID NO: 33975 - DNA, 5045 bp, Zea Mays
acaggctcggaggtgagatcggcggcggggaagggcagagcgcgcgaggtggtcgagggaggaatcggctgcgcgcggaggcggggaggaggtcgagctcgcctggtgctgcatgggggcatgaagcgcggcaccagggacgacgccctcatggggtcccagctcaaacgctcgaacgttgtccgatccgatccgtcggctcagccacagcatatgtctgtgcctggttcagcgtctgcggccgcaccgccgcctcaggctggcgctgctccgccggcgcagccgcagcagccgtccggtgcggcctttaccaaccagaagctgacgacaaatgatgcgctcgtctaccttaaggcagttaaggataagtttcaggacaaacgggagaagtacgaggagttcctcgaggtcatgcgcgacttcaagagcgagaggattgacaccaatggagtgattgtccgtgtcaaaacgctgttcaacgggtaccctgaactgatccttgggttcaacgccttcttgcctaagggctatgcgatcaagctacaagaagagaagaaacctgtcgattttgtggaagctatcaatttcgtgaacaagataaagaatcggtttcagcatgatgaacaagtttacaaggcattcttggacatcctcaacatgtaccgcaaggataataagtctatccaagatgtttaccatgaggttgctatgctgttcaaagaccataaagatttgcttgaagagttccagcacttcctgcctgatacttcagtggctccacaagcagtggcctcaaagggtggtttggttaagcgggaggacaggagctctttagtgcctcctgcaaataagatccttcacaatgataagagggacagagtttacctgtcacatgctgaccgtgattttagtgttgaccgtcctgatgtggagcatgatcgccagagaagacgtcttgataaagacaaagaacggaaggtggaaagggacagaagggattatgagagagaagacaaggatggtgaacatgacagcagagacctggagctaggacagcgtaagcgaaagcctttttcaaggaatatcgaggataatgtaggtgctgagacacaccaaggaggccccagtgagaatcatggaatccacagtgtatctgcttcatcatatgacgataaggatgcgctgaagagtgtatacacacatgagttccatttctgcgagaaggtgaaggaaaagctggagcatgaagcttaccaagagtttttgaaatgtctacacatctatagccaagagattatcacaagaagtgaactgaagaacttgatcttatggaagggtttaacgaattcttggagcattgtgaaaatatagatggatttcttgccggtgtcttcaacaaaaggccaagcacgagggctgttaaaactgaggataaagaaaaggatagagatcgggacagggaggacaaggatagagatcgggaaaaggaaagagaaaaggaacgagaaaggctcgataaaggatcaacattcaattcaaaggaaggttctagtcacaaaccttctatgttctctggcaaagagaagtacaacctatccaaaccaatatcagagcttgatctctcaaactgtcaacgctgcactccgagttaccggcttctacctaaaaattatcccatgcccccagccagcaacaggactgatcttggagcttctgttctgaatgatcactgggtatcagtgacatcaggaagtgaagattattcatttaaacacatgcggaagaatcagtacgaggaaagcttatttagatgcgaggatgacaggtttgagttggatatgctgttggaatcagttaatgcagcgactaagcgtgttgaagagctgatagagaagatgcaggacaactcagtcaaacctgagagcccaatacgcatcgatgaacatttgactccgttgaacctgaggtgcattgagcgactgtacggtgatcatggtctggatgtgatggatgttctacgcaaaaatgctagtgttgcattgccagttattctaactaggctcaaacagaagcaggaggagtggtcaaggtgtcgatcagatttcaacaaagtttgggccgaaatatatgccaaaaattatcacaagtcacttgaccatcgtagtttctatttcaagcagcaagatacgaagaacctgagcacaaagtctctcctgacagagataaaagaaattaatgagaagaaaaggaaggaagatgatgtgctccttgccattgctgctggaaataggcggcctatagttcccaatatgtcattcgagtatatagactcggaaatccatgaagatctacataaaatcattaagtactcctgtgctgaagtctgcaactcttcagatcaattagataaagtgatgagagtatggacaacttttctggagccagttttgggtgttcagcaaaaacatgggtctgaggatcctgatctagttaagaccaagagccgaacaacaaaattgggtcttgcaaatgtgagagaaagcaataccatagctgggattgtctccaagcaaagcaatggcgatgaaagtgaacaaggtccgtcatctcgggctagattagcaaatggagttgcagcgggcactcaaaatggtttccatgatgcagatcgaattgcccgtaaaggtgaagaaccatcaaacgctatactaaatggaagagtgcatggtgctgtctctgcagatgaaacactttccctgatcacacaaaacattgcttctaccgagcgaccagcagaaaatgctgctgctgttaggactgagcaacataaggcgaacttggtacttacgccaggcatgaatgcttctagaagttctcatgatgcagttgaggtggctggtgaaggcaagactggcaatgaaacattgctttctgccgagggaggggagaggttgggaccatctttaaatggcaccagcgagggaattaaagggcgcctaaataatgatggttctgtgccccacacttcaaaagttgaaagagaagagggtgaattgtcgcctaacggagattttgaagaggaccattttgttcctttcgaagatggaacatctaaaggaaaggaagattctacaagcagaccattccatggtaggcctggggaagtggtaccctcttctgccgaggcagctggtgagaatgatgctgatgctgatgacgagggtgaggaaagtgctcagaggtctactgaggacagtgaaaatgcttcagaggcgggtgaagatgcatcgggtagtgaatctggtgatggtgaggaatgctctcgtgaagatcatgatgaggaagaagaggatatggatcacgatgatcaggatgcaaaagctgaaagtgagggtgaggcagaaggaacaactgaaacacatgatgtggaagggggaatatcactaccactttcagaacgctttctgtactcagttaaaccacttgccaagcatgtacctacagctttacatgatcgagagttctcacgtgtattttatggaaacgattcattttatgtgttgttcagactacatcagattttatatgagagactactttcagcaaaaactaattctttcactgctgaaaagaaatggaggaattctaaggatacaaaccctcctgatttatatgcaaagtttatgagcgcgctgtacaacttgcttgatggttcctctgacaacaccaaatttgaggatgactgccgagctattattgggactcaatcatatgtcctctttactttagataaactgatttataaagttgtgaagcagcttcaagctatagcaacagatgaaatggacaataagcttctgcaactatatttatatgaaaaatcaagatctcctgggaggttctttgacctagtttatcatgaaaatgcccgtgttctactccatgatgagagcatataccgatttgaatgttgctcgagtccgacaaggttgtctattcagctgatggaatatggtcacgaaaagccagaagtgactgcagtatcaattgaaccaaatttttcttcgtatctttttagcgagtacttgtgtagtacgccagacaagaaattatctgaaggcgtctaccttggaaggaataagcggaaatattcaaataatgatgaaccttcagattctttgaaggcaatggatggtatcaatgttgtgaatggtcttgaatgcaagatatcctgcaagacctcgaaagtttcatatgtccttgatactgaagatttcttgttccggcttcggaagagaaggaaaattttgcggggcgggaatgtgcccgaccgtttgcagatttcatcaatatctgctgcaaaagtgcagcgcttcaataggttcctatccaaaccataggatcatttggcatacaaatgtatcgaaacctgttgctggggtcccagctgcttggcttgaacaatgattccatcgacgtcgcggagtcccctttcggaataacagatgggaagacatagggtaaatacagcaaagcgaagcgagcatgtaggccacagtagtcagtctgttgttccgaaagatgtgtatatatgtattagcagcatgattgttctgattatctttttactgattttcgatggtaggtctattccatcaagtatttaactaatcatttgttgctgttggtataggtcttttgttcttttagccgtcgttttgcattgaagatatgtagccaaaattaaaaacctgtgtcgaacagttatgtagtcttggctccattaatcaaacggacaccgtaatttcttggagccttttggtgaggttgccagcaacctctcttgtgtatccaattcaattgaagtataggatgtgtgttacttcttgatgttgtgtaaggtggccgaaattagtggacgtgccatccactatttttactattagattagaacatatctataaaatctagagaatgtgtaaaccgtttagtcttgttcgccatattgattatcattttaatgtattggcatggatggatggaaa

SEQ ID NO: 33976 - DNA, 5004 bp, Zea Mays
cggcggacaggctcggaggtgagatcggcggcggggaagggcagagcgcgcgaggtggtcgagggaggaatcggctgcgcgcggaggcggggaggaggtcgagctcgcctggtgctgcatgggggcatgaagcgcggcaccagggacgacgccctcatggggtcccagctcaaacgctcgaacgttgtccgatccgatccgtcggctcagccacagcatatgtctgtgcctggttcagcgtctgcggccgcaccgccgcctcaggctggcgctgctccgccggcgcagccgcagcagccgtccggtgcggcctttaccaaccagaagctgacgacaaatgatgcgctcgtctaccttaaggcagttaaggataagtttcaggacaaacgggagaagtacgaggagttcctcgaggtcatgcgcgacttcaagagcgagaggattgacaccaatggagtgattgtccgtgtcaaaacgctgttcaacgggtaccctgaactgatccttgggttcaacgccttcttgcctaagggctatgcgatcaagctacaagaagagaagaaacctgtcgattttgtggaagctatcaatttcgtgaacaagataaagaatcggtttcagcatgatgaacaagtttacaaggcattcttggacatcctcaacatgtaccgcaaggataataagtctatccaagatgtttaccatgaggttgctatgctgttcaaagaccataaagatttgcttgaagagttccagcacttcctgcctgatacttcagtggctccacaagcagtggcctcaaagggtggtttggttaagcgggaggacaggagctctttagtgcctcctgcaaataagatccttcacaatgataagagaagacgtcttgataaagacaaagaacggaaggtggaaagggacagaagggattatgagagagaagacaaggatggtgaacatgacagcagagacctggagctaggacagcgtaagcgaaagcctttttcaaggaatatcgaggataatgtaggtgctgagacacaccaaggaggccccagtgagaatcatggaatccacagtgtatctgcttcatcatatgacgataaggatgcgctgaagagtgtatacacacatgagttccatttctgcgagaaggtgaaggaaaagctggagcatgaagcttaccaagagtttttgaaatgtctacacatctatagccaagagattatcacaagaagtgaactgaagaacttggtgaatgatatactccaacattatccagatcttatggaagggtttaacgaattcttggagcattgtgaaaatatagatggatttcttgccggtgtcttcaacaaaaggccaagcacgagggctgttaaaactgaggataaagaaaaggatagagatcgggacagggaggacaaggatagagatcgggaaaaggaaagagaaaaggaacgagaaaggctcgataaaggatcaacattcaattcaaaggaaggttctagtcacaaaccttctatgttctctggcaaagagaagtacaacctatccaaaccaatatcagagcttgatctctcaaactgtcaacgctgcactccgagttaccggcttctacctaaaaattatcccatgcccccagccagcaacaggactgatcttggagcttctgttctgaatgatcactgggtatcagtgacatcaggaagtgaagattattcatttaaacacatgcggaagaatcagtacgaggaaagcttatttagatgcgaggatgacaggtttgagttggatatgctgttggaatcagttaatgcagcgactaagcgtgttgaagagctgatagagaagatgcaggacaactcagtcaaacctgagagcccaatacgcatcgatgaacatttgactccgttgaacctgaggtgcattgagcgactgtacggtgatcatggtctggatgtgatggatgttctacgcaaaaatgctagtgttgcattgccagttattctaactaggctcaaacagaagcaggaggagtggtcaaggtgtcgatcagatttcaacaaagtttgggccgaaatatatgccaaaaattatcacaagtcacttgaccatcgtagtttctatttcaagcagcaagatacgaagaacctgagcacaaagtctctcctgacagagataaaagaaattaatgagaagaaaaggaaggaagatgatgtgctccttgccattgctgctggaaataggcggcctatagttcccaatatgtcattcgagtatatagactcggaaatccatgaagatctacataaaatcattaagtactcctgtgctgaagtctgcaactcttcagatcaattagataaagtgatgagagtatggacaacttttctggagccagttttgggtgttcagcaaaaacatgggtctgaggatcctgatctagttaagaccaagagccgaacaacaaaattgggtcttgcaaatgtgagagaaagcaataccatagctgggattgtctccaagcaaagcaatggcgatgaaagtgaacaaggtccgtcatctcgggctagattagcaaatggagttgcagcgggcactcaaaatggtttccatgatgcagatcgaattgcccgtaaaggtgaagaaccatcaaacgctatactaaatggaagagtgcatggtgctgtctctgcagatgaaacactttccctgatcacacaaaacattgcttctaccgagcgaccagcagaaaatgctgctgctgttaggactgagcaacataaggcgaacttggtacttacgccaggcatgaatgcttctagaagttctcatgatgcagttgaggtggctggtgaaggcaagactggcaatgaaacattgctttctgccgagggaggggagaggttgggaccatctttaaatggcaccagcgagggaattaaagggcgcctaaataatgatggttctgtgccccacacttcaaaagttgaaagagaagagggtgaattgtcgcctaacggagattttgaagaggaccattttgttcctttcgaagatggaacatctaaaggaaaggaagattctacaagcagaccattccatggtaggcctggggaagtggtaccctcttctgccgaggcagctggtgagaatgatgctgatgctgatgacgagggtgaggaaagtgctcagaggtctactgaggacagtgaaaatgcttcagaggcgggtgaagatgcatcgggtagtgaatctggtgatggtgaggaatgctctcgtgaagatcatgatgaggaagaagaggatatggatcacgatgatcaggatgcaaaagctgaaagtgagggtgaggcagaaggaacaactgaaacacatgatgtggaagggggaatatcactaccactttcagaacgctttctgtactcagttaaaccacttgccaagcatgtacctacagctttacatgatcgagagttctcacgtgtattttatggaaacgattcattttatgtgttgttcagactacatcagattttatatgagagactactttcagcaaaaactaattctttcactgctgaaaagaaatggaggaattctaaggatacaaaccctcctgatttatatgcaaagtttatgagcgcgctgtacaacttgcttgatggttcctctgacaacaccaaatttgaggatgactgccgagctattattgggactcaatcatatgtcctctttactttagataaactgatttataaagttgtgaagcagcttcaagctatagcaacagatgaaatggacaataagcttctgcaactatatttatatgaaaaatcaagatctcctgggaggttctttgacctagtttatcatgaaaatgcccgtgttctactccatgatgagagcatataccgatttgaatgttgctcgagtccgacaaggttgtctattcagctgatggaatatggtcacgaaaagccagaagtgactgcagtatcaattgaaccaaatttttcttcgtatctttttagcgagtacttgtgtagtacgccagacaagaaattatctgaaggcgtctaccttggaaggaataagcggaaatattcaaataatgatgaaccttcagattctttgaaggcaatggatggtatcaatgttgtgaatggtcttgaatgcaagatatcctgcaagacctcgaaagtttcatatgtccttgatactgaagatttcttgttccggcttcggaagagaaggaaaattttgcggggcgggaatgtgcccgaccgtttgcagatttcatcaatatctgctgcaaaagtgcagcgcttcaataggttcctatccaaaccataggatcatttggcatacaaatgtatcgaaacctgttgctggggtcccagctgcttggcttgaacaatgattccatcgacgtcgcggagtcccctttcggaataacagatgggaagacatagggtaaatacagcaaagcgaagcgagcatgtaggccacagtagtcagtctgttgttccgaaagatgtgtatatatgtattagcagcatgattgttctgattatctttttactgattttcgatggtaggtctattccatcaagtatttaactaatcatttgttgctgttggtataggtcttttgttcttttagccgtcgttttgcattgaagatatgtagccaaaattaaaaacctgtgtcgaacagttatgtagtcttggctccattaatcaaacggacaccgtaatttcttggagccttttggtgaggttgccagcaacctctcttgtgtatccaattcaattgaagtataggatgtgtgttacttcttgatgttgtgtaaggtggccgaaattagtggacgtgccatccactatttttactattagattagaacatatctataaaatctagagaatgtgtaaaccgtttagtcttgttcgccatattgattatcattttaatgtattggcatggatggatggaaa

SEQ ID NO: 33977 - DNA, 5272 bp, Zea Mays
ctttcatttcgtctctcctcctcgctcccttttctcttctggcgcccccacccccctggcgattagctcccgcccgcctcccgctccgctcccgctccccaccgcgctcgccgtgctgtctcggcgctgcgcccggcggcgccgtgagggttggagggtgctcgtggccggcagatccggcgtcggcgtcggcgtcggcggacaggctcggaggtgagatcggcggcggggaagggcagagcgcgcgaggtggtcgagggaggaatcggctgcgcgcggaggcggggaggaggtcgagctcgcctggtgctgcatgggggcatgaagcgcggcaccagggacgacgccctcatggggtcccagctcaaacgctcgaacgttgtccgatccgatccgtcggctcagccacagcatatgtctgtgcctggttcagcgtctgcggccgcaccgccgcctcaggctggcgctgctccgccggcgcagccgcagcagccgtccggtgcggcctttaccaaccagaagctgacgacaaatgatgcgctcgtctaccttaaggcagttaaggataagtttcaggacaaacgggagaagtacgaggagttcctcgaggtcatgcgcgacttcaagagcgagaggattgacaccaatggagtgattgtccgtgtcaaaacgctgttcaacgggtaccctgaactgatccttgggttcaacgccttcttgcctaagggctatgcgatcaagctacaagaagagaagaaacctgtcgattttgtggaagctatcaatttcgtgaacaagataaagaatcggtttcagcatgatgaacaagtttacaaggcattcttggacatcctcaacatgtaccgcaaggataataagtctatccaagatgtttaccatgaggttgctatgctgttcaaagaccataaagatttgcttgaagagttccagcacttcctgcctgatacttcagtggctccacaagcagtggcctcaaagggtggtttggttaagcgggaggacaggagctctttagtgcctcctgcaaataagatccttcacaatgataagagggacagagtttacctgtcacatgctgaccgtgattttagtgttgaccgtcctgatgtggagcatgatcgccagagaagacgtcttgataaagacaaagaacggaaggtggaaagggacagaagggattatgagagagaagacaaggatggtgaacatgacagcagagacctggagctaggacagcgtaagcgaaagcctttttcaaggaatatcgaggataatgtaggtgctgagacacaccaaggaggccccagtgagaatcatggaatccacagtgtatctgcttcatcatatgacgataaggatgcgctgaagagtgtatacacacatgagttccatttctgcgagaaggtgaaggaaaagctggagcatgaagcttaccaagagtttttgaaatgtctacacatctatagccaagagattatcacaagaagtgaactgaagaacttggtgaatgatatactccaacattatccagatcttatggaagggtttaacgaattcttggagcattgtgaaaatatagatggatttcttgccggtgtcttcaacaaaaggccaagcacgagggctgttaaaactgaggataaagaaaaggatagagatcgggacagggaggacaaggatagagatcgggaaaaggaaagagaaaaggaacgagaaaggctcgataaaggatcaacattcaattcaaaggaaggttctagtcacaaaccttctatgttctctggcaaagagaagtacaacctatccaaaccaatatcagagcttgatctctcaaactgtcaacgctgcactccgagttaccggcttctacctaaaaattatcccatgcccccagccagcaacaggactgatcttggagcttctgttctgaatgatcactgggtatcagtgacatcaggaagtgaagattattcatttaaacacatgcggaagaatcagtacgaggaaagcttatttagatgcgaggatgacaggtttgagttggatatgctgttggaatcagttaatgcagcgactaagcgtgttgaagagctgatagagaagatgcaggacaactcagtcaaacctgagagcccaatacgcatcgatgaacatttgactccgttgaacctgaggtgcattgagcgactgtacggtgatcatggtctggatgtgatggatgttctacgcaaaaatgctagtgttgcattgccagttattctaactaggctcaaacagaagcaggaggagtggtcaaggtgtcgatcagatttcaacaaagtttgggccgaaatatatgccaaaaattatcacaagtcacttgaccatcgtagtttctatttcaagcagcaagatacgaagaacctgagcacaaactctcctgacagagataaaagaaattaatgagaagaaaaggaaggaagatgatgtgctccttgccattgctgctggaaataggcggcctatagttcccaatatgtcattcgagtatatagactcggaaatccatgaagatctacataaaatcattaagtactcctgtgctgaagtctgcaactcttcagatcaattagataaagtgatgagagtatggacaacttttctggagccagttttgggtgttcagcaaaaacatgggtctgaggatcctgatctagttaagaccaagagccgaacaacaaaattgggtcttgcaaatgtgagagaaagcaataccatagctgggattgtctccaagcaaagcaatggcgatgaaagtgaacaaggtccgtcatctcgggctagattagcaaatggagttgcagcgggcactcaaaatggtttccatgatgcagatcgaattgcccgtaaaggtgaagaaccatcaaacgctatactaaatggaagagtgcatggtgctgtctctgcagatgaaacactttccctgatcacacaaaacattgcttctaccgagcgaccagcagaaaatgctgctgctgttaggactgagcaacataaggcgaacttggtacttacgccaggcatgaatgcttctagaagttctcatgatgcagttgaggtggctggtgaaggcaagactggcaatgaaacattgctttctgccgagggaggggagaggttgggaccatctttaaatggcaccagcgagggaattaaagggcgcctaaataatgatggttctgtgccccacacttcaaaagttgaaagagaagagggtgaattgtcgcctaacggagattttgaagaggaccattttgttcctttcgaagatggaacatctaaaggaaaggaagattctacaagcagaccattccatggtaggcctggggaagtggtaccctcttctgccgaggcagctggtgagaatgatgctgatgctgatgacgagggtgaggaaagtgctcagaggtctactgaggacagtgaaaatgcttcagaggcgggtgaagatgcatcgggtagtgaatctggtgatggtgaggaatgctctcgtgaagatcatgatgaggaagaagaggatatggatcacgatgatcaggatgcaaaagctgaaagtgagggtgaggcagaaggaacaactgaaacacatgatgtggaagggggaatatcactaccactttcagaacgctttctgtactcagttaaaccacttgccaagcatgtacctacagctttacatgatcgagagttctcacgtgtattttatggaaacgattcattttatgtgttgttcagactacatcagattttatatgagagactactttcagcaaaaactaattctttcactgctgaaaagaaatggaggaattctaaggatacaaaccctcctgatttatatgcaaagtttatgagcgcgctgtacaacttgcttgatggttcctctgacaacaccaaatttgaggatgactgccgagctattattgggactcaatcatatgtcctctttactttagataaactgatttataaagttgtgaagcagcttcaagctatagcaacagatgaaatggacaataagcttctgcaactatatttatatgaaaaatcaagatctcctgggaggttctttgacctagtttatcatgaaaatgcccgtgttctactccatgatgagagcatataccgatttgaatgttgctcgagtccgacaaggttgtctattcagctgatggaatatggtcacgaaaagccagaagtgactgcagtatcaattgaaccaaatttttcttcgtatctttttagcgagtacttgtgtagtacgccagacaagaaattatctgaaggcgtctaccttggaaggaataagcggaaatattcaaataatgatgaaccttcagattctttgaaggcaatggatggtatcaatgttgtgaatggtcttgaatgcaagatatcctgcaagacctcgaaagtttcatatgtccttgatactgaagatttcttgttccggcttcggaagagaaggaaaattttgcggggcgggaatgtgcccgaccgtttgcagatttcatcaatatctgctgcaaaagtgcagcgcttcaataggttcctatccaaaccataggatcatttggcatacaaatgtatcgaaacctgttgctggggtcccagctgcttggcttgaacaatgattccatcgacgtcgcggagtcccctttcggaataacagatgggaagacatagggtaaatacagcaaagcgaagcgagcatgtaggccacagtagtcagtctgttgttccgaaagatgtgtatatatgtattagcagcatgattgttctgattatctttttactgattttcgatggtaggtctattccatcaagtatttaactaatcatttgttgctgttggtataggtcttttgttcttttagccgtcgttttgcattgaagatatgtagccaaaattaaaaacctgtgtcgaacagttatgtagtcttggctccattaatcaaacggacaccgtaatttcttggagccttttggtgaggttgccagcaacctctcttgtgtatccaattcaattgaagtataggatgtgtgttacttcttgatgttgtgtaaggtggccgaaattagtggacgtgccatccactatttttactattagattagaacatatctataaaatctagagaatgtgtaaaccgtttagtcttgttcgccatattgattatcattttaatgtattggcatggatggatggaaa

SEQ ID NO: 33978 - DNA, 2509 bp, Zea Mays
gggggggggggggggggctgggattgtctccaagcaaagcaatggcgatgaaagtgaacaaggtccgtcatctcgggctagattagcaaatggagttgcagcgggcactcaaaatggtttccatgatgcagatcgaattgcccgtaaaggtgaagaaccatcaaacgctatactaaatggaagagtgcatggtgctgtctctgcagatgaaacactttccctgatcacacaaaacattgcttctaccgagcgaccagcagaaaatgctgctgctgttaggactgagcaacataaggcgaacttggtacttacgccaggcatgaatgcttctagaagttctcatgatgcagttgaggtggctggtgaaggcaagactggcaatgaaacattgctttctgccgagggaggggagaggttgggaccatctttaaatggcaccagcgagggaattaaagggcgcctaaataatgatggttctgtgccccacacttcaaaagttgaaagagaagagggtgaattgtcgcctaacggagattttgaagaggaccattttgttcctttcgaagatggaacatctaaaggaaaggaagattctacaagcagaccattccatggtaggcctggggaagtggtaccctcttctgccgaggcagctggtgagaatgatgctgatgctgatgacgagggtgaggaaagtgctcagaggtctactgaggacagtgaaaatgcttcagaggcgggtgaagatgcatcgggtagtgaatctggtgatggtgaggaatgctctcgtgaagatcatgatgaggaagaagaggatatggatcacgatgatcaggatgcaaaagctgaaagtgagggtgaggcagaaggaacaactgaaacacatgatgtggaagggggaatatcactaccactttcagaacgctttctgtactcagttaaaccacttgccaagcatgtacctacagctttacatgatcgagagttctcacgtgtattttatggaaacgattcattttatgtgttgttcagactacatcagattttatatgagagactactttcagcaaaaactaattctttcactgctgaaaagaaatggaggaattctaaggatacaaaccctcctgatttatatgcaaagtttatgagcgcgctgtacaacttgcttgatggttcctctgacaacaccaaatttgaggatgactgccgagctattattgggactcaatcatatgtcctctttactttagataaactgatttataaagttgtgaagcagcttcaagctatagcaacagatgaaatggacaataagcttctgcaactatatttatatgaaaaatcaagatctcctgggaggttctttgacctagtttatcatgaaaatgcccgtgttctactccatgatgagagcatataccgatttgaatgttgctcgagtccgacaaggttgtctattcagctgatggaatatggtcacgaaaagccagaagtgactgcagtatcaattgaaccaaatttttcttcgtatctttttagcgagtacttgtgtagtacgccagacaagaaattatctgaaggcgtctaccttggaaggaataagcggaaatattcaaataatgatgaaccttcagattctttgaaggcaatggatggtatcaatgttgtgaatggtcttgaatgcaagatatcctgcaagacctcgaaagtttcatatgtccttgatactgaagatttcttgttccggcttcggaagagaaggaaaattttgcggggcgggaatgtgcccgaccgtttgcagatttcatcaatatctgctgcaaaagtgcagcgcttcaataggttcctatccaaaccataggatcatttggcatacaaatgtatcgaaacctgttgctggggtcccagctgcttggcttgaacaatgattccatcgacgtcgcggagtcccctttcggaataacagatgggaagacatagggtaaatacagcaaagcgaagcgagcatgtaggccacagtagtcagtctgttgttccgaaagatgtgtatatatgtattagcagcatgattgttctgattatctttttactgattttcgatggtaggtctattccatcaagtatttaactaatcatttgttgctgttggtataggtcttttgttcttttagccgtcgttttgcattgaagatatgtagccaaaattaaaaacctgtgtcgaacagttatgtagtcttggctccattaatcaaacggacaccgtaatttcttggagccttttggtgaggttgccagcaacctctcttgtgtatccaattcaattgaagtataggatgtgtgttacttcttgatgttgtgtaaggtggccgaaattagtggacgtgccatccactatttttactattagattagaacatatctataaaatctagagaatgtgtaaaccgtttagtcttgttcgccatattgattatcattttaatgtattggcatggatggatggaaa

SEQ ID NO: 33979 - DNA, 2088 bp, Zea Mays
cgaaggatgccggccgcaacgcttcgtcctccgcgtccgctttcgcctttcccctcctcctcctcctctcgacaccaccaacacaacaccactccaccgccgttcgaatattccaagcttgagattggaggaggaggggaggggaggggagccgagcgcagaaccctaattacctccatcgattgctaacagctcagatctcagaggcaggggaggtaaaatgccaagagcaaatgagatgttcagggcagattctagaatgatggtggtttttggtgccttgacatcgaaaccagagcagctgacattcgaagaaaccctcagatttgtcaagaaagtgaaggtgagttgaatgttttaataatatattatgtcatcgcatggttttcatctctgtgtaatccaaacgcctattctgagtcattgccttgtctagtaagttgcgatgattttgctggtaccattcacttacagtctagtactgaatctcatctcatgttttgatgcatagagttaccaactatctgaaatctatgtgattggaggcacaattgtgggtttgtaaccttgggattgcgcaatgtggtggtgtgtgtgctcgtgtgcagtccttgtaatcgaaaaacaaaaacatccaaaatgtggggtttacatgtattcctacttgtaagatcctgctgatacctgagtctaggattttgagtgaacaattttgttgaacttttttttaaacctacactccctctagtctaaactattatagttcactttagctttgtcctaagtcaaacttatctaactttgaccaaatttttagaaaagtgtgacaacatcgacaagttgaaatacatgccctatcaagacatgtttcaaggtgaatgtttttttttaaaaaaaaagtgctggcaggagttatgactagcttttaacggaactagttccttattataattataaatgttgatgcattgttcaaagagaagtttggcttaggacaaagcaaaggtgaactataatctgaaacagagggagtagcacatagagtaatcagcatgataacttgcttgccctgcaggtagcagctttctaatgagtgattgctcatcatgttgtatgttagctcatcacctgggaattgcaaccatagttcataaaaatatatatatatatactctggagctcccccccaaaatgtgctagctgtttaaaacaatcagtggaaaagaaatgaatgagttaattaagaatgcaaaggtacatagggaagagagactgtacaaagagaacttttgaccgtgaaactcaattcaaaacttctgctggtctcagttactcgtgctctcatgacctttgcttcacaggcccgcgattacatgctatacctgtcattgttcgacattcttggcagaatggaactatcccagctcgatgcctaccgagagttacagctgctgtttggaaaccacccggatctgtgcgaagagctcgagaagttcaggccaccggtgcctacaaagcaggcagcaaacaacatctggccctgggtcattgtttgcgccgtcccgttggttgcggtcagcctgatcccggcgctcggaaacccagtgctgtggttcgttcagcaaactgtcggcgagaaaatggccgcctgattgaagaaaccactgcagtacatatgcgtgcagcggatgagcgtgcgggcctcctgtcatttgcgccatggcaactggcaatcgaatcagcattgtctttatatatgtgtgtatatatgttagagtagcattctggaaggatactcgtcttcttggtcatcaagtgccgctgagcaagaaatttatgccggtacatgctgtccgggcgcaaccgtgcaagtgcaagcccaccaaacacatatagcccgtttggacatttgagctgggttctaagtgctaaagatcaaaactacgcccaggaatgttattatgctaatgcggttgccccctcctgcttttttgtctatcaatgagctgatcaacgttacgttagattttattctgcactctggaaaagatacgctaatgattagttgagactatcattattcctgtg

SEQ ID NO: 33980 - DNA, 1126 bp, Zea Mays
caccgacccacgacctaggggtctacatgtcatggactaaaatcgcttttttgtacgtgcgctgggtcgaaggatgccggccgcaacgcttcgtcctccgcgtccgctttcgcctttcccctcctcctcctcctctcgacaccaccaacacaacaccactccaccgccgttcgaatattccaagcttgagattggaggaggaggggaggggaggggagccgagcgcagaaccctaattacctccatcgattgctaacagatctcagaggcaggggaggtaaaatgccaagagcaaatgagatgttcagggcagattctagaatgatggtggtttttggtgccttgacatcgaaaccagagcagctgacattcgaagaaaccctcagatttgtcaagaaagtgaaggcccgcgattacatgctatacctgtcattgttcgacattcttggcagaatggaactatcccagctcgatgcctaccgagagctgctgtttggaaaccacccggatctgtgcgaagagctcgagaagttcaggccaccggtgcctacaaagcaggcagcaaacaacatctggccctgggtcattgtttgcgccgtcccgttggttgcggtcagcctgatcccggcgctcggaaacccagtgctgtggttcgttcagcaaactgtcggcgagaaaatggccgcctgattgaagaaaccactgcagtacatatgcgtgcagcggatgagcgtgcgggcctcctgtcatttgcgccatggcaactggcaatcgaatcagcattgtctttatatatgtgtgtatatatgttagagtagcattctggaaggatactcgtcttcttggtcatcaagtgccgctgagcaagaaatttatgccggtacatgctgtccgggcgcaaccgtgcaagtgcaagcccaccaaacacatatagcccgtttggacatttgagctgggttctaagtgctaaagatcaaaactacgcccaggaatgttattatgctaatgcggttgccccctcctgcttttttgtctatcaatgagctgatcaacgttacgttagattttattctgcactctggaaaagatacgctaatgattagttgagactatcattattcctgtg

SEQ ID NO: 33981 - DNA, 3104 bp, Zea Mays
cctagtaacaccagagtcacatgcgtcggatttcgggctgagcagggcaggaggcgaagacaggaaaaaaagaagggagagacatgagagcgagacacactgcgtccgccgccttgaagctaatcttggtgacttggtcccgggctcccggccggcctccccaagattctcttgttctttcggaattccgtcattcctttgcagcctctccttcgcagcagaatccgcgtggaacaagtgctgcgcgtgttgctggaggtgagttttcacctcctccgcgttcttcttcaccgccaaaggcccaagaggaatttcgattggttgaagcgcgaatccgcggggttggcaggtcgatcctcccttggattgcagcgtgtgccatggttctctcctccaatcccaccaacaaggcagcagctcagctgtcacagccggcactgtagtgctttctagcctgctgctgggctccaatggcgtcctcaccttcgccttccccgggcaccatcagggcccccttgccgccttccagcgcaaccccgtcaccggcaaccaccacgcccacgccggcctccccggccccggtgacgcagcccaatgctaccccggccgaccctccctcgtcgccggtcgcgcctccccccgtcccctccgcatccacgccaccgccacagctcacttctccaccgccctccttgcctccgcctcctccagacgccgtgccaccaccgccacttgttgcctctccgccacccgccccagcagccgtagtgcccccaccctcgccgccggcgccggttgcagtgcccccaccacctacacctgctgccccgccaaaggcgtcgcctatacatataaggccccctgcggccgcgtcgccacccccaaccattctgccaacgcccaacccgccggctgacccaacgccgccgacattagcgcagccacctccaccacggcgccggccaccaagaacgcctcagacagaacctccacccctggcaccaccaccttctggaattcctgtcaaaccctctacgagcagtccctcaccgacatccgcagatcctttgatccccactccctctagcccctcacctccagggacgacaacgccaggctctggtagcactccatcggtgccagccccagcaatggcagccgatccagttcgcccggtaacgactgggggttcaaacaagtcgtctagtccagcctcacagagcagcggctccccagtagacagtggcggaatgtcttcaggtgcaaaggcaggcattggtgcagtcgttgccattcttgtgcttattagcttcgttggagctgcattttggtacaggaagaaacggaggagagttcatggataccatgctggcttcttaatgccttcgcctgcctcgactactacacaagtgctagctaaaacgaatttcagtgctgggagtcctgaatcaaaagattcaatgccagagttcagcatgggcaattgtcggttcttcacttatgaagaattgtatcaggtcacaaatggtttctctgcacagaacctgcttggggaagggggaacgcgagttccatgctgaggtggatattatcagtcgtgtgcatcatcgccatctagtatctcttgtagggtattgcatttcagatgagcagagattgcttgtctatgattttgtgcccaacaacacgcttcactaccatcttcatggacttggagtaccagtcttggaatggccatctagggttaaaattgcggctggttcagcacgcggaatagcctatcttcatgaagattgtcaccccagaataatccacagagatataaagtcctctaatattttgctggataataacttcgaagcactggttgctgattttggtcttgcaaggatagctatggatgcttgcactcatgtaactacacgagtgatgggaacttttgggtaccttgctccggagtatgcctcaagtggcaagctgaccgagagatctgatgtattctcatttggtgttgttctcttggagcttattactggtagaaagcctgtcgacgcgtcgaagccattgggcgatgagagccttgttgagtgggtaagctatatcagtaatttgatccatgaaaaggtttccagttttctcacccttcagtagcaaatgaaaactagccatatctttaagttatttgcacatttcaaaatcttaagtagacttattcactgattacgtccaattcagtatgggatttaacagtgtatccagtccagccctacttcacgctatcgatatcttcaaatcccatctcgaagtgtggtttttctggaaaaaataatgctggggaacaatgtgggccagcaattttttttgtgacagcgtagtcatttgcaggctaggccattgctcacgcaagcgctcgagaccggcaatgctggggagctggtggatgcccggcttaataggaactacaatgaagtcgaaatgttccgtatgatcgaagctgctgcagcctgtattcgacattcagcatccaggaggcctcggatgagccaggttgtgcgggtgcttgatagtctcgccgacgtcgatctgactaacggcgttcagccgggcaagagcgagatgttcaatgtcgcgaacacggccgagatcaggatgtttcagcggatggcgttcggcagccaggatttcaggaccgatttcagccagtccagctggagcagccagagcagaggccttgacgcatctggttccaggccattgtaaccctcgtcgtcgtagattcctacatctaactagctagggtgtttcgtgatgggttttgtacgtcatgtaattctttttgattggatcaatcgtgtgattattcttttgccatccctgtcttgtacgactgacatagatcatgtgctgcgctgaggccctgcttgcctgtgcgaagacctgctaactgatgaagagagactgctgcgtttagtcccaattagtgaattgctgtatcgaatttcctgtaattagcagtgcttttgaaatcagcggtttttttacaaggaacgctcagttcgagctgaacttttggggaaagattactcagatgtgtgccttttaga

SEQ ID NO: 33982 - DNA, 3595 bp, Zea Mays
gttttcctcgccttccggttttcactcccctaccattgcattggcccccctcatgagatgagaatgagatcccctctcgtcgcgtaacacacacacacacaacgaacacacagtttcatctcgcttcctctctatctctctgtcgatcaattcattgcccatcgatcgatctcgagcaagaggaacaaggaaaataggagtactaggggatcgatcaggatgttggacacgacggacgacatcgcggaggggatatcattccaggcgttcgaggacgactgccgcctccttgccagcctcctccacgacgtccttctccgcgagctcggcccccgcttcatcaaaatcctcgagcgcaaccgcatcctcgcgcagagcgccgtctccatgcgcgcggcggggatggaggacacggcggccgtcgtagagcggcagctggagaccgacctggccgcaatgcccctggaggacgcgctctgcctggcccgggccttctcccactacctcaacctcatgggcatcgcggagacccaccacagggttcgtaaagcacgcaacatggaacagctctcaaaatcatgtgatgatatattcaacaagctgattcaaagtggtgtcccttcagaacaactatatgacactgtctgcaagcaagaggtcgaaattgttctgacagctcatcccacccaaataaatcggcgaactctgcaatacaagcacctaagagtagcacatctcttggagttcaacggtcgccctgatctaagccacgaggataaagaaatgctaattgaagatctggtaagggaaatcacagcaatatggcagacggatgaattgaggcgccataaacctacaccagttgacgaagctagggctggtcttcatattgtggagcaatccctttggaaagcggtaccgcactatcttcgccgtgttagcagtgctctaaagaagcacaccggaagcccactaccgctaacctgcacaccaatcaagtttggttcttggatgggtggtgaccgagatgggaatcctaacgttacagcaaaagtgactagggatgtttcgttgttgtcacggtggatggcaatcgacttatacatccaggaattagacaatctcagctttgagttgtctgtcaatggatgcagtgataaggttgcaagcttggctaatgacattttgctcaaagcagccgaggacctaaaggccaatacctggaacaaaacagtaccgcagaacaatgcaaagcttcataacttggctctgcctgcacaacttccttcgggtgctgatcttccttcatgtacagaatgcagtgatggagaatctcaatttaggatgataaatcttccaaggaactcaaatcgtccgggggctcttaatttaacagaaaagtttgaagacagtccattatcatctcctactggtcgtcaatcacacatagctagaactccaagtggccgtcaaccaaggaaattgttcaaagaatctaatataggtcgatcaagtagcttccagaagctacttgagccaagcctatctgacagaccgggaattactccttacagggttgtccttggtaatttgaaagaaaagctggtgaagacacgcagaaggcttgagcttctgcttgaggatctaccatgtgactatgacactgaagaatactgtgaaacatcagatcaacttctggaaccgttgctcttgtgccatcaatctctgcaatcatgtggatctagcgtgctagctgatggccggttagcagatttgatacgaagggttgcaacctttggtatggttcttatgaagctcgatgtacggcaggaatctggtcgtcacacagaagcacttgattccgtcacatcctacttggatcttggtgtttatagtgagtgggatgaagaaaagaagctggatttcttgactagagagctgaaagggaagcgccctctagtgccccaaaacatagaggttgctgctgatgtgaaagaagttctggacaccttcaaagttgctgcagaactagggagtgactcacttggagcatatgtcatttcaatggcctcaaatgcaagtgatgtccttgccgtggagctgttgcagaaggatgcaagacttgcagttagcggggacctaggaaggccatgccctggtggcacgttaagagttgttcccttgttcgagaccgtgaaagatttgcaggcagccgggtcagcaatcaggaagctactgtccatcgactggtacagggagcatatcatcaagaaccacaacggacaccaggaggtaatggtgggctactcggactccggcaaggacgccggccgcttcacggcggcatgggagctgtacaaggctcaggaagacgtcgttgccgcgtgcaacgagttcgggatcaaggtgacgctgttccatggccgtggcggcagcatcggccgaggcggcgggccgacgtacctggccatccagtcacagcctcccggctcagtgatgggcactctccgttcgacggagcaaggcgagatggtgcaggccaagttcggccttccgcagacggccgtgcgtcagctggagatctacacgacggcggtgctgctagcgacgctgcgcccgccgcatccgccgcgcgacgccaactggcggaacgtgatggaggagatctcccgcgtgagctgcgcgcactaccgttccacggtgtacgaggacccggagttcatcacctacttccatgaggcgacgccccaggcggagctggggcacctgaacatcgggagccggcccgcgaagcggaagcccgcgggcggcatctcgagcctgcgcgccatcccctgggtgttcgcctggacgcagacgcggctggtgctccccgcgtggctgggcgtcggcacagggctgcaggacgcgctggaccggggccacggcgaggagctccgcgccatgtacgcggagtggcccttcttccagagcacgttggacctgatcgagatggtgacggcgaaggcggacgcgcccatggcggcgcactacgaggagatgctcgtggcgcgggagcggcgcggcgtgggcgccgggctgcggcgtgagcttgcgcgcacggagcggtgcgtgctggcggtgagcggccacagcaagctgacggcgcacaaccggagcctgcggcggctgatcgagagccggctcgcgtacctcaaccccatcaacatgcttcaggtggaggtgctccgcaggctccgccgcgacgacgacaaccgcaggctccgcgacgcgctgctcatcaccatcaacggcatcgccgccggcatgcgcaacaccggctgacagctgagtgctggtgaccgcggcttcctgcctcgttggctcgttgtttgatcaaccgagaagccgccattttggacttcgtcgtgagctcaactgacagctttggtttttcttttctttcgtgaacggccccacccagagaccagagtcgcattttttttgctgctcgatcgtctgcgtctaaataattttaagtcttgttcgtggaaatatttttgcgcgtctgttgcggtcaactgtttcatgcgcgcggcaagggtggagcgtggag
